United States Patent Application Publication US 2006/0134663 A1 - sequence listing, part 49

SEQ ID NO: 110367 - DNA, 929 bp, Homo Sapiens; identical to SEQ ID NO: 78825

SEQ ID NO: 110368 - DNA, 768 bp, Homo Sapiens; identical to SEQ ID NO: 78832

SEQ ID NO: 110369 - DNA, 586 bp, Homo Sapiens; identical to SEQ ID NO: 78833
  misc_feature (331)..(331): n is a, c, g, or t

SEQ ID NO: 110370 - DNA, 948 bp, Homo Sapiens; identical to SEQ ID NO: 78835
  misc_feature (814)..(814): n is a, c, g, or t

SEQ ID NO: 110371 - DNA, 1447 bp, Homo Sapiens; identical to SEQ ID NO: 78836
  misc_feature (40)..(40): n is a, c, g, or t
  misc_feature (76)..(76): n is a, c, g, or t
  misc_feature (113)..(113): n is a, c, g, or t

SEQ ID NO: 110372 - DNA, 484 bp, Homo Sapiens; identical to SEQ ID NO: 78839

SEQ ID NO: 110373 - DNA, 2613 bp, Homo Sapiens; identical to SEQ ID NO: 78840
  misc_feature (2222)..(2319): n is a, c, g, or t
  misc_feature (2322)..(2323): n is a, c, g, or t
  misc_feature (2326)..(2326): n is a, c, g, or t
  misc_feature (2328)..(2339): n is a, c, g, or t
  misc_feature (2379)..(2390): n is a, c, g, or t
  misc_feature (2406)..(2453): n is a, c, g, or t
  misc_feature (2474)..(2482): n is a, c, g, or t
  misc_feature (2539)..(2550): n is a, c, g, or t

SEQ ID NO: 110374 - DNA, 573 bp, Homo Sapiens; identical to SEQ ID NO: 78842
  misc_feature (414)..(471): n is a, c, g, or t

SEQ ID NO: 110375 - DNA, 958 bp, Homo Sapiens; identical to SEQ ID NO: 78843
  misc_feature (102)..(153): n is a, c, g, or t

SEQ ID NO: 110376 - DNA, 1251 bp, Homo Sapiens; identical to SEQ ID NO: 78852

SEQ ID NO: 110377 - DNA, 957 bp, Homo Sapiens; identical to SEQ ID NO: 78853
  misc_feature (696)..(697): n is a, c, g, or t
  misc_feature (718)..(718): n is a, c, g, or t
  misc_feature (804)..(805): n is a, c, g, or t
  misc_feature (884)..(885): n is a, c, g, or t

SEQ ID NO: 110378 - DNA, 666 bp, Homo Sapiens; identical to SEQ ID NO: 78877

SEQ ID NO: 110379 - DNA, 1035 bp, Homo Sapiens; identical to SEQ ID NO: 78878

SEQ ID NO: 110380 - DNA, 1050 bp, Homo Sapiens; identical to SEQ ID NO: 78879

SEQ ID NO: 110381 - DNA, 2454 bp, Homo Sapiens; identical to SEQ ID NO: 78880
  misc_feature (16)..(16): n is a, c, g, or t

SEQ ID NO: 110382 - DNA, 726 bp, Homo Sapiens; identical to SEQ ID NO: 78894

SEQ ID NO: 110383 - DNA, 1560 bp, Homo Sapiens; identical to SEQ ID NO: 78895

SEQ ID NO: 110384 - DNA, 775 bp, Homo Sapiens; identical to SEQ ID NO: 78896
  misc_feature (709)..(709): n is a, c, g, or t

SEQ ID NO: 110385 - DNA, 1215 bp, Homo Sapiens; identical to SEQ ID NO: 78898
  misc_feature (80)..(114): n is a, c, g, or t
  misc_feature (1088)..(1088): n is a, c, g, or t

SEQ ID NO: 110386 - DNA, 776 bp, Homo Sapiens; identical to SEQ ID NO: 78899

SEQ ID NO: 110387 - DNA, 1663 bp, Homo Sapiens; identical to SEQ ID NO: 78905
  misc_feature (33)..(33): n is a, c, g, or t
  misc_feature (345)..(345): n is a, c, g, or t
  misc_feature (1064)..(1111): n is a, c, g, or t

SEQ ID NO: 110388 - DNA, 316 bp, Homo Sapiens; identical to SEQ ID NO: 78906

SEQ ID NO: 110389 - DNA, 1001 bp, Homo Sapiens; identical to SEQ ID NO: 78908
  misc_feature (609)..(678): n is a, c, g, or t

SEQ ID NO: 110390 - DNA, 956 bp, Homo Sapiens; identical to SEQ ID NO: 78909
  misc_feature (124)..(124): n is a, c, g, or t
  misc_feature (360)..(360): n is a, c, g, or t
  misc_feature (365)..(382): n is a, c, g, or t

SEQ ID NO: 110391 - DNA, 1133 bp, Homo Sapiens; identical to SEQ ID NO: 78912
  misc_feature (921)..(921): n is a, c, g, or t

SEQ ID NO: 110392 - DNA, 1664 bp, Homo Sapiens; identical to SEQ ID NO: 78913

SEQ ID NO: 110393 - DNA, 674 bp, Homo Sapiens; identical to SEQ ID NO: 78915

SEQ ID NO: 110394 - DNA, 970 bp, Homo Sapiens; identical to SEQ ID NO: 78916

SEQ ID NO: 110395 - DNA, 585 bp, Homo Sapiens; identical to SEQ ID NO: 78923

SEQ ID NO: 110396 - DNA, 1009 bp, Homo Sapiens; identical to SEQ ID NO: 78924
  misc_feature (773)..(794): n is a, c, g, or t

SEQ ID NO: 110397 - DNA, 527 bp, Homo Sapiens; identical to SEQ ID NO: 78929
  misc_feature (220)..(291): n is a, c, g, or t

SEQ ID NO: 110398 - DNA, 695 bp, Homo Sapiens; identical to SEQ ID NO: 78930

SEQ ID NO: 110399 - DNA, 1511 bp, Homo Sapiens; identical to SEQ ID NO: 78931
  misc_feature (260)..(272): n is a, c, g, or t

SEQ ID NO: 110400 - DNA, 1442 bp, Homo Sapiens; identical to SEQ ID NO: 78932
  misc_feature (136)..(148): n is a, c, g, or t
  misc_feature (1362)..(1385): n is a, c, g, or t

SEQ ID NO: 110401 - DNA, 662 bp, Homo Sapiens; identical to SEQ ID NO: 78940

SEQ ID NO: 110402 - DNA, 541 bp, Homo Sapiens; identical to SEQ ID NO: 78941
  misc_feature (498)..(498): n is a, c, g, or t

SEQ ID NO: 110403 - DNA, 1288 bp, Homo Sapiens; identical to SEQ ID NO: 78942
  misc_feature (34)..(35): n is a, c, g, or t
  misc_feature (67)..(68): n is a, c, g, or t
  misc_feature (119)..(119): n is a, c, g, or t
  misc_feature (153)..(153): n is a, c, g, or t
  misc_feature (158)..(158): n is a, c, g, or t
  misc_feature (160)..(160): n is a, c, g, or t
  misc_feature (173)..(173): n is a, c, g, or t
  misc_feature (195)..(195): n is a, c, g, or t
  misc_feature (200)..(200): n is a, c, g, or t
  misc_feature (1033)..(1034): n is a, c, g, or t
  misc_feature (1037)..(1037): n is a, c, g, or t
  misc_feature (1040)..(1042): n is a, c, g, or t
  misc_feature (1044)..(1044): n is a, c, g, or t
  misc_feature (1047)..(1058): n is a, c, g, or t
  misc_feature (1071)..(1166): n is a, c, g, or t
  misc_feature (1172)..(1172): n is a, c, g, or t
  misc_feature (1175)..(1176): n is a, c, g, or t
  misc_feature (1178)..(1178): n is a, c, g, or t
  misc_feature (1190)..(1205): n is a, c, g, or t

SEQ ID NO: 110404 - DNA, 471 bp, Homo Sapiens; identical to SEQ ID NO: 78943

SEQ ID NO: 110405 - DNA, 1524 bp, Homo Sapiens; identical to SEQ ID NO: 78955
  misc_feature (179)..(191): n is a, c, g, or t
  misc_feature (1311)..(1361): n is a, c, g, or t

SEQ ID NO: 110406 - DNA, 213 bp, Homo Sapiens; identical to SEQ ID NO: 78956

SEQ ID NO: 110407 - DNA, 1346 bp, Homo Sapiens; identical to SEQ ID NO: 78957

SEQ ID NO: 110408 - DNA, 1180 bp, Homo Sapiens; identical to SEQ ID NO: 78958
  misc_feature (231)..(286): n is a, c, g, or t
  misc_feature (1077)..(1096): n is a, c, g, or t

SEQ ID NO: 110409 - DNA, 1176 bp, Homo Sapiens; identical to SEQ ID NO: 78962

SEQ ID NO: 110410 - DNA, 1236 bp, Homo Sapiens; identical to SEQ ID NO: 78963
  misc_feature (531)..(662): n is a, c, g, or t
  misc_feature (1038)..(1083): n is a, c, g, or t

SEQ ID NO: 110411 - DNA, 601 bp, Homo Sapiens; identical to SEQ ID NO: 78964

SEQ ID NO: 110412 - DNA, 512 bp, Homo Sapiens; identical to SEQ ID NO: 78965

SEQ ID NO: 110413 - DNA, 617 bp, Homo Sapiens; identical to SEQ ID NO: 78966

SEQ ID NO: 110414 - DNA, 522 bp, Homo Sapiens; identical to SEQ ID NO: 78987
  misc_feature (504)..(504): n is a, c, g, or t

SEQ ID NO: 110415 - DNA, 963 bp, Homo Sapiens; identical to SEQ ID NO: 78988
  misc_feature (833)..(845): n is a, c, g, or t

SEQ ID NO: 110416 - DNA, 579 bp, Homo Sapiens; identical to SEQ ID NO: 78998
  misc_feature (482)..(501): n is a, c, g, or t

SEQ ID NO: 110417 - DNA, 795 bp, Homo Sapiens; identical to SEQ ID NO: 78999

SEQ ID NO: 110418 - DNA, 1068 bp, Homo Sapiens; identical to SEQ ID NO: 79007
  misc_feature (247)..(247): n is a, c, g, or t
  misc_feature (1008)..(1027): n is a, c, g, or t

SEQ ID NO: 110419 - DNA, 482 bp, Homo Sapiens; identical to SEQ ID NO: 79008

SEQ ID NO: 110420 - DNA, 863 bp, Homo Sapiens; identical to SEQ ID NO: 79019
  misc_feature (627)..(769): n is a, c, g, or t
  misc_feature (779)..(792): n is a, c, g, or t

SEQ ID NO: 110421 - DNA, 2103 bp, Homo Sapiens; identical to SEQ ID NO: 79020
  misc_feature (1746)..(1775): n is a, c, g, or t

SEQ ID NO: 110422 - DNA, 1100 bp, Homo Sapiens; identical to SEQ ID NO: 79021

SEQ ID NO: 110423 - DNA, 1022 bp, Homo Sapiens; identical to SEQ ID NO: 79025

SEQ ID NO: 110424 - DNA, 1903 bp, Homo Sapiens; identical to SEQ ID NO: 79026

SEQ ID NO: 110425 - DNA, 1142 bp, Homo Sapiens; identical to SEQ ID NO: 79031

SEQ ID NO: 110426 - DNA, 836 bp, Homo Sapiens; identical to SEQ ID NO: 79032

SEQ ID NO: 110427 - DNA, 710 bp, Homo Sapiens; identical to SEQ ID NO: 79033

SEQ ID NO: 110428 - DNA, 985 bp, Homo Sapiens; identical to SEQ ID NO: 79034

SEQ ID NO: 110429 - DNA, 1211 bp, Homo Sapiens; identical to SEQ ID NO: 79035

SEQ ID NO: 110430 - DNA, 334 bp, Homo Sapiens; identical to SEQ ID NO: 79036

SEQ ID NO: 110431 - DNA, 714 bp, Homo Sapiens; identical to SEQ ID NO: 79040

SEQ ID NO: 110432 - DNA, 1139 bp, Homo Sapiens; identical to SEQ ID NO: 79041

SEQ ID NO: 110433 - DNA, 697 bp, Homo Sapiens; identical to SEQ ID NO: 79042

SEQ ID NO: 110434 - DNA, 711 bp, Homo Sapiens; identical to SEQ ID NO: 79043
  misc_feature (135)..(135): n is a, c, g, or t

SEQ ID NO: 110435 - DNA, 1605 bp, Homo Sapiens; identical to SEQ ID NO: 79048

SEQ ID NO: 110436 - DNA, 768 bp, Homo Sapiens; identical to SEQ ID NO: 79049
  misc_feature (21)..(21): n is a, c, g, or t
  misc_feature (378)..(402): n is a, c, g, or t

SEQ ID NO: 110437 - DNA, 453 bp, Homo Sapiens; identical to SEQ ID NO: 79050

SEQ ID NO: 110438 - DNA, 1657 bp, Homo Sapiens; identical to SEQ ID NO: 79051

SEQ ID NO: 110439 - DNA, 1095 bp, Homo Sapiens; identical to SEQ ID NO: 79052

SEQ ID NO: 110440 - DNA, 866 bp, Homo Sapiens; identical to SEQ ID NO: 79053

SEQ ID NO: 110441 - DNA, 879 bp, Homo Sapiens; identical to SEQ ID NO: 79054

SEQ ID NO: 110442 - DNA, 1326 bp, Homo Sapiens; identical to SEQ ID NO: 79055
  misc_feature (41)..(79): n is a, c, g, or t
  misc_feature (83)..(117): n is a, c, g, or t

SEQ ID NO: 110443 - DNA, 471 bp, Homo Sapiens; identical to SEQ ID NO: 79056

SEQ ID NO: 110444 - DNA, 1784 bp, Homo Sapiens; identical to SEQ ID NO: 79059

SEQ ID NO: 110445 - DNA, 376 bp, Homo Sapiens; identical to SEQ ID NO: 79060
  misc_feature (282)..(282): n is a, c, g, or t

SEQ ID NO: 110446 - DNA, 2813 bp, Homo Sapiens; identical to SEQ ID NO: 79073
  misc_feature (1496)..(1543): n is a, c, g, or t
  misc_feature (2046)..(2046): n is a, c, g, or t
  misc_feature (2067)..(2075): n is a, c, g, or t
  misc_feature (2352)..(2363): n is a, c, g, or t
  misc_feature (2417)..(2417): n is a, c, g, or t
  misc_feature (2479)..(2479): n is a, c, g, or t
  misc_feature (2481)..(2489): n is a, c, g, or t
  misc_feature (2606)..(2606): n is a, c, g, or t
  misc_feature (2611)..(2611): n is a, c, g, or t
  misc_feature (2641)..(2641): n is a, c, g, or t
  misc_feature (2644)..(2645): n is a, c, g, or t

SEQ ID NO: 110447 - DNA, 2052 bp, Homo Sapiens; identical to SEQ ID NO: 79074
  misc_feature (47)..(99): n is a, c, g, or t

SEQ ID NO: 110448 - DNA, 2081 bp, Homo Sapiens; identical to SEQ ID NO: 79080
  misc_feature (688)..(696): n is a, c, g, or t
  misc_feature (1514)..(1556): n is a, c, g, or t
  misc_feature (1997)..(2022): n is a, c, g, or t

SEQ ID NO: 110449 - DNA, 752 bp, Homo Sapiens; identical to SEQ ID NO: 79081

SEQ ID NO: 110450 - DNA, 1879 bp, Homo Sapiens; identical to SEQ ID NO: 79082
  misc_feature (17)..(17): n is a, c, g, or t

SEQ ID NO: 110451 - DNA, 1071 bp, Homo Sapiens; identical to SEQ ID NO: 79083

SEQ ID NO: 110452 - DNA, 1739 bp, Homo Sapiens; identical to SEQ ID NO: 79097

SEQ ID NO: 110453 - DNA, 1622 bp, Homo Sapiens; identical to SEQ ID NO: 79098

SEQ ID NO: 110454 - DNA, 1905 bp, Homo Sapiens; identical to SEQ ID NO: 79103
  misc_feature (24)..(24): n is a, c, g, or t
  misc_feature (102)..(102): n is a, c, g, or t

SEQ ID NO: 110455 - DNA, 828 bp, Homo Sapiens; identical to SEQ ID NO: 79104

SEQ ID NO: 110456 - DNA, 1073 bp, Homo Sapiens; identical to SEQ ID NO: 79105

SEQ ID NO: 110457 - DNA, 994 bp, Homo Sapiens; identical to SEQ ID NO: 79109
  misc_feature (37)..(37): n is a, c, g, or t
  misc_feature (43)..(43): n is a, c, g, or t
  misc_feature (249)..(249): n is a, c, g, or t
  misc_feature (311)..(311): n is a, c, g, or t

SEQ ID NO: 110458 - DNA, 772 bp, Homo Sapiens; identical to SEQ ID NO: 79110

SEQ ID NO: 110459 - DNA, 954 bp, Homo Sapiens; identical to SEQ ID NO: 79111
  misc_feature (51)..(51): n is a, c, g, or t

SEQ ID NO: 110460 - DNA, 439 bp, Homo Sapiens; identical to SEQ ID NO: 79112

SEQ ID NO: 110461 - DNA, 1832 bp, Homo Sapiens; identical to SEQ ID NO: 79114
  misc_feature (56)..(56): n is a, c, g, or t
  misc_feature (81)..(115): n is a, c, g, or t
  misc_feature (1136)..(1136): n is a, c, g, or t

SEQ ID NO: 110462 - DNA, 1632 bp, Homo Sapiens; identical to SEQ ID NO: 79115

SEQ ID NO: 110463 - DNA, 1255 bp, Homo Sapiens; identical to SEQ ID NO: 79118

SEQ ID NO: 110464 - DNA, 772 bp, Homo Sapiens; identical to SEQ ID NO: 79119

SEQ ID NO: 110465 - DNA, 999 bp, Homo Sapiens; identical to SEQ ID NO: 79121

SEQ ID NO: 110466 - DNA, 1101 bp, Homo Sapiens; identical to SEQ ID NO: 79122
  misc_feature (1032)..(1032): n is a, c, g, or t

SEQ ID NO: 110467 - DNA, 793 bp, Homo Sapiens; identical to SEQ ID NO: 79123

SEQ ID NO: 110468 - DNA, 851 bp, Homo Sapiens; identical to SEQ ID NO: 79137
  misc_feature (54)..(54): n is a, c, g, or t

SEQ ID NO: 110469 - DNA, 1019 bp, Homo Sapiens; identical to SEQ ID NO: 79138
  misc_feature (109)..(109): n is a, c, g, or t
  misc_feature (115)..(115): n is a, c, g, or t
  misc_feature (119)..(119): n is a, c, g, or t
  misc_feature (133)..(133): n is a, c, g, or t
  misc_feature (141)..(141): n is a, c, g, or t
  misc_feature (203)..(203): n is a, c, g, or t
  misc_feature (209)..(209): n is a, c, g, or t
  misc_feature (211)..(211): n is a, c, g, or t
  misc_feature (215)..(215): n is a, c, g, or t
  misc_feature (221)..(221): n is a, c, g, or t
  misc_feature (224)..(224): n is a, c, g, or t
  misc_feature (262)..(262): n is a, c, g, or t
  misc_feature (276)..(276): n is a, c, g, or t
  misc_feature (332)..(332): n is a, c, g, or t
  misc_feature (397)..(397): n is a, c, g, or t

SEQ ID NO: 110470 - DNA, 1739 bp, Homo Sapiens; identical to SEQ ID NO: 79139

SEQ ID NO: 110471 - DNA, 1043 bp, Homo Sapiens; identical to SEQ ID NO: 79140

SEQ ID NO: 110472 - DNA, 882 bp, Homo Sapiens; identical to SEQ ID NO: 79141

SEQ ID NO: 110473 - DNA, 1103 bp, Homo Sapiens; identical to SEQ ID NO: 79142
  misc_feature (1064)..(1064): n is a, c, g, or t
  misc_feature (1069)..(1069): n is a, c, g, or t

SEQ ID NO: 110474 - DNA, 846 bp, Homo Sapiens; identical to SEQ ID NO: 79143
  misc_feature (658)..(658): n is a, c, g, or t

SEQ ID NO: 110475 - DNA, 346 bp, Homo Sapiens; identical to SEQ ID NO: 79144
  misc_feature (137)..(137): n is a, c, g, or t

SEQ ID NO: 110476 - DNA, 2705 bp, Homo Sapiens; identical to SEQ ID NO: 79145

SEQ ID NO: 110477 - DNA, 317 bp, Homo Sapiens; identical to SEQ ID NO: 79151
  misc_feature (47)..(47): n is a, c, g, or t

SEQ ID NO: 110478 - DNA, 478 bp, Homo Sapiens; identical to SEQ ID NO: 79152

SEQ ID NO: 110479 - DNA, 939 bp, Homo Sapiens; identical to SEQ ID NO: 79153
  misc_feature (35)..(35): n is a, c, g, or t
  misc_feature (827)..(861): n is a, c, g, or t

SEQ ID NO: 110480 - DNA, 1689 bp, Homo Sapiens; identical to SEQ ID NO: 79154
  misc_feature (1531)..(1551): n is a, c, g, or t
  misc_feature (1555)..(1557): n is a, c, g, or t
  misc_feature (1559)..(1564): n is a, c, g, or t
  misc_feature (1587)..(1587): n is a, c, g, or t
  misc_feature (1636)..(1636): n is a, c, g, or t

SEQ ID NO: 110481 - DNA, 851 bp, Homo Sapiens; identical to SEQ ID NO: 79159

SEQ ID NO: 110482 - DNA, 963 bp, Homo Sapiens; identical to SEQ ID NO: 79160

SEQ ID NO: 110483 - DNA, 712 bp, Homo Sapiens; identical to SEQ ID NO: 79163
  misc_feature (58)..(58): n is a, c, g, or t
  misc_feature (92)..(102): n is a, c, g, or t

SEQ ID NO: 110484 - DNA, 271 bp, Homo Sapiens; identical to SEQ ID NO: 79164

SEQ ID NO: 110485 - DNA, 726 bp, Homo Sapiens; identical to SEQ ID NO: 79173
  misc_feature (41)..(41): n is a, c, g, or t

SEQ ID NO: 110486 - DNA, 948 bp, Homo Sapiens; identical to SEQ ID NO: 79174
  misc_feature (241)..(241): n is a, c, g, or t

SEQ ID NO: 110487 - DNA, 1365 bp, Homo Sapiens; identical to SEQ ID NO: 79175

SEQ ID NO: 110488 - DNA, 1297 bp, Homo Sapiens; identical to SEQ ID NO: 79184

SEQ ID NO: 110489 - DNA, 584 bp, Homo Sapiens; identical to SEQ ID NO: 79185

SEQ ID NO: 110490 - DNA, 1757 bp, Homo Sapiens; identical to SEQ ID NO: 79194

SEQ ID NO: 110491 - DNA, 1638 bp, Homo Sapiens; identical to SEQ ID NO: 79195
  misc_feature (525)..(525): n is a, c, g, or t
  misc_feature (545)..(545): n is a, c, g, or t

SEQ ID NO: 110492 - DNA, 1509 bp, Homo Sapiens; identical to SEQ ID NO: 79212
  misc_feature (115)..(115): n is a, c, g, or t
  misc_feature (135)..(135): n is a, c, g, or t
  misc_feature (154)..(154): n is a, c, g, or t
  misc_feature (1036)..(1108): n is a, c, g, or t

SEQ ID NO: 110493 - DNA, 859 bp, Homo Sapiens; identical to SEQ ID NO: 79213
  misc_feature (474)..(475): n is a, c, g, or t

SEQ ID NO: 110494 - DNA, 2804 bp, Homo Sapiens; identical to SEQ ID NO: 79214

SEQ ID NO: 110495 - DNA, 762 bp, Homo Sapiens; identical to SEQ ID NO: 79215

SEQ ID NO: 110496 - DNA, 870 bp, Homo Sapiens; identical to SEQ ID NO: 79223

SEQ ID NO: 110497 - DNA, 1283 bp, Homo Sapiens; identical to SEQ ID NO: 79224
  misc_feature (503)..(513): n is a, c, g, or t
  misc_feature (1072)..(1089): n is a, c, g, or t

SEQ ID NO: 110498 - DNA, 1620 bp, Homo Sapiens; identical to SEQ ID NO: 79228

SEQ ID NO: 110499 - DNA, 893 bp, Homo Sapiens; identical to SEQ ID NO: 79229

SEQ ID NO: 110500 - DNA, 862 bp, Homo Sapiens; identical to SEQ ID NO: 79230

SEQ ID NO: 110501 - DNA, 730 bp, Homo Sapiens; identical to SEQ ID NO: 79235
  misc_feature (72)..(72): n is a, c, g, or t

SEQ ID NO: 110502 - DNA, 1520 bp, Homo Sapiens; identical to SEQ ID NO: 79236
  misc_feature (553)..(584): n is a, c, g, or t

SEQ ID NO: 110503 - DNA, 592 bp, Homo Sapiens; identical to SEQ ID NO: 79237

SEQ ID NO: 110504 - DNA, 856 bp, Homo Sapiens; identical to SEQ ID NO: 79246
  misc_feature (42)..(76): n is a, c, g, or t

SEQ ID NO: 110505 - DNA, 752 bp, Homo Sapiens; identical to SEQ ID NO: 79247

SEQ ID NO: 110506 - DNA, 1130 bp, Homo Sapiens; identical to SEQ ID NO: 79258

SEQ ID NO: 110507 - DNA, 1395 bp, Homo Sapiens; identical to SEQ ID NO: 79259

SEQ ID NO: 110508 - DNA, 1149 bp, Homo Sapiens; identical to SEQ ID NO: 79261

SEQ ID NO: 110509 - DNA, 1152 bp, Homo Sapiens; identical to SEQ ID NO: 79262
  misc_feature (966)..(966): n is a, c, g, or t
  misc_feature (975)..(975): n is a, c, g, or t
  misc_feature (1040)..(1040): n is a, c, g, or t

SEQ ID NO: 110510 - DNA, 736 bp, Homo Sapiens; identical to SEQ ID NO: 79266
  misc_feature (69)..(69): n is a, c, g, or t

SEQ ID NO: 110511 - DNA, 716 bp, Homo Sapiens; identical to SEQ ID NO: 79267
  misc_feature (73)..(143): n is a, c, g, or t

SEQ ID NO: 110512 - DNA, 523 bp, Homo Sapiens; identical to SEQ ID NO: 79268

SEQ ID NO: 110513 - DNA, 659 bp, Homo Sapiens; identical to SEQ ID NO: 79283

SEQ ID NO: 110514 - DNA, 842 bp, Homo Sapiens; identical to SEQ ID NO: 79284

SEQ ID NO: 110515 - DNA, 1233 bp, Homo Sapiens; identical to SEQ ID NO: 79289
  misc_feature (76)..(110): n is a, c, g, or t

SEQ ID NO: 110516 - DNA, 1240 bp, Homo Sapiens; identical to SEQ ID NO: 79290

SEQ ID NO: 110517 - DNA, 1902 bp, Homo Sapiens; identical to SEQ ID NO: 79294

SEQ ID NO: 110518 - DNA, 785 bp, Homo Sapiens; identical to SEQ ID NO: 79295

SEQ ID NO: 110519 - DNA, 1801 bp, Homo Sapiens; identical to SEQ ID NO: 79309
  misc_feature (1164)..(1254): n is a, c, g, or t
  misc_feature (1258)..(1258): n is a, c, g, or t
  misc_feature (1264)..(1267): n is a, c, g, or t
  misc_feature (1275)..(1275): n is a, c, g, or t
  misc_feature (1412)..(1422): n is a, c, g, or t
  misc_feature (1457)..(1469): n is a, c, g, or t
  misc_feature (1739)..(1739): n is a, c, g, or t

SEQ ID NO: 110520 - DNA, 1082 bp, Homo Sapiens; identical to SEQ ID NO: 79310
  misc_feature (846)..(846): n is a, c, g, or t
  misc_feature (865)..(865): n is a, c, g, or t
  misc_feature (1007)..(1016): n is a, c, g, or t

SEQ ID NO: 110521 - DNA, 1094 bp, Homo Sapiens; identical to SEQ ID NO: 79311

SEQ ID NO: 110522 - DNA, 894 bp, Homo Sapiens; identical to SEQ ID NO: 79312
  misc_feature (758)..(771): n is a, c, g, or t

SEQ ID NO: 110523 - DNA, 1096 bp, Homo Sapiens; identical to SEQ ID NO: 79313

SEQ ID NO: 110524 - DNA, 1212 bp, Homo Sapiens; identical to SEQ ID NO: 79314
  misc_feature (1011)..(1011): n is a, c, g, or t

SEQ ID NO: 110525 - DNA, 1461 bp, Homo Sapiens; identical to SEQ ID NO: 79333
  misc_feature (307)..(307): n is a, c, g, or t

SEQ ID NO: 110526 - DNA, 858 bp, Homo Sapiens; identical to SEQ ID NO: 79334
  misc_feature (189)..(189): n is a, c, g, or t
  misc_feature (634)..(673): n is a, c, g, or t

SEQ ID NO: 110527 - DNA, 1353 bp, Homo Sapiens; identical to SEQ ID NO: 79337

SEQ ID NO: 110528 - DNA, 1875 bp, Homo Sapiens; identical to SEQ ID NO: 79338
  misc_feature (15)..(15): n is a, c, g, or t

SEQ ID NO: 110529 - DNA, 623 bp, Homo Sapiens; identical to SEQ ID NO: 79339

SEQ ID NO: 110530 - DNA, 690 bp, Homo Sapiens; identical to SEQ ID NO: 79341
  misc_feature (83)..(83): n is a, c, g, or t

SEQ ID NO: 110531 - DNA, 1177 bp, Homo Sapiens; identical to SEQ ID NO: 79342

SEQ ID NO: 110532 - DNA, 717 bp, Homo Sapiens; identical to SEQ ID NO: 79349
  misc_feature (119)..(119): n is a, c, g, or t

SEQ ID NO: 110533 - DNA, 1442 bp, Homo Sapiens; identical to SEQ ID NO: 79350
  misc_feature (978)..(987): n is a, c, g, or t

SEQ ID NO: 110534 - DNA, 2516 bp, Homo Sapiens; identical to SEQ ID NO: 79353

SEQ ID NO: 110535 - DNA, 874 bp, Homo Sapiens; identical to SEQ ID NO: 79354

SEQ ID NO: 110536 - DNA, 1407 bp, Homo Sapiens; identical to SEQ ID NO: 79356

SEQ ID NO: 110537 - DNA, 756 bp, Homo Sapiens; identical to SEQ ID NO: 79357

SEQ ID NO: 110538 - DNA, 690 bp, Homo Sapiens; identical to SEQ ID NO: 79358

SEQ ID NO: 110539 - DNA, 723 bp, Homo Sapiens; identical to SEQ ID NO: 79359
  misc_feature (123)..(123): n is a, c, g, or t

SEQ ID NO: 110540 - DNA, 326 bp, Homo Sapiens; identical to SEQ ID NO: 79360

SEQ ID NO: 110541 - DNA, 1674 bp, Homo Sapiens; identical to SEQ ID NO: 79361
  misc_feature (287)..(300): n is a, c, g, or t
  misc_feature (408)..(420): n is a, c, g, or t

SEQ ID NO: 110542 - DNA, 810 bp, Homo Sapiens; identical to SEQ ID NO: 79362
  misc_feature (158)..(165): n is a, c, g, or t
  misc_feature (548)..(548): n is a, c, g, or t
  misc_feature (554)..(557): n is a, c, g, or t
  misc_feature (559)..(579): n is a, c, g, or t
  misc_feature (582)..(582): n is a, c, g, or t
  misc_feature (589)..(589): n is a, c, g, or t
  misc_feature (731)..(739): n is a, c, g, or t

SEQ ID NO: 110543 - DNA, 534 bp, Homo Sapiens; identical to SEQ ID NO: 79363

SEQ ID NO: 110544 - DNA, 991 bp, Homo Sapiens; identical to SEQ ID NO: 79365

SEQ ID NO: 110545 - DNA, 1408 bp, Homo Sapiens; identical to SEQ ID NO: 79366

SEQ ID NO: 110546 - DNA, 752 bp, Homo Sapiens; identical to SEQ ID NO: 79373
  misc_feature (53)..(116): n is a, c, g, or t

SEQ ID NO: 110547 - DNA, 319 bp, Homo Sapiens; identical to SEQ ID NO: 79374

SEQ ID NO: 110548 - DNA, 701 bp, Homo Sapiens; identical to SEQ ID NO: 79376
  misc_feature (19)..(19): n is a, c, g, or t

SEQ ID NO: 110549 - DNA, 1590 bp, Homo Sapiens; identical to SEQ ID NO: 79377

SEQ ID NO: 110550 - DNA, 351 bp, Homo Sapiens; identical to SEQ ID NO: 79386
  misc_feature (43)..(43): n is a, c, g, or t

SEQ ID NO: 110551 - DNA, 986 bp, Homo Sapiens; identical to SEQ ID NO: 79387
  misc_feature (78)..(112): n is a, c, g, or t

SEQ ID NO: 110552 - DNA, 690 bp, Homo Sapiens; identical to SEQ ID NO: 79389
  misc_feature (602)..(602): n is a, c, g, or t

SEQ ID NO: 110553 - DNA, 585 bp, Homo Sapiens; identical to SEQ ID NO: 79390

SEQ ID NO: 110554 - DNA, 510 bp, Homo Sapiens; identical to SEQ ID NO: 79391
  misc_feature (24)..(24): n is a, c, g, or t

SEQ ID NO: 110555 - DNA, 1892 bp, Homo Sapiens; identical to SEQ ID NO: 79393

SEQ ID NO: 110556 - DNA, 1122 bp, Homo Sapiens; identical to SEQ ID NO: 79394
  misc_feature (623)..(623): n is a, c, g, or t

SEQ ID NO: 110557 - DNA, 1334 bp, Homo Sapiens; identical to SEQ ID NO: 79401
  misc_feature (699)..(712): n is a, c, g, or t
  misc_feature (977)..(998): n is a, c, g, or t
  misc_feature (1029)..(1086): n is a, c, g, or t

SEQ ID NO: 110558 - DNA, 598 bp, Homo Sapiens; identical to SEQ ID NO: 79402
  misc_feature (386)..(443): n is a, c, g, or t
  misc_feature (474)..(495): n is a, c, g, or t

SEQ ID NO: 110559 - DNA, 1354 bp, Homo Sapiens; identical to SEQ ID NO: 79410

SEQ ID NO: 110560 - DNA, 1003 bp, Homo Sapiens; identical to SEQ ID NO: 79411

SEQ ID NO: 110561 - DNA, 516 bp, Homo Sapiens; identical to SEQ ID NO: 79437

SEQ ID NO: 110562 - DNA, 875 bp, Homo Sapiens; identical to SEQ ID NO: 79438
  misc_feature (548)..(698): n is a, c, g, or t
  misc_feature (701)..(721): n is a, c, g, or t
  misc_feature (723)..(723): n is a, c, g, or t
  misc_feature (732)..(732): n is a, c, g, or t
  misc_feature (737)..(807): n is a, c, g, or t
  misc_feature (816)..(828): n is a, c, g, or t

SEQ ID NO: 110563 - DNA, 669 bp, Homo Sapiens; identical to SEQ ID NO: 79439
  misc_feature (221)..(221): n is a, c, g, or t

SEQ ID NO: 110564 - DNA, 750 bp, Homo Sapiens; identical to SEQ ID NO: 79440
  misc_feature (32)..(32): n is a, c, g, or t

SEQ ID NO: 110565 - DNA, 904 bp, Homo Sapiens; identical to SEQ ID NO: 79441
  misc_feature (446)..(461): n is a, c, g, or t

SEQ ID NO: 110566 - DNA, 639 bp, Homo Sapiens; identical to SEQ ID NO: 79450

SEQ ID NO: 110567 - DNA, 1955 bp, Homo Sapiens; identical to SEQ ID NO: 79451
  misc_feature (1280)..(1290): n is a, c, g, or t
  misc_feature (1730)..(1773): n is a, c, g, or t

SEQ ID NO: 110568 - DNA, 1187 bp, Homo Sapiens; identical to SEQ ID NO: 79452
  misc_feature (1075)..(1109): n is a, c, g, or t

SEQ ID NO: 110569 - DNA, 810 bp, Homo Sapiens; identical to SEQ ID NO: 79457

SEQ ID NO: 110570 - DNA, 983 bp, Homo Sapiens; identical to SEQ ID NO: 79458
  misc_feature (824)..(824): n is a, c, g, or t

SEQ ID NO: 110571 - DNA, 1676 bp, Homo Sapiens; identical to SEQ ID NO: 79459
  misc_feature (1579)..(1610): n is a, c, g, or t

SEQ ID NO: 110572 - DNA, 153 bp, Homo Sapiens; identical to SEQ ID NO: 79461

SEQ ID NO: 110573 - DNA, 516 bp, Homo Sapiens; identical to SEQ ID NO: 79462
  misc_feature (19)..(19): n is a, c, g, or t

SEQ ID NO: 110574 - DNA, 1011 bp, Homo Sapiens; identical to SEQ ID NO: 79465
  misc_feature (586)..(586): n is a, c, g, or t
  misc_feature (685)..(893): n is a, c, g, or t
  misc_feature (911)..(911): n is a, c, g, or t

SEQ ID NO: 110575 - DNA, 645 bp, Homo Sapiens; identical to SEQ ID NO: 79466

SEQ ID NO: 110576 - DNA, 1425 bp, Homo Sapiens; identical to SEQ ID NO: 79468
  misc_feature (57)..(97): n is a, c, g, or t
  misc_feature (101)..(135): n is a, c, g, or t

SEQ ID NO: 110577 - DNA, 466 bp, Homo Sapiens; identical to SEQ ID NO: 79469

SEQ ID NO: 110578 - DNA, 973 bp, Homo Sapiens; identical to SEQ ID NO: 79470
  misc_feature (30)..(30): n is a, c, g, or t
  misc_feature (128)..(128): n is a, c, g, or t
  misc_feature (324)..(325): n is a, c, g, or t
  misc_feature (336)..(336): n is a, c, g, or t
  misc_feature (339)..(339): n is a, c, g, or t

SEQ ID NO: 110579 - DNA, 380 bp, Homo Sapiens; identical to SEQ ID NO: 79471

SEQ ID NO: 110580 - DNA, 744 bp, Homo Sapiens; identical to SEQ ID NO: 79487
  misc_feature (74)..(74): n is a, c, g, or t
  misc_feature (105)..(105): n is a, c, g, or t

SEQ ID NO: 110581 - DNA, 1190 bp, Homo Sapiens; identical to SEQ ID NO: 79488
  misc_feature (59)..(59): n is a, c, g, or t
  misc_feature (70)..(70): n is a, c, g, or t
  misc_feature (87)..(87): n is a, c, g, or t
  misc_feature (102)..(102): n is a, c, g, or t
  misc_feature (106)..(106): n is a, c, g, or t
  misc_feature (711)..(771): n is a, c, g, or t

SEQ ID NO: 110582 - DNA, 998 bp, Homo Sapiens; identical to SEQ ID NO: 79489
  misc_feature (356)..(405): n is a, c, g, or t

SEQ ID NO: 110583 - DNA, 821 bp, Homo Sapiens; identical to SEQ ID NO: 79494
  misc_feature (42)..(56): n is a, c, g, or t

SEQ ID NO: 110584 - DNA, 1059 bp, Homo Sapiens; identical to SEQ ID NO: 79495
  misc_feature (320)..(322): n is a, c, g, or t
  misc_feature (775)..(775): n is a, c, g, or t
  misc_feature (839)..(839): n is a, c, g, or t
  misc_feature (845)..(845): n is a, c, g, or t
  misc_feature (854)..(854): n is a, c, g, or t
  misc_feature (858)..(858): n is a, c, g, or t
  misc_feature (901)..(901): n is a, c, g, or t
  misc_feature (932)..(932): n is a, c, g, or t
  misc_feature (944)..(944): n is a, c, g, or t
  misc_feature (980)..(980): n is a, c, g, or t
  misc_feature (992)..(992): n is a, c, g, or t
  misc_feature (1024)..(1024): n is a, c, g, or t
  misc_feature (1029)..(1030): n is a, c, g, or t

SEQ ID NO: 110585 - DNA, 747 bp, Homo Sapiens; identical to SEQ ID NO: 79496

SEQ ID NO: 110586 - DNA, 1267 bp, Homo Sapiens; identical to SEQ ID NO: 79497

SEQ ID NO: 110587 - DNA, 1063 bp, Homo Sapiens; identical to SEQ ID NO: 79498

SEQ ID NO: 110588 - DNA, 840 bp, Homo Sapiens; identical to SEQ ID NO: 79502
  misc_feature (670)..(698): n is a, c, g, or t
  misc_feature (780)..(780): n is a, c, g, or t
  misc_feature (804)..(804): n is a, c, g, or t

SEQ ID NO: 110589 - DNA, 868 bp, Homo Sapiens; identical to SEQ ID NO: 79503

SEQ ID NO: 110590 - DNA, 1299 bp, Homo Sapiens; identical to SEQ ID NO: 79517

SEQ ID NO: 110591 - DNA, 227 bp, Homo Sapiens; identical to SEQ ID NO: 79518

SEQ ID NO: 110592 - DNA, 980 bp, Homo Sapiens; identical to SEQ ID NO: 79519

SEQ ID NO: 110593 - DNA, 1606 bp, Homo Sapiens; identical to SEQ ID NO: 79521

SEQ ID NO: 110594 - DNA, 1156 bp, Homo Sapiens; identical to SEQ ID NO: 79522
  misc_feature (934)..(934): n is a, c, g, or t

SEQ ID NO: 110595 - DNA, 1110 bp, Homo Sapiens; identical to SEQ ID NO: 79523

SEQ ID NO: 110596 - DNA, 1005 bp, Homo Sapiens; identical to SEQ ID NO: 79525

SEQ ID NO: 110597 - DNA, 1076 bp, Homo Sapiens; identical to SEQ ID NO: 79526
  misc_feature (41)..(83): n is a, c, g, or t
  misc_feature (87)..(121): n is a, c, g, or t
  misc_feature (348)..(404): n is a, c, g, or t

SEQ ID NO: 110598 - DNA, 761 bp, Homo Sapiens; identical to SEQ ID NO: 79527
  misc_feature (145)..(180): n is a, c, g, or t
  misc_feature (198)..(443): n is a, c, g, or t
  misc_feature (648)..(648): n is a, c, g, or t
  misc_feature (655)..(655): n is a, c, g, or t
  misc_feature (657)..(657): n is a, c, g, or t
  misc_feature (663)..(663): n is a, c, g, or t
  misc_feature (675)..(675): n is a, c, g, or t
  misc_feature (705)..(705): n is a, c, g, or t
  misc_feature (719)..(719): n is a, c, g, or t
  misc_feature (747)..(747): n is a, c, g, or t

SEQ ID NO: 110599 - DNA, 1963 bp, Homo Sapiens; identical to SEQ ID NO: 79528
  misc_feature (1746)..(1755): n is a, c, g, or t
  misc_feature (1851)..(1851): n is a, c, g, or t
  misc_feature (1887)..(1887): n is a, c, g, or t
  misc_feature (1895)..(1895): n is a, c, g, or t
  misc_feature (1918)..(1918): n is a, c, g, or t

SEQ ID NO: 110600 - DNA, 922 bp, Homo Sapiens; identical to SEQ ID NO: 79529
  misc_feature (903)..(903): n is a, c, g, or t

SEQ ID NO: 110601 - DNA, 756 bp, Homo Sapiens; identical to SEQ ID NO: 79533

SEQ ID NO: 110602 - DNA, 471 bp, Homo Sapiens; identical to SEQ ID NO: 79534

SEQ ID NO: 110603 - DNA, 855 bp, Homo Sapiens; identical to SEQ ID NO: 79554

SEQ ID NO: 110604 - DNA, 1035 bp, Homo Sapiens; identical to SEQ ID NO: 79555
  misc_feature (221)..(221): n is a, c, g, or t

SEQ ID NO: 110605 - DNA, 692 bp, Homo Sapiens; identical to SEQ ID NO: 79556

SEQ ID NO: 110606 - DNA, 966 bp, Homo Sapiens; identical to SEQ ID NO: 79559
  misc_feature (30)..(30): n is a, c, g, or t
  misc_feature (32)..(32): n is a, c, g, or t
  misc_feature (92)..(102): n is a, c, g, or t
  misc_feature (104)..(249): n is a, c, g, or t
  misc_feature (252)..(267): n is a, c, g, or t
  misc_feature (305)..(361): n is a, c, g, or t
  misc_feature (551)..(617): n is a, c, g, or t

SEQ ID NO: 110607 - DNA, 1021 bp, Homo Sapiens; identical to SEQ ID NO: 79560
  misc_feature (56)..(56): n is a, c, g, or t
  misc_feature (73)..(73): n is a, c, g, or t
  misc_feature (91)..(91): n is a, c, g, or t
  misc_feature (754)..(766): n is a, c, g, or t
  misc_feature (770)..(949): n is a, c, g, or t
  misc_feature (956)..(958): n is a, c, g, or t

SEQ ID NO: 110608 - DNA, 1008 bp, Homo Sapiens; identical to SEQ ID NO: 79585
  misc_feature (446)..(468): n is a, c, g, or t
  misc_feature (513)..(899): n is a, c, g, or t
  misc_feature (918)..(918): n is a, c, g, or t
  misc_feature (921)..(921): n is a, c, g, or t

SEQ ID NO: 110609 - DNA, 901 bp, Homo Sapiens; identical to SEQ ID NO: 79586

SEQ ID NO: 110610 - DNA, 2344 bp, Homo Sapiens; identical to SEQ ID NO: 79593
  misc_feature (1348)..(1495): n is a, c, g, or t
  misc_feature (1570)..(1717): n is a, c, g, or t
  misc_feature (2260)..(2260): n is a, c, g, or t

SEQ ID NO: 110611 - DNA, 775 bp, Homo Sapiens; identical to SEQ ID NO: 79594
  misc_feature (623)..(623): n is a, c, g, or t
  misc_feature (650)..(650): n is a, c, g, or t

SEQ ID NO: 110612 - DNA, 851 bp, Homo Sapiens; identical to SEQ ID NO: 79597

SEQ ID NO: 110613 - DNA, 1504 bp, Homo Sapiens; identical to SEQ ID NO: 79598

SEQ ID NO: 110614 - DNA, 698 bp, Homo Sapiens; identical to SEQ ID NO: 79605

SEQ ID NO: 110615 - DNA, 665 bp, Homo Sapiens; identical to SEQ ID NO: 79606

SEQ ID NO: 110616 - DNA, 1260 bp, Homo Sapiens; identical to SEQ ID NO: 79607

SEQ ID NO: 110617 - DNA, 978 bp, Homo Sapiens; identical to SEQ ID NO: 79608

SEQ ID NO: 110618 - DNA, 1106 bp, Homo Sapiens; identical to SEQ ID NO: 79636

SEQ ID NO: 110619 - DNA, 777 bp, Homo Sapiens; identical to SEQ ID NO: 79637

SEQ ID NO: 110620 - DNA, 1184 bp, Homo Sapiens; identical to SEQ ID NO: 79638

SEQ ID NO: 110621 - DNA, 874 bp, Homo Sapiens; identical to SEQ ID NO: 79639

SEQ ID NO: 110622 - DNA, 722 bp, Homo Sapiens; identical to SEQ ID NO: 79651

SEQ ID NO: 110623 - DNA, 907 bp, Homo Sapiens; identical to SEQ ID NO: 79652

SEQ ID NO: 110624 - DNA, 1213 bp, Homo Sapiens; identical to SEQ ID NO: 79655

SEQ ID NO: 110625 - DNA, 971 bp, Homo Sapiens; identical to SEQ ID NO: 79656
  misc_feature (906)..(906): n is a, c, g, or t
  misc_feature (940)..(940): n is a, c, g, or t

SEQ ID NO: 110626 - DNA, 1184 bp, Homo Sapiens; identical to SEQ ID NO: 79657

SEQ ID NO: 110627 - DNA, 781 bp, Homo Sapiens; identical to SEQ ID NO: 79664
  misc_feature (77)..(77): n is a, c, g, or t

SEQ ID NO: 110628 - DNA, 594 bp, Homo Sapiens; identical to SEQ ID NO: 79665
  misc_feature (457)..(495): n is a, c, g, or t

SEQ ID NO: 110629 - DNA, 980 bp, Homo Sapiens; identical to SEQ ID NO: 79669
  misc_feature (524)..(524): n is a, c, g, or t

SEQ ID NO: 110630 - DNA, 1459 bp, Homo Sapiens; identical to SEQ ID NO: 79670
  misc_feature (1363)..(1381): n is a, c, g, or t

SEQ ID NO: 110631 - DNA, 919 bp, Homo Sapiens; identical to SEQ ID NO: 79671
  misc_feature (473)..(508): n is a, c, g, or t
  misc_feature (833)..(833): n is a, c, g, or t

SEQ ID NO: 110632 - DNA, 1140 bp, Homo Sapiens; identical to SEQ ID NO: 79672
  misc_feature (53)..(53): n is a, c, g, or t
  misc_feature (115)..(459): n is a, c, g, or t
  misc_feature (477)..(492): n is a, c, g, or t
  misc_feature (728)..(740): n is a, c, g, or t

SEQ ID NO: 110633 - DNA, 850 bp, Homo Sapiens; identical to SEQ ID NO: 79673
  misc_feature (458)..(458): n is a, c, g, or t

SEQ ID NO: 110634 - DNA, 1321 bp, Homo Sapiens; identical to SEQ ID NO: 79697
  misc_feature (93)..(118): n is a, c, g, or t
  misc_feature (1124)..(1139): n is a, c, g, or t
  misc_feature (1141)..(1187): n is a, c, g, or t

SEQ ID NO: 110635 - DNA, 605 bp, Homo Sapiens; identical to SEQ ID NO: 79698

SEQ ID NO: 110636 - DNA, 1103 bp, Homo Sapiens; identical to SEQ ID NO: 79699

SEQ ID NO: 110637 - DNA, 582 bp, Homo Sapiens; identical to SEQ ID NO: 79703
  misc_feature (353)..(411): n is a, c, g, or t

SEQ ID NO: 110638 - DNA, 732 bp, Homo Sapiens; identical to SEQ ID NO: 6485
  misc_feature (377)..(403): n is a, c, g, or t

SEQ ID NO: 110639 - DNA, 585 bp, Homo Sapiens; identical to SEQ ID NO: 79713

SEQ ID NO: 110640 - DNA, 896 bp, Homo Sapiens; identical to SEQ ID NO: 79714

SEQ ID NO: 110641 - DNA, 1320 bp, Homo Sapiens; identical to SEQ ID NO: 79726
  misc_feature (1045)..(1045): n is a, c, g, or t
  misc_feature (1058)..(1058): n is a, c, g, or t
  misc_feature (1069)..(1069): n is a, c, g, or t
  misc_feature (1078)..(1216): n is a, c, g, or t
  misc_feature (1245)..(1245): n is a, c, g, or t
  misc_feature (1250)..(1250): n is a, c, g, or t
  misc_feature (1253)..(1253): n is a, c, g, or t

SEQ ID NO: 110642 - DNA, 2115 bp, Homo Sapiens; identical to SEQ ID NO: 79727
  misc_feature (1741)..(1835): n is a, c, g, or t
  misc_feature (1865)..(1873): n is a, c, g, or t
  misc_feature (1927)..(1935): n is a, c, g, or t
  misc_feature (2048)..(2059): n is a, c, g, or t

SEQ ID NO: 110643 - DNA, 893 bp, Homo Sapiens; identical to SEQ ID NO: 79728

SEQ ID NO: 110644 - DNA, 892 bp, Homo Sapiens; identical to SEQ ID NO: 79732
  misc_feature (47)..(47): n is a, c, g, or t
  misc_feature (765)..(842): n is a, c, g, or t

SEQ ID NO: 110645 - DNA, 587 bp, Homo Sapiens; identical to SEQ ID NO: 79733
  misc_feature (314)..(326): n is a, c, g, or t

SEQ ID NO: 110646 - DNA, 884 bp, Homo Sapiens; identical to SEQ ID NO: 79734

SEQ ID NO: 110647 - DNA, 1165 bp, Homo Sapiens; identical to SEQ ID NO: 79735
  misc_feature (960)..(1059): n is a, c, g, or t

SEQ ID NO: 110648 - DNA, 1514 bp, Homo Sapiens; identical to SEQ ID NO: 79736

SEQ ID NO: 110649 - DNA, 696 bp, Homo Sapiens; identical to SEQ ID NO: 79737

SEQ ID NO: 110650 - DNA, 1130 bp, Homo Sapiens; identical to SEQ ID NO: 79746

SEQ ID NO: 110651 - DNA, 2246 bp, Homo Sapiens; identical to SEQ ID NO: 79747
  misc_feature (65)..(119): n is a, c, g, or t
  misc_feature (1430)..(1430): n is a, c, g, or t
  misc_feature (1445)..(1445): n is a, c, g, or t

SEQ ID NO: 110652 - DNA, 1440 bp, Homo Sapiens; identical to SEQ ID NO: 79748

SEQ ID NO: 110653 - DNA, 1463 bp, Homo Sapiens; identical to SEQ ID NO: 79753

SEQ ID NO: 110654 - DNA, 1315 bp, Homo Sapiens; identical to SEQ ID NO: 79754

SEQ ID NO: 110655 - DNA, 1423 bp, Homo Sapiens; identical to SEQ ID NO: 79755

SEQ ID NO: 110656 - DNA, 1052 bp, Homo Sapiens; identical to SEQ ID NO: 79770
  misc_feature (49)..(50): n is a, c, g, or t
  misc_feature (75)..(75): n is a, c, g, or t
  misc_feature (111)..(253): n is a, c, g, or t
  misc_feature (255)..(255): n is a, c, g, or t
  misc_feature (261)..(261): n is a, c, g, or t
  misc_feature (270)..(271): n is a, c, g, or t
  misc_feature (796)..(844): n is a, c, g, or t

SEQ ID NO: 110657 - DNA, 885 bp, Homo Sapiens; identical to SEQ ID NO: 79771

SEQ ID NO: 110658 - DNA, 546 bp, Homo Sapiens; identical to SEQ ID NO: 79772
  misc_feature (85)..(129): n is a, c, g, or t

SEQ ID NO: 110659 - DNA, 893 bp, Homo Sapiens; identical to SEQ ID NO: 79782
  misc_feature (302)..(303): n is a, c, g, or t
  misc_feature (312)..(312): n is a, c, g, or t
  misc_feature (314)..(314): n is a, c, g, or t
  misc_feature (320)..(321): n is a, c, g, or t
  misc_feature (325)..(325): n is a, c, g, or t
  misc_feature (327)..(327): n is a, c, g, or t
  misc_feature (330)..(330): n is a, c, g, or t
  misc_feature (334)..(334): n is a, c, g, or t
  misc_feature (338)..(338): n is a, c, g, or t

SEQ ID NO: 110660 - DNA, 616 bp, Homo Sapiens; identical to SEQ ID NO: 79783
  misc_feature (27)..(27): n is a, c, g, or t

SEQ ID NO: 110661 - DNA, 1016 bp, Homo Sapiens; identical to SEQ ID NO: 79787
  misc_feature (171)..(379): n is a, c, g, or t

SEQ ID NO: 110662 - DNA, 663 bp, Homo Sapiens; identical to SEQ ID NO: 79788

SEQ ID NO: 110663 - DNA, 1703 bp, Homo Sapiens; identical to SEQ ID NO: 79789

SEQ ID NO: 110664 - DNA, 667 bp, Homo Sapiens; identical to SEQ ID NO: 79791

SEQ ID NO: 110665 - DNA, 783 bp, Homo Sapiens; identical to SEQ ID NO: 79792
  misc_feature (62)..(76): n is a, c, g, or t
  misc_feature (548)..(557): n is a, c, g, or t

SEQ ID NO: 110666 - DNA, 944 bp, Homo Sapiens; identical to SEQ ID NO: 79793
  misc_feature (55)..(55): n is a, c, g, or t
  misc_feature (100)..(100): n is a, c, g, or t
  misc_feature (113)..(113): n is a, c, g, or t
  misc_feature (125)..(125): n is a, c, g, or t
  misc_feature (165)..(165): n is a, c, g, or t
  misc_feature (199)..(200): n is a, c, g, or t
  misc_feature (256)..(256): n is a, c, g, or t
  misc_feature (356)..(356): n is a, c, g, or t
  misc_feature (370)..(370): n is a, c, g, or t
  misc_feature (384)..(384): n is a, c, g, or t
  misc_feature (391)..(391): n is a, c, g, or t
  misc_feature (393)..(393): n is a, c, g, or t
  misc_feature (524)..(524): n is a, c, g, or t
  misc_feature (573)..(573): n is a, c, g, or t
  misc_feature (605)..(632): n is a, c, g, or t

SEQ ID NO: 110667 - DNA, 393 bp, Homo Sapiens; identical to SEQ ID NO: 79794

SEQ ID NO: 110668 - DNA, 985 bp, Homo Sapiens; identical to SEQ ID NO: 79798
  misc_feature (66)..(66): n is a, c, g, or t
  misc_feature (86)..(86): n is a, c, g, or t
  misc_feature (171)..(434): n is a, c, g, or t
  misc_feature (727)..(749): n is a, c, g, or t

SEQ ID NO: 110669 - DNA, 1303 bp, Homo Sapiens; identical to SEQ ID NO: 79799
  misc_feature (259)..(332): n is a, c, g, or t
  misc_feature (484)..(507): n is a, c, g, or t
  misc_feature (511)..(585): n is a, c, g, or t
  misc_feature (1021)..(1021): n is a, c, g, or t

SEQ ID NO: 110670 - DNA, 1452 bp, Homo Sapiens; identical to SEQ ID NO: 79804
  misc_feature (1204)..(1220): n is a, c, g, or t
  misc_feature (1392)..(1411): n is a, c, g, or t

SEQ ID NO: 110671 - DNA, 439 bp, Homo Sapiens; identical to SEQ ID NO: 79805
  misc_feature (264)..(283): n is a, c, g, or t

SEQ ID NO: 110672 - DNA, 1176 bp, Homo Sapiens; identical to SEQ ID NO: 79806

SEQ ID NO: 110673 - DNA, 652 bp, Homo Sapiens; identical to SEQ ID NO: 79807

SEQ ID NO: 110674 - DNA, 1600 bp, Homo Sapiens; identical to SEQ ID NO: 79811
  misc_feature (91)..(91): n is a, c, g, or t
  misc_feature (311)..(311): n is a, c, g, or t
  misc_feature (386)..(386): n is a, c, g, or t

SEQ ID NO: 110675 - DNA, 916 bp, Homo Sapiens; identical to SEQ ID NO: 79812
  misc_feature (851)..(876): n is a, c, g, or t

SEQ ID NO: 110676 - DNA, 2416 bp, Homo Sapiens; identical to SEQ ID NO: 79819
  misc_feature (1871)..(1889): n is a, c, g, or t
  misc_feature (1904)..(1904): n is a, c, g, or t
  misc_feature (1934)..(2289): n is a, c, g, or t
  misc_feature (2339)..(2339): n is a, c, g, or t

SEQ ID NO: 110677 - DNA, 579 bp, Homo Sapiens; identical to SEQ ID NO: 79820
  misc_feature (161)..(175): n is a, c, g, or t

SEQ ID NO: 110678 - DNA, 917 bp, Homo Sapiens; identical to SEQ ID NO: 79839
  misc_feature (349)..(368): n is a, c, g, or t
  misc_feature (387)..(387): n is a, c, g, or t
  misc_feature (394)..(502): n is a, c, g, or t
  misc_feature (512)..(525): n is a, c, g, or t
  misc_feature (601)..(650): n is a, c, g, or t

SEQ ID NO: 110679 - DNA, 1016 bp, Homo Sapiens; identical to SEQ ID NO: 79840
  misc_feature (748)..(841): n is a, c, g, or t

SEQ ID NO: 110680 - DNA, 1902 bp, Homo Sapiens; identical to SEQ ID NO: 79845
  misc_feature (289)..(369): n is a, c, g, or t
  misc_feature (1820)..(1828): n is a, c, g, or t

SEQ ID NO: 110681 - DNA, 1040 bp, Homo Sapiens; identical to SEQ ID NO: 79846

SEQ ID NO: 110682 - DNA, 418 bp, Homo Sapiens; identical to SEQ ID NO: 79848

SEQ ID NO: 110683 - DNA, 487 bp, Homo Sapiens; identical to SEQ ID NO: 79849

SEQ ID NO: 110684 - DNA, 921 bp, Homo Sapiens; identical to SEQ ID NO: 79850
  misc_feature (740)..(740): n is a, c, g, or t
  misc_feature (746)..(746): n is a, c, g, or t
  misc_feature (748)..(748): n is a, c, g, or t
  misc_feature (750)..(750): n is a, c, g, or t
  misc_feature (755)..(755): n is a, c, g, or t

SEQ ID NO: 110685 - DNA, 609 bp, Homo Sapiens; identical to SEQ ID NO: 79859
  misc_feature (43)..(43): n is a, c, g, or t
  misc_feature (103)..(118): n is a, c, g, or t
  misc_feature (454)..(484): n is a, c, g, or t

SEQ ID NO: 110686 - DNA, 983 bp, Homo Sapiens; identical to SEQ ID NO: 79860
  misc_feature (102)..(132): n is a, c, g, or t
  misc_feature (647)..(660): n is a, c, g, or t

SEQ ID NO: 110687 - DNA, 1048 bp, Homo Sapiens; identical to SEQ ID NO: 79862

SEQ ID NO: 110688 - DNA, 899 bp, Homo Sapiens; identical to SEQ ID NO: 79863
  misc_feature (630)..(630): n is a, c, g, or t

SEQ ID NO: 110689 - DNA, 649 bp, Homo Sapiens; identical to SEQ ID NO: 79865

SEQ ID NO: 110690 - DNA, 419 bp, Homo Sapiens; identical to SEQ ID NO: 79866

SEQ ID NO: 110691 - DNA, 728 bp, Homo Sapiens; identical to SEQ ID NO: 79867
  misc_feature (51)..(52): n is a, c, g, or t
  misc_feature (54)..(54): n is a, c, g, or t
  misc_feature (582)..(618): n is a, c, g, or t

SEQ ID NO: 110692 - DNA, 1173 bp, Homo Sapiens; identical to SEQ ID NO: 79868

SEQ ID NO: 110693 - DNA, 1254 bp, Homo Sapiens; identical to SEQ ID NO: 79876
  misc_feature (87)..(121): n is a, c, g, or t
  misc_feature (1069)..(1083): n is a, c, g, or t
  misc_feature (1178)..(1186): n is a, c, g, or t

SEQ ID NO: 110694 - DNA, 420 bp, Homo Sapiens; identical to SEQ ID NO: 79877

SEQ ID NO: 110695 - DNA, 688 bp, Homo Sapiens; identical to SEQ ID NO: 79888
  misc_feature (675)..(675): n is a, c, g, or t

SEQ ID NO: 110696 - DNA, 624 bp, Homo Sapiens; identical to SEQ ID NO: 79889
  misc_feature (26)..(69): n is a, c, g, or t

SEQ ID NO: 110697 - DNA, 1086 bp, Homo Sapiens; identical to SEQ ID NO: 79890
  misc_feature (62)..(80): n is a, c, g, or t

SEQ ID NO: 110698 - DNA, 482 bp, Homo Sapiens; identical to SEQ ID NO: 79891

SEQ ID NO: 110699 - DNA, 637 bp, Homo Sapiens; identical to SEQ ID NO: 79892

SEQ ID NO: 110700 - DNA, 674 bp, Homo Sapiens; identical to SEQ ID NO: 79893

SEQ ID NO: 110701 - DNA, 494 bp, Homo Sapiens; identical to SEQ ID NO: 79894

SEQ ID NO: 110702 - DNA, 602 bp, Homo Sapiens; identical to SEQ ID NO: 79911
  misc_feature (57)..(127): n is a, c, g, or t
  misc_feature (322)..(546): n is a, c, g, or t

SEQ ID NO: 110703 - DNA, 1094 bp, Homo Sapiens; identical to SEQ ID NO: 79912
  misc_feature (22)..(22): n is a, c, g, or t
  misc_feature (37)..(38): n is a, c, g, or t

SEQ ID NO: 110704 - DNA, 602 bp, Homo Sapiens; identical to SEQ ID NO: 79915
  misc_feature (220)..(220): n is a, c, g, or t
  misc_feature (374)..(428): n is a, c, g, or t

SEQ ID NO: 110705 - DNA, 441 bp, Homo Sapiens; identical to SEQ ID NO: 79916
  misc_feature (145)..(195): n is a, c, g, or t

SEQ ID NO: 110706 - DNA, 201 bp, Homo Sapiens; identical to SEQ ID NO: 79917

SEQ ID NO: 110707 - DNA, 1276 bp, Homo Sapiens; identical to SEQ ID NO: 79933
  misc_feature (88)..(122): n is a, c, g, or t

SEQ ID NO: 110708 - DNA, 892 bp, Homo Sapiens; identical to SEQ ID NO: 79934
  misc_feature (757)..(791): n is a, c, g, or t
  misc_feature (795)..(837): n is a, c, g, or t

SEQ ID NO: 110709 - DNA, 1525 bp, Homo Sapiens; identical to SEQ ID NO: 79935

SEQ ID NO: 110710 - DNA, 841 bp, Homo Sapiens; identical to SEQ ID NO: 79936
  misc_feature (95)..(129): n is a, c, g, or t

SEQ ID NO: 110711 - DNA, 1067 bp, Homo Sapiens; identical to SEQ ID NO: 79937
  misc_feature (71)..(105): n is a, c, g, or t

SEQ ID NO: 110712 - DNA, 1029 bp, Homo Sapiens; identical to SEQ ID NO: 79938
  misc_feature (60)..(101): n is a, c, g, or t
  misc_feature (104)..(138): n is a, c, g, or t

SEQ ID NO: 110713 - DNA, 838 bp, Homo Sapiens; identical to SEQ ID NO: 79943

SEQ ID NO: 110714 - DNA, 866 bp, Homo Sapiens; identical to SEQ ID NO: 79944
  misc_feature (402)..(408): n is a, c, g, or t
  misc_feature (410)..(413): n is a, c, g, or t
  misc_feature (416)..(429): n is a, c, g, or t

SEQ ID NO: 110715 - DNA, 281 bp, Homo Sapiens; identical to SEQ ID NO: 79945

SEQ ID NO: 110716 - DNA, 931 bp, Homo Sapiens; identical to SEQ ID NO: 79946
  misc_feature (68)..(115): n is a, c, g, or t
  misc_feature (128)..(363): n is a, c, g, or t

SEQ ID NO: 110717 - DNA, 983 bp, Homo Sapiens; identical to SEQ ID NO: 79952
  misc_feature (551)..(551): n is a, c, g, or t
  misc_feature (738)..(738): n is a, c, g, or t
  misc_feature (741)..(741): n is a, c, g, or t
  misc_feature (794)..(794): n is a, c, g, or t

SEQ ID NO: 110718 - DNA, 1361 bp, Homo Sapiens; identical to SEQ ID NO: 79953
  misc_feature (429)..(429): n is a, c, g, or t
  misc_feature (665)..(665): n is a, c, g, or t

SEQ ID NO: 110719 - DNA, 1131 bp, Homo Sapiens; identical to SEQ ID NO: 79976
  misc_feature (548)..(634): n is a, c, g, or t

SEQ ID NO: 110720 - DNA, 972 bp, Homo Sapiens; identical to SEQ ID NO: 79977
  misc_feature (585)..(670): n is a, c, g, or t
  misc_feature (714)..(714): n is a, c, g, or t

SEQ ID NO: 110721 - DNA, 787 bp, Homo Sapiens; identical to SEQ ID NO: 79978
  misc_feature (120)..(204): n is a, c, g, or t

SEQ ID NO: 110722 - DNA, 727 bp, Homo Sapiens; identical to SEQ ID NO: 79994
  misc_feature (47)..(47): n is a, c, g, or t
  misc_feature (53)..(53): n is a, c, g, or t
  misc_feature (108)..(108): n is a, c, g, or t
  misc_feature (211)..(211): n is a, c, g, or t

SEQ ID NO: 110723 - DNA, 1244 bp, Homo Sapiens; identical to SEQ ID NO: 79995

SEQ ID NO: 110724 - DNA, 405 bp, Homo Sapiens; identical to SEQ ID NO: 79996
  misc_feature (122)..(187): n is a, c, g, or t
  misc_feature (312)..(326): n is a, c, g, or t
  misc_feature (329)..(362): n is a, c, g, or t

SEQ ID NO: 110725 - DNA, 467 bp, Homo Sapiens; identical to SEQ ID NO: 79997
  misc_feature (67)..(99): n is a, c, g, or t
  misc_feature (119)..(153): n is a, c, g, or t
  misc_feature (284)..(340): n is a, c, g, or t

SEQ ID NO: 110726 - DNA, 2180 bp, Homo Sapiens; identical to SEQ ID NO: 80012
  misc_feature (73)..(107): n is a, c, g, or t

SEQ ID NO: 110727 - DNA, 1222 bp, Homo Sapiens; identical to SEQ ID NO: 80013
  misc_feature (834)..(842): n is a, c, g, or t
  misc_feature (1004)..(1017): n is a, c, g, or t
  misc_feature (1030)..(1129): n is a, c, g, or t
  misc_feature (1152)..(1176): n is a, c, g, or t

SEQ ID NO: 110728 - DNA, 1057 bp, Homo Sapiens; identical to SEQ ID NO: 80021
  misc_feature (502)..(888): n is a, c, g, or t
  misc_feature (910)..(910): n is a, c, g, or t
  misc_feature (916)..(916): n is a, c, g, or t
  misc_feature (924)..(924): n is a, c, g, or t
  misc_feature (1004)..(1004): n is a, c, g, or t

SEQ ID NO: 110729 - DNA, 979 bp, Homo Sapiens; identical to SEQ ID NO: 80022
  misc_feature (19)..(19): n is a, c, g, or t
  misc_feature (55)..(55): n is a, c, g, or t
  misc_feature (69)..(69): n is a, c, g, or t
  misc_feature (114)..(114): n is a, c, g, or t
  misc_feature (119)..(119): n is a, c, g, or t
  misc_feature (122)..(122): n is a, c, g, or t
  misc_feature (128)..(128): n is a, c, g, or t
  misc_feature (142)..(534): n is a, c, g, or t

SEQ ID NO: 110730 - DNA, 1496 bp, Homo Sapiens; identical to SEQ ID NO: 80030
  misc_feature (439)..(498): n is a, c, g, or t
  misc_feature (613)..(694): n is a, c, g, or t
  misc_feature (774)..(834): n is a, c, g, or t

SEQ ID NO: 110731 - DNA, 579 bp, Homo Sapiens; identical to SEQ ID NO: 80031

SEQ ID NO: 110732 - DNA, 442 bp, Homo Sapiens; identical to SEQ ID NO: 80032
  misc_feature (221)..(281): n is a, c, g, or t

SEQ ID NO: 110733 - DNA, 728 bp, Homo Sapiens; identical to SEQ ID NO: 80036
  misc_feature (16)..(16): n is a, c, g, or t
  misc_feature (86)..(86): n is a, c, g, or t

SEQ ID NO: 110734 - DNA, 459 bp, Homo Sapiens; identical to SEQ ID NO: 80037

SEQ ID NO: 110735 - DNA, 942 bp, Homo Sapiens; identical to SEQ ID NO: 80044
  misc_feature (127)..(127): n is a, c, g, or t

SEQ ID NO: 110736 - DNA, 770 bp, Homo Sapiens; identical to SEQ ID NO: 80045
  misc_feature (218)..(270): n is a, c, g, or t

SEQ ID NO: 110737 - DNA, 1083 bp, Homo Sapiens; identical to SEQ ID NO: 80046
  misc_feature (15)..(15): n is a, c, g, or t
  misc_feature (107)..(184): n is a, c, g, or t
  misc_feature (255)..(278): n is a, c, g, or t

SEQ ID NO: 110738 - DNA, 1448 bp, Homo Sapiens; identical to SEQ ID NO: 80047
  misc_feature (579)..(598): n is a, c, g, or t
  misc_feature (1006)..(1021): n is a, c, g, or t
  misc_feature (1225)..(1316): n is a, c, g, or t
  misc_feature (1324)..(1338): n is a, c, g, or t

SEQ ID NO: 110739 - DNA, 833 bp, Homo Sapiens; identical to SEQ ID NO: 80053

SEQ ID NO: 110740 - DNA, 454 bp, Homo Sapiens; identical to SEQ ID NO: 80054

SEQ ID NO: 110741 - DNA, 1047 bp, Homo Sapiens; identical to SEQ ID NO: 80059
  misc_feature (711)..(804): n is a, c, g, or t
  misc_feature (808)..(808): n is a, c, g, or t
  misc_feature (811)..(812): n is a, c, g, or t
  misc_feature (829)..(845): n is a, c, g, or t
  misc_feature (848)..(849): n is a, c, g, or t

SEQ ID NO: 110742 - DNA, 1526 bp, Homo Sapiens; identical to SEQ ID NO: 80060

SEQ ID NO: 110743 - DNA, 859 bp, Homo Sapiens; identical to SEQ ID NO: 80062
  misc_feature (384)..(428): n is a, c, g, or t

SEQ ID NO: 110744 - DNA, 654 bp, Homo Sapiens; identical to SEQ ID NO: 80063

SEQ ID NO: 110745 - DNA, 973 bp, Homo Sapiens; identical to SEQ ID NO: 80079

SEQ ID NO: 110746 - DNA, 1386 bp, Homo Sapiens; identical to SEQ ID NO: 80080

SEQ ID NO: 110747 - DNA, 1408 bp, Homo Sapiens; identical to SEQ ID NO: 80081
  misc_feature (638)..(719): n is a, c, g, or t
  misc_feature (1192)..(1332): n is a, c, g, or t

SEQ ID NO: 110748 - DNA, 757 bp, Homo Sapiens; identical to SEQ ID NO: 80082
  misc_feature (107)..(117): n is a, c, g, or t

SEQ ID NO: 110749 - DNA, 1370 bp, Homo Sapiens; identical to SEQ ID NO: 80083

SEQ ID NO: 110750 - DNA, 1079 bp, Homo Sapiens; identical to SEQ ID NO: 80084
  misc_feature (99)..(107): n is a, c, g, or t
  misc_feature (839)..(839): n is a, c, g, or t
  misc_feature (843)..(843): n is a, c, g, or t
  misc_feature (859)..(860): n is a, c, g, or t
  misc_feature (863)..(868): n is a, c, g, or t
  misc_feature (909)..(909): n is a, c, g, or t
  misc_feature (987)..(987): n is a, c, g, or t

SEQ ID NO: 110751 - DNA, 513 bp, Homo Sapiens; identical to SEQ ID NO: 80095

SEQ ID NO: 110752 - DNA, 620 bp, Homo Sapiens; identical to SEQ ID NO: 80096

SEQ ID NO: 110753 - DNA, 1077 bp, Homo Sapiens; identical to SEQ ID NO: 80106
  misc_feature (72)..(72): n is a, c, g, or t
  misc_feature (97)..(97): n is a, c, g, or t
  misc_feature (124)..(125): n is a, c, g, or t
  misc_feature (133)..(133): n is a, c, g, or t
  misc_feature (137)..(555): n is a, c, g, or t

SEQ ID NO: 110754 - DNA, 1226 bp, Homo Sapiens; identical to SEQ ID NO: 80107

SEQ ID NO: 110755 - DNA, 570 bp, Homo Sapiens; identical to SEQ ID NO: 80121

SEQ ID NO: 110756 - DNA, 1132 bp, Homo Sapiens; identical to SEQ ID NO: 80122
  misc_feature (42)..(76): n is a, c, g, or t

SEQ ID NO: 110757 - DNA, 780 bp, Homo Sapiens; identical to SEQ ID NO: 80123
  misc_feature (687)..(687): n is a, c, g, or t

SEQ ID NO: 110758 - DNA, 1608 bp, Homo Sapiens; identical to SEQ ID NO: 80135
  misc_feature (956)..(976): n is a, c, g, or t
  misc_feature (994)..(1423): n is a, c, g, or t
  misc_feature (1446)..(1446): n is a, c, g, or t
  misc_feature (1515)..(1515): n is a, c, g, or t

SEQ ID NO: 110759 - DNA, 385 bp, Homo Sapiens; identical to SEQ ID NO: 80136

SEQ ID NO: 110760 - DNA, 1775 bp, Homo Sapiens; identical to SEQ ID NO: 80137
  misc_feature (975)..(1031): n is a, c, g, or t

SEQ ID NO: 110761 - DNA, 860 bp, Homo Sapiens; identical to SEQ ID NO: 80138

SEQ ID NO: 110762 - DNA, 871 bp, Homo Sapiens; identical to SEQ ID NO: 80139

SEQ ID NO: 110763 - DNA, 443 bp, Homo Sapiens; identical to SEQ ID NO: 15245

SEQ ID NO: 110764 - DNA, 1130 bp, Homo Sapiens; identical to SEQ ID NO: 80143
  misc_feature (919)..(952): n is a, c, g, or t

SEQ ID NO: 110765 - DNA, 1154 bp, Homo Sapiens; identical to SEQ ID NO: 80144
  misc_feature (17)..(17): n is a, c, g, or t

SEQ ID NO: 110766 - DNA, 1673 bp, Homo Sapiens; identical to SEQ ID NO: 80145
  misc_feature (1635)..(1635): n is a, c, g, or t
  misc_feature (1640)..(1640): n is a, c, g, or t
  misc_feature (1654)..(1654): n is a, c, g, or t

SEQ ID NO: 110767 - DNA, 1378 bp, Homo Sapiens; identical to SEQ ID NO: 80146
  misc_feature (1239)..(1239): n is a, c, g, or t

SEQ ID NO: 110768 - DNA, 1698 bp, Homo Sapiens; identical to SEQ ID NO: 80150

SEQ ID NO: 110769 - DNA, 1286 bp, Homo Sapiens; identical to SEQ ID NO: 80151
  misc_feature (855)..(855): n is a, c, g, or t

SEQ ID NO: 110770 - DNA, 1011 bp, Homo Sapiens; identical to SEQ ID NO: 80157
  misc_feature (74)..(94): n is a, c, g, or t
  misc_feature (712)..(712): n is a, c, g, or t

SEQ ID NO: 110771 - DNA, 1028 bp, Homo Sapiens; identical to SEQ ID NO: 80158
  misc_feature (75)..(95): n is a, c, g, or t

SEQ ID NO: 110772 - DNA, 1459 bp, Homo Sapiens; identical to SEQ ID NO: 80173
  misc_feature (84)..(84): n is a, c, g, or t
  misc_feature (798)..(821): n is a, c, g, or t
  misc_feature (1327)..(1335): n is a, c, g, or t
  misc_feature (1354)..(1362): n is a, c, g, or t

SEQ ID NO: 110773 - DNA, 2281 bp, Homo Sapiens; identical to SEQ ID NO: 80174
  misc_feature (64)..(449): n is a, c, g, or t
  misc_feature (706)..(751): n is a, c, g, or t
  misc_feature (1987)..(1998): n is a, c, g, or t

SEQ ID NO: 110774 - DNA, 838 bp, Homo Sapiens; identical to SEQ ID NO: 80183
  misc_feature (713)..(738): n is a, c, g, or t

SEQ ID NO: 110775 - DNA, 541 bp, Homo Sapiens; identical to SEQ ID NO: 80184
  misc_feature (434)..(459): n is a, c, g, or t

SEQ ID NO: 110776 - DNA, 874 bp, Homo Sapiens; identical to SEQ ID NO: 80187

SEQ ID NO: 110777 - DNA, 1052 bp, Homo Sapiens; identical to SEQ ID NO: 80188
  misc_feature (15)..(15): n is a, c, g, or t

SEQ ID NO: 110778 - DNA, 924 bp, Homo Sapiens; identical to SEQ ID NO: 80189
  misc_feature (535)..(535): n is a, c, g, or t

SEQ ID NO: 110779 - DNA, 842 bp, Homo Sapiens; identical to SEQ ID NO: 80191
  misc_feature (79)..(113): n is a, c, g, or t

SEQ ID NO: 110780 - DNA, 1957 bp, Homo Sapiens; identical to SEQ ID NO: 80192
  misc_feature (1248)..(1331): n is a, c, g, or t
  misc_feature (1442)..(1442): n is a, c, g, or t
  misc_feature (1500)..(1500): n is a, c, g, or t
  misc_feature (1509)..(1509): n is a, c, g, or t
  misc_feature (1697)..(1697): n is a, c, g, or t

SEQ ID NO: 110781 - DNA, 1534 bp, Homo Sapiens; identical to SEQ ID NO: 80198
  misc_feature (70)..(70): n is a, c, g, or t
  misc_feature (202)..(202): n is a, c, g, or t
  misc_feature (226)..(226): n is a, c, g, or t
  misc_feature (261)..(261): n is a, c, g, or t
  misc_feature (1028)..(1045): n is a, c, g, or t
  misc_feature (1054)..(1092): n is a, c, g, or t
  misc_feature (1139)..(1211): n is a, c, g, or t
  misc_feature (1264)..(1357): n is a, c, g, or t

SEQ ID NO: 110782 - DNA, 1367 bp, Homo Sapiens; identical to SEQ ID NO: 80199
  misc_feature (121)..(163): n is a, c, g, or t

SEQ ID NO: 110783 - DNA, 1347 bp, Homo Sapiens; identical to SEQ ID NO: 80200

SEQ ID NO: 110784 - DNA, 1181 bp, Homo Sapiens; identical to SEQ ID NO: 80201
  misc_feature (84)..(130): n is a, c, g, or t
  misc_feature (537)..(563): n is a, c, g, or t

SEQ ID NO: 110785 - DNA, 549 bp, Homo Sapiens; identical to SEQ ID NO: 80202

SEQ ID NO: 110786 - DNA, 671 bp, Homo Sapiens; identical to SEQ ID NO: 80208
  misc_feature (561)..(561): n is a, c, g, or t

SEQ ID NO: 110787 - DNA, 845 bp, Homo Sapiens; identical to SEQ ID NO: 80209
  misc_feature (67)..(101): n is a, c, g, or t
  misc_feature (212)..(225): n is a, c, g, or t

SEQ ID NO: 110788 - DNA, 801 bp, Homo Sapiens; identical to SEQ ID NO: 80236

SEQ ID NO: 110789 - DNA, 399 bp, Homo Sapiens; identical to SEQ ID NO: 80237

SEQ ID NO: 110790 - DNA, 596 bp, Homo Sapiens; identical to SEQ ID NO: 80238

SEQ ID NO: 110791 - DNA, 1417 bp, Homo Sapiens; identical to SEQ ID NO: 80239
  misc_feature (840)..(840): n is a, c, g, or t

SEQ ID NO: 110792 - DNA, 938 bp, Homo Sapiens; identical to SEQ ID NO: 80246

SEQ ID NO: 110793 - DNA, 813 bp, Homo Sapiens; identical to SEQ ID NO: 80247

SEQ ID NO: 110794 - DNA, 661 bp, Homo Sapiens; identical to SEQ ID NO: 80251

SEQ ID NO: 110795 - DNA, 644 bp, Homo Sapiens; identical to SEQ ID NO: 80252
  misc_feature (28)..(28): n is a, c, g, or t

SEQ ID NO: 110796 - DNA, 1018 bp, Homo Sapiens; identical to SEQ ID NO: 80259
  misc_feature (218)..(377): n is a, c, g, or t
  misc_feature (464)..(464): n is a, c, g, or t

SEQ ID NO: 110797 - DNA, 731 bp, Homo Sapiens; identical to SEQ ID NO: 80260
  misc_feature (474)..(486): n is a, c, g, or t

SEQ ID NO: 110798 - DNA, 586 bp, Homo Sapiens; identical to SEQ ID NO: 80269
  misc_feature (44)..(44): n is a, c, g, or t
  misc_feature (235)..(294): n is a, c, g, or t

SEQ ID NO: 110799 - DNA, 1565 bp, Homo Sapiens; identical to SEQ ID NO: 80270
  misc_feature (162)..(255): n is a, c, g, or t
  misc_feature (1442)..(1501): n is a, c, g, or t

SEQ ID NO: 110800 - DNA, 422 bp, Homo Sapiens; identical to SEQ ID NO: 80271

SEQ ID NO: 110801 - DNA, 1406 bp, Homo Sapiens; identical to SEQ ID NO: 80272
  misc_feature (875)..(875): n is a, c, g, or t
  misc_feature (910)..(910): n is a, c, g, or t
  misc_feature (1038)..(1066): n is a, c, g, or t
  misc_feature (1231)..(1239): n is a, c, g, or t

SEQ ID NO: 110802 - DNA, 710 bp, Homo Sapiens; identical to SEQ ID NO: 80277
  misc_feature (40)..(40): n is a, c, g, or t
  misc_feature (43)..(43): n is a, c, g, or t
  misc_feature (53)..(53): n is a, c, g, or t
  misc_feature (103)..(103): n is a, c, g, or t
  misc_feature (116)..(116): n is a, c, g, or t

SEQ ID NO: 110803 - DNA, 754 bp, Homo Sapiens; identical to SEQ ID NO: 80278

SEQ ID NO: 110804 - DNA, 868 bp, Homo Sapiens; identical to SEQ ID NO: 80291

SEQ ID NO: 110805 - DNA, 559 bp, Homo Sapiens; identical to SEQ ID NO: 80292

SEQ ID NO: 110806 - DNA, 672 bp, Homo Sapiens; identical to SEQ ID NO: 80298

SEQ ID NO: 110807 - DNA, 1590 bp, Homo Sapiens; identical to SEQ ID NO: 80299

SEQ ID NO: 110808 - DNA, 1957 bp, Homo Sapiens; identical to SEQ ID NO: 80302
  misc_feature (1217)..(1217): n is a, c, g, or t

SEQ ID NO: 110809 - DNA, 1180 bp, Homo Sapiens; identical to SEQ ID NO: 80303

SEQ ID NO: 110810 - DNA, 1120 bp, Homo Sapiens; identical to SEQ ID NO: 80306
  misc_feature (68)..(244): n is a, c, g, or t
  misc_feature (248)..(248): n is a, c, g, or t
  misc_feature (251)..(251): n is a, c, g, or t
  misc_feature (254)..(254): n is a, c, g, or t
  misc_feature (263)..(264): n is a, c, g, or t
  misc_feature (267)..(267): n is a, c, g, or t
  misc_feature (272)..(272): n is a, c, g, or t
  misc_feature (344)..(344): n is a, c, g, or t
  misc_feature (386)..(386): n is a, c, g, or t

SEQ ID NO: 110811 - DNA, 1008 bp, Homo Sapiens; identical to SEQ ID NO: 80307
  misc_feature (52)..(90): n is a, c, g, or t
  misc_feature (94)..(128): n is a, c, g, or t

SEQ ID NO: 110812 - DNA, 842 bp, Homo Sapiens; identical to SEQ ID NO: 80308
  misc_feature (77)..(111): n is a, c, g, or t

SEQ ID NO: 110813 - DNA, 647 bp, Homo Sapiens; identical to SEQ ID NO: 80319
  misc_feature (39)..(39): n is a, c, g, or t

SEQ ID NO: 110814 - DNA, 771 bp, Homo Sapiens; identical to SEQ ID NO: 80320

SEQ ID NO: 110815 - DNA, 713 bp, Homo Sapiens; identical to SEQ ID NO: 80323
  misc_feature (78)..(78): n is a, c, g, or t
  misc_feature (601)..(601): n is a, c, g, or t

SEQ ID NO: 110816 - DNA, 1374 bp, Homo Sapiens; identical to SEQ ID NO: 80324

SEQ ID NO: 110817 - DNA, 1089 bp, Homo Sapiens; identical to SEQ ID NO: 80325
  misc_feature (173)..(173): n is a, c, g, or t
  misc_feature (180)..(180): n is a, c, g, or t
  misc_feature (193)..(193): n is a, c, g, or t
  misc_feature (262)..(262): n is a, c, g, or t

SEQ ID NO: 110818 - DNA, 361 bp, Homo Sapiens; identical to SEQ ID NO: 80326

SEQ ID NO: 110819 - DNA, 1209 bp, Homo Sapiens; identical to SEQ ID NO: 80333
  misc_feature (1156)..(1165): n is a, c, g, or t

SEQ ID NO: 110820 - DNA, 610 bp, Homo Sapiens; identical to SEQ ID NO: 80334

SEQ ID NO: 110821 - DNA, 1020 bp, Homo Sapiens; identical to SEQ ID NO: 80339
  misc_feature (347)..(363): n is a, c, g, or t
  misc_feature (417)..(463): n is a, c, g, or t
  misc_feature (575)..(594): n is a, c, g, or t

SEQ ID NO: 110822 - DNA, 1723 bp, Homo Sapiens; identical to SEQ ID NO: 80340
  misc_feature (247)..(276): n is a, c, g, or t
  misc_feature (1355)..(1355): n is a, c, g, or t
  misc_feature (1658)..(1668): n is a, c, g, or t

SEQ ID NO: 110823 - DNA, 1023 bp, Homo Sapiens; identical to SEQ ID NO: 80343
  misc_feature (617)..(651): n is a, c, g, or t
  misc_feature (696)..(783): n is a, c, g, or t
  misc_feature (796)..(840): n is a, c, g, or t

SEQ ID NO: 110824 - DNA, 320 bp, Homo Sapiens; identical to SEQ ID NO: 80344
  misc_feature (297)..(297): n is a, c, g, or t

SEQ ID NO: 110825 - DNA, 730 bp, Homo Sapiens; identical to SEQ ID NO: 80345

SEQ ID NO: 110826 - DNA, 1592 bp, Homo Sapiens; identical to SEQ ID NO: 80359
  misc_feature (1465)..(1521): n is a, c, g, or t

SEQ ID NO: 110827 - DNA, 1822 bp, Homo Sapiens; identical to SEQ ID NO: 80360
  misc_feature (445)..(491): n is a, c, g, or t
  misc_feature (1757)..(1757): n is a, c, g, or t

SEQ ID NO: 110828 - DNA, 2298 bp, Homo Sapiens; identical to SEQ ID NO: 80378
  misc_feature (468)..(478): n is a, c, g, or t
  misc_feature (1273)..(1296): n is a, c, g, or t
  misc_feature (1323)..(1352): n is a, c, g, or t
  misc_feature (1403)..(1434): n is a, c, g, or t
  misc_feature (1471)..(1510): n is a, c, g, or t
  misc_feature (1622)..(1665): n is a, c, g, or t
  misc_feature (1756)..(1756): n is a, c, g, or t
  misc_feature (1844)..(1852): n is a, c, g, or t

SEQ ID NO: 110829 - DNA, 885 bp, Homo Sapiens; identical to SEQ ID NO: 80379

SEQ ID NO: 110830 - DNA, 1594 bp, Homo Sapiens; identical to SEQ ID NO: 80391
  misc_feature (415)..(426): n is a, c, g, or t
  misc_feature (665)..(674): n is a, c, g, or t
  misc_feature (688)..(688): n is a, c, g, or t

SEQ ID NO: 110831 - DNA, 901 bp, Homo Sapiens; identical to SEQ ID NO: 80392
  misc_feature (80)..(114): n is a, c, g, or t

SEQ ID NO: 110832 - DNA, 1140 bp, Homo Sapiens; identical to SEQ ID NO: 80393
  misc_feature (1027)..(1061): n is a, c, g, or t

SEQ ID NO: 110833 - DNA, 1126 bp, Homo Sapiens; identical to SEQ ID NO: 80394

SEQ ID NO: 110834 - DNA, 1591 bp, Homo Sapiens; identical to SEQ ID NO: 80397
  misc_feature (1515)..(1516): n is a, c, g, or t
  misc_feature (1574)..(1574): n is a, c, g, or t

SEQ ID NO: 110835 - DNA, 828 bp, Homo Sapiens; identical to SEQ ID NO: 80398
  misc_feature (690)..(690): n is a, c, g, or t

SEQ ID NO: 110836 - DNA, 797 bp, Homo Sapiens; identical to SEQ ID NO: 80407
  misc_feature (582)..(599): n is a, c, g, or t

SEQ ID NO: 110837 - DNA, 554 bp, Homo Sapiens; identical to SEQ ID NO: 80408

SEQ ID NO: 110838 - DNA, 1033 bp, Homo Sapiens; identical to SEQ ID NO: 80423

SEQ ID NO: 110839 - DNA, 404 bp, Homo Sapiens; identical to SEQ ID NO: 80424
  misc_feature (204)..(213): n is a, c, g, or t

SEQ ID NO: 110840 - DNA, 1038 bp, Homo Sapiens; identical to SEQ ID NO: 80427
  misc_feature (515)..(532): n is a, c, g, or t
  misc_feature (573)..(803): n is a, c, g, or t
  misc_feature (811)..(811): n is a, c, g, or t
  misc_feature (878)..(878): n is a, c, g, or t
  misc_feature (888)..(888): n is a, c, g, or t
  misc_feature (929)..(929): n is a, c, g, or t
  misc_feature (975)..(975): n is a, c, g, or t

SEQ ID NO: 110841 - DNA, 436 bp, Homo Sapiens; identical to SEQ ID NO: 80428
  misc_feature (30)..(30): n is a, c, g, or t
  misc_feature (84)..(84): n is a, c, g, or t

SEQ ID NO: 110842 - DNA, 1053 bp, Homo Sapiens; identical to SEQ ID NO: 80444
  misc_feature (127)..(127): n is a, c, g, or t
  misc_feature (221)..(398): n is a, c, g, or t
  misc_feature (993)..(1011): n is a, c, g, or t

SEQ ID NO: 110843 - DNA, 1002 bp, Homo Sapiens; identical to SEQ ID NO: 80445
  misc_feature (692)..(844): n is a, c, g, or t
  misc_feature (883)..(917): n is a, c, g, or t

SEQ ID NO: 110844 - DNA, 954 bp, Homo Sapiens; identical to SEQ ID NO: 80452

SEQ ID NO: 110845 - DNA, 3342 bp, Homo Sapiens; identical to SEQ ID NO: 80453
  misc_feature (2835)..(2871): n is a, c, g, or t
  misc_feature (3074)..(3076): n is a, c, g, or t
  misc_feature (3078)..(3081): n is a, c, g, or t
  misc_feature (3086)..(3086): n is a, c, g, or t
  misc_feature (3209)..(3210): n is a, c, g, or t
  misc_feature (3265)..(3274): n is a, c, g, or t

SEQ ID NO: 110846 - DNA, 1006 bp, Homo Sapiens; identical to SEQ ID NO: 80461
  misc_feature (205)..(259): n is a, c, g, or t
  misc_feature (679)..(821): n is a, c, g, or t

SEQ ID NO: 110847 - DNA, 1074 bp, Homo Sapiens; identical to SEQ ID NO: 80462
  misc_feature (526)..(536): n is a, c, g, or t

SEQ ID NO: 110848 - DNA, 1499 bp, Homo Sapiens; identical to SEQ ID NO: 80489
  misc_feature (16)..(16): n is a, c, g, or t

SEQ ID NO: 110849 - DNA, 476 bp, Homo Sapiens; identical to SEQ ID NO: 80490
  misc_feature (23)..(23): n is a, c, g, or t

SEQ ID NO: 110850 - DNA, 867 bp, Homo Sapiens; identical to SEQ ID NO: 80491

SEQ ID NO: 110851 - DNA, 556 bp, Homo Sapiens; identical to SEQ ID NO: 80492

SEQ ID NO: 110852 - DNA, 1050 bp, Homo Sapiens; identical to SEQ ID NO: 80493

SEQ ID NO: 110853 - DNA, 1089 bp, Homo Sapiens; identical to SEQ ID NO: 80498
  misc_feature (80)..(80): n is a, c, g, or t
  misc_feature (90)..(90): n is a, c, g, or t
  misc_feature (138)..(138): n is a, c, g, or t
  misc_feature (140)..(140): n is a, c, g, or t
  misc_feature (142)..(142): n is a, c, g, or t
  misc_feature (147)..(526): n is a, c, g, or t

SEQ ID NO: 110854 - DNA, 813 bp, Homo Sapiens; identical to SEQ ID NO: 80499

SEQ ID NO: 110855 - DNA, 1068 bp, Homo Sapiens; identical to SEQ ID NO: 80500
  misc_feature (1002)..(1002): n is a, c, g, or t

SEQ ID NO: 110856 - DNA, 1387 bp, Homo Sapiens; identical to SEQ ID NO: 80501
  misc_feature (88)..(96): n is a, c, g, or t
  misc_feature (1228)..(1228): n is a, c, g, or t

SEQ ID NO: 110857 - DNA, 1006 bp, Homo Sapiens; identical to SEQ ID NO: 80502
  misc_feature (504)..(512): n is a, c, g, or t
  misc_feature (683)..(911): n is a, c, g, or t
  misc_feature (940)..(940): n is a, c, g, or t

SEQ ID NO: 110858 - DNA, 759 bp, Homo Sapiens; identical to SEQ ID NO: 80503
  misc_feature (14)..(14): n is a, c, g, or t
  misc_feature (54)..(55): n is a, c, g, or t

SEQ ID NO: 110859 - DNA, 775 bp, Homo Sapiens; identical to SEQ ID NO: 80504

SEQ ID NO: 110860 - DNA, 811 bp, Homo Sapiens; identical to SEQ ID NO: 80510

SEQ ID NO: 110861 - DNA, 390 bp, Homo Sapiens; identical to SEQ ID NO: 80511
  misc_feature (373)..(373): n is a, c, g, or t

SEQ ID NO: 110862 - DNA, 665 bp, Homo Sapiens; identical to SEQ ID NO: 80534

SEQ ID NO: 110863 - DNA, 478 bp, Homo Sapiens; identical to SEQ ID NO: 80535

SEQ ID NO: 110864 - DNA, 486 bp, Homo Sapiens; identical to SEQ ID NO: 80536

SEQ ID NO: 110865 - DNA, 975 bp, Homo Sapiens; identical to SEQ ID NO: 80538

SEQ ID NO: 110866 - DNA, 1409 bp, Homo Sapiens; identical to SEQ ID NO: 80539
  misc_feature (105)..(105): n is a, c, g, or t
  misc_feature (1316)..(1336): n is a, c, g, or t

SEQ ID NO: 110867 - DNA, 297 bp, Homo Sapiens; identical to SEQ ID NO: 80543

SEQ ID NO: 110868 - DNA, 845 bp, Homo Sapiens; identical to SEQ ID NO: 80544

SEQ ID NO: 110869 - DNA, 847 bp, Homo Sapiens; identical to SEQ ID NO: 80545

SEQ ID NO: 110870 - DNA, 1151 bp, Homo Sapiens; identical to SEQ ID NO: 80568

SEQ ID NO: 110871 - DNA, 1480 bp, Homo Sapiens; identical to SEQ ID NO: 80569
  misc_feature (524)..(571): n is a, c, g, or t
  misc_feature (579)..(600): n is a, c, g, or t
  misc_feature (623)..(661): n is a, c, g, or t
  misc_feature (715)..(725): n is a, c, g, or t
  misc_feature (776)..(793): n is a, c, g, or t
  misc_feature (925)..(938): n is a, c, g, or t
  misc_feature (958)..(958): n is a, c, g, or t
  misc_feature (1056)..(1056): n is a, c, g, or t
  misc_feature (1133)..(1133): n is a, c, g, or t
  misc_feature (1137)..(1137): n is a, c, g, or t
  misc_feature (1259)..(1259): n is a, c, g, or t
  misc_feature (1307)..(1307): n is a, c, g, or t
  misc_feature (1402)..(1402): n is a, c, g, or t

SEQ ID NO: 110872 - DNA, 543 bp, Homo Sapiens; identical to SEQ ID NO: 80570

SEQ ID NO: 110873 - DNA, 804 bp, Homo Sapiens; identical to SEQ ID NO: 80571
  misc_feature (710)..(710): n is a, c, g, or t

SEQ ID NO: 110874 - DNA, 713 bp, Homo Sapiens; identical to SEQ ID NO: 80585
  misc_feature (176)..(329): n is a, c, g, or t

SEQ ID NO: 110875 - DNA, 654 bp, Homo Sapiens; identical to SEQ ID NO: 80586
  misc_feature (470)..(471): n is a, c, g, or t
  misc_feature (474)..(475): n is a, c, g, or t
  misc_feature (477)..(479): n is a, c, g, or t
  misc_feature (481)..(482): n is a, c, g, or t
  misc_feature (489)..(492): n is a, c, g, or t
  misc_feature (541)..(541): n is a, c, g, or t

SEQ ID NO: 110876 - DNA, 603 bp, Homo Sapiens; identical to SEQ ID NO: 80603

SEQ ID NO: 110877 - DNA, 811 bp, Homo Sapiens; identical to SEQ ID NO: 80604

SEQ ID NO: 110878 - DNA, 475 bp, Homo Sapiens; identical to SEQ ID NO: 80605
  misc_feature (31)..(31): n is a, c, g, or t

SEQ ID NO: 110879 - DNA, 364 bp, Homo Sapiens; identical to SEQ ID NO: 80606

SEQ ID NO: 110880 - DNA, 931 bp, Homo Sapiens; identical to SEQ ID NO: 80611
  misc_feature (51)..(51): n is a, c, g, or t

SEQ ID NO: 110881 - DNA, 884 bp, Homo Sapiens; identical to SEQ ID NO: 80612

SEQ ID NO: 110882 - DNA, 1326 bp, Homo Sapiens; identical to SEQ ID NO: 80627

SEQ ID NO: 110883 - DNA, 1337 bp, Homo Sapiens; identical to SEQ ID NO: 80628
  misc_feature (749)..(749): n is a, c, g, or t

SEQ ID NO: 110884 - DNA, 953 bp, Homo Sapiens; identical to SEQ ID NO: 80629
  misc_feature (633)..(633): n is a, c, g, or t
  misc_feature (646)..(646): n is a, c, g, or t
  misc_feature (696)..(696): n is a, c, g, or t
  misc_feature (784)..(784): n is a, c, g, or t

SEQ ID NO: 110885 - DNA, 533 bp, Homo Sapiens; identical to SEQ ID NO: 80641
  misc_feature (465)..(479): n is a, c, g, or t

SEQ ID NO: 110886 - DNA, 1697 bp, Homo Sapiens; identical to SEQ ID NO: 80642
  misc_feature (1148)..(1148): n is a, c, g, or t
  misc_feature (1624)..(1638): n is a, c, g, or t

SEQ ID NO: 110887 - DNA, 682 bp, Homo Sapiens; identical to SEQ ID NO: 80650
  misc_feature (74)..(74): n is a, c, g, or t

SEQ ID NO: 110888 - DNA, 992 bp, Homo Sapiens; identical to SEQ ID NO: 80651

SEQ ID NO: 110889 - DNA, 969 bp, Homo Sapiens; identical to SEQ ID NO: 80652
  misc_feature (864)..(884): n is a, c, g, or t

SEQ ID NO: 110890 - DNA, 1093 bp, Homo Sapiens; identical to SEQ ID NO: 80653
  misc_feature (64)..(115): n is a, c, g, or t
  misc_feature (119)..(153): n is a, c, g, or t

SEQ ID NO: 110891 - DNA, 1208 bp, Homo Sapiens; identical to SEQ ID NO: 80658
  misc_feature (1079)..(1111): n is a, c, g, or t
  misc_feature (1124)..(1124): n is a, c, g, or t

SEQ ID NO: 110892 - DNA, 941 bp, Homo Sapiens; identical to SEQ ID NO: 80659
  misc_feature (446)..(475): n is a, c, g, or t
  misc_feature (841)..(875): n is a, c, g, or t

SEQ ID NO: 110893 - DNA, 1147 bp, Homo Sapiens; identical to SEQ ID NO: 80677
  misc_feature (44)..(78): n is a, c, g, or t

SEQ ID NO: 110894 - DNA, 979 bp, Homo Sapiens; identical to SEQ ID NO: 80678
  misc_feature (866)..(868): n is a, c, g, or t

SEQ ID NO: 110895 - DNA, 1612 bp, Homo Sapiens; identical to SEQ ID NO: 80681
  misc_feature (653)..(653): n is a, c, g, or t
  misc_feature (722)..(722): n is a, c, g, or t

SEQ ID NO: 110896 - DNA, 949 bp, Homo Sapiens; identical to SEQ ID NO: 80682
  misc_feature (851)..(851): n is a, c, g, or t
  misc_feature (877)..(877): n is a, c, g, or t

SEQ ID NO: 110897 - DNA, 627 bp, Homo Sapiens; identical to SEQ ID NO: 80697
  misc_feature (552)..(572): n is a, c, g, or t

SEQ ID NO: 110898 - DNA, 1730 bp, Homo Sapiens; identical to SEQ ID NO: 80698

SEQ ID NO: 110899 - DNA, 984 bp, Homo Sapiens; identical to SEQ ID NO: 80699
  misc_feature (914)..(935): n is a, c, g, or t

SEQ ID NO: 110900 - DNA, 1052 bp, Homo Sapiens; identical to SEQ ID NO: 80700
  misc_feature (107)..(107): n is a, c, g, or t
  misc_feature (135)..(135): n is a, c, g, or t
  misc_feature (158)..(158): n is a, c, g, or t
  misc_feature (171)..(172): n is a, c, g, or t
  misc_feature (176)..(176): n is a, c, g, or t
  misc_feature (262)..(262): n is a, c, g, or t
  misc_feature (289)..(289): n is a, c, g, or t
  misc_feature (336)..(337): n is a, c, g, or t

SEQ ID NO: 110901 - DNA, 791 bp, Homo Sapiens; identical to SEQ ID NO: 80701
  misc_feature (108)..(108): n is a, c, g, or t

SEQ ID NO: 110902 - DNA, 1062 bp, Homo Sapiens; identical to SEQ ID NO: 80704
  misc_feature (64)..(124): n is a, c, g, or t

SEQ ID NO: 110903 - DNA, 962 bp, Homo Sapiens; identical to SEQ ID NO: 80705
  misc_feature (404)..(429): n is a, c, g, or t
  misc_feature (554)..(605): n is a, c, g, or t

SEQ ID NO: 110904 - DNA, 735 bp, Homo Sapiens; identical to SEQ ID NO: 80714
  misc_feature (673)..(673): n is a, c, g, or t

SEQ ID NO: 110905 - DNA, 913 bp, Homo Sapiens; identical to SEQ ID NO: 80715

SEQ ID NO: 110906 - DNA, 978 bp, Homo Sapiens; identical to SEQ ID NO: 80716
  misc_feature (800)..(800): n is a, c, g, or t

SEQ ID NO: 110907 - DNA, 964 bp, Homo Sapiens; identical to SEQ ID NO: 80719

SEQ ID NO: 110908 - DNA, 334 bp, Homo Sapiens; identical to SEQ ID NO: 80720

SEQ ID NO: 110909 - DNA, 1409 bp, Homo Sapiens; identical to SEQ ID NO: 80734
  misc_feature (1096)..(1157): n is a, c, g, or t

SEQ ID NO: 110910 - DNA, 758 bp, Homo Sapiens; identical to SEQ ID NO: 80735
  misc_feature (696)..(713): n is a, c, g, or t

SEQ ID NO: 110911 - DNA, 739 bp, Homo Sapiens; identical to SEQ ID NO: 80739

SEQ ID NO: 110912 - DNA, 999 bp, Homo Sapiens; identical to SEQ ID NO: 80740

SEQ ID NO: 110913 - DNA, 886 bp, Homo Sapiens; identical to SEQ ID NO: 80741
  misc_feature (701)..(701): n is a, c, g, or t
  misc_feature (808)..(808): n is a, c, g, or t

SEQ ID NO: 110914 - DNA, 1025 bp, Homo Sapiens; identical to SEQ ID NO: 80742

SEQ ID NO: 110915 - DNA, 903 bp, Homo Sapiens; identical to SEQ ID NO: 80743

SEQ ID NO: 110916 - DNA, 1933 bp, Homo Sapiens; identical to SEQ ID NO: 80744

SEQ ID NO: 110917 - DNA, 573 bp, Homo Sapiens; identical to SEQ ID NO: 80755
  misc_feature (178)..(201): n is a, c, g, or t

SEQ ID NO: 110918 - DNA, 1152 bp, Homo Sapiens; identical to SEQ ID NO: 80756
  misc_feature (262)..(313): n is a, c, g, or t

SEQ ID NO: 110919 - DNA, 601 bp, Homo Sapiens; identical to SEQ ID NO: 80757
  misc_feature (235)..(258): n is a, c, g, or t
  misc_feature (482)..(482): n is a, c, g, or t
  misc_feature (550)..(550): n is a, c, g, or t

SEQ ID NO: 110920 - DNA, 991 bp, Homo Sapiens; identical to SEQ ID NO: 80759
  misc_feature (783)..(783): n is a, c, g, or t
  misc_feature (787)..(787): n is a, c, g, or t
  misc_feature (800)..(800): n is a, c, g, or t
  misc_feature (893)..(945): n is a, c, g, or t

SEQ ID NO: 110921 - DNA, 508 bp, Homo Sapiens; identical to SEQ ID NO: 80760

SEQ ID NO: 110922 - DNA, 1078 bp, Homo Sapiens; identical to SEQ ID NO: 80775
  misc_feature (421)..(421): n is a, c, g, or t
  misc_feature (697)..(758): n is a, c, g, or t
  misc_feature (821)..(821): n is a, c, g, or t

SEQ ID NO: 110923 - DNA, 447 bp, Homo Sapiens; identical to SEQ ID NO: 80776

SEQ ID NO: 110924 - DNA, 530 bp, Homo Sapiens; identical to SEQ ID NO: 80780

SEQ ID NO: 110925 - DNA, 1515 bp, Homo Sapiens; identical to SEQ ID NO: 3471
  misc_feature (944)..(945): n is a, c, g, or t
  misc_feature (1024)..(1024): n is a, c, g, or t
  misc_feature (1180)..(1180): n is a, c, g, or t
  misc_feature (1205)..(1223): n is a, c, g, or t
  misc_feature (1274)..(1274): n is a, c, g, or t
  misc_feature (1320)..(1320): n is a, c, g, or t
  misc_feature (1325)..(1325): n is a, c, g, or t
  misc_feature (1361)..(1361): n is a, c, g, or t

SEQ ID NO: 110926 - DNA, 925 bp, Homo Sapiens; identical to SEQ ID NO: 80811
  misc_feature (67)..(101): n is a, c, g, or t
  misc_feature (879)..(879): n is a, c, g, or t

SEQ ID NO: 110927 - DNA, 1070 bp, Homo Sapiens; identical to SEQ ID NO: 80812
  misc_feature (44)..(81): n is a, c, g, or t
  misc_feature (84)..(118): n is a, c, g, or t

SEQ ID NO: 110928 - DNA, 209 bp, Homo Sapiens; identical to SEQ ID NO: 80815

SEQ ID NO: 110929 - DNA, 1414 bp, Homo Sapiens; identical to SEQ ID NO: 80816
  misc_feature (859)..(859): n is a, c, g, or t
  misc_feature (1047)..(1047): n is a, c, g, or t
  misc_feature (1058)..(1058): n is a, c, g, or t

SEQ ID NO: 110930 - DNA, 917 bp, Homo Sapiens; identical to SEQ ID NO: 80824
  misc_feature (93)..(93): n is a, c, g, or t
  misc_feature (118)..(118): n is a, c, g, or t

SEQ ID NO: 110931 - DNA, 1553 bp, Homo Sapiens; identical to SEQ ID NO: 80825
  misc_feature (162)..(162): n is a, c, g, or t
  misc_feature (1177)..(1223): n is a, c, g, or t
  misc_feature (1417)..(1427): n is a, c, g, or t

SEQ ID NO: 110932 - DNA, 935 bp, Homo Sapiens; identical to SEQ ID NO: 80826

SEQ ID NO: 110933 - DNA, 912 bp, Homo Sapiens; identical to SEQ ID NO: 80827

SEQ ID NO: 110934 - DNA, 1060 bp, Homo Sapiens; identical to SEQ ID NO: 80831
  misc_feature (893)..(906): n is a, c, g, or t

SEQ ID NO: 110935 - DNA, 482 bp, Homo Sapiens; identical to SEQ ID NO: 80832

SEQ ID NO: 110936 - DNA, 1197 bp, Homo Sapiens; identical to SEQ ID NO: 80843
  misc_feature (446)..(507): n is a, c, g, or t

SEQ ID NO: 110937 - DNA, 941 bp, Homo Sapiens; identical to SEQ ID NO: 80844

SEQ ID NO: 110938 - DNA, 889 bp, Homo Sapiens; identical to SEQ ID NO: 80845

SEQ ID NO: 110939 - DNA, 1921 bp, Homo Sapiens; identical to SEQ ID NO: 80846
  misc_feature (342)..(356): n is a, c, g, or t
  misc_feature (693)..(709): n is a, c, g, or t

SEQ ID NO: 110940 - DNA, 381 bp, Homo Sapiens; identical to SEQ ID NO: 80847

SEQ ID NO: 110941 - DNA, 317 bp, Homo Sapiens; identical to SEQ ID NO: 80848

SEQ ID NO: 110942 - DNA, 371 bp, Homo Sapiens; identical to SEQ ID NO: 80849

SEQ ID NO: 110943 - DNA, 753 bp, Homo Sapiens; identical to SEQ ID NO: 80850

SEQ ID NO: 110944 - DNA, 493 bp, Homo Sapiens; identical to SEQ ID NO: 80851

SEQ ID NO: 110945 - DNA, 480 bp, Homo Sapiens; identical to SEQ ID NO: 80852

SEQ ID NO: 110946 - DNA, 2209 bp, Homo Sapiens; identical to SEQ ID NO: 80853
  misc_feature (102)..(229): n is a, c, g, or t
  misc_feature (543)..(564): n is a, c, g, or t

SEQ ID NO: 110947 - DNA, 774 bp, Homo Sapiens; identical to SEQ ID NO: 80887
  misc_feature (82)..(123): n is a, c, g, or t

SEQ ID NO: 110948 - DNA, 1103 bp, Homo Sapiens; identical to SEQ ID NO: 80888

SEQ ID NO: 110949 - DNA, 1139 bp, Homo Sapiens; identical to SEQ ID NO: 80907

SEQ ID NO: 110950 - DNA, 515 bp, Homo Sapiens; identical to SEQ ID NO: 80908
  misc_feature (25)..(25): n is a, c, g, or t

SEQ ID NO: 110951 - DNA, 969 bp, Homo Sapiens; identical to SEQ ID NO: 80915

SEQ ID NO: 110952 - DNA, 885 bp, Homo Sapiens; identical to SEQ ID NO: 80916

SEQ ID NO: 110953 - DNA, 971 bp, Homo Sapiens; identical to SEQ ID NO: 80917

SEQ ID NO: 110954 - DNA, 963 bp, Homo Sapiens; identical to SEQ ID NO: 80927
  misc_feature (68)..(94): n is a, c, g, or t

SEQ ID NO: 110955 - DNA, 681 bp, Homo Sapiens; identical to SEQ ID NO: 80928
  misc_feature (414)..(440): n is a, c, g, or t
  misc_feature (515)..(578): n is a, c, g, or t

SEQ ID NO: 110956 - DNA, 615 bp, Homo Sapiens; identical to SEQ ID NO: 80929
  misc_feature (575)..(575): n is a, c, g, or t

SEQ ID NO: 110957 - DNA, 2150 bp, Homo Sapiens; identical to SEQ ID NO: 80945
  misc_feature (1720)..(1745): n is a, c, g, or t

SEQ ID NO: 110958 - DNA, 1067 bp, Homo Sapiens; identical to SEQ ID NO: 80946

SEQ ID NO: 110959 - DNA, 893 bp, Homo Sapiens; identical to SEQ ID NO: 80964

SEQ ID NO: 110960 - DNA, 926 bp, Homo Sapiens; identical to SEQ ID NO: 80965

SEQ ID NO: 110961 - DNA, 867 bp, Homo Sapiens; identical to SEQ ID NO: 80971

SEQ ID NO: 110962 - DNA, 1554 bp, Homo Sapiens; identical to SEQ ID NO: 80972

SEQ ID NO: 110963 - DNA, 790 bp, Homo Sapiens; identical to SEQ ID NO: 80982
  misc_feature (67)..(76): n is a, c, g, or t

SEQ ID NO: 110964 - DNA, 1508 bp, Homo Sapiens; identical to SEQ ID NO: 80983

SEQ ID NO: 110965 - DNA, 686 bp, Homo Sapiens; identical to SEQ ID NO: 80985
  misc_feature (43)..(77): n is a, c, g, or t
  misc_feature (396)..(404): n is a, c, g, or t

SEQ ID NO: 110966 - DNA, 825 bp, Homo Sapiens; identical to SEQ ID NO: 80986

SEQ ID NO: 110967 - DNA, 2097 bp, Homo Sapiens; identical to SEQ ID NO: 80997

SEQ ID NO: 110968 - DNA, 442 bp, Homo Sapiens; identical to SEQ ID NO: 80998
  misc_feature (271)..(271): n is a, c, g, or t

SEQ ID NO: 110969 - DNA, 838 bp, Homo Sapiens; identical to SEQ ID NO: 81030
  misc_feature (685)..(685): n is a, c, g, or t
  misc_feature (692)..(692): n is a, c, g, or t

SEQ ID NO: 110970 - DNA, 785 bp, Homo Sapiens; identical to SEQ ID NO: 81031

SEQ ID NO: 110971 - DNA, 974 bp, Homo Sapiens; identical to SEQ ID NO: 81043
  misc_feature (63)..(63): n is a, c, g, or t
  misc_feature (124)..(124): n is a, c, g, or t
  misc_feature (163)..(163): n is a, c, g, or t
  misc_feature (175)..(175): n is a, c, g, or t
  misc_feature (226)..(226): n is a, c, g, or t
  misc_feature (229)..(229): n is a, c, g, or t
  misc_feature (241)..(241): n is a, c, g, or t

SEQ ID NO: 110972 - DNA, 912 bp, Homo Sapiens; identical to SEQ ID NO: 81044

SEQ ID NO: 110973 - DNA, 1141 bp, Homo Sapiens; identical to SEQ ID NO: 81045

SEQ ID NO: 110974 - DNA, 1292 bp, Homo Sapiens; identical to SEQ ID NO: 81061
  misc_feature (272)..(308): n is a, c, g, or t

SEQ ID NO: 110975 - DNA, 794 bp, Homo Sapiens; identical to SEQ ID NO: 81062
  misc_feature (444)..(444): n is a, c, g, or t

SEQ ID NO: 110976 - DNA, 1236 bp, Homo Sapiens; identical to SEQ ID NO: 81063

SEQ ID NO: 110977 - DNA, 1358 bp, Homo Sapiens; identical to SEQ ID NO: 81092

SEQ ID NO: 110978 - DNA, 880 bp, Homo Sapiens; identical to SEQ ID NO: 81093

SEQ ID NO: 110979 - DNA, 995 bp, Homo Sapiens; identical to SEQ ID NO: 81100
  misc_feature (855)..(875): n is a, c, g, or t

SEQ ID NO: 110980 - DNA, 2200 bp, Homo Sapiens; identical to SEQ ID NO: 81101
  misc_feature (989)..(989): n is a, c, g, or t
  misc_feature (1371)..(1379): n is a, c, g, or t
  misc_feature (1530)..(1540): n is a, c, g, or t
  misc_feature (1544)..(1544): n is a, c, g, or t
  misc_feature (1546)..(1547): n is a, c, g, or t
  misc_feature (1549)..(1551): n is a, c, g, or t
  misc_feature (1557)..(1557): n is a, c, g, or t
  misc_feature (1570)..(1571): n is a, c, g, or t
  misc_feature (1584)..(1584): n is a, c, g, or t
  misc_feature (1793)..(1793): n is a, c, g, or t

SEQ ID NO: 110981 - DNA, 730 bp, Homo Sapiens; identical to SEQ ID NO: 81105
  misc_feature (248)..(248): n is a, c, g, or t

SEQ ID NO: 110982 - DNA, 1677 bp, Homo Sapiens; identical to SEQ ID NO: 81106
  misc_feature (811)..(811): n is a, c, g, or t
  misc_feature (1121)..(1121): n is a, c, g, or t

SEQ ID NO: 110983 - DNA, 1037 bp, Homo Sapiens; identical to SEQ ID NO: 81113
  misc_feature (133)..(133): n is a, c, g, or t
  misc_feature (146)..(146): n is a, c, g, or t
  misc_feature (172)..(172): n is a, c, g, or t
  misc_feature (248)..(248): n is a, c, g, or t
  misc_feature (258)..(259): n is a, c, g, or t
  misc_feature (279)..(279): n is a, c, g, or t

SEQ ID NO: 110984 - DNA, 1212 bp, Homo Sapiens; identical to SEQ ID NO: 81114

SEQ ID NO: 110985 - DNA, 488 bp, Homo Sapiens; identical to SEQ ID NO: 81115
  misc_feature (85)..(95): n is a, c, g, or t

SEQ ID NO: 110986 - DNA, 1028 bp, Homo Sapiens; identical to SEQ ID NO: 81116
  misc_feature (656)..(656): n is a, c, g, or t

SEQ ID NO: 110987 - DNA, 498 bp, Homo Sapiens; identical to SEQ ID NO: 81136
  misc_feature (243)..(341): n is a, c, g, or t

SEQ ID NO: 110988 - DNA, 371 bp, Homo Sapiens; identical to SEQ ID NO: 81137
  misc_feature (131)..(166): n is a, c, g, or t
  misc_feature (183)..(215): n is a, c, g, or t

SEQ ID NO: 110989 - DNA, 991 bp, Homo Sapiens; identical to SEQ ID NO: 81139
  misc_feature (55)..(55): n is a, c, g, or t
  misc_feature (72)..(73): n is a, c, g, or t
  misc_feature (75)..(75): n is a, c, g, or t
  misc_feature (83)..(83): n is a, c, g, or t
  misc_feature (127)..(127): n is a, c, g, or t
  misc_feature (137)..(137): n is a, c, g, or t
  misc_feature (139)..(139): n is a, c, g, or t
  misc_feature (143)..(143): n is a, c, g, or t
  misc_feature (177)..(177): n is a, c, g, or t
  misc_feature (206)..(206): n is a, c, g, or t
  misc_feature (212)..(212): n is a, c, g, or t
  misc_feature (232)..(233): n is a, c, g, or t
  misc_feature (259)..(259): n is a, c, g, or t

SEQ ID NO: 110990 - DNA, 483 bp, Homo Sapiens; identical to SEQ ID NO: 81140

SEQ ID NO: 110991 - DNA, 1189 bp, Homo Sapiens; identical to SEQ ID NO: 81151

SEQ ID NO: 110992 - DNA, 993 bp, Homo Sapiens; identical to SEQ ID NO: 81152

SEQ ID NO: 110993 - DNA, 1199 bp, Homo Sapiens; identical to SEQ ID NO: 81169
  misc_feature (519)..(528): n is a, c, g, or t

SEQ ID NO: 110994 - DNA, 2834 bp, Homo Sapiens; identical to SEQ ID NO: 81170
  misc_feature (192)..(237): n is a, c, g, or t

SEQ ID NO: 110995 - DNA, 1441 bp, Homo Sapiens; identical to SEQ ID NO: 81175
  misc_feature (78)..(78): n is a, c, g, or t
  misc_feature (172)..(550): n is a, c, g, or t
  misc_feature (597)..(597): n is a, c, g, or t
  misc_feature (1033)..(1048): n is a, c, g, or t
  misc_feature (1347)..(1355): n is a, c, g, or t

SEQ ID NO: 110996 - DNA, 456 bp, Homo Sapiens; identical to SEQ ID NO: 81176
  misc_feature (30)..(30): n is a, c, g, or t
  misc_feature (51)..(51): n is a, c, g, or t
  misc_feature (61)..(61): n is a, c, g, or t
  misc_feature (366)..(366): n is a, c, g, or t
  misc_feature (371)..(371): n is a, c, g, or t
  misc_feature (374)..(374): n is a, c, g, or t

SEQ ID NO: 110997 - DNA, 1698 bp, Homo Sapiens; identical to SEQ ID NO: 81185

SEQ ID NO: 110998 - DNA, 642 bp, Homo Sapiens; identical to SEQ ID NO: 81186

SEQ ID NO: 110999 - DNA, 570 bp, Homo Sapiens; identical to SEQ ID NO: 81195

SEQ ID NO: 111000 - DNA, 1091 bp, Homo Sapiens; identical to SEQ ID NO: 81196
  misc_feature (955)..(989): n is a, c, g, or t
  misc_feature (992)..(1031): n is a, c, g, or t
  misc_feature (1033)..(1033): n is a, c, g, or t

SEQ ID NO: 111001 - DNA, 930 bp, Homo Sapiens; identical to SEQ ID NO: 81197
  misc_feature (25)..(25): n is a, c, g, or t
  misc_feature (84)..(118): n is a, c, g, or t
  misc_feature (820)..(820): n is a, c, g, or t

SEQ ID NO: 111002 - DNA, 966 bp, Homo Sapiens; identical to SEQ ID NO: 81198
  misc_feature (240)..(248): n is a, c, g, or t
  misc_feature (253)..(253): n is a, c, g, or t

SEQ ID NO: 111003 - DNA, 582 bp, Homo Sapiens; identical to SEQ ID NO: 81206
  misc_feature (159)..(178): n is a, c, g, or t

SEQ ID NO: 111004 - DNA, 452 bp, Homo Sapiens; identical to SEQ ID NO: 81207
  misc_feature (140)..(206): n is a, c, g, or t

SEQ ID NO: 111005 - DNA, 1788 bp, Homo Sapiens; identical to SEQ ID NO: 81208

SEQ ID NO: 111006 - DNA, 1885 bp, Homo Sapiens; identical to SEQ ID NO: 81209
  misc_feature (261)..(311): n is a, c, g, or t
  misc_feature (1427)..(1689): n is a, c, g, or t

SEQ ID NO: 111007 - DNA, 1025 bp, Homo Sapiens; identical to SEQ ID NO: 81210
  misc_feature (427)..(446): n is a, c, g, or t
  misc_feature (578)..(623): n is a, c, g, or t
  misc_feature (748)..(800): n is a, c, g, or t

SEQ ID NO: 111008 - DNA, 446 bp, Homo Sapiens; identical to SEQ ID NO: 81211

SEQ ID NO: 111009 - DNA, 1687 bp, Homo Sapiens; identical to SEQ ID NO: 81218

SEQ ID NO: 111010 - DNA, 987 bp, Homo Sapiens; identical to SEQ ID NO: 81219

SEQ ID NO: 111011 - DNA, 673 bp, Homo Sapiens; identical to SEQ ID NO: 81260

SEQ ID NO: 111012 - DNA, 589 bp, Homo Sapiens; identical to SEQ ID NO: 81261
  misc_feature (74)..(237): n is a, c, g, or t
  misc_feature (507)..(544): n is a, c, g, or t

SEQ ID NO: 111013 - DNA, 631 bp, Homo Sapiens; identical to SEQ ID NO: 81378

SEQ ID NO: 111014 - DNA, 1170 bp, Homo Sapiens; identical to SEQ ID NO: 81379
  misc_feature (62)..(62): n is a, c, g, or t
  misc_feature (278)..(278): n is a, c, g, or t
  misc_feature (328)..(328): n is a, c, g, or t

SEQ ID NO: 111015 - DNA, 663 bp, Homo Sapiens; identical to SEQ ID NO: 81395

SEQ ID NO: 111016 - DNA, 934 bp, Homo Sapiens; identical to SEQ ID NO: 81396
  misc_feature (579)..(598): n is a, c, g, or t

SEQ ID NO: 111017 - DNA, 1738 bp, Homo Sapiens; identical to SEQ ID NO: 81399
  misc_feature (1599)..(1658): n is a, c, g, or t

SEQ ID NO: 111018 - DNA, 459 bp, Homo Sapiens; identical to SEQ ID NO: 81400
  misc_feature (336)..(375): n is a, c, g, or t

SEQ ID NO: 111019 - DNA, 123 bp, Homo Sapiens; identical to SEQ ID NO: 81407

SEQ ID NO: 111020 - DNA, 868 bp, Homo Sapiens; identical to SEQ ID NO: 81408
  misc_feature (669)..(680): n is a, c, g, or t

SEQ ID NO: 111021 - DNA, 1267 bp, Homo Sapiens; identical to SEQ ID NO: 81435
  misc_feature (1001)..(1001): n is a, c, g, or t

SEQ ID NO: 111022 - DNA, 1009 bp, Homo Sapiens; identical to SEQ ID NO: 81436
  misc_feature (25)..(25): n is a, c, g, or t
  misc_feature (610)..(649): n is a, c, g, or t

SEQ ID NO: 111023 - DNA, 916 bp, Homo Sapiens; identical to SEQ ID NO: 81439
  misc_feature (786)..(827): n is a, c, g, or t

SEQ ID NO: 111024 - DNA, 284 bp, Homo Sapiens; identical to SEQ ID NO: 81440
  misc_feature (41)..(41): n is a, c, g, or t
  misc_feature (59)..(59): n is a, c, g, or t

SEQ ID NO: 111025 - DNA, 1157 bp, Homo Sapiens; identical to SEQ ID NO: 81445

SEQ ID NO: 111026 - DNA, 690 bp, Homo Sapiens; identical to SEQ ID NO: 81446
  misc_feature (424)..(440): n is a, c, g, or t

SEQ ID NO: 111027 - DNA, 508 bp, Homo Sapiens; identical to SEQ ID NO: 81448
  misc_feature (130)..(130): n is a, c, g, or t

SEQ ID NO: 111028 - DNA, 1555 bp, Homo Sapiens; identical to SEQ ID NO: 81449
  misc_feature (1303)..(1303): n is a, c, g, or t
  misc_feature (1389)..(1389): n is a, c, g, or t
  misc_feature (1407)..(1408): n is a, c, g, or t
  misc_feature (1502)..(1502): n is a, c, g, or t
  misc_feature (1511)..(1511): n is a, c, g, or t

SEQ ID NO: 111029 - DNA, 1303 bp, Homo Sapiens; identical to SEQ ID NO: 81463
  misc_feature (27)..(27): n is a, c, g, or t
  misc_feature (29)..(29): n is a, c, g, or t
  misc_feature (38)..(38): n is a, c, g, or t
  misc_feature (80)..(80): n is a, c, g, or t
  misc_feature (123)..(123): n is a, c, g, or t
  misc_feature (143)..(143): n is a, c, g, or t
  misc_feature (153)..(154): n is a, c, g, or t
  misc_feature (156)..(574): n is a, c, g, or t
  misc_feature (740)..(748): n is a, c, g, or t

SEQ ID NO: 111030 - DNA, 484 bp, Homo Sapiens; identical to SEQ ID NO: 81464
  misc_feature (44)..(56): n is a, c, g, or t

SEQ ID NO: 111031 - DNA, 1035 bp, Homo Sapiens; identical to SEQ ID NO: 81465

SEQ ID NO: 111032 - DNA, 707 bp, Homo Sapiens; identical to SEQ ID NO: 81466
  misc_feature (277)..(340): n is a, c, g, or t

SEQ ID NO: 111033 - DNA, 1221 bp, Homo Sapiens; identical to SEQ ID NO: 81467
  misc_feature (104)..(104): n is a, c, g, or t
  misc_feature (192)..(202): n is a, c, g, or t
  misc_feature (207)..(207): n is a, c, g, or t
  misc_feature (229)..(229): n is a, c, g, or t
  misc_feature (316)..(316): n is a, c, g, or t
  misc_feature (486)..(486): n is a, c, g, or t
  misc_feature (655)..(655): n is a, c, g, or t
  misc_feature (666)..(692): n is a, c, g, or t
  misc_feature (1029)..(1050): n is a, c, g, or t
  misc_feature (1095)..(1170): n is a, c, g, or t

SEQ ID NO: 111034 - DNA, 545 bp, Homo Sapiens; identical to SEQ ID NO: 81468
  misc_feature (160)..(181): n is a, c, g, or t
  misc_feature (226)..(300): n is a, c, g, or t
  misc_feature (354)..(415): n is a, c, g, or t

SEQ ID NO: 111035 - DNA, 524 bp, Homo Sapiens; identical to SEQ ID NO: 81469
  misc_feature (138)..(159): n is a, c, g, or t
  misc_feature (204)..(279): n is a, c, g, or t
  misc_feature (332)..(393): n is a, c, g, or t

SEQ ID NO: 111036 - DNA, 462 bp, Homo Sapiens; identical to SEQ ID NO: 81470
  misc_feature (328)..(362): n is a, c, g, or t

SEQ ID NO: 111037 - DNA, 369 bp, Homo Sapiens; identical to SEQ ID NO: 81471
  misc_feature (50)..(83): n is a, c, g, or t

SEQ ID NO: 111038 - DNA, 382 bp, Homo Sapiens; identical to SEQ ID NO: 81472
  misc_feature (13)..(13): n is a, c, g, or t

SEQ ID NO: 111039 - DNA, 501 bp, Homo Sapiens; identical to SEQ ID NO: 81473
  misc_feature (116)..(137): n is a, c, g, or t
  misc_feature (182)..(256): n is a, c, g, or t
  misc_feature (310)..(370): n is a, c, g, or t

SEQ ID NO: 111040 - DNA, 388 bp, Homo Sapiens; identical to SEQ ID NO: 81474
  misc_feature (61)..(95): n is a, c, g, or t

SEQ ID NO: 111041 - DNA, 546 bp, Homo Sapiens; identical to SEQ ID NO: 81475
  misc_feature (217)..(302): n is a, c, g, or t
  misc_feature (355)..(416): n is a, c, g, or t

SEQ ID NO: 111042 - DNA, 527 bp, Homo Sapiens; identical to SEQ ID NO: 81476
  misc_feature (146)..(167): n is a, c, g, or t
  misc_feature (203)..(284): n is a, c, g, or t
  misc_feature (340)..(401): n is a, c, g, or t

SEQ ID NO: 111043 - DNA, 1027 bp, Homo Sapiens; identical to SEQ ID NO: 81485
  misc_feature (88)..(88): n is a, c, g, or t
  misc_feature (96)..(96): n is a, c, g, or t
  misc_feature (182)..(183): n is a, c, g, or t
  misc_feature (218)..(218): n is a, c, g, or t
  misc_feature (270)..(271): n is a, c, g, or t
  misc_feature (275)..(275): n is a, c, g, or t
  misc_feature (316)..(316): n is a, c, g, or t

SEQ ID NO: 111044 - DNA, 934 bp, Homo Sapiens; identical to SEQ ID NO: 81486
  misc_feature (902)..(902): n is a, c, g, or t

SEQ ID NO: 111045 - DNA, 2007 bp, Homo Sapiens; identical to SEQ ID NO: 81490
  misc_feature (114)..(114): n is a, c, g, or t
  misc_feature (196)..(196): n is a, c, g, or t
  misc_feature (373)..(373): n is a, c, g, or t
  misc_feature (1153)..(1189): n is a, c, g, or t
  misc_feature (1231)..(1810): n is a, c, g, or t

SEQ ID NO: 111046 - DNA, 1704 bp, Homo Sapiens; identical to SEQ ID NO: 81491

SEQ ID NO: 111047 - DNA, 1104 bp, Homo Sapiens; identical to SEQ ID NO: 81501
  misc_feature (31)..(31): n is a, c, g, or t
  misc_feature (40)..(40): n is a, c, g, or t
  misc_feature (62)..(62): n is a, c, g, or t
  misc_feature (75)..(76): n is a, c, g, or t
  misc_feature (99)..(652): n is a, c, g, or t

SEQ ID NO: 111048 - DNA, 536 bp, Homo Sapiens; identical to SEQ ID NO: 81502

SEQ ID NO: 111049 - DNA, 826 bp, Homo Sapiens; identical to SEQ ID NO: 81503
  misc_feature (61)..(81): n is a, c, g, or t

SEQ ID NO: 111050 - DNA, 865 bp, Homo Sapiens; identical to SEQ ID NO: 81504

SEQ ID NO: 111051 - DNA, 422 bp, Homo Sapiens; identical to SEQ ID NO: 81505
  misc_feature (112)..(125): n is a, c, g, or t
  misc_feature (198)..(210): n is a, c, g, or t

SEQ ID NO: 111052 - DNA, 445 bp, Homo Sapiens; identical to SEQ ID NO: 81506
  misc_feature (185)..(220): n is a, c, g, or t

SEQ ID NO: 111053 - DNA, 390 bp, Homo Sapiens; identical to SEQ ID NO: 81507
  misc_feature (49)..(84): n is a, c, g, or t

SEQ ID NO: 111054 - DNA, 383 bp, Homo Sapiens; identical to SEQ ID NO: 81510

SEQ ID NO: 111055 - DNA, 994 bp, Homo Sapiens; identical to SEQ ID NO: 81511
  misc_feature (513)..(518): n is a, c, g, or t
  misc_feature (521)..(574): n is a, c, g, or t
  misc_feature (859)..(906): n is a, c, g, or t

SEQ ID NO: 111056 - DNA, 1159 bp, Homo Sapiens; identical to SEQ ID NO: 81512
  misc_feature (76)..(110): n is a, c, g, or t

SEQ ID NO: 111057 - DNA, 560 bp, Homo Sapiens; identical to SEQ ID NO: 81513
  misc_feature (260)..(304): n is a, c, g, or t

SEQ ID NO: 111058 - DNA, 1691 bp, Homo Sapiens; identical to SEQ ID NO: 81519
  misc_feature (152)..(152): n is a, c, g, or t
  misc_feature (175)..(606): n is a, c, g, or t

SEQ ID NO: 111059 - DNA, 430 bp, Homo Sapiens; identical to SEQ ID NO: 81520

SEQ ID NO: 111060 - DNA, 1123 bp, Homo Sapiens; identical to SEQ ID NO: 81522
  misc_feature (11)..(11): n is a, c, g, or t
  misc_feature (33)..(33): n is a, c, g, or t
  misc_feature (231)..(231): n is a, c, g, or t
  misc_feature (242)..(242): n is a, c, g, or t
  misc_feature (246)..(246): n is a, c, g, or t
  misc_feature (252)..(252): n is a, c, g, or t
  misc_feature (268)..(268): n is a, c, g, or t
  misc_feature (282)..(282): n is a, c, g, or t
  misc_feature (1033)..(1058): n is a, c, g, or t

SEQ ID NO: 111061 - DNA, 1180 bp, Homo Sapiens; identical to SEQ ID NO: 81523
  misc_feature (1085)..(1115): n is a, c, g, or t

SEQ ID NO: 111062 - DNA, 1038 bp, Homo Sapiens; identical to SEQ ID NO: 81537
  misc_feature (651)..(700): n is a, c, g, or t
  misc_feature (787)..(787): n is a, c, g, or t
  misc_feature (971)..(971): n is a, c, g, or t
  misc_feature (1015)..(1015): n is a, c, g, or t

SEQ ID NO: 111063 - DNA, 868 bp, Homo Sapiens; identical to SEQ ID NO: 81538
  misc_feature (228)..(277): n is a, c, g, or t

SEQ ID NO: 111064 - DNA, 1067 bp, Homo Sapiens; identical to SEQ ID NO: 81540
  misc_feature (174)..(174): n is a, c, g, or t
  misc_feature (216)..(216): n is a, c, g, or t
  misc_feature (270)..(270): n is a, c, g, or t
  misc_feature (275)..(275): n is a, c, g, or t
  misc_feature (290)..(290): n is a, c, g, or t
  misc_feature (341)..(341): n is a, c, g, or t
  misc_feature (982)..(1009): n is a, c, g, or t

SEQ ID NO: 111065 - DNA, 489 bp, Homo Sapiens; identical to SEQ ID NO: 81541

SEQ ID NO: 111066 - DNA, 586 bp, Homo Sapiens; identical to SEQ ID NO: 81542
  misc_feature (62)..(62): n is a, c, g, or t
  misc_feature (105)..(105): n is a, c, g, or t

SEQ ID NO: 111067 - DNA, 799 bp, Homo Sapiens; identical to SEQ ID NO: 81543

SEQ ID NO: 111068 - DNA, 643 bp, Homo Sapiens; identical to SEQ ID NO: 81544

SEQ ID NO: 111069 - DNA, 1403 bp, Homo Sapiens; identical to SEQ ID NO: 81546
  misc_feature (909)..(944): n is a, c, g, or t
  misc_feature (964)..(1312): n is a, c, g, or t
  misc_feature (1353)..(1353): n is a, c, g, or t

SEQ ID NO: 111070 - DNA, 734 bp, Homo Sapiens; identical to SEQ ID NO: 81547

SEQ ID NO: 111071 - DNA, 1054 bp, Homo Sapiens; identical to SEQ ID NO: 81548
  misc_feature (64)..(64): n is a, c, g, or t
  misc_feature (80)..(81): n is a, c, g, or t
  misc_feature (141)..(541): n is a, c, g, or t

SEQ ID NO: 111072 - DNA, 623 bp, Homo Sapiens; identical to SEQ ID NO: 81549

SEQ ID NO: 111073 - DNA, 201 bp, Homo Sapiens; identical to SEQ ID NO: 81552

SEQ ID NO: 111074 - DNA, 1171 bp, Homo Sapiens; identical to SEQ ID NO: 81553
  misc_feature (287)..(323): n is a, c, g, or t
  misc_feature (858)..(897): n is a, c, g, or t

SEQ ID NO: 111075 - DNA, 643 bp, Homo Sapiens; identical to SEQ ID NO: 81561
  misc_feature (78)..(78): n is a, c, g, or t

SEQ ID NO: 111076 - DNA, 633 bp, Homo Sapiens; identical to SEQ ID NO: 81562

SEQ ID NO: 111077 - DNA, 1843 bp, Homo Sapiens; identical to SEQ ID NO: 81566

SEQ ID NO: 111078 - DNA, 891 bp, Homo Sapiens; identical to SEQ ID NO: 81567
  misc_feature (73)..(107): n is a, c, g, or t

SEQ ID NO: 111079 - DNA, 1037 bp, Homo Sapiens; identical to SEQ ID NO: 81572
  misc_feature (694)..(694): n is a, c, g, or t
  misc_feature (718)..(718): n is a, c, g, or t
  misc_feature (754)..(754): n is a, c, g, or t
  misc_feature (777)..(777): n is a, c, g, or t
  misc_feature (779)..(779): n is a, c, g, or t
  misc_feature (790)..(790): n is a, c, g, or t
  misc_feature (798)..(799): n is a, c, g, or t
  misc_feature (855)..(855): n is a, c, g, or t
  misc_feature (857)..(857): n is a, c, g, or t
  misc_feature (882)..(882): n is a, c, g, or t
  misc_feature (890)..(890): n is a, c, g, or t
  misc_feature (974)..(974): n is a, c, g, or t
  misc_feature (976)..(976): n is a, c, g, or t
  misc_feature (1000)..(1000): n is a, c, g, or t
  misc_feature (1010)..(1010): n is a, c, g, or t
  misc_feature (1014)..(1014): n is a, c, g, or t

SEQ ID NO: 111080 - DNA, 310 bp, Homo Sapiens; identical to SEQ ID NO: 81573

SEQ ID NO: 111081 - DNA, 459 bp, Homo Sapiens; identical to SEQ ID NO: 7608

SEQ ID NO: 111082 - DNA, 976 bp, Homo Sapiens; identical to SEQ ID NO: 81578
  misc_feature (118)..(545): n is a, c, g, or t
  misc_feature (566)..(583): n is a, c, g, or t

SEQ ID NO: 111083 - DNA, 1069 bp, Homo Sapiens; identical to SEQ ID NO: 81582
  misc_feature (148)..(345): n is a, c, g, or t
  misc_feature (376)..(512): n is a, c, g, or t

SEQ ID NO: 111084 - DNA, 501 bp, Homo Sapiens; identical to SEQ ID NO: 81583

SEQ ID NO: 111085 - DNA, 1298 bp, Homo Sapiens; identical to SEQ ID NO: 81584
  misc_feature (138)..(306): n is a, c, g, or t
  misc_feature (433)..(604): n is a, c, g, or t

SEQ ID NO: 111086 - DNA, 1038 bp, Homo Sapiens; identical to SEQ ID NO: 81585
  misc_feature (142)..(142): n is a, c, g, or t
  misc_feature (154)..(154): n is a, c, g, or t
  misc_feature (183)..(396): n is a, c, g, or t

SEQ ID NO: 111087 - DNA, 393 bp, Homo Sapiens; identical to SEQ ID NO: 81586

SEQ ID NO: 111088 - DNA, 700 bp, Homo Sapiens; identical to SEQ ID NO: 81587

SEQ ID NO: 111089 - DNA, 1653 bp, Homo Sapiens; identical to SEQ ID NO: 81588

SEQ ID NO: 111090 - DNA, 501 bp, Homo Sapiens; identical to SEQ ID NO: 81604

SEQ ID NO: 111091 - DNA, 1009 bp, Homo Sapiens; identical to SEQ ID NO: 81605

SEQ ID NO: 111092 - DNA, 878 bp, Homo Sapiens; identical to SEQ ID NO: 81612

SEQ ID NO: 111093 - DNA, 525 bp, Homo Sapiens; identical to SEQ ID NO: 81613

SEQ ID NO: 111094 - DNA, 583 bp, Homo Sapiens; identical to SEQ ID NO: 81614

SEQ ID NO: 111095 - DNA, 748 bp, Homo Sapiens; identical to SEQ ID NO: 81616

SEQ ID NO: 111096 - DNA, 1149 bp, Homo Sapiens; identical to SEQ ID NO: 81617

SEQ ID NO: 111097 - DNA, 1008 bp, Homo Sapiens; identical to SEQ ID NO: 81619
  misc_feature (20)..(20): n is a, c, g, or t
  misc_feature (151)..(151): n is a, c, g, or t
  misc_feature (174)..(174): n is a, c, g, or t
  misc_feature (226)..(226): n is a, c, g, or t
  misc_feature (234)..(234): n is a, c, g, or t
  misc_feature (245)..(245): n is a, c, g, or t
  misc_feature (251)..(251): n is a, c, g, or t
  misc_feature (265)..(265): n is a, c, g, or t
  misc_feature (408)..(408): n is a, c, g, or t

SEQ ID NO: 111098 - DNA, 1170 bp, Homo Sapiens; identical to SEQ ID NO: 81620
  misc_feature (187)..(195): n is a, c, g, or t

SEQ ID NO: 111099 - DNA, 266 bp, Homo Sapiens; identical to SEQ ID NO: 81621

SEQ ID NO: 111100 - DNA, 970 bp, Homo Sapiens; identical to SEQ ID NO: 81635
  misc_feature (60)..(60): n is a, c, g, or t
  misc_feature (82)..(116): n is a, c, g, or t

SEQ ID NO: 111101 - DNA, 1512 bp, Homo Sapiens; identical to SEQ ID NO: 81636

SEQ ID NO: 111102 - DNA, 1421 bp, Homo Sapiens; identical to SEQ ID NO: 81647
  misc_feature (69)..(182): n is a, c, g, or t

SEQ ID NO: 111103 - DNA, 1607 bp, Homo Sapiens; identical to SEQ ID NO: 81648

SEQ ID NO: 111104 - DNA, 274 bp, Homo Sapiens; identical to SEQ ID NO: 81649

SEQ ID NO: 111105 - DNA, 1129 bp, Homo Sapiens; identical to SEQ ID NO: 81652
  misc_feature (106)..(106): n is a, c, g, or t
  misc_feature (203)..(266): n is a, c, g, or t
  misc_feature (270)..(271): n is a, c, g, or t
  misc_feature (280)..(281): n is a, c, g, or t
  misc_feature (289)..(289): n is a, c, g, or t
  misc_feature (294)..(294): n is a, c, g, or t
  misc_feature (417)..(417): n is a, c, g, or t
  misc_feature (1057)..(1086): n is a, c, g, or t

SEQ ID NO: 111106 - DNA, 1147 bp, Homo Sapiens; identical to SEQ ID NO: 81653

SEQ ID NO: 111107 - DNA, 1806 bp, Homo Sapiens; identical to SEQ ID NO: 81656

SEQ ID NO: 111108 - DNA, 1107 bp, Homo Sapiens; identical to SEQ ID NO: 81657

SEQ ID NO: 111109 - DNA, 2076 bp, Homo Sapiens; identical to SEQ ID NO: 81661
  misc_feature (71)..(71): n is a, c, g, or t
  misc_feature (116)..(117): n is a, c, g, or t
  misc_feature (121)..(121): n is a, c, g, or t
  misc_feature (129)..(129): n is a, c, g, or t
  misc_feature (1056)..(1166): n is a, c, g, or t
  misc_feature (1171)..(1171): n is a, c, g, or t
  misc_feature (1578)..(1586): n is a, c, g, or t
  misc_feature (1677)..(1677): n is a, c, g, or t
  misc_feature (1707)..(1707): n is a, c, g, or t

SEQ ID NO: 111110 - DNA, 1014 bp, Homo Sapiens; identical to SEQ ID NO: 81662
  misc_feature (97)..(97): n is a, c, g, or t
  misc_feature (103)..(103): n is a, c, g, or t

SEQ ID NO: 111111 - DNA, 1254 bp, Homo Sapiens; identical to SEQ ID NO: 81665
  misc_feature (52)..(81): n is a, c, g, or t
  misc_feature (98)..(106): n is a, c, g, or t
  misc_feature (137)..(158): n is a, c, g, or t
  misc_feature (727)..(764): n is a, c, g, or t
  misc_feature (1147)..(1181): n is a, c, g, or t

SEQ ID NO: 111112 - DNA, 1078 bp, Homo Sapiens; identical to SEQ ID NO: 81666
  misc_feature (438)..(460): n is a, c, g, or t

SEQ ID NO: 111113 - DNA, 617 bp, Homo Sapiens; identical to SEQ ID NO: 81677
  misc_feature (546)..(559): n is a, c, g, or t

SEQ ID NO: 111114 - DNA, 226 bp, Homo Sapiens; identical to SEQ ID NO: 81678

SEQ ID NO: 111115 - DNA, 1011 bp, Homo Sapiens; identical to SEQ ID NO: 81685
  misc_feature (452)..(469): n is a, c, g, or t

SEQ ID NO: 111116 - DNA, 1206 bp, Homo Sapiens; identical to SEQ ID NO: 81686
  misc_feature (1139)..(1139): n is a, c, g, or t
  misc_feature (1165)..(1165): n is a, c, g, or t
  misc_feature (1168)..(1168): n is a, c, g, or t
  misc_feature (1173)..(1173): n is a, c, g, or t
  misc_feature (1190)..(1190): n is a, c, g, or t

SEQ ID NO: 111117 - DNA, 1097 bp, Homo Sapiens; identical to SEQ ID NO: 81687
  misc_feature (169)..(194): n is a, c, g, or t

SEQ ID NO: 111118 - DNA, 1540 bp, Homo Sapiens; identical to SEQ ID NO: 81698

SEQ ID NO: 111119 - DNA, 1164 bp, Homo Sapiens; identical to SEQ ID NO: 81699
  misc_feature (66)..(66): n is a, c, g, or t
  misc_feature (93)..(94): n is a, c, g, or t

SEQ ID NO: 111120 - DNA, 1260 bp, Homo Sapiens; identical to SEQ ID NO: 81706
  misc_feature (130)..(362): n is a, c, g, or t
  misc_feature (435)..(454): n is a, c, g, or t
  misc_feature (481)..(1063): n is a, c, g, or t

SEQ ID NO: 111121 - DNA, 976 bp, Homo Sapiens; identical to SEQ ID NO: 81707
  misc_feature (141)..(141): n is a, c, g, or t
  misc_feature (721)..(820): n is a, c, g, or t
  misc_feature (829)..(889): n is a, c, g, or t
  misc_feature (894)..(904): n is a, c, g, or t

SEQ ID NO: 111122 - DNA, 1980 bp, Homo Sapiens; identical to SEQ ID NO: 81709
  misc_feature (63)..(63): n is a, c, g, or t
  misc_feature (70)..(70): n is a, c, g, or t
  misc_feature (91)..(91): n is a, c, g, or t
  misc_feature (211)..(211): n is a, c, g, or t
  misc_feature (249)..(249): n is a, c, g, or t
  misc_feature (274)..(274): n is a, c, g, or t
  misc_feature (310)..(310): n is a, c, g, or t
  misc_feature (326)..(326): n is a, c, g, or t
  misc_feature (373)..(373): n is a, c, g, or t
  misc_feature (1675)..(1675): n is a, c, g, or t
  misc_feature (1848)..(1848): n is a, c, g, or t

SEQ ID NO: 111123 - DNA, 418 bp, Homo Sapiens; identical to SEQ ID NO: 81710

SEQ ID NO: 111124 - DNA, 1296 bp, Homo Sapiens; identical to SEQ ID NO: 81725
  misc_feature (615)..(632): n is a, c, g, or t
  misc_feature (665)..(1151): n is a, c, g, or t

SEQ ID NO: 111125 - DNA, 1732 bp, Homo Sapiens; identical to SEQ ID NO: 81726

SEQ ID NO: 111126 - DNA, 549 bp, Homo Sapiens; identical to SEQ ID NO: 81732

SEQ ID NO: 111127 - DNA, 1295 bp, Homo Sapiens; identical to SEQ ID NO: 15014
  misc_feature (452)..(587): n is a, c, g, or t
  misc_feature (742)..(804): n is a, c, g, or t
  misc_feature (898)..(908): n is a, c, g, or t
  misc_feature (1215)..(1225): n is a, c, g, or t

SEQ ID NO: 111128 - DNA, 1014 bp, Homo Sapiens; identical to SEQ ID NO: 81740
  misc_feature (887)..(887): n is a, c, g, or t

SEQ ID NO: 111129 - DNA, 379 bp, Homo Sapiens; identical to SEQ ID NO: 81741

SEQ ID NO: 111130 - DNA, 1473 bp, Homo Sapiens; identical to SEQ ID NO: 81746
  misc_feature (45)..(45): n is a, c, g, or t
  misc_feature (93)..(93): n is a, c, g, or t
  misc_feature (106)..(106): n is a, c, g, or t
  misc_feature (187)..(187): n is a, c, g, or t
  misc_feature (196)..(196): n is a, c, g, or t
  misc_feature (238)..(238): n is a, c, g, or t

SEQ ID NO: 111131 - DNA, 1101 bp, Homo Sapiens; identical to SEQ ID NO: 81747

SEQ ID NO: 111132 - DNA, 1491 bp, Homo Sapiens; identical to SEQ ID NO: 81748
  misc_feature (99)..(99): n is a, c, g, or t
  misc_feature (139)..(139): n is a, c, g, or t
  misc_feature (141)..(328): n is a, c, g, or t
  misc_feature (332)..(332): n is a, c, g, or t
  misc_feature (873)..(897): n is a, c, g, or t

SEQ ID NO: 111133 - DNA, 1075 bp, Homo Sapiens; identical to SEQ ID NO: 81749

SEQ ID NO: 111134 - DNA, 855 bp, Homo Sapiens; identical to SEQ ID NO: 81750
  misc_feature (56)..(56): n is a, c, g, or t
  misc_feature (58)..(58): n is a, c, g, or t
  misc_feature (68)..(68): n is a, c, g, or t
  misc_feature (75)..(77): n is a, c, g, or t
  misc_feature (82)..(84): n is a, c, g, or t
  misc_feature (115)..(115): n is a, c, g, or t
  misc_feature (120)..(120): n is a, c, g, or t
  misc_feature (138)..(139): n is a, c, g, or t
  misc_feature (168)..(168): n is a, c, g, or t
  misc_feature (171)..(171): n is a, c, g, or t
  misc_feature (175)..(211): n is a, c, g, or t
  misc_feature (215)..(215): n is a, c, g, or t
  misc_feature (226)..(304): n is a, c, g, or t
  misc_feature (307)..(307): n is a, c, g, or t
  misc_feature (313)..(313): n is a, c, g, or t
  misc_feature (323)..(323): n is a, c, g, or t
  misc_feature (330)..(330): n is a, c, g, or t
  misc_feature (334)..(334): n is a, c, g, or t
  misc_feature (360)..(360): n is a, c, g, or t
  misc_feature (364)..(364): n is a, c, g, or t
  misc_feature (366)..(366): n is a, c, g, or t
  misc_feature (368)..(368): n is a, c, g, or t
  misc_feature (372)..(372): n is a, c, g, or t
  misc_feature (377)..(378): n is a, c, g, or t
  misc_feature (380)..(380): n is a, c, g, or t
  misc_feature (385)..(386): n is a, c, g, or t
  misc_feature (393)..(393): n is a, c, g, or t
  misc_feature (396)..(396): n is a, c, g, or t
  misc_feature (400)..(401): n is a, c, g, or t
  misc_feature (405)..(405): n is a, c, g, or t
  misc_feature (407)..(407): n is a, c, g, or t
  misc_feature (413)..(414): n is a, c, g, or t
  misc_feature (417)..(417): n is a, c, g, or t
  misc_feature (420)..(422): n is a, c, g, or t
  misc_feature (425)..(426): n is a, c, g, or t
  misc_feature (430)..(430): n is a, c, g, or t
  misc_feature (433)..(434): n is a, c, g, or t
  misc_feature (436)..(440): n is a, c, g, or t
  misc_feature (442)..(445): n is a, c, g, or t
  misc_feature (447)..(449): n is a, c, g, or t
  misc_feature (451)..(451): n is a, c, g, or t
  misc_feature (453)..(456): n is a, c, g, or t
  misc_feature (458)..(459): n is a, c, g, or t
  misc_feature (461)..(469): n is a, c, g, or t
  misc_feature (471)..(478): n is a, c, g, or t
  misc_feature (480)..(481): n is a, c, g, or t
  misc_feature (483)..(521): n is a, c, g, or t
  misc_feature (735)..(753): n is a, c, g, or t

SEQ ID NO: 111135 - DNA, 1122 bp, Homo Sapiens; identical to SEQ ID NO: 81751
  misc_feature (525)..(560): n is a, c, g, or t

SEQ ID NO: 111136 - DNA, 861 bp, Homo Sapiens; identical to SEQ ID NO: 81752
  misc_feature (44)..(85): n is a, c, g, or t
  misc_feature (822)..(822): n is a, c, g, or t

SEQ ID NO: 111137 - DNA, 695 bp, Homo Sapiens; identical to SEQ ID NO: 81753
  misc_feature (569)..(607): n is a, c, g, or t

SEQ ID NO: 111138 - DNA, 1607 bp, Homo Sapiens; identical to SEQ ID NO: 81754
  misc_feature (319)..(356): n is a, c, g, or t

SEQ ID NO: 111139 - DNA, 852 bp, Homo Sapiens; identical to SEQ ID NO: 81755

SEQ ID NO: 111140 - DNA, 719 bp, Homo Sapiens; identical to SEQ ID NO: 81768
  misc_feature (161)..(203): n is a, c, g, or t

SEQ ID NO: 111141 - DNA, 883 bp, Homo Sapiens; identical to SEQ ID NO: 81769
  misc_feature (141)..(176): n is a, c, g, or t

SEQ ID NO: 111142 - DNA, 1059 bp, Homo Sapiens; identical to SEQ ID NO: 81778
  misc_feature (732)..(740): n is a, c, g, or t
  misc_feature (969)..(1000): n is a, c, g, or t

SEQ ID NO: 111143 - DNA, 896 bp, Homo Sapiens; identical to SEQ ID NO: 81779

SEQ ID NO: 111144 - DNA, 642 bp, Homo Sapiens; identical to SEQ ID NO: 81789

SEQ ID NO: 111145 - DNA, 1366 bp, Homo Sapiens; identical to SEQ ID NO: 81790

SEQ ID NO: 111146 - DNA, 978 bp, Homo Sapiens; identical to SEQ ID NO: 81795
  misc_feature (210)..(210): n is a, c, g, or t
  misc_feature (231)..(231): n is a, c, g, or t
  misc_feature (320)..(392): n is a, c, g, or t

SEQ ID NO: 111147 - DNA, 875 bp, Homo Sapiens; identical to SEQ ID NO: 81796

SEQ ID NO: 111148 - DNA, 1041 bp, Homo Sapiens; identical to SEQ ID NO: 81802
  misc_feature (133)..(133): n is a, c, g, or t
  misc_feature (175)..(391): n is a, c, g, or t
  misc_feature (859)..(896): n is a, c, g, or t

SEQ ID NO: 111149 - DNA, 619 bp, Homo Sapiens; identical to SEQ ID NO: 81803
  misc_feature (411)..(465): n is a, c, g, or t

SEQ ID NO: 111150 - DNA, 615 bp, Homo Sapiens; identical to SEQ ID NO: 81804

SEQ ID NO: 111151 - DNA, 2492 bp, Homo Sapiens; identical to SEQ ID NO: 81805

SEQ ID NO: 111152 - DNA, 789 bp, Homo Sapiens; identical to SEQ ID NO: 81820
  misc_feature (85)..(119): n is a, c, g, or t
  misc_feature (515)..(682): n is a, c, g, or t

SEQ ID NO: 111153 - DNA, 921 bp, Homo Sapiens; identical to SEQ ID NO: 81821

SEQ ID NO: 111154 - DNA, 1253 bp, Homo Sapiens; identical to SEQ ID NO: 81826

SEQ ID NO: 111155 - DNA, 468 bp, Homo Sapiens; identical to SEQ ID NO: 81827

SEQ ID NO: 111156 - DNA, 558 bp, Homo Sapiens; identical to SEQ ID NO: 81847

SEQ ID NO: 111157 - DNA, 694 bp, Homo Sapiens; identical to SEQ ID NO: 81848
  misc_feature (148)..(158): n is a, c, g, or t
  misc_feature (211)..(211): n is a, c, g, or t

SEQ ID NO: 111158 - DNA, 1000 bp, Homo Sapiens; identical to SEQ ID NO: 81850
  misc_feature (150)..(234): n is a, c, g, or t
  misc_feature (521)..(521): n is a, c, g, or t
  misc_feature (542)..(542): n is a, c, g, or t
  misc_feature (643)..(869): n is a, c, g, or t

SEQ ID NO: 111159 - DNA, 431 bp, Homo Sapiens; identical to SEQ ID NO: 81851
  misc_feature (174)..(273): n is a, c, g, or t

SEQ ID NO: 111160 - DNA, 1247 bp, Homo Sapiens; identical to SEQ ID NO: 81852
  misc_feature (164)..(164): n is a, c, g, or t
  misc_feature (191)..(191): n is a, c, g, or t
  misc_feature (206)..(206): n is a, c, g, or t

SEQ ID NO: 111161 - DNA, 583 bp, Homo Sapiens; identical to SEQ ID NO: 81853

SEQ ID NO: 111162 - DNA, 1045 bp, Homo Sapiens; identical to SEQ ID NO: 81862
  misc_feature (40)..(40): n is a, c, g, or t
  misc_feature (84)..(118): n is a, c, g, or t
  misc_feature (719)..(736): n is a, c, g, or t
  misc_feature (780)..(796): n is a, c, g, or t

SEQ ID NO: 111163 - DNA, 740 bp, Homo Sapiens; identical to SEQ ID NO: 81863
  misc_feature (513)..(547): n is a, c, g, or t
  misc_feature (550)..(557): n is a, c, g, or t
  misc_feature (658)..(658): n is a, c, g, or t

SEQ ID NO: 111164 - DNA, 1008 bp, Homo Sapiens; identical to SEQ ID NO: 15279
  misc_feature (986)..(986): n is a, c, g, or t

SEQ ID NO: 111165 - DNA, 1006 bp, Homo Sapiens; identical to SEQ ID NO: 81865
  misc_feature (915)..(945): n is a, c, g, or t

SEQ ID NO: 111166 - DNA, 1019 bp, Homo Sapiens; identical to SEQ ID NO: 81866
  misc_feature (50)..(50): n is a, c, g, or t
  misc_feature (62)..(63): n is a, c, g, or t
  misc_feature (71)..(71): n is a, c, g, or t
  misc_feature (169)..(169): n is a, c, g, or t
  misc_feature (255)..(256): n is a, c, g, or t

SEQ ID NO: 111167 - DNA, 1392 bp, Homo Sapiens; identical to SEQ ID NO: 81867
  misc_feature (928)..(973): n is a, c, g, or t

SEQ ID NO: 111168 - DNA, 1103 bp, Homo Sapiens; identical to SEQ ID NO: 81875
  misc_feature (74)..(92): n is a, c, g, or t

SEQ ID NO: 111169 - DNA, 458 bp, Homo Sapiens; identical to SEQ ID NO: 81876
  misc_feature (227)..(238): n is a, c, g, or t

SEQ ID NO: 111170 - DNA, 1200 bp, Homo Sapiens; identical to SEQ ID NO: 81884
  misc_feature (1016)..(1024): n is a, c, g, or t
  misc_feature (1030)..(1114): n is a, c, g, or t

SEQ ID NO: 111171 - DNA, 1960 bp, Homo Sapiens; identical to SEQ ID NO: 81885

SEQ ID NO: 111172 - DNA, 424 bp, Homo Sapiens; identical to SEQ ID NO: 81890

SEQ ID NO: 111173 - DNA, 1015 bp, Homo Sapiens; identical to SEQ ID NO: 81891

SEQ ID NO: 111174 - DNA, 1061 bp, Homo Sapiens; identical to SEQ ID NO: 81894
  misc_feature (32)..(32): n is a, c, g, or t
  misc_feature (38)..(38): n is a, c, g, or t
  misc_feature (49)..(49): n is a, c, g, or t
  misc_feature (75)..(75): n is a, c, g, or t
  misc_feature (88)..(88): n is a, c, g, or t
  misc_feature (90)..(90): n is a, c, g, or t
  misc_feature (96)..(96): n is a, c, g, or t
  misc_feature (101)..(101): n is a, c, g, or t
  misc_feature (113)..(113): n is a, c, g, or t
  misc_feature (131)..(131): n is a, c, g, or t
  misc_feature (166)..(166): n is a, c, g, or t
  misc_feature (318)..(318): n is a, c, g, or t
  misc_feature (347)..(347): n is a, c, g, or t

SEQ ID NO: 111175 - DNA, 452 bp, Homo Sapiens; identical to SEQ ID NO: 81895

SEQ ID NO: 111176 - DNA, 1026 bp, Homo Sapiens; identical to SEQ ID NO: 81896
  misc_feature (55)..(55): n is a, c, g, or t
  misc_feature (133)..(133): n is a, c, g, or t
  misc_feature (159)..(340): n is a, c, g, or t

SEQ ID NO: 111177 - DNA, 909 bp, Homo Sapiens; identical to SEQ ID NO: 81897

SEQ ID NO: 111178 - DNA, 1084 bp, Homo Sapiens; identical to SEQ ID NO: 81922
  misc_feature (86)..(100): n is a, c, g, or t
  misc_feature (759)..(759): n is a, c, g, or t
  misc_feature (780)..(780): n is a, c, g, or t
  misc_feature (852)..(853): n is a, c, g, or t
  misc_feature (871)..(871): n is a, c, g, or t
  misc_feature (898)..(898): n is a, c, g, or t

SEQ ID NO: 111179 - DNA, 741 bp, Homo Sapiens; identical to SEQ ID NO: 81923
  misc_feature (43)..(43): n is a, c, g, or t

SEQ ID NO: 111180 - DNA, 1092 bp, Homo Sapiens; identical to SEQ ID NO: 81924

SEQ ID NO: 111181 - DNA, 1001 bp, Homo Sapiens; identical to SEQ ID NO: 81952
  misc_feature (46)..(46): n is a, c, g, or t
  misc_feature (153)..(154): n is a, c, g, or t
  misc_feature (214)..(214): n is a, c, g, or t
  misc_feature (227)..(227): n is a, c, g, or t
  misc_feature (294)..(294): n is a, c, g, or t
  misc_feature (302)..(302): n is a, c, g, or t
  misc_feature (360)..(360): n is a, c, g, or t
  misc_feature (490)..(490): n is a, c, g, or t

SEQ ID NO: 111182 - DNA, 546 bp, Homo Sapiens; identical to SEQ ID NO: 81953

SEQ ID NO: 111183 - DNA, 752 bp, Homo Sapiens; identical to SEQ ID NO: 81959
  misc_feature (597)..(597): n is a, c, g, or t

SEQ ID NO: 111184 - DNA, 958 bp, Homo Sapiens; identical to SEQ ID NO: 81960

SEQ ID NO: 111185 - DNA, 679 bp, Homo Sapiens; identical to SEQ ID NO: 81968

SEQ ID NO: 111186 - DNA, 814 bp, Homo Sapiens; identical to SEQ ID NO: 81969
  misc_feature (605)..(605): n is a, c, g, or t
  misc_feature (609)..(609): n is a, c, g, or t
  misc_feature (611)..(617): n is a, c, g, or t
  misc_feature (619)..(625): n is a, c, g, or t
  misc_feature (630)..(632): n is a, c, g, or t

SEQ ID NO: 111187 - DNA, 1099 bp, Homo Sapiens; identical to SEQ ID NO: 81970
  misc_feature (612)..(624): n is a, c, g, or t
  misc_feature (626)..(635): n is a, c, g, or t
  misc_feature (673)..(683): n is a, c, g, or t
  misc_feature (714)..(723): n is a, c, g, or t
  misc_feature (832)..(860): n is a, c, g, or t

SEQ ID NO: 111188 - DNA, 1206 bp, Homo Sapiens; identical to SEQ ID NO: 81981
  misc_feature (214)..(223): n is a, c, g, or t
  misc_feature (646)..(646): n is a, c, g, or t
  misc_feature (780)..(780): n is a, c, g, or t
  misc_feature (789)..(995): n is a, c, g, or t
  misc_feature (997)..(997): n is a, c, g, or t

SEQ ID NO: 111189 - DNA, 556 bp, Homo Sapiens; identical to SEQ ID NO: 81982

SEQ ID NO: 111190 - DNA, 1012 bp, Homo Sapiens; identical to SEQ ID NO: 81986
  misc_feature (29)..(30): n is a, c, g, or t
  misc_feature (262)..(262): n is a, c, g, or t
  misc_feature (293)..(294): n is a, c, g, or t
  misc_feature (306)..(306): n is a, c, g, or t
  misc_feature (313)..(313): n is a, c, g, or t

SEQ ID NO: 111191 - DNA, 1233 bp, Homo Sapiens; identical to SEQ ID NO: 81987

SEQ ID NO: 111192 - DNA, 1120 bp, Homo Sapiens; identical to SEQ ID NO: 81990
  misc_feature (62)..(62): n is a, c, g, or t
  misc_feature (71)..(450): n is a, c, g, or t
  misc_feature (492)..(509): n is a, c, g, or t
  misc_feature (890)..(890): n is a, c, g, or t

SEQ ID NO: 111193 - DNA, 985 bp, Homo Sapiens; identical to SEQ ID NO: 81991

SEQ ID NO: 111194 - DNA, 1055 bp, Homo Sapiens; identical to SEQ ID NO: 82003
  misc_feature (117)..(117): n is a, c, g, or t
  misc_feature (181)..(181): n is a, c, g, or t
  misc_feature (183)..(183): n is a, c, g, or t
  misc_feature (201)..(201): n is a, c, g, or t
  misc_feature (228)..(228): n is a, c, g, or t
  misc_feature (232)..(232): n is a, c, g, or t
  misc_feature (567)..(598): n is a, c, g, or t
  misc_feature (976)..(995): n is a, c, g, or t

SEQ ID NO: 111195 - DNA, 662 bp, Homo Sapiens; identical to SEQ ID NO: 82004
  misc_feature (99)..(131): n is a, c, g, or t

SEQ ID NO: 111196 - DNA, 1007 bp, Homo Sapiens; identical to SEQ ID NO: 82012
  misc_feature (133)..(133): n is a, c, g, or t
  misc_feature (135)..(343): n is a, c, g, or t

SEQ ID NO: 111197 - DNA, 1151 bp, Homo Sapiens; identical to SEQ ID NO: 82013
  misc_feature (401)..(430): n is a, c, g, or t
  misc_feature (633)..(647): n is a, c, g, or t
  misc_feature (882)..(882): n is a, c, g, or t
  misc_feature (945)..(945): n is a, c, g, or t
  misc_feature (947)..(947): n is a, c, g, or t
  misc_feature (956)..(956): n is a, c, g, or t
  misc_feature (969)..(969): n is a, c, g, or t
  misc_feature (971)..(971): n is a, c, g, or t
  misc_feature (973)..(981): n is a, c, g, or t

SEQ ID NO: 111198 - DNA, 1707 bp, Homo Sapiens; identical to SEQ ID NO: 82015

SEQ ID NO: 111199 - DNA, 1011 bp, Homo Sapiens; identical to SEQ ID NO: 82016

SEQ ID NO: 111200 - DNA, 1298 bp, Homo Sapiens; identical to SEQ ID NO: 82018
  misc_feature (113)..(223): n is a, c, g, or t
  misc_feature (819)..(932): n is a, c, g, or t
  misc_feature (964)..(984): n is a, c, g, or t
  misc_feature (1028)..(1066): n is a, c, g, or t
  misc_feature (1220)..(1220): n is a, c, g, or t

SEQ ID NO: 111201 - DNA, 570 bp, Homo Sapiens; identical to SEQ ID NO: 82019
  misc_feature (216)..(271): n is a, c, g, or t

SEQ ID NO: 111202 - DNA, 926 bp, Homo Sapiens; identical to SEQ ID NO: 82020
  misc_feature (97)..(110): n is a, c, g, or t
  misc_feature (129)..(246): n is a, c, g, or t
  misc_feature (253)..(375): n is a, c, g, or t
  misc_feature (720)..(775): n is a, c, g, or t

SEQ ID NO: 111203 - DNA, 661 bp, Homo Sapiens; identical to SEQ ID NO: 82024
  misc_feature (14)..(14): n is a, c, g, or t

SEQ ID NO: 111204 - DNA, 1184 bp, Homo Sapiens; identical to SEQ ID NO: 82025
  misc_feature (113)..(113): n is a, c, g, or t
  misc_feature (242)..(242): n is a, c, g, or t

SEQ ID NO: 111205 - DNA, 1476 bp, Homo Sapiens; identical to SEQ ID NO: 82026

SEQ ID NO: 111206 - DNA, 387 bp, Homo Sapiens; identical to SEQ ID NO: 82030

SEQ ID NO: 111207 - DNA, 1087 bp, Homo Sapiens; identical to SEQ ID NO: 82031

SEQ ID NO: 111208 - DNA, 1629 bp, Homo Sapiens; identical to SEQ ID NO: 82047
  misc_feature (42)..(84): n is a, c, g, or t
  misc_feature (88)..(122): n is a, c, g, or t
  misc_feature (1031)..(1055): n is a, c, g, or t
  misc_feature (1466)..(1474): n is a, c, g, or t
  misc_feature (1520)..(1520): n is a, c, g, or t
  misc_feature (1589)..(1589): n is a, c, g, or t

SEQ ID NO: 111209 - DNA, 827 bp, Homo Sapiens; identical to SEQ ID NO: 82048
  misc_feature (689)..(717): n is a, c, g, or t

SEQ ID NO: 111210 - DNA, 1822 bp, Homo Sapiens; identical to SEQ ID NO: 82056
  misc_feature (31)..(31): n is a, c, g, or t
  misc_feature (47)..(47): n is a, c, g, or t
  misc_feature (66)..(67): n is a, c, g, or t
  misc_feature (82)..(82): n is a, c, g, or t
  misc_feature (95)..(95): n is a, c, g, or t
  misc_feature (99)..(99): n is a, c, g, or t
  misc_feature (156)..(156): n is a, c, g, or t
  misc_feature (175)..(175): n is a, c, g, or t
  misc_feature (186)..(186): n is a, c, g, or t
  misc_feature (191)..(191): n is a, c, g, or t
  misc_feature (216)..(216): n is a, c, g, or t
  misc_feature (224)..(224): n is a, c, g, or t
  misc_feature (239)..(239): n is a, c, g, or t
  misc_feature (250)..(250): n is a, c, g, or t
  misc_feature (285)..(285): n is a, c, g, or t
  misc_feature (289)..(289): n is a, c, g, or t
  misc_feature (296)..(296): n is a, c, g, or t
  misc_feature (303)..(303): n is a, c, g, or t
  misc_feature (1056)..(1070): n is a, c, g, or t
  misc_feature (1103)..(1752): n is a, c, g, or t

SEQ ID NO: 111211 - DNA, 1289 bp, Homo Sapiens; identical to SEQ ID NO: 82057
  misc_feature (179)..(179): n is a, c, g, or t
  misc_feature (231)..(231): n is a, c, g, or t
  misc_feature (281)..(281): n is a, c, g, or t
  misc_feature (291)..(291): n is a, c, g, or t
  misc_feature (293)..(293): n is a, c, g, or t
  misc_feature (331)..(331): n is a, c, g, or t

SEQ ID NO: 111212 - DNA, 2329 bp, Homo Sapiens; identical to SEQ ID NO: 82059
  misc_feature (49)..(83): n is a, c, g, or t
  misc_feature (685)..(685): n is a, c, g, or t
  misc_feature (976)..(997): n is a, c, g, or t

SEQ ID NO: 111213 - DNA, 1028 bp, Homo Sapiens; identical to SEQ ID NO: 82060
  misc_feature (91)..(91): n is a, c, g, or t
  misc_feature (133)..(133): n is a, c, g, or t
  misc_feature (216)..(237): n is a, c, g, or t
  misc_feature (243)..(243): n is a, c, g, or t
  misc_feature (526)..(589): n is a, c, g, or t

SEQ ID NO: 111214 - DNA, 1203 bp, Homo Sapiens; identical to SEQ ID NO: 82061
  misc_feature (24)..(24): n is a, c, g, or t
  misc_feature (35)..(35): n is a, c, g, or t
  misc_feature (63)..(63): n is a, c, g, or t
  misc_feature (72)..(72): n is a, c, g, or t
  misc_feature (81)..(81): n is a, c, g, or t
  misc_feature (96)..(96): n is a, c, g, or t
  misc_feature (260)..(260): n is a, c, g, or t
  misc_feature (671)..(671): n is a, c, g, or t
  misc_feature (842)..(872): n is a, c, g, or t
  misc_feature (1038)..(1049): n is a, c, g, or t

SEQ ID NO: 111215 - DNA, 917 bp, Homo Sapiens; identical to SEQ ID NO: 82062
  misc_feature (39)..(39): n is a, c, g, or t
  misc_feature (56)..(58): n is a, c, g, or t
  misc_feature (227)..(227): n is a, c, g, or t
  misc_feature (242)..(242): n is a, c, g, or t
  misc_feature (651)..(662): n is a, c, g, or t
  misc_feature (831)..(861): n is a, c, g, or t

SEQ ID NO: 111216 - DNA, 443 bp, Homo Sapiens; identical to SEQ ID NO: 82065
  misc_feature (352)..(352): n is a, c, g, or t

SEQ ID NO: 111217 - DNA, 951 bp, Homo Sapiens; identical to SEQ ID NO: 82066
  misc_feature (135)..(146): n is a, c, g, or t

SEQ ID NO: 111218 - DNA, 1644 bp, Homo Sapiens; identical to SEQ ID NO: 82076

SEQ ID NO: 111219 - DNA, 780 bp, Homo Sapiens; identical to SEQ ID NO: 82077

SEQ ID NO: 111220 - DNA, 997 bp, Homo Sapiens; identical to SEQ ID NO: 82094
  misc_feature (38)..(38): n is a, c, g, or t
  misc_feature (108)..(108): n is a, c, g, or t
  misc_feature (129)..(129): n is a, c, g, or t
  misc_feature (158)..(158): n is a, c, g, or t
  misc_feature (161)..(161): n is a, c, g, or t
  misc_feature (219)..(219): n is a, c, g, or t
  misc_feature (312)..(312): n is a, c, g, or t

SEQ ID NO: 111221 - DNA, 1153 bp, Homo Sapiens; identical to SEQ ID NO: 82095

SEQ ID NO: 111222 - DNA, 1005 bp, Homo Sapiens; identical to SEQ ID NO: 82101
  misc_feature (98)..(154): n is a, c, g, or t
  misc_feature (173)..(173): n is a, c, g, or t

SEQ ID NO: 111223 - DNA, 887 bp, Homo Sapiens; identical to SEQ ID NO: 82102
  misc_feature (37)..(37): n is a, c, g, or t

SEQ ID NO: 111224 - DNA, 1000 bp, Homo Sapiens; identical to SEQ ID NO: 82103

SEQ ID NO: 111225 - DNA, 592 bp, Homo Sapiens; identical to SEQ ID NO: 82104
  misc_feature (83)..(83): n is a, c, g, or t
  misc_feature (91)..(91): n is a, c, g, or t
  misc_feature (103)..(103): n is a, c, g, or t
  misc_feature (115)..(115): n is a, c, g, or t
  misc_feature (128)..(128): n is a, c, g, or t

SEQ ID NO: 111226 - DNA, 2032 bp, Homo Sapiens; identical to SEQ ID NO: 82113
  misc_feature (75)..(109): n is a, c, g, or t

SEQ ID NO: 111227 - DNA, 324 bp, Homo Sapiens; identical to SEQ ID NO: 82114

SEQ ID NO: 111228 - DNA, 961 bp, Homo Sapiens; identical to SEQ ID NO: 82117
  misc_feature (235)..(235): n is a, c, g, or t
  misc_feature (275)..(277): n is a, c, g, or t
  misc_feature (286)..(287): n is a, c, g, or t
  misc_feature (296)..(296): n is a, c, g, or t

SEQ ID NO: 111229 - DNA, 429 bp, Homo Sapiens; identical to SEQ ID NO: 82118

SEQ ID NO: 111230 - DNA, 504 bp, Homo Sapiens; identical to SEQ ID NO: 82119

SEQ ID NO: 111231 - DNA, 1031 bp, Homo Sapiens; identical to SEQ ID NO: 82124
  misc_feature (22)..(22): n is a, c, g, or t
  misc_feature (24)..(24): n is a, c, g, or t
  misc_feature (38)..(38): n is a, c, g, or t
  misc_feature (46)..(46): n is a, c, g, or t
  misc_feature (99)..(99): n is a, c, g, or t

SEQ ID NO: 111232 - DNA, 1084 bp, Homo Sapiens; identical to SEQ ID NO: 82125
  misc_feature (984)..(984): n is a, c, g, or t

SEQ ID NO: 111233 - DNA, 734 bp, Homo Sapiens; identical to SEQ ID NO: 82128
  misc_feature (510)..(510): n is a, c, g, or t
  misc_feature (513)..(513): n is a, c, g, or t
  misc_feature (539)..(539): n is a, c, g, or t
  misc_feature (561)..(561): n is a, c, g, or t
  misc_feature (572)..(572): n is a, c, g, or t
  misc_feature (600)..(600): n is a, c, g, or t
  misc_feature (666)..(666): n is a, c, g, or t

SEQ ID NO: 111234 - DNA, 644 bp, Homo Sapiens; identical to SEQ ID NO: 82129

SEQ ID NO: 111235 - DNA, 852 bp, Homo Sapiens; identical to SEQ ID NO: 82130
  misc_feature (439)..(565): n is a, c, g, or t

SEQ ID NO: 111236 - DNA, 1005 bp, Homo Sapiens; identical to SEQ ID NO: 82133
  misc_feature (110)..(110): n is a, c, g, or t
  misc_feature (164)..(164): n is a, c, g, or t
  misc_feature (182)..(182): n is a, c, g, or t
  misc_feature (191)..(191): n is a, c, g, or t
  misc_feature (212)..(212): n is a, c, g, or t
  misc_feature (216)..(216): n is a, c, g, or t
  misc_feature (225)..(225): n is a, c, g, or t
  misc_feature (228)..(228): n is a, c, g, or t
  misc_feature (237)..(237): n is a, c, g, or t
  misc_feature (294)..(294): n is a, c, g, or t
  misc_feature (316)..(316): n is a, c, g, or t
  misc_feature (322)..(322): n is a, c, g, or t
  misc_feature (590)..(590): n is a, c, g, or t
  misc_feature (943)..(943): n is a, c, g, or t
  misc_feature (946)..(946): n is a, c, g, or t

SEQ ID NO: 111237 - DNA, 979 bp, Homo Sapiens; identical to SEQ ID NO: 82134
  misc_feature (53)..(68): n is a, c, g, or t

SEQ ID NO: 111238 - DNA, 1690 bp, Homo Sapiens; identical to SEQ ID NO: 82137
  misc_feature (219)..(667): n is a, c, g, or t
  misc_feature (723)..(785): n is a, c, g, or t
  misc_feature (1103)..(1127): n is a, c, g, or t
  misc_feature (1328)..(1385): n is a, c, g, or t

SEQ ID NO: 111239 - DNA, 400 bp, Homo Sapiens; identical to SEQ ID NO: 82138
  misc_feature (50)..(74): n is a, c, g, or t

SEQ ID NO: 111240 - DNA, 532 bp, Homo Sapiens; identical to SEQ ID NO: 82145

SEQ ID NO: 111241 - DNA, 1285 bp, Homo Sapiens; identical to SEQ ID NO: 82146

SEQ ID NO: 111242 - DNA, 984 bp, Homo Sapiens; identical to SEQ ID NO: 82149
  misc_feature (117)..(117): n is a, c, g, or t
  misc_feature (137)..(137): n is a, c, g, or t
  misc_feature (228)..(228): n is a, c, g, or t
  misc_feature (239)..(239): n is a, c, g, or t
  misc_feature (244)..(244): n is a, c, g, or t
  misc_feature (467)..(483): n is a, c, g, or t

SEQ ID NO: 111243 - DNA, 651 bp, Homo Sapiens; identical to SEQ ID NO: 82150
  misc_feature (130)..(157): n is a, c, g, or t
  misc_feature (537)..(537): n is a, c, g, or t

SEQ ID NO: 111244 - DNA, 1387 bp, Homo Sapiens; identical to SEQ ID NO: 82151
  misc_feature (323)..(338): n is a, c, g, or t
  misc_feature (578)..(606): n is a, c, g, or t
  misc_feature (858)..(858): n is a, c, g, or t
  misc_feature (860)..(885): n is a, c, g, or t
  misc_feature (941)..(1316): n is a, c, g, or t
  misc_feature (1320)..(1320): n is a, c, g, or t
  misc_feature (1342)..(1342): n is a, c, g, or t

SEQ ID NO: 111245 - DNA, 391 bp, Homo Sapiens; identical to SEQ ID NO: 82152

SEQ ID NO: 111246 - DNA, 1289 bp, Homo Sapiens; identical to SEQ ID NO: 82155
  misc_feature (30)..(30): n is a, c, g, or t
  misc_feature (47)..(47): n is a, c, g, or t
  misc_feature (244)..(244): n is a, c, g, or t

SEQ ID NO: 111247 - DNA, 507 bp, Homo Sapiens; identical to SEQ ID NO: 82156

SEQ ID NO: 111248 - DNA, 1558 bp, Homo Sapiens; identical to SEQ ID NO: 82173
  misc_feature (1447)..(1478): n is a, c, g, or t

SEQ ID NO: 111249 - DNA, 578 bp, Homo Sapiens; identical to SEQ ID NO: 82174

SEQ ID NO: 111250 - DNA, 763 bp, Homo Sapiens; identical to SEQ ID NO: 82177
  misc_feature (164)..(204): n is a, c, g, or t

SEQ ID NO: 111251 - DNA, 469 bp, Homo Sapiens; identical to SEQ ID NO: 82178
  misc_feature (334)..(334): n is a, c, g, or t

SEQ ID NO: 111252 - DNA, 424 bp, Homo Sapiens; identical to SEQ ID NO: 82189
  misc_feature (28)..(28): n is a, c, g, or t

SEQ ID NO: 111253 - DNA, 1057 bp, Homo Sapiens; identical to SEQ ID NO: 82190
  misc_feature (929)..(952): n is a, c, g, or t

SEQ ID NO: 111254 - DNA, 1239 bp, Homo Sapiens; identical to SEQ ID NO: 82191
  misc_feature (35)..(35): n is a, c, g, or t
  misc_feature (47)..(47): n is a, c, g, or t
  misc_feature (193)..(193): n is a, c, g, or t
  misc_feature (214)..(214): n is a, c, g, or t
  misc_feature (247)..(247): n is a, c, g, or t
  misc_feature (283)..(284): n is a, c, g, or t
  misc_feature (365)..(365): n is a, c, g, or t

SEQ ID NO: 111255 - DNA, 1129 bp, Homo Sapiens; identical to SEQ ID NO: 82192
  misc_feature (16)..(16): n is a, c, g, or t
  misc_feature (85)..(119): n is a, c, g, or t

SEQ ID NO: 111256 - DNA, 1022 bp, Homo Sapiens; identical to SEQ ID NO: 82202
  misc_feature (29)..(29): n is a, c, g, or t
  misc_feature (52)..(53): n is a, c, g, or t
  misc_feature (60)..(60): n is a, c, g, or t
  misc_feature (71)..(71): n is a, c, g, or t
  misc_feature (92)..(477): n is a, c, g, or t

SEQ ID NO: 111257 - DNA, 734 bp, Homo Sapiens; identical to SEQ ID NO: 82203

SEQ ID NO: 111258 - DNA, 960 bp, Homo Sapiens; identical to SEQ ID NO: 82209

SEQ ID NO: 111259 - DNA, 728 bp, Homo Sapiens; identical to SEQ ID NO: 82210

SEQ ID NO: 111260 - DNA, 1183 bp, Homo Sapiens; identical to SEQ ID NO: 82224
  misc_feature (880)..(888): n is a, c, g, or t
  misc_feature (950)..(1027): n is a, c, g, or t
  misc_feature (1051)..(1059): n is a, c, g, or t

SEQ ID NO: 111261 - DNA, 871 bp, Homo Sapiens; identical to SEQ ID NO: 82225

SEQ ID NO: 111262 - DNA, 1021 bp, Homo Sapiens; identical to SEQ ID NO: 82241
  misc_feature (120)..(120): n is a, c, g, or t
  misc_feature (152)..(152): n is a, c, g, or t
  misc_feature (156)..(156): n is a, c, g, or t
  misc_feature (166)..(166): n is a, c, g, or t
  misc_feature (175)..(175): n is a, c, g, or t
  misc_feature (191)..(192): n is a, c, g, or t
  misc_feature (212)..(212): n is a, c, g, or t
  misc_feature (225)..(225): n is a, c, g, or t
  misc_feature (241)..(241): n is a, c, g, or t
  misc_feature (407)..(407): n is a, c, g, or t

SEQ ID NO: 111263 - DNA, 621 bp, Homo Sapiens; identical to SEQ ID NO: 82242
  misc_feature (595)..(595): n is a, c, g, or t

SEQ ID NO: 111264 - DNA, 983 bp, Homo Sapiens; identical to SEQ ID NO: 82243

SEQ ID NO: 111265 - DNA, 1044 bp, Homo Sapiens; identical to SEQ ID NO: 82247
  misc_feature (50)..(50): n is a, c, g, or t
  misc_feature (85)..(85): n is a, c, g, or t
  misc_feature (90)..(90): n is a, c, g, or t
  misc_feature (95)..(95): n is a, c, g, or t
  misc_feature (98)..(98): n is a, c, g, or t
  misc_feature (107)..(107): n is a, c, g, or t
  misc_feature (116)..(116): n is a, c, g, or t
  misc_feature (123)..(123): n is a, c, g, or t
  misc_feature (152)..(535): n is a, c, g, or t
  misc_feature (558)..(558): n is a, c, g, or t
  misc_feature (634)..(644): n is a, c, g, or t

SEQ ID NO: 111266 - DNA, 387 bp, Homo Sapiens; identical to SEQ ID NO: 82248
  misc_feature (180)..(192): n is a, c, g, or t

SEQ ID NO: 111267 - DNA, 1455 bp, Homo Sapiens; identical to SEQ ID NO: 82251

SEQ ID NO: 111268 - DNA, 1240 bp, Homo Sapiens; identical to SEQ ID NO: 82252
  misc_feature (80)..(114): n is a, c, g, or t
  misc_feature (819)..(877): n is a, c, g, or t
  misc_feature (1029)..(1029): n is a, c, g, or t
  misc_feature (1031)..(1063): n is a, c, g, or t
  misc_feature (1166)..(1167): n is a, c, g, or t

SEQ ID NO: 111269 - DNA, 978 bp, Homo Sapiens; identical to SEQ ID NO: 82261
  misc_feature (53)..(53): n is a, c, g, or t
  misc_feature (98)..(98): n is a, c, g, or t
  misc_feature (101)..(101): n is a, c, g, or t
  misc_feature (107)..(107): n is a, c, g, or t
  misc_feature (153)..(154): n is a, c, g, or t
  misc_feature (544)..(673): n is a, c, g, or t

SEQ ID NO: 111270 - DNA, 414 bp, Homo Sapiens; identical to SEQ ID NO: 82262

SEQ ID NO: 111271 - DNA, 1261 bp, Homo Sapiens; identical to SEQ ID NO: 82263
  misc_feature (852)..(865): n is a, c, g, or t
  misc_feature (931)..(931): n is a, c, g, or t

SEQ ID NO: 111272 - DNA, 1452 bp, Homo Sapiens; identical to SEQ ID NO: 82268
  misc_feature (112)..(171): n is a, c, g, or t

SEQ ID NO: 111273 - DNA, 773 bp, Homo Sapiens; identical to SEQ ID NO: 82269

SEQ ID NO: 111274 - DNA, 1454 bp, Homo Sapiens; identical to SEQ ID NO: 82287
  misc_feature (41)..(41): n is a, c, g, or t
  misc_feature (81)..(81): n is a, c, g, or t
  misc_feature (102)..(102): n is a, c, g, or t
  misc_feature (113)..(113): n is a, c, g, or t
  misc_feature (123)..(123): n is a, c, g, or t
  misc_feature (132)..(132): n is a, c, g, or t
  misc_feature (136)..(136): n is a, c, g, or t
  misc_feature (144)..(144): n is a, c, g, or t
  misc_feature (191)..(191): n is a, c, g, or t
  misc_feature (193)..(193): n is a, c, g, or t
  misc_feature (218)..(218): n is a, c, g, or t
  misc_feature (241)..(241): n is a, c, g, or t
  misc_feature (253)..(253): n is a, c, g, or t
  misc_feature (271)..(271): n is a, c, g, or t
  misc_feature (294)..(294): n is a, c, g, or t
  misc_feature (324)..(324): n is a, c, g, or t
  misc_feature (1129)..(1129): n is a, c, g, or t
  misc_feature (1225)..(1226): n is a, c, g, or t
  misc_feature (1295)..(1296): n is a, c, g, or t
  misc_feature (1360)..(1360): n is a, c, g, or t
  misc_feature (1387)..(1387): n is a, c, g, or t
  misc_feature (1405)..(1405): n is a, c, g, or t
  misc_feature (1423)..(1423): n is a, c, g, or t
  misc_feature (1431)..(1431): n is a, c, g, or t

SEQ ID NO: 111275 - DNA, 952 bp, Homo Sapiens; identical to SEQ ID NO: 82288
  misc_feature (304)..(353): n is a, c, g, or t
  misc_feature (490)..(520): n is a, c, g, or t

SEQ ID NO: 111276 - DNA, 1102 bp, Homo Sapiens; identical to SEQ ID NO: 82296
  misc_feature (413)..(414): n is a, c, g, or t

SEQ ID NO: 111277 - DNA, 362 bp, Homo Sapiens; identical to SEQ ID NO: 82297

SEQ ID NO: 111278 - DNA, 996 bp, Homo Sapiens; identical to SEQ ID NO: 82301
  misc_feature (33)..(33): n is a, c, g, or t
  misc_feature (73)..(73): n is a, c, g, or t
  misc_feature (100)..(100): n is a, c, g, or t
  misc_feature (102)..(102): n is a, c, g, or t
  misc_feature (203)..(203): n is a, c, g, or t
  misc_feature (259)..(259): n is a, c, g, or t

SEQ ID NO: 111279 - DNA, 973 bp, Homo Sapiens; identical to SEQ ID NO: 82302
  misc_feature (40)..(40): n is a, c, g, or t
  misc_feature (99)..(146): n is a, c, g, or t

SEQ ID NO: 111280 - DNA, 1219 bp, Homo Sapiens; identical to SEQ ID NO: 82315

SEQ ID NO: 111281 - DNA, 1299 bp, Homo Sapiens; identical to SEQ ID NO: 82316
  misc_feature (25)..(25): n is a, c, g, or t
  misc_feature (478)..(478): n is a, c, g, or t
  misc_feature (562)..(562): n is a, c, g, or t
  misc_feature (668)..(668): n is a, c, g, or t

SEQ ID NO: 111282 - DNA, 1003 bp, Homo Sapiens; identical to SEQ ID NO: 82327
  misc_feature (86)..(86): n is a, c, g, or t
  misc_feature (90)..(90): n is a, c, g, or t
  misc_feature (97)..(97): n is a, c, g, or t
  misc_feature (100)..(100): n is a, c, g, or t
  misc_feature (106)..(106): n is a, c, g, or t
  misc_feature (117)..(118): n is a, c, g, or t
  misc_feature (171)..(171): n is a, c, g, or t
  misc_feature (175)..(175): n is a, c, g, or t
  misc_feature (184)..(184): n is a, c, g, or t
  misc_feature (221)..(221): n is a, c, g, or t
  misc_feature (231)..(231): n is a, c, g, or t
  misc_feature (240)..(241): n is a, c, g, or t
  misc_feature (249)..(250): n is a, c, g, or t
  misc_feature (261)..(262): n is a, c, g, or t
  misc_feature (311)..(311): n is a, c, g, or t

SEQ ID NO: 111283 - DNA, 503 bp, Homo Sapiens; identical to SEQ ID NO: 82328
  misc_feature (219)..(228): n is a, c, g, or t

SEQ ID NO: 111284 - DNA, 1414 bp, Homo Sapiens; identical to SEQ ID NO: 82338
  misc_feature (220)..(220): n is a, c, g, or t
  misc_feature (270)..(270): n is a, c, g, or t
  misc_feature (279)..(279): n is a, c, g, or t
  misc_feature (400)..(400): n is a, c, g, or t
  misc_feature (887)..(929): n is a, c, g, or t
  misc_feature (1095)..(1103): n is a, c, g, or t
  misc_feature (1113)..(1122): n is a, c, g, or t
  misc_feature (1140)..(1203): n is a, c, g, or t

SEQ ID NO: 111285 - DNA, 1622 bp, Homo Sapiens; identical to SEQ ID NO: 82339
  misc_feature (833)..(841): n is a, c, g, or t
  misc_feature (851)..(860): n is a, c, g, or t
  misc_feature (879)..(924): n is a, c, g, or t
  misc_feature (1547)..(1556): n is a, c, g, or t

SEQ ID NO: 111286 - DNA, 693 bp, Homo Sapiens; identical to SEQ ID NO: 82340

SEQ ID NO: 111287 - DNA, 867 bp, Homo Sapiens; identical to SEQ ID NO: 82357
  misc_feature (799)..(800): n is a, c, g, or t

SEQ ID NO: 111288 - DNA, 851 bp, Homo Sapiens; identical to SEQ ID NO: 82358
  misc_feature (771)..(790): n is a, c, g, or t
  misc_feature (792)..(794): n is a, c, g, or t

SEQ ID NO: 111289 - DNA, 1077 bp, Homo Sapiens; identical to SEQ ID NO: 82366
  misc_feature (996)..(1014): n is a, c, g, or t

SEQ ID NO: 111290 - DNA, 552 bp, Homo Sapiens; identical to SEQ ID NO: 82367

SEQ ID NO: 111291 - DNA, 881 bp, Homo Sapiens; identical to SEQ ID NO: 82368
  misc_feature (215)..(215): n is a, c, g, or t
  misc_feature (777)..(777): n is a, c, g, or t

SEQ ID NO: 111292 - DNA, 970 bp, Homo Sapiens; identical to SEQ ID NO: 82370
  misc_feature (44)..(44): n is a, c, g, or t
  misc_feature (217)..(526): n is a, c, g, or t

SEQ ID NO: 111293 - DNA, 878 bp, Homo Sapiens; identical to SEQ ID NO: 82371
  misc_feature (41)..(75): n is a, c, g, or t

SEQ ID NO: 111294 - DNA, 939 bp, Homo Sapiens; identical to SEQ ID NO: 82372
  misc_feature (670)..(670): n is a, c, g, or t
  misc_feature (740)..(740): n is a, c, g, or t

SEQ ID NO: 111295 - DNA, 957 bp, Homo Sapiens; identical to SEQ ID NO: 82377
  misc_feature (48)..(87): n is a, c, g, or t
  misc_feature (91)..(125): n is a, c, g, or t

SEQ ID NO: 111296 - DNA, 1209 bp, Homo Sapiens; identical to SEQ ID NO: 82378

SEQ ID NO: 111297 - DNA, 562 bp, Homo Sapiens; identical to SEQ ID NO: 82381

SEQ ID NO: 111298 - DNA, 426 bp, Homo Sapiens; identical to SEQ ID NO: 82382

SEQ ID NO: 111299 - DNA, 1157 bp, Homo Sapiens; identical to SEQ ID NO: 82390
  misc_feature (68)..(102): n is a, c, g, or t
  misc_feature (759)..(759): n is a, c, g, or t
  misc_feature (774)..(774): n is a, c, g, or t
  misc_feature (783)..(784): n is a, c, g, or t

SEQ ID NO: 111300 - DNA, 1355 bp, Homo Sapiens; identical to SEQ ID NO: 82391

SEQ ID NO: 111301 - DNA, 1198 bp, Homo Sapiens; identical to SEQ ID NO: 82397
  misc_feature (713)..(713): n is a, c, g, or t
  misc_feature (729)..(729): n is a, c, g, or t

SEQ ID NO: 111302 - DNA, 852 bp, Homo Sapiens; identical to SEQ ID NO: 82398

SEQ ID NO: 111303 - DNA, 688 bp, Homo Sapiens; identical to SEQ ID NO: 82399
  misc_feature (58)..(58): n is a, c, g, or t

SEQ ID NO: 111304 - DNA, 925 bp, Homo Sapiens; identical to SEQ ID NO: 82418
  misc_feature (77)..(111): n is a, c, g, or t

SEQ ID NO: 111305 - DNA, 1482 bp, Homo Sapiens; identical to SEQ ID NO: 82419
  misc_feature (86)..(120): n is a, c, g, or t
  misc_feature (1402)..(1402): n is a, c, g, or t
  misc_feature (1420)..(1434): n is a, c, g, or t

SEQ ID NO: 111306 - DNA, 556 bp, Homo Sapiens; identical to SEQ ID NO: 82420

SEQ ID NO: 111307 - DNA, 535 bp, Homo Sapiens; identical to SEQ ID NO: 82421

SEQ ID NO: 111308 - DNA, 562 bp, Homo Sapiens; identical to SEQ ID NO: 82422

SEQ ID NO: 111309 - DNA, 1043 bp, Homo Sapiens; identical to SEQ ID NO: 82428
  misc_feature (104)..(104): n is a, c, g, or t
  misc_feature (123)..(123): n is a, c, g, or t
  misc_feature (134)..(134): n is a, c, g, or t
  misc_feature (170)..(170): n is a, c, g, or t
  misc_feature (175)..(176): n is a, c, g, or t
  misc_feature (203)..(203): n is a, c, g, or t
  misc_feature (246)..(246): n is a, c, g, or t
  misc_feature (624)..(661): n is a, c, g, or t

SEQ ID NO: 111310 - DNA, 907 bp, Homo Sapiens; identical to SEQ ID NO: 82429

SEQ ID NO: 111311 - DNA, 402 bp, Homo Sapiens; identical to SEQ ID NO: 82430
  misc_feature (233)..(269): n is a, c, g, or t
  misc_feature (326)..(334): n is a, c, g, or t

SEQ ID NO: 111312 - DNA, 397 bp, Homo Sapiens; identical to SEQ ID NO: 82431
  misc_feature (64)..(72): n is a, c, g, or t
  misc_feature (129)..(165): n is a, c, g, or t

SEQ ID NO: 111313 - DNA, 1002 bp, Homo Sapiens; identical to SEQ ID NO: 82441
  misc_feature (622)..(630): n is a, c, g, or t

SEQ ID NO: 111314 - DNA, 565 bp, Homo Sapiens; identical to SEQ ID NO: 82442
  misc_feature (484)..(492): n is a, c, g, or t

SEQ ID NO: 111315 - DNA, 175 bp, Homo Sapiens; identical to SEQ ID NO: 82443

SEQ ID NO: 111316 - DNA, 1444 bp, Homo Sapiens; identical to SEQ ID NO: 82448

SEQ ID NO: 111317 - DNA, 660 bp, Homo Sapiens; identical to SEQ ID NO: 82449

SEQ ID NO: 111318 - DNA, 457 bp, Homo Sapiens; identical to SEQ ID NO: 82450
  misc_feature (21)..(21): n is a, c, g, or t

SEQ ID NO: 111319 - DNA, 482 bp, Homo Sapiens; identical to SEQ ID NO: 82451

SEQ ID NO: 111320 - DNA, 1111 bp, Homo Sapiens; identical to SEQ ID NO: 82453
  misc_feature (88)..(88): n is a, c, g, or t
  misc_feature (111)..(111): n is a, c, g, or t
  misc_feature (129)..(129): n is a, c, g, or t
  misc_feature (140)..(542): n is a, c, g, or t

SEQ ID NO: 111321 - DNA, 1218 bp, Homo Sapiens; identical to SEQ ID NO: 82454

SEQ ID NO: 111322 - DNA, 972 bp, Homo Sapiens; identical to SEQ ID NO: 82458
  misc_feature (73)..(73): n is a, c, g, or t
  misc_feature (81)..(81): n is a, c, g, or t
  misc_feature (145)..(145): n is a, c, g, or t
  misc_feature (260)..(260): n is a, c, g, or t
  misc_feature (286)..(286): n is a, c, g, or t
  misc_feature (344)..(344): n is a, c, g, or t
  misc_feature (886)..(894): n is a, c, g, or t

SEQ ID NO: 111323 - DNA, 536 bp, Homo Sapiens; identical to SEQ ID NO: 82459
  misc_feature (72)..(80): n is a, c, g, or t

SEQ ID NO: 111324 - DNA, 1114 bp, Homo Sapiens; identical to SEQ ID NO: 82464
  misc_feature (34)..(34): n is a, c, g, or t
  misc_feature (94)..(94): n is a, c, g, or t
  misc_feature (97)..(97): n is a, c, g, or t
  misc_feature (222)..(223): n is a, c, g, or t
  misc_feature (263)..(263): n is a, c, g, or t
  misc_feature (1037)..(1055): n is a, c, g, or t

SEQ ID NO: 111325 - DNA, 475 bp, Homo Sapiens; identical to SEQ ID NO: 82465
  misc_feature (84)..(84): n is a, c, g, or t

SEQ ID NO: 111326 - DNA, 779 bp, Homo Sapiens; identical to SEQ ID NO: 82477
  misc_feature (176)..(211): n is a, c, g, or t

SEQ ID NO: 111327 - DNA, 716 bp, Homo Sapiens; identical to SEQ ID NO: 82478

SEQ ID NO: 111328 - DNA, 418 bp, Homo Sapiens; identical to SEQ ID NO: 82479

SEQ ID NO: 111329 - DNA, 1167 bp, Homo Sapiens; identical to SEQ ID NO: 82485
  misc_feature (501)..(539): n is a, c, g, or t

SEQ ID NO: 111330 - DNA, 2003 bp, Homo Sapiens; identical to SEQ ID NO: 82486
  misc_feature (1854)..(1882): n is a, c, g, or t
  misc_feature (1919)..(1932): n is a, c, g, or t

SEQ ID NO: 111331 - DNA, 970 bp, Homo Sapiens; identical to SEQ ID NO: 82489

SEQ ID NO: 111332 - DNA, 1433 bp, Homo Sapiens; identical to SEQ ID NO: 82490
  misc_feature (928)..(956): n is a, c, g, or t
  misc_feature (1238)..(1238): n is a, c, g, or t
  misc_feature (1247)..(1247): n is a, c, g, or t
  misc_feature (1277)..(1277): n is a, c, g, or t
  misc_feature (1384)..(1384): n is a, c, g, or t

SEQ ID NO: 111333 - DNA, 1000 bp, Homo Sapiens; identical to SEQ ID NO: 82493
  misc_feature (236)..(236): n is a, c, g, or t

SEQ ID NO: 111334 - DNA, 515 bp, Homo Sapiens; identical to SEQ ID NO: 82494

SEQ ID NO: 111335 - DNA, 1494 bp, Homo Sapiens; identical to SEQ ID NO: 82498
  misc_feature (780)..(780): n is a, c, g, or t
  misc_feature (881)..(985): n is a, c, g, or t
  misc_feature (1129)..(1154): n is a, c, g, or t
  misc_feature (1340)..(1348): n is a, c, g, or t

SEQ ID NO: 111336 - DNA, 795 bp, Homo Sapiens; identical to SEQ ID NO: 82499

SEQ ID NO: 111337 - DNA, 1171 bp, Homo Sapiens; identical to SEQ ID NO: 82507

SEQ ID NO: 111338 - DNA, 854 bp, Homo Sapiens; identical to SEQ ID NO: 82508
  misc_feature (505)..(505): n is a, c, g, or t
  misc_feature (523)..(523): n is a, c, g, or t
  misc_feature (532)..(532): n is a, c, g, or t
  misc_feature (538)..(538): n is a, c, g, or t
  misc_feature (567)..(567): n is a, c, g, or t

SEQ ID NO: 111339 - DNA, 728 bp, Homo Sapiens; identical to SEQ ID NO: 82514

SEQ ID NO: 111340 - DNA, 925 bp, Homo Sapiens; identical to SEQ ID NO: 82515
  misc_feature (739)..(739): n is a, c, g, or t
  misc_feature (741)..(744): n is a, c, g, or t
  misc_feature (746)..(746): n is a, c, g, or t
  misc_feature (748)..(748): n is a, c, g, or t
  misc_feature (750)..(750): n is a, c, g, or t
  misc_feature (752)..(752): n is a, c, g, or t
  misc_feature (754)..(754): n is a, c, g, or t
  misc_feature (757)..(758): n is a, c, g, or t
  misc_feature (761)..(762): n is a, c, g, or t
  misc_feature (764)..(768): n is a, c, g, or t

SEQ ID NO: 111341 - DNA, 1510 bp, Homo Sapiens; identical to SEQ ID NO: 82517
  misc_feature (33)..(33): n is a, c, g, or t

SEQ ID NO: 111342 - DNA, 790 bp, Homo Sapiens; identical to SEQ ID NO: 82518
  misc_feature (374)..(411): n is a, c, g, or t

SEQ ID NO: 111343 - DNA, 1164 bp, Homo Sapiens; identical to SEQ ID NO: 82523
  misc_feature (582)..(689): n is a, c, g, or t
  misc_feature (698)..(711): n is a, c, g, or t
  misc_feature (750)..(877): n is a, c, g, or t
  misc_feature (953)..(962): n is a, c, g, or t

SEQ ID NO: 111344 - DNA, 680 bp, Homo Sapiens; identical to SEQ ID NO: 82524

SEQ ID NO: 111345 - DNA, 651 bp, Homo Sapiens; identical to SEQ ID NO: 82525
  misc_feature (406)..(503): n is a, c, g, or t
  misc_feature (505)..(510): n is a, c, g, or t
  misc_feature (512)..(516): n is a, c, g, or t
  misc_feature (518)..(520): n is a, c, g, or t
  misc_feature (522)..(522): n is a, c, g, or t
  misc_feature (525)..(525): n is a, c, g, or t
  misc_feature (528)..(529): n is a, c, g, or t
  misc_feature (531)..(532): n is a, c, g, or t
  misc_feature (536)..(538): n is a, c, g, or t
  misc_feature (541)..(543): n is a, c, g, or t
  misc_feature (583)..(584): n is a, c, g, or t

SEQ ID NO: 111346 - DNA, 1809 bp, Homo Sapiens; identical to SEQ ID NO: 82530
  misc_feature (1030)..(1038): n is a, c, g, or t

SEQ ID NO: 111347 - DNA, 1515 bp, Homo Sapiens; identical to SEQ ID NO: 82531
  misc_feature (311)..(399): n is a, c, g, or t
  misc_feature (633)..(651): n is a, c, g, or t
  misc_feature (892)..(946): n is a, c, g, or t
  misc_feature (1215)..(1224): n is a, c, g, or t
  misc_feature (1439)..(1473): n is a, c, g, or t

SEQ ID NO: 111348 - DNA, 2223 bp, Homo Sapiens; identical to SEQ ID NO: 82536
  misc_feature (1124)..(1132): n is a, c, g, or t
  misc_feature (1187)..(1196): n is a, c, g, or t
  misc_feature (1780)..(1788): n is a, c, g, or t

SEQ ID NO: 111349 - DNA, 554 bp, Homo Sapiens; identical to SEQ ID NO: 82537
  misc_feature (410)..(410): n is a, c, g, or t

SEQ ID NO: 111350 - DNA, 1376 bp, Homo Sapiens; identical to SEQ ID NO: 82538
  misc_feature (628)..(664): n is a, c, g, or t

SEQ ID NO: 111351 - DNA, 1558 bp, Homo Sapiens; identical to SEQ ID NO: 82539

SEQ ID NO: 111352 - DNA, 389 bp, Homo Sapiens; identical to SEQ ID NO: 82544
  misc_feature (220)..(268): n is a, c, g, or t

SEQ ID NO: 111353 - DNA, 690 bp, Homo Sapiens; identical to SEQ ID NO: 82545
  misc_feature (17)..(17): n is a, c, g, or t
  misc_feature (27)..(27): n is a, c, g, or t
  misc_feature (35)..(35): n is a, c, g, or t
  misc_feature (423)..(474): n is a, c, g, or t

SEQ ID NO: 111354 - DNA, 759 bp, Homo Sapiens; identical to SEQ ID NO: 82546

SEQ ID NO: 111355 - DNA, 724 bp, Homo Sapiens; identical to SEQ ID NO: 82548

SEQ ID NO: 111356 - DNA, 567 bp, Homo Sapiens; identical to SEQ ID NO: 82549

SEQ ID NO: 111357 - DNA, 530 bp, Homo Sapiens; identical to SEQ ID NO: 82560

SEQ ID NO: 111358 - DNA, 797 bp, Homo Sapiens; identical to SEQ ID NO: 82561
  misc_feature (342)..(358): n is a, c, g, or t

SEQ ID NO: 111359 - DNA, 1402 bp, Homo Sapiens; identical to SEQ ID NO: 82576

SEQ ID NO: 111360 - DNA, 802 bp, Homo Sapiens; identical to SEQ ID NO: 82577

SEQ ID NO: 111361 - DNA, 766 bp, Homo Sapiens; identical to SEQ ID NO: 82580

SEQ ID NO: 111362 - DNA, 607 bp, Homo Sapiens; identical to SEQ ID NO: 82581
  misc_feature (13)..(13): n is a, c, g, or t

SEQ ID NO: 111363 - DNA, 339 bp, Homo Sapiens; identical to SEQ ID NO: 82585
  misc_feature (33)..(33): n is a, c, g, or t

SEQ ID NO: 111364 - DNA, 703 bp, Homo Sapiens; identical to SEQ ID NO: 82586

SEQ ID NO: 111365 - DNA, 1520 bp, Homo Sapiens; identical to SEQ ID NO: 82595

SEQ ID NO: 111366 - DNA, 1218 bp, Homo Sapiens; identical to SEQ ID NO: 82596
  misc_feature (1033)..(1033): n is a, c, g, or t
  misc_feature (1074)..(1074): n is a, c, g, or t
  misc_feature (1129)..(1129): n is a, c, g, or t
  misc_feature (1166)..(1166): n is a, c, g, or t
  misc_feature (1203)..(1203): n is a, c, g, or t

SEQ ID NO: 111367 - DNA, 807 bp, Homo Sapiens; identical to SEQ ID NO: 82614
  misc_feature (145)..(145): n is a, c, g, or t

SEQ ID NO: 111368 - DNA, 936 bp, Homo Sapiens; identical to SEQ ID NO: 82615

SEQ ID NO: 111369 - DNA, 921 bp, Homo Sapiens; identical to SEQ ID NO: 15841

SEQ ID NO: 111370 - DNA, 679 bp, Homo Sapiens; identical to SEQ ID NO: 82618

SEQ ID NO: 111371 - DNA, 525 bp, Homo Sapiens; identical to SEQ ID NO: 82619

SEQ ID NO: 111372 - DNA, 566 bp, Homo Sapiens; identical to SEQ ID NO: 82620

SEQ ID NO: 111373 - DNA, 1102 bp, Homo Sapiens; identical to SEQ ID NO: 82621
  misc_feature (852)..(853): n is a, c, g, or t
  misc_feature (942)..(942): n is a, c, g, or t
  misc_feature (946)..(946): n is a, c, g, or t
  misc_feature (952)..(954): n is a, c, g, or t
  misc_feature (979)..(979): n is a, c, g, or t
  misc_feature (1002)..(1003): n is a, c, g, or t
  misc_feature (1013)..(1013): n is a, c, g, or t
  misc_feature (1015)..(1015): n is a, c, g, or t
  misc_feature (1038)..(1038): n is a, c, g, or t
  misc_feature (1049)..(1049): n is a, c, g, or t

SEQ ID NO: 111374 - DNA, 844 bp, Homo Sapiens; identical to SEQ ID NO: 82624

SEQ ID NO: 111375 - DNA, 586 bp, Homo Sapiens; identical to SEQ ID NO: 82625
  misc_feature (483)..(483): n is a, c, g, or t

SEQ ID NO: 111376 - DNA, 1063 bp, Homo Sapiens; identical to SEQ ID NO: 82629
  misc_feature (983)..(997): n is a, c, g, or t

SEQ ID NO: 111377 - DNA, 549 bp, Homo Sapiens; identical to SEQ ID NO: 82630
  misc_feature (329)..(369): n is a, c, g, or t

SEQ ID NO: 111378 - DNA, 1039 bp, Homo Sapiens; identical to SEQ ID NO: 82637

SEQ ID NO: 111379 - DNA, 839 bp, Homo Sapiens; identical to SEQ ID NO: 82638

SEQ ID NO: 111380 - DNA, 241 bp, Homo Sapiens; identical to SEQ ID NO: 82650

SEQ ID NO: 111381 - DNA, 502 bp, Homo Sapiens; identical to SEQ ID NO: 82651
  misc_feature (291)..(293): n is a, c, g, or t
  misc_feature (295)..(296): n is a, c, g, or t
  misc_feature (300)..(300): n is a, c, g, or t
  misc_feature (304)..(306): n is a, c, g, or t

SEQ ID NO: 111382 - DNA, 378 bp, Homo Sapiens; identical to SEQ ID NO: 82652
  misc_feature (241)..(307): n is a, c, g, or t

SEQ ID NO: 111383 - DNA, 991 bp, Homo Sapiens; identical to SEQ ID NO: 82654
  misc_feature (31)..(31): n is a, c, g, or t
  misc_feature (41)..(83): n is a, c, g, or t
  misc_feature (87)..(121): n is a, c, g, or t

SEQ ID NO: 111384 - DNA, 854 bp, Homo Sapiens; identical to SEQ ID NO: 82655

SEQ ID NO: 111385 - DNA, 338 bp, Homo Sapiens; identical to SEQ ID NO: 82659

SEQ ID NO: 111386 - DNA, 844 bp, Homo Sapiens; identical to SEQ ID NO: 82660
  misc_feature (649)..(649): n is a, c, g, or t

SEQ ID NO: 111387 - DNA, 732 bp, Homo Sapiens; identical to SEQ ID NO: 82661
  misc_feature (148)..(148): n is a, c, g, or t

SEQ ID NO: 111388 - DNA, 358 bp, Homo Sapiens; identical to SEQ ID NO: 82662
  misc_feature (324)..(324): n is a, c, g, or t

SEQ ID NO: 111389 - DNA, 478 bp, Homo Sapiens; identical to SEQ ID NO: 82663

SEQ ID NO: 111390 - DNA, 539 bp, Homo Sapiens; identical to SEQ ID NO: 82666
  misc_feature (184)..(224): n is a, c, g, or t

SEQ ID NO: 111391 - DNA, 877 bp, Homo Sapiens; identical to SEQ ID NO: 82667

SEQ ID NO: 111392 - DNA, 1353 bp, Homo Sapiens; identical to SEQ ID NO: 82676
  misc_feature (1105)..(1119): n is a, c, g, or t

SEQ ID NO: 111393 - DNA, 439 bp, Homo Sapiens; identical to SEQ ID NO: 82677

SEQ ID NO: 111394 - DNA, 560 bp, Homo Sapiens; identical to SEQ ID NO: 82678
  misc_feature (453)..(453): n is a, c, g, or t

SEQ ID NO: 111395 - DNA, 490 bp, Homo Sapiens; identical to SEQ ID NO: 82681
  misc_feature (457)..(457): n is a, c, g, or t

SEQ ID NO: 111396 - DNA, 807 bp, Homo Sapiens; identical to SEQ ID NO: 82682
  misc_feature (744)..(744): n is a, c, g, or t

SEQ ID NO: 111397 - DNA, 1272 bp, Homo Sapiens; identical to SEQ ID NO: 82685

SEQ ID NO: 111398 - DNA, 887 bp, Homo Sapiens; identical to SEQ ID NO: 82686

SEQ ID NO: 111399 - DNA, 750 bp, Homo Sapiens; identical to SEQ ID NO: 82689

SEQ ID NO: 111400 - DNA, 581 bp, Homo Sapiens; identical to SEQ ID NO: 82690

SEQ ID NO: 111401 - DNA, 438 bp, Homo Sapiens; identical to SEQ ID NO: 82691

SEQ ID NO: 111402 - DNA, 982 bp, Homo Sapiens; identical to SEQ ID NO: 82692

SEQ ID NO: 111403 - DNA, 847 bp, Homo Sapiens; identical to SEQ ID NO: 82703

SEQ ID NO: 111404 - DNA, 434 bp, Homo Sapiens; identical to SEQ ID NO: 82704
  misc_feature (162)..(162): n is a, c, g, or t
  misc_feature (422)..(422): n is a, c, g, or t

SEQ ID NO: 111405 - DNA, 453 bp, Homo Sapiens; identical to SEQ ID NO: 82706

SEQ ID NO: 111406 - DNA, 1034 bp, Homo Sapiens; identical to SEQ ID NO: 82707

SEQ ID NO: 111407 - DNA, 951 bp, Homo Sapiens; identical to SEQ ID NO: 82708

SEQ ID NO: 111408 - DNA, 1003 bp, Homo Sapiens; identical to SEQ ID NO: 82709

SEQ ID NO: 111409 - DNA, 545 bp, Homo Sapiens; identical to SEQ ID NO: 82710

SEQ ID NO: 111410 - DNA, 424 bp, Homo Sapiens; identical to SEQ ID NO: 82711

SEQ ID NO: 111411 - DNA, 763 bp, Homo Sapiens; identical to SEQ ID NO: 82719
  misc_feature (21)..(21): n is a, c, g, or t
  misc_feature (444)..(539): n is a, c, g, or t
  misc_feature (613)..(614): n is a, c, g, or t
  misc_feature (626)..(641): n is a, c, g, or t

SEQ ID NO: 111412 - DNA, 461 bp, Homo Sapiens; identical to SEQ ID NO: 82720

SEQ ID NO: 111413 - DNA, 488 bp, Homo Sapiens; identical to SEQ ID NO: 82726

SEQ ID NO: 111414 - DNA, 1295 bp, Homo Sapiens; identical to SEQ ID NO: 82727

SEQ ID NO: 111415 - DNA, 868 bp, Homo Sapiens; identical to SEQ ID NO: 82728

SEQ ID NO: 111416 - DNA, 1020 bp, Homo Sapiens; identical to SEQ ID NO: 82729

SEQ ID NO: 111417 - DNA, 541 bp, Homo Sapiens; identical to SEQ ID NO: 82730
  misc_feature (23)..(23): n is a, c, g, or t

SEQ ID NO: 111418 - DNA, 820 bp, Homo Sapiens; identical to SEQ ID NO: 82732
  misc_feature (489)..(497): n is a, c, g, or t

SEQ ID NO: 111419 - DNA, 1094 bp, Homo Sapiens; identical to SEQ ID NO: 82733

SEQ ID NO: 111420 - DNA, 870 bp, Homo Sapiens; identical to SEQ ID NO: 82755

SEQ ID NO: 111421 - DNA, 461 bp, Homo Sapiens; identical to SEQ ID NO: 82756
  misc_feature (138)..(138): n is a, c, g, or t

SEQ ID NO: 111422 - DNA, 1111 bp, Homo Sapiens; identical to SEQ ID NO: 82764

SEQ ID NO: 111423 - DNA, 517 bp, Homo Sapiens; identical to SEQ ID NO: 82765

SEQ ID NO: 111424 - DNA, 501 bp, Homo Sapiens; identical to SEQ ID NO: 82766
  misc_feature (12)..(12): n is a, c, g, or t
  misc_feature (64)..(64): n is a, c, g, or t
  misc_feature (67)..(67): n is a, c, g, or t

SEQ ID NO: 111425 - DNA, 534 bp, Homo Sapiens; identical to SEQ ID NO: 82767

SEQ ID NO: 111426 - DNA, 843 bp, Homo Sapiens; identical to SEQ ID NO: 82768
  misc_feature (538)..(538): n is a, c, g, or t

SEQ ID NO: 111427 - DNA, 872 bp, Homo Sapiens; identical to SEQ ID NO: 82769
  misc_feature (88)..(122): n is a, c, g, or t

SEQ ID NO: 111428 - DNA, 434 bp, Homo Sapiens; identical to SEQ ID NO: 82770

SEQ ID NO: 111429 - DNA, 467 bp, Homo Sapiens; identical to SEQ ID NO: 82771
  misc_feature (223)..(223): n is a, c, g, or t

SEQ ID NO: 111430 - DNA, 1067 bp, Homo Sapiens; identical to SEQ ID NO: 82778

SEQ ID NO: 111431 - DNA, 334 bp, Homo Sapiens; identical to SEQ ID NO: 82779

SEQ ID NO: 111432 - DNA, 1176 bp, Homo Sapiens; identical to SEQ ID NO: 82782
  misc_feature (66)..(106): n is a, c, g, or t
  misc_feature (110)..(144): n is a, c, g, or t
  misc_feature (728)..(729): n is a, c, g, or t
  misc_feature (731)..(731): n is a, c, g, or t
  misc_feature (735)..(790): n is a, c, g, or t
  misc_feature (797)..(798): n is a, c, g, or t
  misc_feature (994)..(1002): n is a, c, g, or t

SEQ ID NO: 111433 - DNA, 1062 bp, Homo Sapiens; identical to SEQ ID NO: 82783

SEQ ID NO: 111434 - DNA, 1171 bp, Homo Sapiens; identical to SEQ ID NO: 82784

SEQ ID NO: 111435 - DNA, 1621 bp, Homo Sapiens; identical to SEQ ID NO: 82785
  misc_feature (885)..(885): n is a, c, g, or t
  misc_feature (976)..(976): n is a, c, g, or t
  misc_feature (1020)..(1028): n is a, c, g, or t
  misc_feature (1080)..(1090): n is a, c, g, or t
  misc_feature (1103)..(1103): n is a, c, g, or t
  misc_feature (1112)..(1112): n is a, c, g, or t
  misc_feature (1168)..(1168): n is a, c, g, or t
  misc_feature (1198)..(1198): n is a, c, g, or t
  misc_feature (1226)..(1226): n is a, c, g, or t
  misc_feature (1360)..(1360): n is a, c, g, or t
  misc_feature (1374)..(1386): n is a, c, g, or t

SEQ ID NO: 111436 - DNA, 520 bp, Homo Sapiens; identical to SEQ ID NO: 82802

SEQ ID NO: 111437 - DNA, 1162 bp, Homo Sapiens; identical to SEQ ID NO: 82803
  misc_feature (1067)..(1067): n is a, c, g, or t
  misc_feature (1123)..(1123): n is a, c, g, or t
  misc_feature (1139)..(1139): n is a, c, g, or t

SEQ ID NO: 111438 - DNA, 2958 bp, Homo Sapiens; identical to SEQ ID NO: 82809
  misc_feature (79)..(80): n is a, c, g, or t
  misc_feature (184)..(184): n is a, c, g, or t
  misc_feature (2848)..(2895): n is a, c, g, or t
  misc_feature (2900)..(2909): n is a, c, g, or t

SEQ ID NO: 111439 - DNA, 436 bp, Homo Sapiens; identical to SEQ ID NO: 82810

SEQ ID NO: 111440 - DNA, 1027 bp, Homo Sapiens; identical to SEQ ID NO: 82833

SEQ ID NO: 111441 - DNA, 1163 bp, Homo Sapiens; identical to SEQ ID NO: 82834
  misc_feature (918)..(926): n is a, c, g, or t

SEQ ID NO: 111442 - DNA, 658 bp, Homo Sapiens; identical to SEQ ID NO: 82836

SEQ ID NO: 111443 - DNA, 875 bp, Homo Sapiens; identical to SEQ ID NO: 82837
  misc_feature (761)..(761): n is a, c, g, or t

SEQ ID NO: 111444 - DNA, 706 bp, Homo Sapiens; identical to SEQ ID NO: 2964
  misc_feature (497)..(498): n is a, c, g, or t
  misc_feature (501)..(502): n is a, c, g, or t
  misc_feature (504)..(511): n is a, c, g, or t
  misc_feature (514)..(515): n is a, c, g, or t
  misc_feature (523)..(523): n is a, c, g, or t
  misc_feature (531)..(532): n is a, c, g, or t
  misc_feature (546)..(546): n is a, c, g, or t

SEQ ID NO: 111445 - DNA, 524 bp, Homo Sapiens; identical to SEQ ID NO: 82839

SEQ ID NO: 111446 - DNA, 800 bp, Homo Sapiens; identical to SEQ ID NO: 82840

SEQ ID NO: 111447 - DNA, 777 bp, Homo Sapiens; identical to SEQ ID NO: 82841
  misc_feature (662)..(664): n is a, c, g, or t
  misc_feature (675)..(699): n is a, c, g, or t

SEQ ID NO: 111448 - DNA, 800 bp, Homo Sapiens; identical to SEQ ID NO: 82842
  misc_feature (694)..(694): n is a, c, g, or t
  misc_feature (742)..(743): n is a, c, g, or t

SEQ ID NO: 111449 - DNA, 629 bp, Homo Sapiens; identical to SEQ ID NO: 82843

SEQ ID NO: 111450 - DNA, 441 bp, Homo Sapiens; identical to SEQ ID NO: 82844
  misc_feature (57)..(57): n is a, c, g, or t

SEQ ID NO: 111451 - DNA, 489 bp, Homo Sapiens; identical to SEQ ID NO: 82845

SEQ ID NO: 111452 - DNA, 461 bp, Homo Sapiens; identical to SEQ ID NO: 82849

SEQ ID NO: 111453 - DNA, 707 bp, Homo Sapiens; identical to SEQ ID NO: 82850

SEQ ID NO: 111454 - DNA, 776 bp, Homo Sapiens; identical to SEQ ID NO: 82857

SEQ ID NO: 111455 - DNA, 857 bp, Homo Sapiens; identical to SEQ ID NO: 82858
  misc_feature (695)..(695): n is a, c, g, or t

SEQ ID NO: 111456 - DNA, 1443 bp, Homo Sapiens; identical to SEQ ID NO: 82862
  misc_feature (74)..(108): n is a, c, g, or t

SEQ ID NO: 111457 - DNA, 886 bp, Homo Sapiens; identical to SEQ ID NO: 15378

SEQ ID NO: 111458 - DNA, 798 bp, Homo Sapiens; identical to SEQ ID NO: 82871
  misc_feature (581)..(581): n is a, c, g, or t
  misc_feature (622)..(622): n is a, c, g, or t
  misc_feature (731)..(731): n is a, c, g, or t
  misc_feature (734)..(734): n is a, c, g, or t

SEQ ID NO: 111459 - DNA, 1220 bp, Homo Sapiens; identical to SEQ ID NO: 82872

SEQ ID NO: 111460 - DNA, 1569 bp, Homo Sapiens; identical to SEQ ID NO: 82876

SEQ ID NO: 111461 - DNA, 886 bp, Homo Sapiens; identical to SEQ ID NO: 82877

SEQ ID NO: 111462 - DNA, 862 bp, Homo Sapiens; identical to SEQ ID NO: 82878

SEQ ID NO: 111463 - DNA, 904 bp, Homo Sapiens; identical to SEQ ID NO: 82886
  misc_feature (165)..(240): n is a, c, g, or t
  misc_feature (791)..(791): n is a, c, g, or t
  misc_feature (801)..(801): n is a, c, g, or t
  misc_feature (850)..(850): n is a, c, g, or t

SEQ ID NO: 111464 - DNA, 743 bp, Homo Sapiens; identical to SEQ ID NO: 82887
  misc_feature (471)..(546): n is a, c, g, or t

SEQ ID NO: 111465 - DNA, 955 bp, Homo Sapiens; identical to SEQ ID NO: 82889

SEQ ID NO: 111466 - DNA, 846 bp, Homo Sapiens; identical to SEQ ID NO: 82890

SEQ ID NO: 111467 - DNA, 669 bp, Homo Sapiens; identical to SEQ ID NO: 82905
  misc_feature (59)..(59): n is a, c, g, or t

SEQ ID NO: 111468 - DNA, 972 bp, Homo Sapiens; identical to SEQ ID NO: 82906
  misc_feature (80)..(114): n is a, c, g, or t
  misc_feature (659)..(661): n is a, c, g, or t
  misc_feature (663)..(664): n is a, c, g, or t
  misc_feature (667)..(668): n is a, c, g, or t
  misc_feature (677)..(677): n is a, c, g, or t
  misc_feature (680)..(680): n is a, c, g, or t
  misc_feature (682)..(683): n is a, c, g, or t
  misc_feature (687)..(718): n is a, c, g, or t
  misc_feature (726)..(726): n is a, c, g, or t
  misc_feature (730)..(735): n is a, c, g, or t
  misc_feature (737)..(793): n is a, c, g, or t
  misc_feature (795)..(795): n is a, c, g, or t
  misc_feature (799)..(803): n is a, c, g, or t
  misc_feature (807)..(807): n is a, c, g, or t
  misc_feature (809)..(809): n is a, c, g, or t
  misc_feature (811)..(813): n is a, c, g, or t
  misc_feature (815)..(815): n is a, c, g, or t
  misc_feature (818)..(832): n is a, c, g, or t
  misc_feature (838)..(838): n is a, c, g, or t
  misc_feature (840)..(859): n is a, c, g, or t

SEQ ID NO: 111469 - DNA, 815 bp, Homo Sapiens; identical to SEQ ID NO: 82913
  misc_feature (614)..(615): n is a, c, g, or t
  misc_feature (635)..(636): n is a, c, g, or t

SEQ ID NO: 111470 - DNA, 461 bp, Homo Sapiens; identical to SEQ ID NO: 82914

SEQ ID NO: 111471 - DNA, 822 bp, Homo Sapiens; identical to SEQ ID NO: 82917
  misc_feature (764)..(779): n is a, c, g, or t

SEQ ID NO: 111472 - DNA, 1182 bp, Homo Sapiens; identical to SEQ ID NO: 82918

SEQ ID NO: 111473 - DNA, 1618 bp, Homo Sapiens; identical to SEQ ID NO: 82920
  misc_feature (500)..(512): n is a, c, g, or t
  misc_feature (712)..(858): n is a, c, g, or t
  misc_feature (901)..(955): n is a, c, g, or t
  misc_feature (1351)..(1407): n is a, c, g, or t

SEQ ID NO: 111474 - DNA, 383 bp, Homo Sapiens; identical to SEQ ID NO: 82921
  misc_feature (216)..(268): n is a, c, g, or t

SEQ ID NO: 111475 - DNA, 546 bp, Homo Sapiens; identical to SEQ ID NO: 82922
  misc_feature (340)..(486): n is a, c, g, or t
  misc_feature (492)..(492): n is a, c, g, or t

SEQ ID NO: 111476 - DNA, 480 bp, Homo Sapiens; identical to SEQ ID NO: 82923

SEQ ID NO: 111477 - DNA, 451 bp, Homo Sapiens; identical to SEQ ID NO: 82938
  misc_feature (23)..(23): n is a, c, g, or t
  misc_feature (31)..(31): n is a, c, g, or t
  misc_feature (42)..(90): n is a, c, g, or t

SEQ ID NO: 111478 - DNA, 928 bp, Homo Sapiens; identical to SEQ ID NO: 82939

SEQ ID NO: 111479 - DNA, 626 bp, Homo Sapiens; identical to SEQ ID NO: 82950

SEQ ID NO: 111480 - DNA, 1145 bp, Homo Sapiens; identical to SEQ ID NO: 82951
  misc_feature (590)..(620): n is a, c, g, or t

SEQ ID NO: 111481 - DNA, 512 bp, Homo Sapiens; identical to SEQ ID NO: 82956
  misc_feature (69)..(125): n is a, c, g, or t

SEQ ID NO: 111482 - DNA, 1308 bp, Homo Sapiens; identical to SEQ ID NO: 82957

SEQ ID NO: 111483 - DNA, 982 bp, Homo Sapiens; identical to SEQ ID NO: 82958
  misc_feature (315)..(315): n is a, c, g, or t

SEQ ID NO: 111484 - DNA, 497 bp, Homo Sapiens; identical to SEQ ID NO: 82965

SEQ ID NO: 111485 - DNA, 948 bp, Homo Sapiens; identical to SEQ ID NO: 82966

SEQ ID NO: 111486 - DNA, 655 bp, Homo Sapiens; identical to SEQ ID NO: 82971

SEQ ID NO: 111487 - DNA, 1002 bp, Homo Sapiens; identical to SEQ ID NO: 82972

SEQ ID NO: 111488 - DNA, 499 bp, Homo Sapiens; identical to SEQ ID NO: 82975
  misc_feature (26)..(26): n is a, c, g, or t

SEQ ID NO: 111489 - DNA, 490 bp, Homo Sapiens; identical to SEQ ID NO: 82976

SEQ ID NO: 111490 - DNA, 935 bp, Homo Sapiens; identical to SEQ ID NO: 82981

SEQ ID NO: 111491 - DNA, 484 bp, Homo Sapiens; identical to SEQ ID NO: 82982

SEQ ID NO: 111492 - DNA, 645 bp, Homo Sapiens; identical to SEQ ID NO: 82983

SEQ ID NO: 111493 - DNA, 1107 bp, Homo Sapiens; identical to SEQ ID NO: 83000

SEQ ID NO: 111494 - DNA, 531 bp, Homo Sapiens; identical to SEQ ID NO: 83001

SEQ ID NO: 111495 - DNA, 528 bp, Homo Sapiens; identical to SEQ ID NO: 83008

SEQ ID NO: 111496 - DNA, 1255 bp, Homo Sapiens; identical to SEQ ID NO: 83009

SEQ ID NO: 111497 - DNA, 822 bp, Homo Sapiens; identical to SEQ ID NO: 83010

SEQ ID NO: 111498 - DNA, 426 bp, Homo Sapiens; identical to SEQ ID NO: 83015

SEQ ID NO: 111499 - DNA, 919 bp, Homo Sapiens; identical to SEQ ID NO: 83016
  misc_feature (600)..(600): n is a, c, g, or t
  misc_feature (603)..(603): n is a, c, g, or t
  misc_feature (609)..(609): n is a, c, g, or t
  misc_feature (841)..(849): n is a, c, g, or t

SEQ ID NO: 111500 - DNA, 812 bp, Homo Sapiens; identical to SEQ ID NO: 83017
  misc_feature (630)..(653): n is a, c, g, or t

SEQ ID NO: 111501 - DNA, 531 bp, Homo Sapiens; identical to SEQ ID NO: 83029

SEQ ID NO: 111502 - DNA, 625 bp, Homo Sapiens; identical to SEQ ID NO: 83030
  misc_feature (453)..(499): n is a, c, g, or t

SEQ ID NO: 111503 - DNA, 609 bp, Homo Sapiens; identical to SEQ ID NO: 83033
  misc_feature (437)..(499): n is a, c, g, or t

SEQ ID NO: 111504 - DNA, 690 bp, Homo Sapiens; identical to SEQ ID NO: 83034

SEQ ID NO: 111505 - DNA, 509 bp, Homo Sapiens; identical to SEQ ID NO: 83045
  misc_feature (49)..(125): n is a, c, g, or t
  misc_feature (350)..(350): n is a, c, g, or t

SEQ ID NO: 111506 - DNA, 715 bp, Homo Sapiens; identical to SEQ ID NO: 83046
  misc_feature (187)..(196): n is a, c, g, or t
  misc_feature (457)..(508): n is a, c, g, or t

SEQ ID NO: 111507 - DNA, 716 bp, Homo Sapiens; identical to SEQ ID NO: 83047

SEQ ID NO: 111508 - DNA, 1067 bp, Homo Sapiens; identical to SEQ ID NO: 83064

SEQ ID NO: 111509 - DNA, 797 bp, Homo Sapiens; identical to SEQ ID NO: 83065

SEQ ID NO: 111510 - DNA, 588 bp, Homo Sapiens; identical to SEQ ID NO: 83066

SEQ ID NO: 111511 - DNA, 624 bp, Homo Sapiens; identical to SEQ ID NO: 83082

SEQ ID NO: 111512 - DNA, 1056 bp, Homo Sapiens; identical to SEQ ID NO: 83083
  misc_feature (14)..(14): n is a, c, g, or t
  misc_feature (582)..(582): n is a, c, g, or t
  misc_feature (847)..(878): n is a, c, g, or t
  misc_feature (950)..(988): n is a, c, g, or t

SEQ ID NO: 111513 - DNA, 1254 bp, Homo Sapiens; identical to SEQ ID NO: 83113
  misc_feature (1213)..(1213): n is a, c, g, or t
  misc_feature (1239)..(1239): n is a, c, g, or t

SEQ ID NO: 111514 - DNA, 944 bp, Homo Sapiens; identical to SEQ ID NO: 83114

SEQ ID NO: 111515 - DNA, 788 bp, Homo Sapiens; identical to SEQ ID NO: 83118
  misc_feature (79)..(111): n is a, c, g, or t

SEQ ID NO: 111516 - DNA, 540 bp, Homo Sapiens; identical to SEQ ID NO: 83119
  misc_feature (348)..(380): n is a, c, g, or t

SEQ ID NO: 111517 - DNA, 526 bp, Homo Sapiens; identical to SEQ ID NO: 83120

SEQ ID NO: 111518 - DNA, 1313 bp, Homo Sapiens; identical to SEQ ID NO: 83126

SEQ ID NO: 111519 - DNA, 708 bp, Homo Sapiens; identical to SEQ ID NO: 83127

SEQ ID NO: 111520 - DNA, 1156 bp, Homo Sapiens; identical to SEQ ID NO: 83128

SEQ ID NO: 111521 - DNA, 546 bp, Homo Sapiens; identical to SEQ ID NO: 83138
  misc_feature (64)..(134): n is a, c, g, or t

SEQ ID NO: 111522 - DNA, 709 bp, Homo Sapiens; identical to SEQ ID NO: 83139

SEQ ID NO: 111523 - DNA, 1058 bp, Homo Sapiens; identical to SEQ ID NO: 83141

SEQ ID NO: 111524 - DNA, 717 bp, Homo Sapiens; identical to SEQ ID NO: 83142
  misc_feature (260)..(269): n is a, c, g, or t

SEQ ID NO: 111525 - DNA, 414 bp, Homo Sapiens; identical to SEQ ID NO: 83143

SEQ ID NO: 111526 - DNA, 1738 bp, Homo Sapiens; identical to SEQ ID NO: 83179

SEQ ID NO: 111527 - DNA, 589 bp, Homo Sapiens; identical to SEQ ID NO: 83180

SEQ ID NO: 111528 - DNA, 571 bp, Homo Sapiens; identical to SEQ ID NO: 83186
  misc_feature (74)..(74): n is a, c, g, or t

SEQ ID NO: 111529 - DNA, 831 bp, Homo Sapiens; identical to SEQ ID NO: 83187

SEQ ID NO: 111530 - DNA, 1371 bp, Homo Sapiens; identical to SEQ ID NO: 83191

SEQ ID NO: 111531 - DNA, 616 bp, Homo Sapiens; identical to SEQ ID NO: 83192

SEQ ID NO: 111532 - DNA, 580 bp, Homo Sapiens; identical to SEQ ID NO: 83193

SEQ ID NO: 111533 - DNA, 427 bp, Homo Sapiens; identical to SEQ ID NO: 83194

SEQ ID NO: 111534 - DNA, 829 bp, Homo Sapiens; identical to SEQ ID NO: 83195
  misc_feature (690)..(693): n is a, c, g, or t
  misc_feature (695)..(695): n is a, c, g, or t
  misc_feature (698)..(699): n is a, c, g, or t
  misc_feature (701)..(701): n is a, c, g, or t
  misc_feature (703)..(706): n is a, c, g, or t
  misc_feature (716)..(716): n is a, c, g, or t

SEQ ID NO: 111535 - DNA, 562 bp, Homo Sapiens; identical to SEQ ID NO: 83201
  misc_feature (126)..(362): n is a, c, g, or t

SEQ ID NO: 111536 - DNA, 790 bp, Homo Sapiens; identical to SEQ ID NO: 83202
  misc_feature (115)..(166): n is a, c, g, or t
  misc_feature (254)..(301): n is a, c, g, or t
  misc_feature (323)..(352): n is a, c, g, or t

SEQ ID NO: 111537 - DNA, 427 bp, Homo Sapiens; identical to SEQ ID NO: 83206
  misc_feature (76)..(115): n is a, c, g, or t

SEQ ID NO: 111538 - DNA, 1362 bp, Homo Sapiens; identical to SEQ ID NO: 83207

SEQ ID NO: 111539 - DNA, 1401 bp, Homo Sapiens; identical to SEQ ID NO: 83208
  misc_feature (1037)..(1037): n is a, c, g, or t
  misc_feature (1359)..(1359): n is a, c, g, or t

SEQ ID NO: 111540 - DNA, 493 bp, Homo Sapiens; identical to SEQ ID NO: 83209

SEQ ID NO: 111541 - DNA, 1329 bp, Homo Sapiens; identical to SEQ ID NO: 5577
  misc_feature (944)..(944): n is a, c, g, or t
  misc_feature (963)..(963): n is a, c, g, or t
  misc_feature (1065)..(1065): n is a, c, g, or t
  misc_feature (1112)..(1112): n is a, c, g, or t
  misc_feature (1114)..(1114): n is a, c, g, or t
  misc_feature (1121)..(1121): n is a, c, g, or t
  misc_feature (1177)..(1177): n is a, c, g, or t
  misc_feature (1242)..(1242): n is a, c, g, or t
  misc_feature (1280)..(1280): n is a, c, g, or t

SEQ ID NO: 111542 - DNA, 309 bp, Homo Sapiens; identical to SEQ ID NO: 83216

SEQ ID NO: 111543 - DNA, 622 bp, Homo Sapiens; identical to SEQ ID NO: 83240

SEQ ID NO: 111544 - DNA, 916 bp, Homo Sapiens; identical to SEQ ID NO: 83241

SEQ ID NO: 111545 - DNA, 549 bp, Homo Sapiens; identical to SEQ ID NO: 83243

SEQ ID NO: 111546 - DNA, 1559 bp, Homo Sapiens; identical to SEQ ID NO: 83244
  misc_feature (35)..(36): n is a, c, g, or t
  misc_feature (117)..(117): n is a, c, g, or t
  misc_feature (144)..(144): n is a, c, g, or t
  misc_feature (1371)..(1430): n is a, c, g, or t
  misc_feature (1547)..(1547): n is a, c, g, or t

SEQ ID NO: 111547 - DNA, 732 bp, Homo Sapiens; identical to SEQ ID NO: 83253
  misc_feature (25)..(25): n is a, c, g, or t

SEQ ID NO: 111548 - DNA, 1173 bp, Homo Sapiens; identical to SEQ ID NO: 83254
  misc_feature (75)..(109): n is a, c, g, or t

SEQ ID NO: 111549 - DNA, 1200 bp, Homo Sapiens; identical to SEQ ID NO: 83257
  misc_feature (99)..(156): n is a, c, g, or t

SEQ ID NO: 111550 - DNA, 1256 bp, Homo Sapiens; identical to SEQ ID NO: 83258

SEQ ID NO: 111551 - DNA, 781 bp, Homo Sapiens; identical to SEQ ID NO: 83259

SEQ ID NO: 111552 - DNA, 1317 bp, Homo Sapiens; identical to SEQ ID NO: 83260
  misc_feature (1187)..(1187): n is a, c, g, or t

SEQ ID NO: 111553 - DNA, 156 bp, Homo Sapiens; identical to SEQ ID NO: 83270

SEQ ID NO: 111554 - DNA, 462 bp, Homo Sapiens; identical to SEQ ID NO: 83271
  misc_feature (257)..(317): n is a, c, g, or t
  misc_feature (437)..(437): n is a, c, g, or t
  misc_feature (444)..(444): n is a, c, g, or t

SEQ ID NO: 111555 - DNA, 245 bp, Homo Sapiens; identical to SEQ ID NO: 83272

SEQ ID NO: 111556 - DNA, 272 bp, Homo Sapiens; identical to SEQ ID NO: 83287
  misc_feature (33)..(33): n is a, c, g, or t

SEQ ID NO: 111557 - DNA, 582 bp, Homo Sapiens; identical to SEQ ID NO: 83288

SEQ ID NO: 111558 - DNA, 884 bp, Homo Sapiens; identical to SEQ ID NO: 83289
  misc_feature (670)..(670): n is a, c, g, or t
  misc_feature (731)..(794): n is a, c, g, or t

SEQ ID NO: 111559 - DNA, 752 bp, Homo Sapiens; identical to SEQ ID NO: 83293
  misc_feature (46)..(69): n is a, c, g, or t
  misc_feature (485)..(494): n is a, c, g, or t
  misc_feature (638)..(675): n is a, c, g, or t

SEQ ID NO: 111560 - DNA, 482 bp, Homo Sapiens; identical to SEQ ID NO: 83294
  misc_feature (255)..(301): n is a, c, g, or t

SEQ ID NO: 111561 - DNA, 1053 bp, Homo Sapiens; identical to SEQ ID NO: 83296
  misc_feature (26)..(26): n is a, c, g, or t

SEQ ID NO: 111562 - DNA, 1212 bp, Homo Sapiens; identical to SEQ ID NO: 83297

SEQ ID NO: 111563 - DNA, 853 bp, Homo Sapiens; identical to SEQ ID NO: 83299
  misc_feature (608)..(608): n is a, c, g, or t
  misc_feature (619)..(619): n is a, c, g, or t
  misc_feature (629)..(629): n is a, c, g, or t
  misc_feature (633)..(633): n is a, c, g, or t

SEQ ID NO: 111564 - DNA, 737 bp, Homo Sapiens; identical to SEQ ID NO: 83300

SEQ ID NO: 111565 - DNA, 776 bp, Homo Sapiens; identical to SEQ ID NO: 83315

SEQ ID NO: 111566 - DNA, 313 bp, Homo Sapiens; identical to SEQ ID NO: 83316

SEQ ID NO: 111567 - DNA, 1370 bp, Homo Sapiens; identical to SEQ ID NO: 83350
  misc_feature (780)..(797): n is a, c, g, or t

SEQ ID NO: 111568 - DNA, 778 bp, Homo Sapiens; identical to SEQ ID NO: 83351
  misc_feature (581)..(581): n is a, c, g, or t
  misc_feature (676)..(710): n is a, c, g, or t
  misc_feature (762)..(762): n is a, c, g, or t

SEQ ID NO: 111569 - DNA, 416 bp, Homo Sapiens; identical to SEQ ID NO: 83352

SEQ ID NO: 111570 - DNA, 1557 bp, Homo Sapiens; identical to SEQ ID NO: 83353
  misc_feature (308)..(380): n is a, c, g, or t
  misc_feature (747)..(747): n is a, c, g, or t
  misc_feature (756)..(799): n is a, c, g, or t
  misc_feature (882)..(916): n is a, c, g, or t
  misc_feature (992)..(1005): n is a, c, g, or t
  misc_feature (1143)..(1143): n is a, c, g, or t

SEQ ID NO: 111571 - DNA, 406 bp, Homo Sapiens; identical to SEQ ID NO: 83354

SEQ ID NO: 111572 - DNA, 1313 bp, Homo Sapiens; identical to SEQ ID NO: 83360

SEQ ID NO: 111573 - DNA, 744 bp, Homo Sapiens; identical to SEQ ID NO: 83361

SEQ ID NO: 111574 - DNA, 461 bp, Homo Sapiens; identical to SEQ ID NO: 83363
  misc_feature (63)..(64): n is a, c, g, or t
  misc_feature (151)..(151): n is a, c, g, or t
  misc_feature (164)..(164): n is a, c, g, or t
  misc_feature (174)..(174): n is a, c, g, or t
  misc_feature (176)..(176): n is a, c, g, or t
  misc_feature (178)..(178): n is a, c, g, or t
  misc_feature (180)..(180): n is a, c, g, or t
  misc_feature (426)..(426): n is a, c, g, or t

SEQ ID NO: 111575 - DNA, 582 bp, Homo Sapiens; identical to SEQ ID NO: 83364

SEQ ID NO: 111576 - DNA, 582 bp, Homo Sapiens; identical to SEQ ID NO: 83377

SEQ ID NO: 111577 - DNA, 1103 bp, Homo Sapiens; identical to SEQ ID NO: 83378

SEQ ID NO: 111578 - DNA, 518 bp, Homo Sapiens; identical to SEQ ID NO: 83379
  misc_feature (499)..(499): n is a, c, g, or t

SEQ ID NO: 111579 - DNA, 811 bp, Homo Sapiens; identical to SEQ ID NO: 83382

SEQ ID NO: 111580 - DNA, 1240 bp, Homo Sapiens; identical to SEQ ID NO: 83383

SEQ ID NO: 111581 - DNA, 506 bp, Homo Sapiens; identical to SEQ ID NO: 83395
  misc_feature (426)..(451): n is a, c, g, or t

SEQ ID NO: 111582 - DNA, 888 bp, Homo Sapiens; identical to SEQ ID NO: 83396
  misc_feature (809)..(833): n is a, c, g, or t

SEQ ID NO: 111583 - DNA, 1229 bp, Homo Sapiens; identical to SEQ ID NO: 83409
  misc_feature (537)..(546): n is a, c, g, or t
  misc_feature (1076)..(1076): n is a, c, g, or t

SEQ ID NO: 111584 - DNA, 495 bp, Homo Sapiens; identical to SEQ ID NO: 83410
  misc_feature (18)..(18): n is a, c, g, or t
  misc_feature (29)..(29): n is a, c, g, or t

SEQ ID NO: 111585 - DNA, 1042 bp, Homo Sapiens; identical to SEQ ID NO: 83411
  misc_feature (26)..(26): n is a, c, g, or t
  misc_feature (35)..(35): n is a, c, g, or t
  misc_feature (483)..(487): n is a, c, g, or t
  misc_feature (491)..(491): n is a, c, g, or t
  misc_feature (493)..(493): n is a, c, g, or t
  misc_feature (495)..(495): n is a, c, g, or t
  misc_feature (700)..(725): n is a, c, g, or t
  misc_feature (1032)..(1032): n is a, c, g, or t

SEQ ID NO: 111586 - DNA, 660 bp, Homo Sapiens; identical to SEQ ID NO: 83416
  misc_feature (55)..(55): n is a, c, g, or t
  misc_feature (156)..(156): n is a, c, g, or t
  misc_feature (295)..(295): n is a, c, g, or t
  misc_feature (463)..(463): n is a, c, g, or t
  misc_feature (629)..(629): n is a, c, g, or t

SEQ ID NO: 111587 - DNA, 1053 bp, Homo Sapiens; identical to SEQ ID NO: 83417
  misc_feature (15)..(15): n is a, c, g, or t
  misc_feature (38)..(38): n is a, c, g, or t
  misc_feature (45)..(45): n is a, c, g, or t
  misc_feature (94)..(94): n is a, c, g, or t
  misc_feature (102)..(102): n is a, c, g, or t
  misc_feature (104)..(104): n is a, c, g, or t
  misc_feature (108)..(108): n is a, c, g, or t
  misc_feature (166)..(166): n is a, c, g, or t
  misc_feature (172)..(172): n is a, c, g, or t

SEQ ID NO: 111588 - DNA, 1442 bp, Homo Sapiens; identical to SEQ ID NO: 83418

SEQ ID NO: 111589 - DNA, 1045 bp, Homo Sapiens; identical to SEQ ID NO: 83419
  misc_feature (1022)..(1022): n is a, c, g, or t
  misc_feature (1032)..(1032): n is a, c, g, or t

SEQ ID NO: 111590 - DNA, 467 bp, Homo Sapiens; identical to SEQ ID NO: 83431

SEQ ID NO: 111591 - DNA, 891 bp, Homo Sapiens; identical to SEQ ID NO: 83432

SEQ ID NO: 111592 - DNA, 963 bp, Homo Sapiens; identical to SEQ ID NO: 83451
  misc_feature (151)..(403): n is a, c, g, or t
  misc_feature (633)..(633): n is a, c, g, or t

SEQ ID NO: 111593 - DNA, 1682 bp, Homo Sapiens; identical to SEQ ID NO: 83452
  misc_feature (492)..(501): n is a, c, g, or t
  misc_feature (1617)..(1617): n is a, c, g, or t

SEQ ID NO: 111594 - DNA, 910 bp, Homo Sapiens; identical to SEQ ID NO: 83453

SEQ ID NO: 111595 - DNA, 981 bp, Homo Sapiens; identical to SEQ ID NO: 83454

SEQ ID NO: 111596 - DNA, 1331 bp, Homo Sapiens; identical to SEQ ID NO: 83455

SEQ ID NO: 111597 - DNA, 732 bp, Homo Sapiens; identical to SEQ ID NO: 83461

SEQ ID NO: 111598 - DNA, 596 bp, Homo Sapiens; identical to SEQ ID NO: 83462
  misc_feature (566)..(566): n is a, c, g, or t

SEQ ID NO: 111599 - DNA, 1170 bp, Homo Sapiens; identical to SEQ ID NO: 83463

SEQ ID NO: 111600 - DNA, 644 bp, Homo Sapiens; identical to SEQ ID NO: 83465
  misc_feature (128)..(128): n is a, c, g, or t
  misc_feature (131)..(131): n is a, c, g, or t
  misc_feature (495)..(495): n is a, c, g, or t
  misc_feature (587)..(587): n is a, c, g, or t

SEQ ID NO: 111601 - DNA, 538 bp, Homo Sapiens; identical to SEQ ID NO: 83466

SEQ ID NO: 111602 - DNA, 895 bp, Homo Sapiens; identical to SEQ ID NO: 83467

SEQ ID NO: 111603 - DNA, 383 bp, Homo Sapiens; identical to SEQ ID NO: 83468

SEQ ID NO: 111604 - DNA, 703 bp, Homo Sapiens; identical to SEQ ID NO: 83475
  misc_feature (683)..(683): n is a, c, g, or t

SEQ ID NO: 111605 - DNA, 975 bp, Homo Sapiens; identical to SEQ ID NO: 83476

SEQ ID NO: 111606 - DNA, 1246 bp, Homo Sapiens; identical to SEQ ID NO: 83480
  misc_feature (1141)..(1141): n is a, c, g, or t

SEQ ID NO: 111607 - DNA, 775 bp, Homo Sapiens; identical to SEQ ID NO: 83481

SEQ ID NO: 111608 - DNA, 691 bp, Homo Sapiens; identical to SEQ ID NO: 83489

SEQ ID NO: 111609 - DNA, 749 bp, Homo Sapiens; identical to SEQ ID NO: 83490
  misc_feature (336)..(344): n is a, c, g, or t

SEQ ID NO: 111610 - DNA, 1019 bp, Homo Sapiens; identical to SEQ ID NO: 83491

SEQ ID NO: 111611 - DNA, 549 bp, Homo Sapiens; identical to SEQ ID NO: 83492

SEQ ID NO: 111612 - DNA, 570 bp, Homo Sapiens; identical to SEQ ID NO: 83512
  misc_feature (289)..(289): n is a, c, g, or t

SEQ ID NO: 111613 - DNA, 647 bp, Homo Sapiens; identical to SEQ ID NO: 83513

SEQ ID NO: 111614 - DNA, 484 bp, Homo Sapiens; identical to SEQ ID NO: 83516

SEQ ID NO: 111615 - DNA, 433 bp, Homo Sapiens; identical to SEQ ID NO: 83517

SEQ ID NO: 111616 - DNA, 854 bp, Homo Sapiens; identical to SEQ ID NO: 83523
  misc_feature (75)..(109): n is a, c, g, or t

SEQ ID NO: 111617 - DNA, 1380 bp, Homo Sapiens; identical to SEQ ID NO: 83524
  misc_feature (81)..(115): n is a, c, g, or t

SEQ ID NO: 111618 - DNA, 1065 bp, Homo Sapiens; identical to SEQ ID NO: 83538

SEQ ID NO: 111619 - DNA, 1085 bp, Homo Sapiens; identical to SEQ ID NO: 83539
  misc_feature (745)..(745): n is a, c, g, or t

SEQ ID NO: 111620 - DNA, 969 bp, Homo Sapiens; identical to SEQ ID NO: 83540

SEQ ID NO: 111621 - DNA, 361 bp, Homo Sapiens; identical to SEQ ID NO: 83541

SEQ ID NO: 111622 - DNA, 680 bp, Homo Sapiens; identical to SEQ ID NO: 83543
  misc_feature (429)..(429): n is a, c, g, or t

SEQ ID NO: 111623 - DNA, 465 bp, Homo Sapiens; identical to SEQ ID NO: 83544

SEQ ID NO: 111624 - DNA, 956 bp, Homo Sapiens; identical to SEQ ID NO: 83547

SEQ ID NO: 111625 - DNA, 1389 bp, Homo Sapiens; identical to SEQ ID NO: 83548
  misc_feature (46)..(84): n is a, c, g, or t
  misc_feature (88)..(122): n is a, c, g, or t

SEQ ID NO: 111626 - DNA, 767 bp, Homo Sapiens; identical to SEQ ID NO: 83549

SEQ ID NO: 111627 - DNA, 929 bp, Homo Sapiens; identical to SEQ ID NO: 83550
  misc_feature (86)..(120): n is a, c, g, or t
  misc_feature (203)..(212): n is a, c, g, or t

SEQ ID NO: 111628 - DNA, 605 bp, Homo Sapiens; identical to SEQ ID NO: 83570
  misc_feature (499)..(549): n is a, c, g, or t

SEQ ID NO: 111629 - DNA, 1011 bp, Homo Sapiens; identical to SEQ ID NO: 83571

SEQ ID NO: 111630 - DNA, 470 bp, Homo Sapiens; identical to SEQ ID NO: 83573

SEQ ID NO: 111631 - DNA, 610 bp, Homo Sapiens; identical to SEQ ID NO: 83574
  misc_feature (79)..(79): n is a, c, g, or t

SEQ ID NO: 111632 - DNA, 549 bp, Homo Sapiens; identical to SEQ ID NO: 83575

SEQ ID NO: 111633 - DNA, 595 bp, Homo Sapiens; identical to SEQ ID NO: 83576
  misc_feature (486)..(486): n is a, c, g, or t

SEQ ID NO: 111634 - DNA, 989 bp, Homo Sapiens; identical to SEQ ID NO: 83577

SEQ ID NO: 111635 - DNA, 1554 bp, Homo Sapiens; identical to SEQ ID NO: 83578
  misc_feature (1413)..(1445): n is a, c, g, or t

SEQ ID NO: 111636 - DNA, 457 bp, Homo Sapiens; identical to SEQ ID NO: 83579
  misc_feature (195)..(195): n is a, c, g, or t

SEQ ID NO: 111637 - DNA, 588 bp, Homo Sapiens; identical to SEQ ID NO: 83580

SEQ ID NO: 111638 - DNA, 448 bp, Homo Sapiens; identical to SEQ ID NO: 83581

SEQ ID NO: 111639 - DNA, 484 bp, Homo Sapiens; identical to SEQ ID NO: 83593
  misc_feature (25)..(25): n is a, c, g, or t

SEQ ID NO: 111640 - DNA, 937 bp, Homo Sapiens; identical to SEQ ID NO: 83594
  misc_feature (780)..(780): n is a, c, g, or t
  misc_feature (798)..(798): n is a, c, g, or t

SEQ ID NO: 111641 - DNA, 960 bp, Homo Sapiens; identical to SEQ ID NO: 83595
  misc_feature (794)..(794): n is a, c, g, or t
  misc_feature (820)..(820): n is a, c, g, or t
  misc_feature (827)..(827): n is a, c, g, or t
  misc_feature (859)..(859): n is a, c, g, or t
  misc_feature (921)..(921): n is a, c, g, or t

SEQ ID NO: 111642 - DNA, 481 bp, Homo Sapiens; identical to SEQ ID NO: 83608
  misc_feature (371)..(371): n is a, c, g, or t
  misc_feature (426)..(426): n is a, c, g, or t
  misc_feature (443)..(443): n is a, c, g, or t
  misc_feature (456)..(456): n is a, c, g, or t

SEQ ID NO: 111643 - DNA, 529 bp, Homo Sapiens; identical to SEQ ID NO: 83609
  misc_feature (30)..(30): n is a, c, g, or t

SEQ ID NO: 111644 - DNA, 919 bp, Homo Sapiens; identical to SEQ ID NO: 83614
  misc_feature (99)..(133): n is a, c, g, or t

SEQ ID NO: 111645 - DNA, 927 bp, Homo Sapiens; identical to SEQ ID NO: 83615

SEQ ID NO: 111646 - DNA, 1168 bp, Homo Sapiens; identical to SEQ ID NO: 83616

SEQ ID NO: 111647 - DNA, 946 bp, Homo Sapiens; identical to SEQ ID NO: 83617

SEQ ID NO: 111648 - DNA, 1049 bp, Homo Sapiens; identical to SEQ ID NO: 83623

SEQ ID NO: 111649 - DNA, 458 bp, Homo Sapiens; identical to SEQ ID NO: 83624

SEQ ID NO: 111650 - DNA, 652 bp, Homo Sapiens; identical to SEQ ID NO: 83628

SEQ ID NO: 111651 - DNA, 963 bp, Homo Sapiens; identical to SEQ ID NO: 83629

SEQ ID NO: 111652 - DNA, 915 bp, Homo Sapiens; identical to SEQ ID NO: 83640

SEQ ID NO: 111653 - DNA, 721 bp, Homo Sapiens; identical to SEQ ID NO: 83641
  misc_feature (63)..(155): n is a, c, g, or t

SEQ ID NO: 111654 - DNA, 488 bp, Homo Sapiens; identical to SEQ ID NO: 83642
  misc_feature (459)..(459): n is a, c, g, or t

SEQ ID NO: 111655 - DNA, 1812 bp, Homo Sapiens; identical to SEQ ID NO: 83643
  misc_feature (943)..(943): n is a, c, g, or t

SEQ ID NO: 111656 - DNA, 535 bp, Homo Sapiens; identical to SEQ ID NO: 83644
  misc_feature (121)..(213): n is a, c, g, or t

SEQ ID NO: 111657 - DNA, 542 bp, Homo Sapiens; identical to SEQ ID NO: 83645

SEQ ID NO: 111658 - DNA, 1008 bp, Homo Sapiens; identical to SEQ ID NO: 83646
  misc_feature (270)..(362): n is a, c, g, or t

SEQ ID NO: 111659 - DNA, 724 bp, Homo Sapiens; identical to SEQ ID NO: 83657

SEQ ID NO: 111660 - DNA, 1136 bp, Homo Sapiens; identical to SEQ ID NO: 83658
  misc_feature (1081)..(1081): n is a, c, g, or t
  misc_feature (1117)..(1117): n is a, c, g, or t

SEQ ID NO: 111661 - DNA, 641 bp, Homo Sapiens; identical to SEQ ID NO: 83659
  misc_feature (591)..(591): n is a, c, g, or t

SEQ ID NO: 111662 - DNA, 672 bp, Homo Sapiens; identical to SEQ ID NO: 83660

SEQ ID NO: 111663 - DNA, 1443 bp, Homo Sapiens; identical to SEQ ID NO: 83683

SEQ ID NO: 111664 - DNA, 882 bp, Homo Sapiens; identical to SEQ ID NO: 83684

SEQ ID NO: 111665 - DNA, 801 bp, Homo Sapiens; identical to SEQ ID NO: 83702
  misc_feature (224)..(341): n is a, c, g, or t
  misc_feature (783)..(783): n is a, c, g, or t

SEQ ID NO: 111666 - DNA, 1069 bp, Homo Sapiens; identical to SEQ ID NO: 83703

SEQ ID NO: 111667 - DNA, 771 bp, Homo Sapiens; identical to SEQ ID NO: 83704
  misc_feature (456)..(456): n is a, c, g, or t
  misc_feature (672)..(672): n is a, c, g, or t
  misc_feature (689)..(689): n is a, c, g, or t
  misc_feature (737)..(737): n is a, c, g, or t

SEQ ID NO: 111668 - DNA, 1321 bp, Homo Sapiens; identical to SEQ ID NO: 83708

SEQ ID NO: 111669 - DNA, 1236 bp, Homo Sapiens; identical to SEQ ID NO: 83709
  misc_feature (994)..(994): n is a, c, g, or t
  misc_feature (1072)..(1073): n is a, c, g, or t
  misc_feature (1090)..(1090): n is a, c, g, or t

SEQ ID NO: 111670 - DNA, 691 bp, Homo Sapiens; identical to SEQ ID NO: 83712

SEQ ID NO: 111671 - DNA, 615 bp, Homo Sapiens; identical to SEQ ID NO: 83713

SEQ ID NO: 111672 - DNA, 536 bp, Homo Sapiens; identical to SEQ ID NO: 83726
  misc_feature (461)..(461): n is a, c, g, or t
  misc_feature (495)..(495): n is a, c, g, or t
  misc_feature (509)..(509): n is a, c, g, or t

SEQ ID NO: 111673 - DNA, 1049 bp, Homo Sapiens; identical to SEQ ID NO: 83727
  misc_feature (929)..(941): n is a, c, g, or t

SEQ ID NO: 111674 - DNA, 846 bp, Homo Sapiens; identical to SEQ ID NO: 83728

SEQ ID NO: 111675 - DNA, 532 bp, Homo Sapiens; identical to SEQ ID NO: 83729
  misc_feature (367)..(367): n is a, c, g, or t

SEQ ID NO: 111676 - DNA, 843 bp, Homo Sapiens; identical to SEQ ID NO: 83730
  misc_feature (84)..(118): n is a, c, g, or t

SEQ ID NO: 111677 - DNA, 660 bp, Homo Sapiens; identical to SEQ ID NO: 83731

SEQ ID NO: 111678 - DNA, 954 bp, Homo Sapiens; identical to SEQ ID NO: 83750

SEQ ID NO: 111679 - DNA, 1534 bp, Homo Sapiens; identical to SEQ ID NO: 83751
  misc_feature (73)..(108): n is a, c, g, or t
  misc_feature (1224)..(1370): n is a, c, g, or t

SEQ ID NO: 111680 - DNA, 451 bp, Homo Sapiens; identical to SEQ ID NO: 83757

SEQ ID NO: 111681 - DNA, 763 bp, Homo Sapiens; identical to SEQ ID NO: 83758

SEQ ID NO: 111682 - DNA, 1303 bp, Homo Sapiens; identical to SEQ ID NO: 83783

SEQ ID NO: 111683 - DNA, 829 bp, Homo Sapiens; identical to SEQ ID NO: 83784

SEQ ID NO: 111684 - DNA, 1087 bp, Homo Sapiens; identical to SEQ ID NO: 83797

SEQ ID NO: 111685 - DNA, 827 bp, Homo Sapiens; identical to SEQ ID NO: 83798

SEQ ID NO: 111686 - DNA, 1102 bp, Homo Sapiens; identical to SEQ ID NO: 83799

SEQ ID NO: 111687 - DNA, 1647 bp, Homo Sapiens; identical to SEQ ID NO: 83800
  misc_feature (26)..(26): n is a, c, g, or t
  misc_feature (303)..(303): n is a, c, g, or t
  misc_feature (937)..(937): n is a, c, g, or t

SEQ ID NO: 111688 - DNA, 918 bp, Homo Sapiens; identical to SEQ ID NO: 83801

SEQ ID NO: 111689 - DNA, 1325 bp, Homo Sapiens; identical to SEQ ID NO: 83817

SEQ ID NO: 111690 - DNA, 752 bp, Homo Sapiens; identical to SEQ ID NO: 83818
  misc_feature (538)..(540): n is a, c, g, or t

SEQ ID NO: 111691 - DNA, 547 bp, Homo Sapiens; identical to SEQ ID NO: 83837

SEQ ID NO: 111692 - DNA, 607 bp, Homo Sapiens; identical to SEQ ID NO: 83838

SEQ ID NO: 111693 - DNA, 547 bp, Homo Sapiens; identical to SEQ ID NO: 83843
  misc_feature (471)..(471): n is a, c, g, or t
  misc_feature (499)..(499): n is a, c, g, or t
  misc_feature (522)..(522): n is a, c, g, or t

SEQ ID NO: 111694 - DNA, 793 bp, Homo Sapiens; identical to SEQ ID NO: 83844

SEQ ID NO: 111695 - DNA, 431 bp, Homo Sapiens; identical to SEQ ID NO: 83846
  misc_feature (11)..(11): n is a, c, g, or t
  misc_feature (195)..(195): n is a, c, g, or t
  misc_feature (355)..(355): n is a, c, g, or t

SEQ ID NO: 111696 - DNA, 449 bp, Homo Sapiens; identical to SEQ ID NO: 83847

SEQ ID NO: 111697 - DNA, 469 bp, Homo Sapiens; identical to SEQ ID NO: 83848

SEQ ID NO: 111698 - DNA, 716 bp, Homo Sapiens; identical to SEQ ID NO: 83859
  misc_feature (179)..(179): n is a, c, g, or t
  misc_feature (674)..(674): n is a, c, g, or t

SEQ ID NO: 111699 - DNA, 573 bp, Homo Sapiens; identical to SEQ ID NO: 83860

SEQ ID NO: 111700 - DNA, 1645 bp, Homo Sapiens; identical to SEQ ID NO: 83869
  misc_feature (1420)..(1420): n is a, c, g, or t

SEQ ID NO: 111701 - DNA, 887 bp, Homo Sapiens; identical to SEQ ID NO: 83870

SEQ ID NO: 111702 - DNA, 783 bp, Homo Sapiens; identical to SEQ ID NO: 83871

SEQ ID NO: 111703 - DNA, 1353 bp, Homo Sapiens; identical to SEQ ID NO: 83876

SEQ ID NO: 111704 - DNA, 441 bp, Homo Sapiens; identical to SEQ ID NO: 83877
  misc_feature (231)..(260): n is a, c, g, or t

SEQ ID NO: 111705 - DNA, 698 bp, Homo Sapiens; identical to SEQ ID NO: 83878

SEQ ID NO: 111706 - DNA, 545 bp, Homo Sapiens; identical to SEQ ID NO: 83879
  misc_feature (412)..(412): n is a, c, g, or t

SEQ ID NO: 111707 - DNA, 471 bp, Homo Sapiens; identical to SEQ ID NO: 83880
  misc_feature (145)..(145): n is a, c, g, or t

SEQ ID NO: 111708 - DNA, 828 bp, Homo Sapiens; identical to SEQ ID NO: 83881

SEQ ID NO: 111709 - DNA, 577 bp, Homo Sapiens; identical to SEQ ID NO: 83893

SEQ ID NO: 111710 - DNA, 947 bp, Homo Sapiens; identical to SEQ ID NO: 83894
  misc_feature (865)..(866): n is a, c, g, or t
  misc_feature (869)..(869): n is a, c, g, or t
  misc_feature (871)..(872): n is a, c, g, or t
  misc_feature (876)..(876): n is a, c, g, or t
  misc_feature (879)..(880): n is a, c, g, or t
  misc_feature (884)..(884): n is a, c, g, or t
  misc_feature (886)..(886): n is a, c, g, or t
  misc_feature (888)..(899): n is a, c, g, or t
  misc_feature (902)..(902): n is a, c, g, or t
  misc_feature (911)..(911): n is a, c, g, or t
  misc_feature (933)..(933): n is a, c, g, or t

SEQ ID NO: 111711 - DNA, 651 bp, Homo Sapiens; identical to SEQ ID NO: 83897
  misc_feature (557)..(557): n is a, c, g, or t
  misc_feature (563)..(563): n is a, c, g, or t
  misc_feature (582)..(582): n is a, c, g, or t

SEQ ID NO: 111712 - DNA, 1207 bp, Homo Sapiens; identical to SEQ ID NO: 83898
  misc_feature (213)..(246): n is a, c, g, or t

SEQ ID NO: 111713 - DNA, 893 bp, Homo Sapiens; identical to SEQ ID NO: 83902
  misc_feature (66)..(66): n is a, c, g, or t
  misc_feature (613)..(613): n is a, c, g, or t

SEQ ID NO: 111714 - DNA, 1025 bp, Homo Sapiens; identical to SEQ ID NO: 83903
  misc_feature (36)..(36): n is a, c, g, or t
  misc_feature (863)..(863): n is a, c, g, or t

SEQ ID NO: 111715 - DNA, 701 bp, Homo Sapiens; identical to SEQ ID NO: 83915

SEQ ID NO: 111716 - DNA, 885 bp, Homo Sapiens; identical to SEQ ID NO: 83916

SEQ ID NO: 111717 - DNA, 680 bp, Homo Sapiens; identical to SEQ ID NO: 83930

SEQ ID NO: 111718 - DNA, 582 bp, Homo Sapiens; identical to SEQ ID NO: 83931

SEQ ID NO: 111719 - DNA, 507 bp, Homo Sapiens; identical to SEQ ID NO: 83945

SEQ ID NO: 111720 - DNA, 1182 bp, Homo Sapiens; identical to SEQ ID NO: 83946

SEQ ID NO: 111721 - DNA, 352 bp, Homo Sapiens; identical to SEQ ID NO: 83947

SEQ ID NO: 111722 - DNA, 1296 bp, Homo Sapiens; identical to SEQ ID NO: 83948
  misc_feature (619)..(733): n is a, c, g, or t

SEQ ID NO: 111723 - DNA, 576 bp, Homo Sapiens; identical to SEQ ID NO: 83954
  misc_feature (30)..(30): n is a, c, g, or t
  misc_feature (37)..(37): n is a, c, g, or t
  misc_feature (43)..(43): n is a, c, g, or t
  misc_feature (64)..(64): n is a, c, g, or t
  misc_feature (70)..(70): n is a, c, g, or t
  misc_feature (99)..(99): n is a, c, g, or t
  misc_feature (136)..(136): n is a, c, g, or t
  misc_feature (147)..(147): n is a, c, g, or t

SEQ ID NO: 111724 - DNA, 461 bp, Homo Sapiens; identical to SEQ ID NO: 83955
  misc_feature (85)..(141): n is a, c, g, or t

SEQ ID NO: 111725 - DNA, 535 bp, Homo Sapiens; identical to SEQ ID NO: 83956
  misc_feature (73)..(73): n is a, c, g, or t
  misc_feature (194)..(194): n is a, c, g, or t
  misc_feature (434)..(434): n is a, c, g, or t
  misc_feature (456)..(456): n is a, c, g, or t
  misc_feature (510)..(510): n is a, c, g, or t

SEQ ID NO: 111726 - DNA, 848 bp, Homo Sapiens; identical to SEQ ID NO: 83957

SEQ ID NO: 111727 - DNA, 570 bp, Homo Sapiens; identical to SEQ ID NO: 83961

SEQ ID NO: 111728 - DNA, 526 bp, Homo Sapiens; identical to SEQ ID NO: 83962

SEQ ID NO: 111729 - DNA, 472 bp, Homo Sapiens; identical to SEQ ID NO: 83969
  misc_feature (290)..(308): n is a, c, g, or t
  misc_feature (313)..(325): n is a, c, g, or t

SEQ ID NO: 111730 - DNA, 2889 bp, Homo Sapiens; identical to SEQ ID NO: 83970
  misc_feature (159)..(171): n is a, c, g, or t

SEQ ID NO: 111731 - DNA, 864 bp, Homo Sapiens; identical to SEQ ID NO: 83977

SEQ ID NO: 111732 - DNA, 877 bp, Homo Sapiens; identical to SEQ ID NO: 83978

SEQ ID NO: 111733 - DNA, 657 bp, Homo Sapiens; identical to SEQ ID NO: 83985

SEQ ID NO: 111734 - DNA, 875 bp, Homo Sapiens; identical to SEQ ID NO: 83986

SEQ ID NO: 111735 - DNA, 1080 bp, Homo Sapiens; identical to SEQ ID NO: 83987

SEQ ID NO: 111736 - DNA, 466 bp, Homo Sapiens; identical to SEQ ID NO: 83988
  misc_feature (387)..(397): n is a, c, g, or t
  misc_feature (438)..(438): n is a, c, g, or t

SEQ ID NO: 111737 - DNA, 781 bp, Homo Sapiens; identical to SEQ ID NO: 83989
  misc_feature (344)..(374): n is a, c, g, or t

SEQ ID NO: 111738 - DNA, 611 bp, Homo Sapiens; identical to SEQ ID NO: 83996
  misc_feature (169)..(169): n is a, c, g, or t
  misc_feature (301)..(301): n is a, c, g, or t

SEQ ID NO: 111739 - DNA, 584 bp, Homo Sapiens; identical to SEQ ID NO: 83997
  misc_feature (49)..(49): n is a, c, g, or t

SEQ ID NO: 111740 - DNA, 533 bp, Homo Sapiens; identical to SEQ ID NO: 83998

SEQ ID NO: 111741 - DNA, 1902 bp, Homo Sapiens; identical to SEQ ID NO: 84002

SEQ ID NO: 111742 - DNA, 362 bp, Homo Sapiens; identical to SEQ ID NO: 84003

SEQ ID NO: 111743 - DNA, 968 bp, Homo Sapiens; identical to SEQ ID NO: 84040
  misc_feature (855)..(889): n is a, c, g, or t

SEQ ID NO: 111744 - DNA, 186 bp, Homo Sapiens; identical to SEQ ID NO: 84041

SEQ ID NO: 111745 - DNA, 1007 bp, Homo Sapiens; identical to SEQ ID NO: 84044
  misc_feature (463)..(473): n is a, c, g, or t
  misc_feature (730)..(739): n is a, c, g, or t

SEQ ID NO: 111746 - DNA, 469 bp, Homo Sapiens; identical to SEQ ID NO: 6178
  misc_feature (414)..(423): n is a, c, g, or t

SEQ ID NO: 111747 - DNA, 928 bp, Homo Sapiens; identical to SEQ ID NO: 84048
  misc_feature (323)..(411): n is a, c, g, or t
  misc_feature (685)..(685): n is a, c, g, or t

SEQ ID NO: 111748 - DNA, 977 bp, Homo Sapiens; identical to SEQ ID NO: 84049
  misc_feature (261)..(349): n is a, c, g, or t
  misc_feature (674)..(736): n is a, c, g, or t

SEQ ID NO: 111749 - DNA, 775 bp, Homo Sapiens; identical to SEQ ID NO: 84050
  misc_feature (231)..(278): n is a, c, g, or t
  misc_feature (358)..(408): n is a, c, g, or t

SEQ ID NO: 111750 - DNA, 1694 bp, Homo Sapiens; identical to SEQ ID NO: 84051
  misc_feature (1292)..(1336): n is a, c, g, or t

SEQ ID NO: 111751 - DNA, 855 bp, Homo Sapiens; identical to SEQ ID NO: 84052

SEQ ID NO: 111752 - DNA, 1001 bp, Homo Sapiens; identical to SEQ ID NO: 84054

SEQ ID NO: 111753 - DNA, 1111 bp, Homo Sapiens; identical to SEQ ID NO: 84055
  misc_feature (891)..(891): n is a, c, g, or t
  misc_feature (931)..(931): n is a, c, g, or t

SEQ ID NO: 111754 - DNA, 802 bp, Homo Sapiens; identical to SEQ ID NO: 84061

SEQ ID NO: 111755 - DNA, 535 bp, Homo Sapiens; identical to SEQ ID NO: 84062
  misc_feature (390)..(390): n is a, c, g, or t

SEQ ID NO: 111756 - DNA, 718 bp, Homo Sapiens; identical to SEQ ID NO: 84068
  misc_feature (29)..(29): n is a, c, g, or t
  misc_feature (631)..(631): n is a, c, g, or t

SEQ ID NO: 111757 - DNA, 447 bp, Homo Sapiens; identical to SEQ ID NO: 84069

SEQ ID NO: 111758 - DNA, 1083 bp, Homo Sapiens; identical to SEQ ID NO: 84090

SEQ ID NO: 111759 - DNA, 1034 bp, Homo Sapiens; identical to SEQ ID NO: 84091

SEQ ID NO: 111760 - DNA, 984 bp, Homo Sapiens; identical to SEQ ID NO: 84092

SEQ ID NO: 111761 - DNA, 1269 bp, Homo Sapiens; identical to SEQ ID NO: 84104
  misc_feature (1121)..(1121): n is a, c, g, or t

SEQ ID NO: 111762 - DNA, 1034 bp, Homo Sapiens; identical to SEQ ID NO: 84105

SEQ ID NO: 111763 - DNA, 828 bp, Homo Sapiens; identical to SEQ ID NO: 84121

SEQ ID NO: 111764 - DNA, 919 bp, Homo Sapiens; identical to SEQ ID NO: 84122

SEQ ID NO: 111765 - DNA, 637 bp, Homo Sapiens; identical to SEQ ID NO: 84125
  misc_feature (23)..(23): n is a, c, g, or t
  misc_feature (61)..(61): n is a, c, g, or t
  misc_feature (93)..(93): n is a, c, g, or t
  misc_feature (116)..(116): n is a, c, g, or t

SEQ ID NO: 111766 - DNA, 1153 bp, Homo Sapiens; identical to SEQ ID NO: 84126

SEQ ID NO: 111767 - DNA, 1403 bp, Homo Sapiens; identical to SEQ ID NO: 84152

SEQ ID NO: 111768 - DNA, 452 bp, Homo Sapiens; identical to SEQ ID NO: 84153

SEQ ID NO: 111769 - DNA, 1103 bp, Homo Sapiens; identical to SEQ ID NO: 84170

SEQ ID NO: 111770 - DNA, 436 bp, Homo Sapiens; identical to SEQ ID NO: 84171

SEQ ID NO: 111771 - DNA, 444 bp, Homo Sapiens; identical to SEQ ID NO: 84183

SEQ ID NO: 111772 - DNA, 1229 bp, Homo Sapiens; identical to SEQ ID NO: 84184

SEQ ID NO: 111773 - DNA, 3166 bp, Homo Sapiens; identical to SEQ ID NO: 84202

SEQ ID NO: 111774 - DNA, 1047 bp, Homo Sapiens; identical to SEQ ID NO: 84203
  misc_feature (206)..(206): n is a, c, g, or t

SEQ ID NO: 111775 - DNA, 1122 bp, Homo Sapiens; identical to SEQ ID NO: 84220

SEQ ID NO: 111776 - DNA, 504 bp, Homo Sapiens; identical to SEQ ID NO: 84221

SEQ ID NO: 111777 - DNA, 591 bp, Homo Sapiens; identical to SEQ ID NO: 84223
  misc_feature (514)..(514): n is a, c, g, or t
  misc_feature (523)..(523): n is a, c, g, or t
  misc_feature (529)..(529): n is a, c, g, or t
  misc_feature (563)..(563): n is a, c, g, or t

SEQ ID NO: 111778 - DNA, 1366 bp, Homo Sapiens; identical to SEQ ID NO: 84224
  misc_feature (429)..(438): n is a, c, g, or t

SEQ ID NO: 111779 - DNA, 793 bp, Homo Sapiens; identical to SEQ ID NO: 84229

SEQ ID NO: 111780 - DNA, 835 bp, Homo Sapiens; identical to SEQ ID NO: 84230
  misc_feature (799)..(799): n is a, c, g, or t

SEQ ID NO: 111781 - DNA, 1515 bp, Homo Sapiens; identical to SEQ ID NO: 84237
  misc_feature (143)..(169): n is a, c, g, or t
  misc_feature (859)..(859): n is a, c, g, or t
  misc_feature (887)..(887): n is a, c, g, or t

SEQ ID NO: 111782 - DNA, 1198 bp, Homo Sapiens; identical to SEQ ID NO: 84238
  misc_feature (1055)..(1055): n is a, c, g, or t
  misc_feature (1076)..(1076): n is a, c, g, or t

SEQ ID NO: 111783 - DNA, 1263 bp, Homo Sapiens; identical to SEQ ID NO: 84259

SEQ ID NO: 111784 - DNA, 1032 bp, Homo Sapiens; identical to SEQ ID NO: 84260

SEQ ID NO: 111785 - DNA, 651 bp, Homo Sapiens; identical to SEQ ID NO: 84261

SEQ ID NO: 111786 - DNA, 897 bp, Homo Sapiens; identical to SEQ ID NO: 84262

SEQ ID NO: 111787 - DNA, 1868 bp, Homo Sapiens; identical to SEQ ID NO: 84263
  misc_feature (1816)..(1825): n is a, c, g, or t

SEQ ID NO: 111788 - DNA, 891 bp, Homo Sapiens; identical to SEQ ID NO: 84264

SEQ ID NO: 111789 - DNA, 537 bp, Homo Sapiens; identical to SEQ ID NO: 84265

SEQ ID NO: 111790 - DNA, 761 bp, Homo Sapiens; identical to SEQ ID NO: 84271

SEQ ID NO: 111791 - DNA, 911 bp, Homo Sapiens; identical to SEQ ID NO: 84272

SEQ ID NO: 111792 - DNA, 1582 bp, Homo Sapiens; identical to SEQ ID NO: 84273

SEQ ID NO: 111793 - DNA, 869 bp, Homo Sapiens; identical to SEQ ID NO: 84283

SEQ ID NO: 111794 - DNA, 883 bp, Homo Sapiens; identical to SEQ ID NO: 84284

SEQ ID NO: 111795 - DNA, 737 bp, Homo Sapiens; identical to SEQ ID NO: 84286

SEQ ID NO: 111796 - DNA, 517 bp, Homo Sapiens; identical to SEQ ID NO: 84287

SEQ ID NO: 111797 - DNA, 1025 bp, Homo Sapiens; identical to SEQ ID NO: 84288
  misc_feature (882)..(882): n is a, c, g, or t

SEQ ID NO: 111798 - DNA, 507 bp, Homo Sapiens; identical to SEQ ID NO: 84289
  misc_feature (392)..(416): n is a, c, g, or t

SEQ ID NO: 111799 - DNA, 518 bp, Homo Sapiens; identical to SEQ ID NO: 84290
  misc_feature (392)..(416): n is a, c, g, or t

SEQ ID NO: 111800 - DNA, 783 bp, Homo Sapiens; identical to SEQ ID NO: 84301

SEQ ID NO: 111801 - DNA, 780 bp, Homo Sapiens; identical to SEQ ID NO: 84302

SEQ ID NO: 111802 - DNA, 814 bp, Homo Sapiens; identical to SEQ ID NO: 84303

SEQ ID NO: 111803 - DNA, 969 bp, Homo Sapiens; identical to SEQ ID NO: 84307

SEQ ID NO: 111804 - DNA, 1136 bp, Homo Sapiens; identical to SEQ ID NO: 84308
  misc_feature (925)..(925): n is a, c, g, or t
  misc_feature (1044)..(1044): n is a, c, g, or t
  misc_feature (1069)..(1069): n is a, c, g, or t
  misc_feature (1097)..(1097): n is a, c, g, or t

SEQ ID NO: 111805 - DNA, 1105 bp, Homo Sapiens; identical to SEQ ID NO: 84309
  misc_feature (898)..(898): n is a, c, g, or t
  misc_feature (912)..(912): n is a, c, g, or t
  misc_feature (932)..(932): n is a, c, g, or t
  misc_feature (1041)..(1041): n is a, c, g, or t

SEQ ID NO: 111806 - DNA, 1456 bp, Homo Sapiens; identical to SEQ ID NO: 84317

SEQ ID NO: 111807 - DNA, 879 bp, Homo Sapiens; identical to SEQ ID NO: 84318

SEQ ID NO: 111808 - DNA, 1200 bp, Homo Sapiens; identical to SEQ ID NO: 84319

SEQ ID NO: 111809 - DNA, 970 bp, Homo Sapiens; identical to SEQ ID NO: 84320
  misc_feature (912)..(912): n is a, c, g, or t

SEQ ID NO: 111810 - DNA, 979 bp, Homo Sapiens; identical to SEQ ID NO: 84323
  misc_feature (852)..(915): n is a, c, g, or t

SEQ ID NO: 111811 - DNA, 1293 bp, Homo Sapiens; identical to SEQ ID NO: 84324
  misc_feature (1029)..(1029): n is a, c, g, or t
  misc_feature (1185)..(1193): n is a, c, g, or t

SEQ ID NO: 111812 - DNA, 907 bp, Homo Sapiens; identical to SEQ ID NO: 84329

SEQ ID NO: 111813 - DNA, 1653 bp, Homo Sapiens; identical to SEQ ID NO: 84330
  misc_feature (100)..(108): n is a, c, g, or t
  misc_feature (288)..(288): n is a, c, g, or t

SEQ ID NO: 111814 - DNA, 498 bp, Homo Sapiens; identical to SEQ ID NO: 84332

SEQ ID NO: 111815 - DNA, 1469 bp, Homo Sapiens; identical to SEQ ID NO: 84333
  misc_feature (540)..(541): n is a, c, g, or t

SEQ ID NO: 111816 - DNA, 674 bp, Homo Sapiens; identical to SEQ ID NO: 84334

SEQ ID NO: 111817 - DNA, 736 bp, Homo Sapiens; identical to SEQ ID NO: 84335

SEQ ID NO: 111818 - DNA, 786 bp, Homo Sapiens; identical to SEQ ID NO: 84336
  misc_feature (162)..(213): n is a, c, g, or t

SEQ ID NO: 111819 - DNA, 500 bp, Homo Sapiens; identical to SEQ ID NO: 84343

SEQ ID NO: 111820 - DNA, 550 bp, Homo Sapiens; identical to SEQ ID NO: 84344
  misc_feature (218)..(237): n is a, c, g, or t
  misc_feature (360)..(420): n is a, c, g, or t

SEQ ID NO: 111821 - DNA, 508 bp, Homo Sapiens; identical to SEQ ID NO: 84345
  misc_feature (182)..(236): n is a, c, g, or t
  misc_feature (394)..(415): n is a, c, g, or t

SEQ ID NO: 111822 - DNA, 807 bp, Homo Sapiens; identical to SEQ ID NO: 84346
  misc_feature (12)..(12): n is a, c, g, or t
  misc_feature (174)..(193): n is a, c, g, or t
  misc_feature (316)..(376): n is a, c, g, or t

SEQ ID NO: 111823 - DNA, 2130 bp, Homo Sapiens; identical to SEQ ID NO: 84348

SEQ ID NO: 111824 - DNA, 665 bp, Homo Sapiens; identical to SEQ ID NO: 84349

SEQ ID NO: 111825 - DNA, 1081 bp, Homo Sapiens; identical to SEQ ID NO: 84361
  misc_feature (347)..(360): n is a, c, g, or t

SEQ ID NO: 111826 - DNA, 1038 bp, Homo Sapiens; identical to SEQ ID NO: 84362

SEQ ID NO: 111827 - DNA, 373 bp, Homo Sapiens; identical to SEQ ID NO: 84363

SEQ ID NO: 111828 - DNA, 615 bp, Homo Sapiens; identical to SEQ ID NO: 84369
  misc_feature (231)..(259): n is a, c, g, or t
  misc_feature (261)..(291): n is a, c, g, or t
  misc_feature (549)..(565): n is a, c, g, or t

SEQ ID NO: 111829 - DNA, 826 bp, Homo Sapiens; identical to SEQ ID NO: 84370
  misc_feature (454)..(454): n is a, c, g, or t
  misc_feature (495)..(531): n is a, c, g, or t

SEQ ID NO: 111830 - DNA, 1034 bp, Homo Sapiens; identical to SEQ ID NO: 84371
  misc_feature (537)..(578): n is a, c, g, or t
  misc_feature (931)..(989): n is a, c, g, or t

SEQ ID NO: 111831 - DNA, 597 bp, Homo Sapiens; identical to SEQ ID NO: 84398
  misc_feature (263)..(305): n is a, c, g, or t
  misc_feature (400)..(400): n is a, c, g, or t

SEQ ID NO: 111832 - DNA, 636 bp, Homo Sapiens; identical to SEQ ID NO: 84399
  misc_feature (112)..(154): n is a, c, g, or t

SEQ ID NO: 111833 - DNA, 368 bp, Homo Sapiens; identical to SEQ ID NO: 84410

SEQ ID NO: 111834 - DNA, 779 bp, Homo Sapiens; identical to SEQ ID NO: 84411
  misc_feature (353)..(362): n is a, c, g, or t

SEQ ID NO: 111835 - DNA, 889 bp, Homo Sapiens; identical to SEQ ID NO: 84412
  misc_feature (404)..(412): n is a, c, g, or t

SEQ ID NO: 111836 - DNA, 795 bp, Homo Sapiens; identical to SEQ ID NO: 84416

SEQ ID NO: 111837 - DNA, 512 bp, Homo Sapiens; identical to SEQ ID NO: 84417

SEQ ID NO: 111838 - DNA, 760 bp, Homo Sapiens; identical to SEQ ID NO: 84423

SEQ ID NO: 111839 - DNA, 526 bp, Homo Sapiens; identical to SEQ ID NO: 84424

SEQ ID NO: 111840 - DNA, 687 bp, Homo Sapiens; identical to SEQ ID NO: 84425

SEQ ID NO: 111841 - DNA, 369 bp, Homo Sapiens; identical to SEQ ID NO: 84431

SEQ ID NO: 111842 - DNA, 748 bp, Homo Sapiens; identical to SEQ ID NO: 84432

SEQ ID NO: 111843 - DNA, 1037 bp, Homo Sapiens; identical to SEQ ID NO: 84433
  misc_feature (610)..(644): n is a, c, g, or t

SEQ ID NO: 111844 - DNA, 443 bp, Homo Sapiens; identical to SEQ ID NO: 84441
  misc_feature (11)..(11): n is a, c, g, or t
  misc_feature (24)..(24): n is a, c, g, or t
  misc_feature (33)..(33): n is a, c, g, or t
  misc_feature (42)..(42): n is a, c, g, or t
  misc_feature (51)..(51): n is a, c, g, or t

SEQ ID NO: 111845 - DNA, 1012 bp, Homo Sapiens; identical to SEQ ID NO: 84442
  misc_feature (142)..(249): n is a, c, g, or t

SEQ ID NO: 111846 - DNA, 434 bp, Homo Sapiens; identical to SEQ ID NO: 84444

SEQ ID NO: 111847 - DNA, 501 bp, Homo Sapiens; identical to SEQ ID NO: 84445

SEQ ID NO: 111848 - DNA, 1165 bp, Homo Sapiens; identical to SEQ ID NO: 84447

SEQ ID NO: 111849 - DNA, 1118 bp, Homo Sapiens; identical to SEQ ID NO: 84448

SEQ ID NO: 111850 - DNA, 1571 bp, Homo Sapiens; identical to SEQ ID NO: 84455

SEQ ID NO: 111851 - DNA, 1019 bp, Homo Sapiens; identical to SEQ ID NO: 84456

SEQ ID NO: 111852 - DNA, 875 bp, Homo Sapiens; identical to SEQ ID NO: 84460

SEQ ID NO: 111853 - DNA, 1177 bp, Homo Sapiens; identical to SEQ ID NO: 84461
  misc_feature (49)..(49): n is a, c, g, or t
  misc_feature (60)..(60): n is a, c, g, or t

SEQ ID NO: 111854 - DNA, 798 bp, Homo Sapiens; identical to SEQ ID NO: 84462

SEQ ID NO: 111855 - DNA, 967 bp, Homo Sapiens; identical to SEQ ID NO: 84463

SEQ ID NO: 111856 - DNA, 1021 bp, Homo Sapiens; identical to SEQ ID NO: 84464
  misc_feature (903)..(903): n is a, c, g, or t

SEQ ID NO: 111857 - DNA, 1262 bp, Homo Sapiens; identical to SEQ ID NO: 84469

SEQ ID NO: 111858 - DNA, 1104 bp, Homo Sapiens; identical to SEQ ID NO: 84470

SEQ ID NO: 111859 - DNA, 938 bp, Homo Sapiens; identical to SEQ ID NO: 84471
  misc_feature (797)..(797): n is a, c, g, or t

SEQ ID NO: 111860 - DNA, 702 bp, Homo Sapiens; identical to SEQ ID NO: 84488
  misc_feature (612)..(612): n is a, c, g, or t
  misc_feature (614)..(614): n is a, c, g, or t
  misc_feature (661)..(661): n is a, c, g, or t

SEQ ID NO: 111861 - DNA, 1019 bp, Homo Sapiens; identical to SEQ ID NO: 84489
  misc_feature (732)..(732): n is a, c, g, or t
  misc_feature (777)..(777): n is a, c, g, or t

SEQ ID NO: 111862 - DNA, 629 bp, Homo Sapiens; identical to SEQ ID NO: 84490
  misc_feature (450)..(450): n is a, c, g, or t

SEQ ID NO: 111863 - DNA, 827 bp, Homo Sapiens; identical to SEQ ID NO: 84491
  misc_feature (749)..(749): n is a, c, g, or t

SEQ ID NO: 111864 - DNA, 466 bp, Homo Sapiens; identical to SEQ ID NO: 84502

SEQ ID NO: 111865 - DNA, 940 bp, Homo Sapiens; identical to SEQ ID NO: 84503

SEQ ID NO: 111866 - DNA, 1157 bp, Homo Sapiens; identical to SEQ ID NO: 84504
  misc_feature (276)..(320): n is a, c, g, or t

SEQ ID NO: 111867 - DNA, 1868 bp, Homo Sapiens; identical to SEQ ID NO: 84505
  misc_feature (1555)..(1555): n is a, c, g, or t

SEQ ID NO: 111868 - DNA, 793 bp, Homo Sapiens; identical to SEQ ID NO: 84512

SEQ ID NO: 111869 - DNA, 590 bp, Homo Sapiens; identical to SEQ ID NO: 84513

SEQ ID NO: 111870 - DNA, 1097 bp, Homo Sapiens; identical to SEQ ID NO: 84518

SEQ ID NO: 111871 - DNA, 1542 bp, Homo Sapiens; identical to SEQ ID NO: 84519
  misc_feature (1523)..(1523): n is a, c, g, or t

SEQ ID NO: 111872 - DNA, 1452 bp, Homo Sapiens; identical to SEQ ID NO: 84524

SEQ ID NO: 111873 - DNA, 757 bp, Homo Sapiens; identical to SEQ ID NO: 84525

SEQ ID NO: 111874 - DNA, 190 bp, Homo Sapiens; identical to SEQ ID NO: 84540

SEQ ID NO: 111875 - DNA, 175 bp, Homo Sapiens; identical to SEQ ID NO: 84541

SEQ ID NO: 111876 - DNA, 560 bp, Homo Sapiens; identical to SEQ ID NO: 84551
  misc_feature (313)..(313): n is a, c, g, or t

SEQ ID NO: 111877 - DNA, 885 bp, Homo Sapiens; identical to SEQ ID NO: 84552
  misc_feature (479)..(482): n is a, c, g, or t
  misc_feature (484)..(485): n is a, c, g, or t
  misc_feature (488)..(491): n is a, c, g, or t
  misc_feature (545)..(605): n is a, c, g, or t
  misc_feature (637)..(655): n is a, c, g, or t

SEQ ID NO: 111878 - DNA, 1125 bp, Homo Sapiens; identical to SEQ ID NO: 84556
  misc_feature (19)..(19): n is a, c, g, or t
  misc_feature (1024)..(1060): n is a, c, g, or t

SEQ ID NO: 111879 - DNA, 1517 bp, Homo Sapiens; identical to SEQ ID NO: 84557
  misc_feature (486)..(517): n is a, c, g, or t
  misc_feature (877)..(877): n is a, c, g, or t
  misc_feature (896)..(896): n is a, c, g, or t
  misc_feature (922)..(922): n is a, c, g, or t
  misc_feature (995)..(995): n is a, c, g, or t
  misc_feature (1058)..(1058): n is a, c, g, or t
  misc_feature (1171)..(1171): n is a, c, g, or t
  misc_feature (1251)..(1251): n is a, c, g, or t
  misc_feature (1281)..(1281): n is a, c, g, or t
  misc_feature (1322)..(1322): n is a, c, g, or t
  misc_feature (1325)..(1325): n is a, c, g, or t
  misc_feature (1399)..(1399): n is a, c, g, or t

SEQ ID NO: 111880 - DNA, 997 bp, Homo Sapiens; identical to SEQ ID NO: 84558
  misc_feature (428)..(464): n is a, c, g, or t
  misc_feature (849)..(880): n is a, c, g, or t

SEQ ID NO: 111881 - DNA, 1126 bp, Homo Sapiens; identical to SEQ ID NO: 84566

SEQ ID NO: 111882 - DNA, 848 bp, Homo Sapiens; identical to SEQ ID NO: 84567

SEQ ID NO: 111883 - DNA, 826 bp, Homo Sapiens; identical to SEQ ID NO: 84571
  misc_feature (694)..(694): n is a, c, g, or t

SEQ ID NO: 111884 - DNA, 1324 bp, Homo Sapiens; identical to SEQ ID NO: 84572
  misc_feature (13)..(13): n is a, c, g, or t
  misc_feature (1083)..(1091): n is a, c, g, or t
  misc_feature (1116)..(1127): n is a, c, g, or t

SEQ ID NO: 111885 - DNA, 466 bp, Homo Sapiens; identical to SEQ ID NO: 84573

SEQ ID NO: 111886 - DNA, 910 bp, Homo Sapiens; identical to SEQ ID NO: 84575
  misc_feature (655)..(733): n is a, c, g, or t

SEQ ID NO: 111887 - DNA, 558 bp, Homo Sapiens; identical to SEQ ID NO: 84576

SEQ ID NO: 111888 - DNA, 1157 bp, Homo Sapiens; identical to SEQ ID NO: 84578
  misc_feature (590)..(590): n is a, c, g, or t
  misc_feature (1127)..(1127): n is a, c, g, or t

SEQ ID NO: 111889 - DNA, 433 bp, Homo Sapiens; identical to SEQ ID NO: 84579

SEQ ID NO: 111890 - DNA, 876 bp, Homo Sapiens; identical to SEQ ID NO: 84580

SEQ ID NO: 111891 - DNA, 924 bp, Homo Sapiens; identical to SEQ ID NO: 84584
  misc_feature (773)..(773): n is a, c, g, or t
  misc_feature (822)..(822): n is a, c, g, or t
  misc_feature (873)..(873): n is a, c, g, or t
  misc_feature (903)..(903): n is a, c, g, or t

SEQ ID NO: 111892 - DNA, 676 bp, Homo Sapiens; identical to SEQ ID NO: 84585

SEQ ID NO: 111893 - DNA, 534 bp, Homo Sapiens; identical to SEQ ID NO: 84638

SEQ ID NO: 111894 - DNA, 1115 bp, Homo Sapiens; identical to SEQ ID NO: 84639
  misc_feature (21)..(21): n is a, c, g, or t
  misc_feature (98)..(219): n is a, c, g, or t

SEQ ID NO: 111895 - DNA, 379 bp, Homo Sapiens; identical to SEQ ID NO: 84685
  misc_feature (364)..(364): n is a, c, g, or t

SEQ ID NO: 111896 - DNA, 341 bp, Homo Sapiens; identical to SEQ ID NO: 84686
  misc_feature (14)..(14): n is a, c, g, or t
  misc_feature (28)..(28): n is a, c, g, or t

SEQ ID NO: 111897 - DNA, 406 bp, Homo Sapiens; identical to SEQ ID NO: 84688
  misc_feature (29)..(29): n is a, c, g, or t
  misc_feature (35)..(35): n is a, c, g, or t
  misc_feature (55)..(55): n is a, c, g, or t
  misc_feature (80)..(80): n is a, c, g, or t
  misc_feature (151)..(151): n is a, c, g, or t

SEQ ID NO: 111898 - DNA, 1014 bp, Homo Sapiens; identical to SEQ ID NO: 84689
  misc_feature (651)..(670): n is a, c, g, or t

SEQ ID NO: 111899 - DNA, 491 bp, Homo Sapiens; identical to SEQ ID NO: 84695
  misc_feature (14)..(14): n is a, c, g, or t
  misc_feature (34)..(34): n is a, c, g, or t
  misc_feature (94)..(94): n is a, c, g, or t
  misc_feature (115)..(115): n is a, c, g, or t
  misc_feature (120)..(121): n is a, c, g, or t
  misc_feature (143)..(144): n is a, c, g, or t
  misc_feature (193)..(193): n is a, c, g, or t
  misc_feature (211)..(211): n is a, c, g, or t
  misc_feature (422)..(422): n is a, c, g, or t

SEQ ID NO: 111900 - DNA, 507 bp, Homo Sapiens; identical to SEQ ID NO: 84696
  misc_feature (128)..(128): n is a, c, g, or t

SEQ ID NO: 111901 - DNA, 675 bp, Homo Sapiens; identical to SEQ ID NO: 84722

SEQ ID NO: 111902 - DNA, 413 bp, Homo Sapiens; identical to SEQ ID NO: 84723
  misc_feature (34)..(34): n is a, c, g, or t
  misc_feature (44)..(44): n is a, c, g, or t

SEQ ID NO: 111903 - DNA, 582 bp, Homo Sapiens; identical to SEQ ID NO: 84735

SEQ ID NO: 111904 - DNA, 572 bp, Homo Sapiens; identical to SEQ ID NO: 84736
  misc_feature (148)..(148): n is a, c, g, or t
  misc_feature (487)..(487): n is a, c, g, or t
  misc_feature (517)..(517): n is a, c, g, or t
  misc_feature (548)..(548): n is a, c, g, or t

SEQ ID NO: 111905 - DNA, 422 bp, Homo Sapiens; identical to SEQ ID NO: 84754
  misc_feature (11)..(11): n is a, c, g, or t
  misc_feature (81)..(81): n is a, c, g, or t

SEQ ID NO: 111906 - DNA, 428 bp, Homo Sapiens; identical to SEQ ID NO: 84755

SEQ ID NO: 111907 - DNA, 1465 bp, Homo Sapiens; identical to SEQ ID NO: 84756
  misc_feature (114)..(114): n is a, c, g, or t
  misc_feature (191)..(199): n is a, c, g, or t
  misc_feature (235)..(235): n is a, c, g, or t

SEQ ID NO: 111908 - DNA, 1248 bp, Homo Sapiens; identical to SEQ ID NO: 84785

SEQ ID NO: 111909 - DNA, 1078 bp, Homo Sapiens; identical to SEQ ID NO: 84786

SEQ ID NO: 111910 - DNA, 983 bp, Homo Sapiens; identical to SEQ ID NO: 84787

SEQ ID NO: 111911 - DNA, 251 bp, Homo Sapiens; identical to SEQ ID NO: 84811

SEQ ID NO: 111912 - DNA, 1254 bp, Homo Sapiens; identical to SEQ ID NO: 84812

SEQ ID NO: 111913 - DNA, 831 bp, Homo Sapiens; identical to SEQ ID NO: 84831
  misc_feature (51)..(80): n is a, c, g, or t
  misc_feature (376)..(378): n is a, c, g, or t

SEQ ID NO: 111914 - DNA, 1681 bp, Homo Sapiens; identical to SEQ ID NO: 84832
  misc_feature (64)..(64): n is a, c, g, or t
  misc_feature (100)..(108): n is a, c, g, or t
  misc_feature (400)..(430): n is a, c, g, or t

SEQ ID NO: 111915 - DNA, 1149 bp, Homo Sapiens; identical to SEQ ID NO: 84859
  misc_feature (198)..(209): n is a, c, g, or t

SEQ ID NO: 111916 - DNA, 844 bp, Homo Sapiens; identical to SEQ ID NO: 84860

SEQ ID NO: 111917 - DNA, 963 bp, Homo Sapiens; identical to SEQ ID NO: 84861

SEQ ID NO: 111918 - DNA, 1254 bp, Homo Sapiens; identical to SEQ ID NO: 84875
  misc_feature (121)..(164): n is a, c, g, or t
  misc_feature (170)..(197): n is a, c, g, or t
  misc_feature (517)..(569): n is a, c, g, or t

SEQ ID NO: 111919 - DNA, 1813 bp, Homo Sapiens; identical to SEQ ID NO: 84876
  misc_feature (70)..(159): n is a, c, g, or t
  misc_feature (1105)..(1111): n is a, c, g, or t
  misc_feature (1113)..(1114): n is a, c, g, or t
  misc_feature (1116)..(1118): n is a, c, g, or t
  misc_feature (1120)..(1120): n is a, c, g, or t
  misc_feature (1122)..(1122): n is a, c, g, or t
  misc_feature (1125)..(1125): n is a, c, g, or t
  misc_feature (1138)..(1138): n is a, c, g, or t
  misc_feature (1295)..(1304): n is a, c, g, or t
  misc_feature (1308)..(1318): n is a, c, g, or t
  misc_feature (1506)..(1506): n is a, c, g, or t
  misc_feature (1694)..(1694): n is a, c, g, or t
  misc_feature (1699)..(1699): n is a, c, g, or t
  misc_feature (1703)..(1703): n is a, c, g, or t

SEQ ID NO: 111920 - DNA, 1345 bp, Homo Sapiens; identical to SEQ ID NO: 84881
  misc_feature (65)..(189): n is a, c, g, or t
  misc_feature (1198)..(1206): n is a, c, g, or t

SEQ ID NO: 111921 - DNA, 820 bp, Homo Sapiens; identical to SEQ ID NO: 84882
  misc_feature (72)..(106): n is a, c, g, or t

SEQ ID NO: 111922 - DNA, 353 bp, Homo Sapiens; identical to SEQ ID NO: 84884

SEQ ID NO: 111923 - DNA, 499 bp, Homo Sapiens; identical to SEQ ID NO: 84885

SEQ ID NO: 111924 - DNA, 520 bp, Homo Sapiens; identical to SEQ ID NO: 84898

SEQ ID NO: 111925 - DNA, 711 bp, Homo Sapiens; identical to SEQ ID NO: 84899
  misc_feature (141)..(141): n is a, c, g, or t

SEQ ID NO: 111926 - DNA, 445 bp, Homo Sapiens; identical to SEQ ID NO: 84901
  misc_feature (249)..(357): n is a, c, g, or t

SEQ ID NO: 111927 - DNA, 794 bp, Homo Sapiens; identical to SEQ ID NO: 84902
  misc_feature (46)..(80): n is a, c, g, or t
  misc_feature (127)..(186): n is a, c, g, or t
  misc_feature (188)..(223): n is a, c, g, or t
  misc_feature (276)..(315): n is a, c, g, or t
  misc_feature (715)..(715): n is a, c, g, or t

SEQ ID NO: 111928 - DNA, 1006 bp, Homo Sapiens; identical to SEQ ID NO: 84913

SEQ ID NO: 111929 - DNA, 2223 bp, Homo Sapiens; identical to SEQ ID NO: 84914
  misc_feature (237)..(251): n is a, c, g, or t
  misc_feature (482)..(522): n is a, c, g, or t

SEQ ID NO: 111930 - DNA, 882 bp, Homo Sapiens; identical to SEQ ID NO: 84915
  misc_feature (82)..(116): n is a, c, g, or t

SEQ ID NO: 111931 - DNA, 855 bp, Homo Sapiens; identical to SEQ ID NO: 84916
  misc_feature (580)..(580): n is a, c, g, or t

SEQ ID NO: 111932 - DNA, 1301 bp, Homo Sapiens; identical to SEQ ID NO: 84917
  misc_feature (252)..(252): n is a, c, g, or t

SEQ ID NO: 111933 - DNA, 366 bp, Homo Sapiens; identical to SEQ ID NO: 84923

SEQ ID NO: 111934 - DNA, 466 bp, Homo Sapiens; identical to SEQ ID NO: 84924

SEQ ID NO: 111935 - DNA, 1226 bp, Homo Sapiens; identical to SEQ ID NO: 84925
  misc_feature (1149)..(1183): n is a, c, g, or t

SEQ ID NO: 111936 - DNA, 964 bp, Homo Sapiens; identical to SEQ ID NO: 84926
  misc_feature (60)..(102): n is a, c, g, or t
  misc_feature (105)..(139): n is a, c, g, or t

SEQ ID NO: 111937 - DNA, 1646 bp, Homo Sapiens; identical to SEQ ID NO: 84932
  misc_feature (78)..(112): n is a, c, g, or t
  misc_feature (1072)..(1129): n is a, c, g, or t

SEQ ID NO: 111938 - DNA, 1014 bp, Homo Sapiens; identical to SEQ ID NO: 84933
  misc_feature (93)..(93): n is a, c, g, or t

SEQ ID NO: 111939 - DNA, 1229 bp, Homo Sapiens; identical to SEQ ID NO: 84934
  misc_feature (1010)..(1010): n is a, c, g, or t

SEQ ID NO: 111940 - DNA, 957 bp, Homo Sapiens; identical to SEQ ID NO: 84966

SEQ ID NO: 111941 - DNA, 358 bp, Homo Sapiens; identical to SEQ ID NO: 84967

SEQ ID NO: 111942 - DNA, 495 bp, Homo Sapiens; identical to SEQ ID NO: 84972
  misc_feature (38)..(38): n is a, c, g, or t
  misc_feature (64)..(64): n is a, c, g, or t
  misc_feature (197)..(197): n is a, c, g, or t

SEQ ID NO: 111943 - DNA, 330 bp, Homo Sapiens; identical to SEQ ID NO: 84973
  misc_feature (20)..(20): n is a, c, g, or t

SEQ ID NO: 111944 - DNA, 676 bp, Homo Sapiens; identical to SEQ ID NO: 84984
  misc_feature (50)..(50): n is a, c, g, or t

SEQ ID NO: 111945 - DNA, 684 bp, Homo Sapiens; identical to SEQ ID NO: 84985

SEQ ID NO: 111946 - DNA, 387 bp, Homo Sapiens; identical to SEQ ID NO: 84986

SEQ ID NO: 111947 - DNA, 564 bp, Homo Sapiens; identical to SEQ ID NO: 84993
  misc_feature (91)..(136): n is a, c, g, or t

SEQ ID NO: 111948 - DNA, 562 bp, Homo Sapiens; identical to SEQ ID NO: 84994
  misc_feature (251)..(282): n is a, c, g, or t

SEQ ID NO: 111949 - DNA, 1095 bp, Homo Sapiens; identical to SEQ ID NO: 85000
  misc_feature (351)..(392): n is a, c, g, or t
  misc_feature (945)..(945): n is a, c, g, or t
  misc_feature (1024)..(1032): n is a, c, g, or t

SEQ ID NO: 111950 - DNA, 803 bp, Homo Sapiens; identical to SEQ ID NO: 85001
  misc_feature (197)..(197): n is a, c, g, or t

SEQ ID NO: 111951 - DNA, 525 bp, Homo Sapiens; identical to SEQ ID NO: 85002
  misc_feature (92)..(141): n is a, c, g, or t

SEQ ID NO: 111952 - DNA, 705 bp, Homo Sapiens; identical to SEQ ID NO: 85012

SEQ ID NO: 111953 - DNA, 929 bp, Homo Sapiens; identical to SEQ ID NO: 85013
  misc_feature (647)..(647): n is a, c, g, or t
  misc_feature (767)..(767): n is a, c, g, or t

SEQ ID NO: 111954 - DNA, 379 bp, Homo Sapiens; identical to SEQ ID NO: 85027
  misc_feature (107)..(117): n is a, c, g, or t
  misc_feature (230)..(230): n is a, c, g, or t
  misc_feature (320)..(320): n is a, c, g, or t
  misc_feature (328)..(328): n is a, c, g, or t
  misc_feature (347)..(347): n is a, c, g, or t

SEQ ID NO: 111955 - DNA, 501 bp, Homo Sapiens; identical to SEQ ID NO: 85028
  misc_feature (26)..(26): n is a, c, g, or t
  misc_feature (45)..(45): n is a, c, g, or t
  misc_feature (108)..(108): n is a, c, g, or t
  misc_feature (120)..(212): n is a, c, g, or t
  misc_feature (410)..(417): n is a, c, g, or t
  misc_feature (419)..(419): n is a, c, g, or t

SEQ ID NO: 111956 - DNA, 384 bp, Homo Sapiens; identical to SEQ ID NO: 85029
  misc_feature (11)..(11): n is a, c, g, or t
  misc_feature (22)..(22): n is a, c, g, or t
  misc_feature (82)..(92): n is a, c, g, or t
  misc_feature (96)..(188): n is a, c, g, or t

SEQ ID NO: 111957 - DNA, 479 bp, Homo Sapiens; identical to SEQ ID NO: 85030
  misc_feature (16)..(16): n is a, c, g, or t
  misc_feature (93)..(216): n is a, c, g, or t
  misc_feature (393)..(393): n is a, c, g, or t
  misc_feature (411)..(411): n is a, c, g, or t
  misc_feature (415)..(424): n is a, c, g, or t
  misc_feature (451)..(451): n is a, c, g, or t
  misc_feature (457)..(457): n is a, c, g, or t

SEQ ID NO: 111958 - DNA, 386 bp, Homo Sapiens; identical to SEQ ID NO: 85031
  misc_feature (27)..(27): n is a, c, g, or t
  misc_feature (44)..(44): n is a, c, g, or t
  misc_feature (58)..(58): n is a, c, g, or t
  misc_feature (63)..(63): n is a, c, g, or t
  misc_feature (75)..(117): n is a, c, g, or t

SEQ ID NO: 111959 - DNA, 792 bp, Homo Sapiens; identical to SEQ ID NO: 85062
  misc_feature (71)..(100): n is a, c, g, or t

SEQ ID NO: 111960 - DNA, 651 bp, Homo Sapiens; identical to SEQ ID NO: 85063
  misc_feature (373)..(402): n is a, c, g, or t

SEQ ID NO: 111961 - DNA, 1814 bp, Homo Sapiens; identical to SEQ ID NO: 85081
  misc_feature (1687)..(1688): n is a, c, g, or t
  misc_feature (1765)..(1765): n is a, c, g, or t
  misc_feature (1783)..(1783): n is a, c, g, or t

SEQ ID NO: 111962 - DNA, 435 bp, Homo Sapiens; identical to SEQ ID NO: 85082

SEQ ID NO: 111963 - DNA, 1604 bp, Homo Sapiens; identical to SEQ ID NO: 85094
  misc_feature (119)..(119): n is a, c, g, or t
  misc_feature (249)..(249): n is a, c, g, or t

SEQ ID NO: 111964 - DNA, 887 bp, Homo Sapiens; identical to SEQ ID NO: 85095
  misc_feature (78)..(78): n is a, c, g, or t

SEQ ID NO: 111965 - DNA, 1168 bp, Homo Sapiens; identical to SEQ ID NO: 85096
  misc_feature (1045)..(1054): n is a, c, g, or t

SEQ ID NO: 111966 - DNA, 889 bp, Homo Sapiens; identical to SEQ ID NO: 85099

SEQ ID NO: 111967 - DNA, 900 bp, Homo Sapiens; identical to SEQ ID NO: 85100

SEQ ID NO: 111968 - DNA, 235 bp, Homo Sapiens; identical to SEQ ID NO: 85107

SEQ ID NO: 111969 - DNA, 1399 bp, Homo Sapiens; identical to SEQ ID NO: 85108

SEQ ID NO: 111970 - DNA, 831 bp, Homo Sapiens; identical to SEQ ID NO: 85109
  misc_feature (102)..(102): n is a, c, g, or t

SEQ ID NO: 111971 - DNA, 1268 bp, Homo Sapiens; identical to SEQ ID NO: 85118

SEQ ID NO: 111972 - DNA, 490 bp, Homo Sapiens; identical to SEQ ID NO: 85119
  misc_feature (393)..(393): n is a, c, g, or t

SEQ ID NO: 111973 - DNA, 507 bp, Homo Sapiens; identical to SEQ ID NO: 85122

SEQ ID NO: 111974 - DNA, 1424 bp, Homo Sapiens; identical to SEQ ID NO: 85123
  misc_feature (351)..(351): n is a, c, g, or t
  misc_feature (601)..(922): n is a, c, g, or t
  misc_feature (1261)..(1310): n is a, c, g, or t

SEQ ID NO: 111975 - DNA, 530 bp, Homo Sapiens; identical to SEQ ID NO: 85155
  misc_feature (161)..(224): n is a, c, g, or t

SEQ ID NO: 111976 - DNA, 952 bp, Homo Sapiens; identical to SEQ ID NO: 15293
  misc_feature (545)..(560): n is a, c, g, or t

SEQ ID NO: 111977 - DNA, 546 bp, Homo Sapiens; identical to SEQ ID NO: 85157

SEQ ID NO: 111978 - DNA, 367 bp, Homo Sapiens; identical to SEQ ID NO: 85169

SEQ ID NO: 111979 - DNA, 390 bp, Homo Sapiens; identical to SEQ ID NO: 85170

SEQ ID NO: 111980 - DNA, 711 bp, Homo Sapiens; identical to SEQ ID NO: 85171
  misc_feature (551)..(551): n is a, c, g, or t
  misc_feature (559)..(559): n is a, c, g, or t
  misc_feature (601)..(601): n is a, c, g, or t
  misc_feature (614)..(614): n is a, c, g, or t
  misc_feature (633)..(633): n is a, c, g, or t
  misc_feature (644)..(644): n is a, c, g, or t
  misc_feature (679)..(679): n is a, c, g, or t
  misc_feature (689)..(689): n is a, c, g, or t

SEQ ID NO: 111981 - DNA, 835 bp, Homo Sapiens; identical to SEQ ID NO: 85189

SEQ ID NO: 111982 - DNA, 1183 bp, Homo Sapiens; identical to SEQ ID NO: 85190
  misc_feature (981)..(989): n is a, c, g, or t
  misc_feature (1054)..(1090): n is a, c, g, or t

SEQ ID NO: 111983 - DNA, 439 bp, Homo Sapiens; identical to SEQ ID NO: 85213

SEQ ID NO: 111984 - DNA, 544 bp, Homo Sapiens; identical to SEQ ID NO: 85214

SEQ ID NO: 111985 - DNA, 1163 bp, Homo Sapiens; identical to SEQ ID NO: 85231

SEQ ID NO: 111986 - DNA, 989 bp, Homo Sapiens; identical to SEQ ID NO: 85232
  misc_feature (86)..(120): n is a, c, g, or t

SEQ ID NO: 111987 - DNA, 1663 bp, Homo Sapiens; identical to SEQ ID NO: 85233

SEQ ID NO: 111988 - DNA, 914 bp, Homo Sapiens; identical to SEQ ID NO: 85236
  misc_feature (392)..(455): n is a, c, g, or t

SEQ ID NO: 111989 - DNA, 998 bp, Homo Sapiens; identical to SEQ ID NO: 85237
  misc_feature (869)..(948): n is a, c, g, or t

SEQ ID NO: 111990 - DNA, 1356 bp, Homo Sapiens; identical to SEQ ID NO: 85241
  misc_feature (73)..(104): n is a, c, g, or t
  misc_feature (107)..(141): n is a, c, g, or t

SEQ ID NO: 111991 - DNA, 900 bp, Homo Sapiens; identical to SEQ ID NO: 85242
  misc_feature (34)..(34): n is a, c, g, or t
  misc_feature (41)..(41): n is a, c, g, or t
  misc_feature (53)..(53): n is a, c, g, or t

SEQ ID NO: 111992 - DNA, 1119 bp, Homo Sapiens; identical to SEQ ID NO: 85243

SEQ ID NO: 111993 - DNA, 1311 bp, Homo Sapiens; identical to SEQ ID NO: 85244

SEQ ID NO: 111994 - DNA, 958 bp, Homo Sapiens; identical to SEQ ID NO: 85257
  misc_feature (936)..(936): n is a, c, g, or t

SEQ ID NO: 111995 - DNA, 544 bp, Homo Sapiens; identical to SEQ ID NO: 85258

SEQ ID NO: 111996 - DNA, 923 bp, Homo Sapiens; identical to SEQ ID NO: 85260

SEQ ID NO: 111997 - DNA, 1009 bp, Homo Sapiens; identical to SEQ ID NO: 85261

SEQ ID NO: 111998 - DNA, 1152 bp, Homo Sapiens; identical to SEQ ID NO: 85274
  misc_feature (41)..(84): n is a, c, g, or t
  misc_feature (89)..(123): n is a, c, g, or t
  misc_feature (481)..(521): n is a, c, g, or t

SEQ ID NO: 111999 - DNA, 669 bp, Homo Sapiens; identical to SEQ ID NO: 85275

SEQ ID NO: 112000 - DNA, 2423 bp, Homo Sapiens; identical to SEQ ID NO: 85278
  misc_feature (2327)..(2327): n is a, c, g, or t
  misc_feature (2352)..(2353): n is a, c, g, or t
  misc_feature (2369)..(2369): n is a, c, g, or t
  misc_feature (2371)..(2371): n is a, c, g, or t
  misc_feature (2393)..(2393): n is a, c, g, or t

SEQ ID NO: 112001 - DNA, 572 bp, Homo Sapiens; identical to SEQ ID NO: 85279
  misc_feature (415)..(415): n is a, c, g, or t
  misc_feature (465)..(465): n is a, c, g, or t
  misc_feature (524)..(524): n is a, c, g, or t

SEQ ID NO: 112002 - DNA, 866 bp, Homo Sapiens; identical to SEQ ID NO: 85291

SEQ ID NO: 112003 - DNA, 942 bp, Homo Sapiens; identical to SEQ ID NO: 85292
  misc_feature (78)..(112): n is a, c, g, or t

SEQ ID NO: 112004 - DNA, 1007 bp, Homo Sapiens; identical to SEQ ID NO: 85293
  misc_feature (86)..(120): n is a, c, g, or t
  misc_feature (930)..(930): n is a, c, g, or t

SEQ ID NO: 112005 - DNA, 818 bp, Homo Sapiens; identical to SEQ ID NO: 85294

SEQ ID NO: 112006 - DNA, 829 bp, Homo Sapiens; identical to SEQ ID NO: 85295

SEQ ID NO: 112007 - DNA, 880 bp, Homo Sapiens; identical to SEQ ID NO: 85296

SEQ ID NO: 112008 - DNA, 989 bp, Homo Sapiens; identical to SEQ ID NO: 85297

SEQ ID NO: 112009 - DNA, 853 bp, Homo Sapiens; identical to SEQ ID NO: 85298

SEQ ID NO: 112010 - DNA, 865 bp, Homo Sapiens; identical to SEQ ID NO: 85299

SEQ ID NO: 112011 - DNA, 1187 bp, Homo Sapiens; identical to SEQ ID NO: 85300
  misc_feature (1143)..(1143): n is a, c, g, or t

SEQ ID NO: 112012 - DNA, 804 bp, Homo Sapiens; identical to SEQ ID NO: 85301

SEQ ID NO: 112013 - DNA, 815 bp, Homo Sapiens; identical to SEQ ID NO: 85302

SEQ ID NO: 112014 - DNA, 1388 bp, Homo Sapiens; identical to SEQ ID NO: 85303

SEQ ID NO: 112015 - DNA, 388 bp, Homo Sapiens; identical to SEQ ID NO: 85314
  misc_feature (332)..(332): n is a, c, g, or t
  misc_feature (348)..(348): n is a, c, g, or t

SEQ ID NO: 112016 - DNA, 358 bp, Homo Sapiens; identical to SEQ ID NO: 85315
  misc_feature (274)..(274): n is a, c, g, or t
  misc_feature (287)..(287): n is a, c, g, or t
  misc_feature (298)..(298): n is a, c, g, or t
  misc_feature (303)..(303): n is a, c, g, or t
  misc_feature (312)..(312): n is a, c, g, or t
  misc_feature (340)..(340): n is a, c, g, or t

SEQ ID NO: 112017 - DNA, 892 bp, Homo Sapiens; identical to SEQ ID NO: 85330
  misc_feature (79)..(113): n is a, c, g, or t

SEQ ID NO: 112018 - DNA, 1414 bp, Homo Sapiens; identical to SEQ ID NO: 85331
  misc_feature (1021)..(1021): n is a, c, g, or t

SEQ ID NO: 112019 - DNA, 1129 bp, Homo Sapiens; identical to SEQ ID NO: 85338

SEQ ID NO: 112020 - DNA, 800 bp, Homo Sapiens; identical to SEQ ID NO: 85339
  misc_feature (704)..(704): n is a, c, g, or t

SEQ ID NO: 112021 - DNA, 822 bp, Homo Sapiens; identical to SEQ ID NO: 85376

SEQ ID NO: 112022 - DNA, 516 bp, Homo Sapiens; identical to SEQ ID NO: 85377

SEQ ID NO: 112023 - DNA, 854 bp, Homo Sapiens; identical to SEQ ID NO: 85387
  misc_feature (173)..(173): n is a, c, g, or t

SEQ ID NO: 112024 - DNA, 1193 bp, Homo Sapiens; identical to SEQ ID NO: 85388

SEQ ID NO: 112025 - DNA, 998 bp, Homo Sapiens; identical to SEQ ID NO: 85434
  misc_feature (543)..(576): n is a, c, g, or t
  misc_feature (718)..(727): n is a, c, g, or t
  misc_feature (749)..(777): n is a, c, g, or t

SEQ ID NO: 112026 - DNA, 848 bp, Homo Sapiens; identical to SEQ ID NO: 85435
  misc_feature (108)..(142): n is a, c, g, or t
  misc_feature (314)..(343): n is a, c, g, or t
  misc_feature (565)..(597): n is a, c, g, or t
  misc_feature (712)..(724): n is a, c, g, or t

SEQ ID NO: 112027 - DNA, 309 bp, Homo Sapiens; identical to SEQ ID NO: 85436

SEQ ID NO: 112028 - DNA, 463 bp, Homo Sapiens; identical to SEQ ID NO: 85444
  misc_feature (85)..(85): n is a, c, g, or t
  misc_feature (155)..(155): n is a, c, g, or t

SEQ ID NO: 112029 - DNA, 491 bp, Homo Sapiens; identical to SEQ ID NO: 85445

SEQ ID NO: 112030 - DNA, 966 bp, Homo Sapiens; identical to SEQ ID NO: 85450

SEQ ID NO: 112031 - DNA, 753 bp, Homo Sapiens; identical to SEQ ID NO: 85451
  misc_feature (466)..(497): n is a, c, g, or t

SEQ ID NO: 112032 - DNA, 437 bp, Homo Sapiens; identical to SEQ ID NO: 85458

SEQ ID NO: 112033 - DNA, 1478 bp, Homo Sapiens; identical to SEQ ID NO: 85459

SEQ ID NO: 112034 - DNA, 1093 bp, Homo Sapiens; identical to SEQ ID NO: 85460

SEQ ID NO: 112035 - DNA, 1353 bp, Homo Sapiens; identical to SEQ ID NO: 85461

SEQ ID NO: 112036 - DNA, 567 bp, Homo Sapiens; identical to SEQ ID NO: 85462

SEQ ID NO: 112037 - DNA, 876 bp, Homo Sapiens; identical to SEQ ID NO: 85463

SEQ ID NO: 112038 - DNA, 1577 bp, Homo Sapiens; identical to SEQ ID NO: 85479
  misc_feature (1463)..(1497): n is a, c, g, or t

SEQ ID NO: 112039 - DNA, 1509 bp, Homo Sapiens; identical to SEQ ID NO: 85480
  misc_feature (59)..(79): n is a, c, g, or t

SEQ ID NO: 112040 - DNA, 1045 bp, Homo Sapiens; identical to SEQ ID NO: 85482

SEQ ID NO: 112041 - DNA, 976 bp, Homo Sapiens; identical to SEQ ID NO: 85483

SEQ ID NO: 112042 - DNA, 557 bp, Homo Sapiens; identical to SEQ ID NO: 85489

SEQ ID NO: 112043 - DNA, 1187 bp, Homo Sapiens; identical to SEQ ID NO: 85490

SEQ ID NO: 112044 - DNA, 959 bp, Homo Sapiens; identical to SEQ ID NO: 85499

SEQ ID NO: 112045 - DNA, 966 bp, Homo Sapiens; identical to SEQ ID NO: 85500

SEQ ID NO: 112046 - DNA, 913 bp, Homo Sapiens; identical to SEQ ID NO: 85501
  misc_feature (716)..(716): n is a, c, g, or t

SEQ ID NO: 112047 - DNA, 398 bp, Homo Sapiens; identical to SEQ ID NO: 85510
  misc_feature (56)..(56): n is a, c, g, or t

SEQ ID NO: 112048 - DNA, 721 bp, Homo Sapiens; identical to SEQ ID NO: 85511

SEQ ID NO: 112049 - DNA, 795 bp, Homo Sapiens; identical to SEQ ID NO: 85569
  misc_feature (137)..(303): n is a, c, g, or t

SEQ ID NO: 112050 - DNA, 565 bp, Homo Sapiens; identical to SEQ ID NO: 85570
  misc_feature (379)..(430): n is a, c, g, or t

SEQ ID NO: 112051 - DNA, 841 bp, Homo Sapiens; identical to SEQ ID NO: 85604
  misc_feature (18)..(18): n is a, c, g, or t
  misc_feature (73)..(73): n is a, c, g, or t

SEQ ID NO: 112052 - DNA, 609 bp, Homo Sapiens; identical to SEQ ID NO: 85605

SEQ ID NO: 112053 - DNA, 534 bp, Homo Sapiens; identical to SEQ ID NO: 85632

SEQ ID NO: 112054 - DNA, 475 bp, Homo Sapiens; identical to SEQ ID NO: 85633

SEQ ID NO: 112055 - DNA, 1086 bp, Homo Sapiens; identical to SEQ ID NO: 85634
  misc_feature (673)..(733): n is a, c, g, or t
  misc_feature (807)..(807): n is a, c, g, or t
  misc_feature (949)..(949): n is a, c, g, or t

SEQ ID NO: 112056 - DNA, 656 bp, Homo Sapiens; identical to SEQ ID NO: 85639
  misc_feature (489)..(489): n is a, c, g, or t
  misc_feature (551)..(551): n is a, c, g, or t
  misc_feature (599)..(599): n is a, c, g, or t
  misc_feature (612)..(612): n is a, c, g, or t
  misc_feature (619)..(619): n is a, c, g, or t
  misc_feature (643)..(643): n is a, c, g, or t

SEQ ID NO: 112057 - DNA, 439 bp, Homo Sapiens; identical to SEQ ID NO: 85640
  misc_feature (295)..(295): n is a, c, g, or t

SEQ ID NO: 112058 - DNA, 713 bp, Homo Sapiens; identical to SEQ ID NO: 85643

SEQ ID NO: 112059 - DNA, 1740 bp, Homo Sapiens; identical to SEQ ID NO: 85644
  misc_feature (696)..(696): n is a, c, g, or t

SEQ ID NO: 112060 - DNA, 594 bp, Homo Sapiens; identical to SEQ ID NO: 85646

SEQ ID NO: 112061 - DNA, 1419 bp, Homo Sapiens; identical to SEQ ID NO: 85647
  misc_feature (598)..(673): n is a, c, g, or t
  misc_feature (985)..(1048): n is a, c, g, or t

SEQ ID NO: 112062 - DNA, 347 bp, Homo Sapiens; identical to SEQ ID NO: 85662
  misc_feature (68)..(106): n is a, c, g, or t

SEQ ID NO: 112063 - DNA, 184 bp, Homo Sapiens; identical to SEQ ID NO: 85663

SEQ ID NO: 112064 - DNA, 2500 bp, Homo Sapiens; identical to SEQ ID NO: 85694

SEQ ID NO: 112065 - DNA, 247 bp, Homo Sapiens; identical to SEQ ID NO: 85695

SEQ ID NO: 112066 - DNA, 419 bp, Homo Sapiens; identical to SEQ ID NO: 85720

SEQ ID NO: 112067 - DNA, 826 bp, Homo Sapiens; identical to SEQ ID NO: 85721

SEQ ID NO: 112068 - DNA, 621 bp, Homo Sapiens; identical to SEQ ID NO: 85725
  misc_feature (75)..(109): n is a, c, g, or t

SEQ ID NO: 112069 - DNA, 703 bp, Homo Sapiens; identical to SEQ ID NO: 85726

SEQ ID NO: 112070 - DNA, 1726 bp, Homo Sapiens; identical to SEQ ID NO: 85727

SEQ ID NO: 112071 - DNA, 455 bp, Homo Sapiens; identical to SEQ ID NO: 85730

SEQ ID NO: 112072 - DNA, 541 bp, Homo Sapiens; identical to SEQ ID NO: 85731

SEQ ID NO: 112073 - DNA, 1169 bp, Homo Sapiens; identical to SEQ ID NO: 85732
  misc_feature (81)..(112): n is a, c, g, or t
  misc_feature (187)..(199): n is a, c, g, or t
  misc_feature (503)..(513): n is a, c, g, or t

SEQ ID NO: 112074 - DNA, 755 bp, Homo Sapiens; identical to SEQ ID NO: 85733
  misc_feature (293)..(303): n is a, c, g, or t
  misc_feature (381)..(412): n is a, c, g, or t
  misc_feature (487)..(499): n is a, c, g, or t

SEQ ID NO: 112075 - DNA, 728 bp, Homo Sapiens; identical to SEQ ID NO: 85736
  misc_feature (667)..(667): n is a, c, g, or t

SEQ ID NO: 112076 - DNA, 262 bp, Homo Sapiens; identical to SEQ ID NO: 85737

SEQ ID NO: 112077 - DNA, 1042 bp, Homo Sapiens; identical to SEQ ID NO: 85740

SEQ ID NO: 112078 - DNA, 1429 bp, Homo Sapiens; identical to SEQ ID NO: 85741
  misc_feature (1388)..(1388): n is a, c, g, or t

SEQ ID NO: 112079 - DNA, 1383 bp, Homo Sapiens; identical to SEQ ID NO: 85763

SEQ ID NO: 112080 - DNA, 761 bp, Homo Sapiens; identical to SEQ ID NO: 85764
  misc_feature (182)..(215): n is a, c, g, or t
  misc_feature (631)..(693): n is a, c, g, or t

SEQ ID NO: 112081 - DNA, 566 bp, Homo Sapiens; identical to SEQ ID NO: 85765

SEQ ID NO: 112082 - DNA, 763 bp, Homo Sapiens; identical to SEQ ID NO: 85776

SEQ ID NO: 112083 - DNA, 1386 bp, Homo Sapiens; identical to SEQ ID NO: 85777

SEQ ID NO: 112084 - DNA, 1343 bp, Homo Sapiens; identical to SEQ ID NO: 85778

SEQ ID NO: 112085 - DNA, 1010 bp, Homo Sapiens; identical to SEQ ID NO: 85779
  misc_feature (677)..(677): n is a, c, g, or t

SEQ ID NO: 112086 - DNA, 2086 bp, Homo Sapiens; identical to SEQ ID NO: 85800
  misc_feature (253)..(279): n is a, c, g, or t
  misc_feature (347)..(394): n is a, c, g, or t
  misc_feature (462)..(599): n is a, c, g, or t
  misc_feature (620)..(633): n is a, c, g, or t
  misc_feature (1975)..(2009): n is a, c, g, or t

SEQ ID NO: 112087 - DNA, 1459 bp, Homo Sapiens; identical to SEQ ID NO: 85801

SEQ ID NO: 112088 - DNA, 758 bp, Homo Sapiens; identical to SEQ ID NO: 85813

SEQ ID NO: 112089 - DNA, 567 bp, Homo Sapiens; identical to SEQ ID NO: 85814
  misc_feature (242)..(292): n is a, c, g, or t

SEQ ID NO: 112090 - DNA, 1486 bp, Homo Sapiens; identical to SEQ ID NO: 85815

SEQ ID NO: 112091 - DNA, 427 bp, Homo Sapiens; identical to SEQ ID NO: 85855

SEQ ID NO: 112092 - DNA, 1139 bp, Homo Sapiens; identical to SEQ ID NO: 85856

SEQ ID NO: 112093 - DNA, 1691 bp, Homo Sapiens; identical to SEQ ID NO: 85864
  misc_feature (1626)..(1627): n is a, c, g, or t
  misc_feature (1629)..(1629): n is a, c, g, or t
  misc_feature (1638)..(1638): n is a, c, g, or t
  misc_feature (1647)..(1651): n is a, c, g, or t

SEQ ID NO: 112094 - DNA, 673 bp, Homo Sapiens; identical to SEQ ID NO: 85865
  misc_feature (102)..(166): n is a, c, g, or t

SEQ ID NO: 112095 - DNA, 696 bp, Homo Sapiens; identical to SEQ ID NO: 85866

SEQ ID NO: 112096 - DNA, 687 bp, Homo Sapiens; identical to SEQ ID NO: 85894

SEQ ID NO: 112097 - DNA, 569 bp, Homo Sapiens; identical to SEQ ID NO: 85895

SEQ ID NO: 112098 - DNA, 802 bp, Homo Sapiens; identical to SEQ ID NO: 85938
  misc_feature (520)..(563): n is a, c, g, or t

SEQ ID NO: 112099 - DNA, 359 bp, Homo Sapiens; identical to SEQ ID NO: 85939
  misc_feature (84)..(117): n is a, c, g, or t

SEQ ID NO: 112100 - DNA, 1124 bp, Homo Sapiens; identical to SEQ ID NO: 85941

SEQ ID NO: 112101 - DNA, 683 bp, Homo Sapiens; identical to SEQ ID NO: 85942
  misc_feature (72)..(72): n is a, c, g, or t

SEQ ID NO: 112102 - DNA, 543 bp, Homo Sapiens; identical to SEQ ID NO: 85943

SEQ ID NO: 112103 - DNA, 1058 bp, Homo Sapiens; identical to SEQ ID NO: 85944
  misc_feature (113)..(115): n is a, c, g, or t
  misc_feature (122)..(123): n is a, c, g, or t
  misc_feature (125)..(125): n is a, c, g, or t
  misc_feature (135)..(137): n is a, c, g, or t

SEQ ID NO: 112104 - DNA, 785 bp, Homo Sapiens; identical to SEQ ID NO: 85946

SEQ ID NO: 112105 - DNA, 857 bp, Homo Sapiens; identical to SEQ ID NO: 85947
  misc_feature (732)..(732): n is a, c, g, or t
  misc_feature (736)..(736): n is a, c, g, or t
  misc_feature (739)..(740): n is a, c, g, or t
  misc_feature (743)..(743): n is a, c, g, or t
  misc_feature (756)..(758): n is a, c, g, or t
  misc_feature (761)..(763): n is a, c, g, or t
  misc_feature (842)..(842): n is a, c, g, or t

SEQ ID NO: 112106 - DNA, 1670 bp, Homo Sapiens; identical to SEQ ID NO: 85969

SEQ ID NO: 112107 - DNA, 864 bp, Homo Sapiens; identical to SEQ ID NO: 85970

SEQ ID NO: 112108 - DNA, 1079 bp, Homo Sapiens; identical to SEQ ID NO: 85971

SEQ ID NO: 112109 - DNA, 974 bp, Homo Sapiens; identical to SEQ ID NO: 85972
  misc_feature (299)..(299): n is a, c, g, or t

SEQ ID NO: 112110 - DNA, 597 bp, Homo Sapiens; identical to SEQ ID NO: 85987

SEQ ID NO: 112111 - DNA, 2412 bp, Homo Sapiens; identical to SEQ ID NO: 85988
  misc_feature (1752)..(1990): n is a, c, g, or t
  misc_feature (2262)..(2262): n is a, c, g, or t

SEQ ID NO: 112112 - DNA, 1109 bp, Homo Sapiens; identical to SEQ ID NO: 85989

SEQ ID NO: 112113 - DNA, 1749 bp, Homo Sapiens; identical to SEQ ID NO: 85995
  misc_feature (1475)..(1475): n is a, c, g, or t
  misc_feature (1501)..(1501): n is a, c, g, or t
  misc_feature (1653)..(1672): n is a, c, g, or t
  misc_feature (1707)..(1707): n is a, c, g, or t

SEQ ID NO: 112114 - DNA, 943 bp, Homo Sapiens; identical to SEQ ID NO: 85996
  misc_feature (145)..(145): n is a, c, g, or t

SEQ ID NO: 112115 - DNA, 1384 bp, Homo Sapiens; identical to SEQ ID NO: 85998

SEQ ID NO: 112116 - DNA, 381 bp, Homo Sapiens; identical to SEQ ID NO: 85999

SEQ ID NO: 112117 - DNA, 1237 bp, Homo Sapiens; identical to SEQ ID NO: 86006

SEQ ID NO: 112118 - DNA, 756 bp, Homo Sapiens; identical to SEQ ID NO: 86007
  misc_feature (56)..(66): n is a, c, g, or t

SEQ ID NO: 112119 - DNA, 1726 bp, Homo Sapiens; identical to SEQ ID NO: 86008

SEQ ID NO: 112120 - DNA, 615 bp, Homo Sapiens; identical to SEQ ID NO: 86009

SEQ ID NO: 112121 - DNA, 1083 bp, Homo Sapiens; identical to SEQ ID NO: 86010

SEQ ID NO: 112122 - DNA, 1186 bp, Homo Sapiens; identical to SEQ ID NO: 86016

SEQ ID NO: 112123 - DNA, 956 bp, Homo Sapiens; identical to SEQ ID NO: 86017

SEQ ID NO: 112124 - DNA, 612 bp, Homo Sapiens; identical to SEQ ID NO: 86018
  misc_feature (305)..(327): n is a, c, g, or t

SEQ ID NO: 112125 - DNA, 863 bp, Homo Sapiens; identical to SEQ ID NO: 86019

SEQ ID NO: 112126 - DNA, 974 bp, Homo Sapiens; identical to SEQ ID NO: 86033
  misc_feature (518)..(558): n is a, c, g, or t

SEQ ID NO: 112127 - DNA, 475 bp, Homo Sapiens; identical to SEQ ID NO: 86034

SEQ ID NO: 112128 - DNA, 1385 bp, Homo Sapiens; identical to SEQ ID NO: 86039
  misc_feature (244)..(253): n is a, c, g, or t
  misc_feature (391)..(408): n is a, c, g, or t

SEQ ID NO: 112129 - DNA, 1089 bp, Homo Sapiens; identical to SEQ ID NO: 86040
  misc_feature (734)..(734): n is a, c, g, or t

SEQ ID NO: 112130 - DNA, 1102 bp, Homo Sapiens; identical to SEQ ID NO: 86041
  misc_feature (946)..(946): n is a, c, g, or t
  misc_feature (1015)..(1015): n is a, c, g, or t

SEQ ID NO: 112131 - DNA, 1209 bp, Homo Sapiens; identical to SEQ ID NO: 86043

SEQ ID NO: 112132 - DNA, 834 bp, Homo Sapiens; identical to SEQ ID NO: 86044

SEQ ID NO: 112133 - DNA, 884 bp, Homo Sapiens; identical to SEQ ID NO: 86052
  misc_feature (47)..(47): n is a, c, g, or t
  misc_feature (118)..(118): n is a, c, g, or t

SEQ ID NO: 112134 - DNA, 750 bp, Homo Sapiens; identical to SEQ ID NO: 86053

SEQ ID NO: 112135 - DNA, 891 bp, Homo Sapiens; identical to SEQ ID NO: 86056
  misc_feature (284)..(317): n is a, c, g, or t

SEQ ID NO: 112136 - DNA, 778 bp, Homo Sapiens; identical to SEQ ID NO: 86057
  misc_feature (617)..(652): n is a, c, g, or t
  misc_feature (662)..(662): n is a, c, g, or t
  misc_feature (692)..(692): n is a, c, g, or t
  misc_feature (724)..(724): n is a, c, g, or t
  misc_feature (740)..(740): n is a, c, g, or t

SEQ ID NO: 112137 - DNA, 1134 bp, Homo Sapiens; identical to SEQ ID NO: 86059

SEQ ID NO: 112138 - DNA, 729 bp, Homo Sapiens; identical to SEQ ID NO: 86060

SEQ ID NO: 112139 - DNA, 1063 bp, Homo Sapiens; identical to SEQ ID NO: 86061
  misc_feature (937)..(980): n is a, c, g, or t

SEQ ID NO: 112140 - DNA, 785 bp, Homo Sapiens; identical to SEQ ID NO: 86062
  misc_feature (665)..(665): n is a, c, g, or t
  misc_feature (762)..(762): n is a, c, g, or t

SEQ ID NO: 112141 - DNA, 2000 bp, Homo Sapiens; identical to SEQ ID NO: 86067

SEQ ID NO: 112142 - DNA, 823 bp, Homo Sapiens; identical to SEQ ID NO: 86068
  misc_feature (740)..(740): n is a, c, g, or t
  misc_feature (746)..(746): n is a, c, g, or t
  misc_feature (752)..(752): n is a, c, g, or t

SEQ ID NO: 112143 - DNA, 1882 bp, Homo Sapiens; identical to SEQ ID NO: 86079

SEQ ID NO: 112144 - DNA, 771 bp, Homo Sapiens; identical to SEQ ID NO: 86080

SEQ ID NO: 112145 - DNA, 1075 bp, Homo Sapiens; identical to SEQ ID NO: 86081
  misc_feature (677)..(677): n is a, c, g, or t

SEQ ID NO: 112146 - DNA, 1672 bp, Homo Sapiens; identical to SEQ ID NO: 86088
  misc_feature (308)..(361): n is a, c, g, or t

SEQ ID NO: 112147 - DNA, 640 bp, Homo Sapiens; identical to SEQ ID NO: 86089
  misc_feature (163)..(211): n is a, c, g, or t

SEQ ID NO: 112148 - DNA, 285 bp, Homo Sapiens; identical to SEQ ID NO: 86090

SEQ ID NO: 112149 - DNA, 1394 bp, Homo Sapiens; identical to SEQ ID NO: 86091

SEQ ID NO: 112150 - DNA, 591 bp, Homo Sapiens; identical to SEQ ID NO: 86092

SEQ ID NO: 112151 - DNA, 154 bp, Homo Sapiens; identical to SEQ ID NO: 86104

SEQ ID NO: 112152 - DNA, 820 bp, Homo Sapiens; identical to SEQ ID NO: 86105

SEQ ID NO: 112153 - DNA, 1347 bp, Homo Sapiens; identical to SEQ ID NO: 86108
  misc_feature (35)..(35): n is a, c, g, or t
  misc_feature (46)..(46): n is a, c, g, or t
  misc_feature (59)..(59): n is a, c, g, or t
  misc_feature (62)..(62): n is a, c, g, or t
  misc_feature (68)..(68): n is a, c, g, or t
  misc_feature (105)..(106): n is a, c, g, or t
  misc_feature (138)..(138): n is a, c, g, or t
  misc_feature (146)..(146): n is a, c, g, or t
  misc_feature (152)..(152): n is a, c, g, or t
  misc_feature (179)..(179): n is a, c, g, or t
  misc_feature (232)..(232): n is a, c, g, or t
  misc_feature (285)..(285): n is a, c, g, or t

SEQ ID NO: 112154 - DNA, 880 bp, Homo Sapiens; identical to SEQ ID NO: 86109

SEQ ID NO: 112155 - DNA, 461 bp, Homo Sapiens; identical to SEQ ID NO: 86125

SEQ ID NO: 112156 - DNA, 415 bp, Homo Sapiens; identical to SEQ ID NO: 86126

SEQ ID NO: 112157 - DNA, 1006 bp, Homo Sapiens; identical to SEQ ID NO: 86128

SEQ ID NO: 112158 - DNA, 1189 bp, Homo Sapiens; identical to SEQ ID NO: 86129
  misc_feature (683)..(683): n is a, c, g, or t

SEQ ID NO: 112159 - DNA, 1106 bp, Homo Sapiens; identical to SEQ ID NO: 86134
  misc_feature (73)..(107): n is a, c, g, or t

SEQ ID NO: 112160 - DNA, 490 bp, Homo Sapiens; identical to SEQ ID NO: 86135

SEQ ID NO: 112161 - DNA, 893 bp, Homo Sapiens; identical to SEQ ID NO: 86160
  misc_feature (787)..(787): n is a, c, g, or t
  misc_feature (830)..(838): n is a, c, g, or t

SEQ ID NO: 112162 - DNA, 997 bp, Homo Sapiens; identical to SEQ ID NO: 86161

SEQ ID NO: 112163 - DNA, 1139 bp, Homo Sapiens; identical to SEQ ID NO: 86162

SEQ ID NO: 112164 - DNA, 783 bp, Homo Sapiens; identical to SEQ ID NO: 86189
  misc_feature (747)..(747): n is a, c, g, or t

SEQ ID NO: 112165 - DNA, 1466 bp, Homo Sapiens; identical to SEQ ID NO: 86190

SEQ ID NO: 112166 - DNA, 1059 bp, Homo Sapiens; identical to SEQ ID NO: 86207

SEQ ID NO: 112167 - DNA, 1329 bp, Homo Sapiens; identical to SEQ ID NO: 86208
  misc_feature (829)..(829): n is a, c, g, or t
  misc_feature (1060)..(1148): n is a, c, g, or t
  misc_feature (1197)..(1239): n is a, c, g, or t
  misc_feature (1265)..(1275): n is a, c, g, or t

SEQ ID NO: 112168 - DNA, 493 bp, Homo Sapiens; identical to SEQ ID NO: 86209

SEQ ID NO: 112169 - DNA, 1342 bp, Homo Sapiens; identical to SEQ ID NO: 86223
  misc_feature (16)..(16): n is a, c, g, or t
  misc_feature (77)..(111): n is a, c, g, or t

SEQ ID NO: 112170 - DNA, 957 bp, Homo Sapiens; identical to SEQ ID NO: 86224

SEQ ID NO: 112171 - DNA, 1600 bp, Homo Sapiens; identical to SEQ ID NO: 86229
  misc_feature (1475)..(1483): n is a, c, g, or t

SEQ ID NO: 112172 - DNA, 582 bp, Homo Sapiens; identical to SEQ ID NO: 86230

SEQ ID NO: 112173 - DNA, 964 bp, Homo Sapiens; identical to SEQ ID NO: 86232
  misc_feature (852)..(871): n is a, c, g, or t

SEQ ID NO: 112174 - DNA, 537 bp, Homo Sapiens; identical to SEQ ID NO: 86233
  misc_feature (333)..(352): n is a, c, g, or t

SEQ ID NO: 112175 - DNA, 859 bp, Homo Sapiens; identical to SEQ ID NO: 86242

SEQ ID NO: 112176 - DNA, 851 bp, Homo Sapiens; identical to SEQ ID NO: 86243

SEQ ID NO: 112177 - DNA, 1008 bp, Homo Sapiens; identical to SEQ ID NO: 86249
  misc_feature (74)..(108): n is a, c, g, or t
  misc_feature (945)..(945): n is a, c, g, or t

SEQ ID NO: 112178 - DNA, 749 bp, Homo Sapiens; identical to SEQ ID NO: 86250

SEQ ID NO: 112179 - DNA, 657 bp, Homo Sapiens; identical to SEQ ID NO: 86260
  misc_feature (155)..(169): n is a, c, g, or t
  misc_feature (452)..(460): n is a, c, g, or t

SEQ ID NO: 112180 - DNA, 800 bp, Homo Sapiens; identical to SEQ ID NO: 86261

SEQ ID NO: 112181 - DNA, 1256 bp, Homo Sapiens; identical to SEQ ID NO: 86280

SEQ ID NO: 112182 - DNA, 857 bp, Homo Sapiens; identical to SEQ ID NO: 86281

SEQ ID NO: 112183 - DNA, 966 bp, Homo Sapiens; identical to SEQ ID NO: 86286
  misc_feature (146)..(157): n is a, c, g, or t
  misc_feature (835)..(869): n is a, c, g, or t

SEQ ID NO: 112184 - DNA, 1174 bp, Homo Sapiens; identical to SEQ ID NO: 86287
  misc_feature (642)..(652): n is a, c, g, or t

SEQ ID NO: 112185 - DNA, 693 bp, Homo Sapiens; identical to SEQ ID NO: 86290

SEQ ID NO: 112186 - DNA, 500 bp, Homo Sapiens; identical to SEQ ID NO: 86291

SEQ ID NO: 112187 - DNA, 551 bp, Homo Sapiens; identical to SEQ ID NO: 86292

SEQ ID NO: 112188 - DNA, 581 bp, Homo Sapiens; identical to SEQ ID NO: 86293

SEQ ID NO: 112189 - DNA, 1314 bp, Homo Sapiens; identical to SEQ ID NO: 86294
  misc_feature (206)..(239): n is a, c, g, or t

SEQ ID NO: 112190 - DNA, 767 bp, Homo Sapiens; identical to SEQ ID NO: 86304

SEQ ID NO: 112191 - DNA, 988 bp, Homo Sapiens; identical to SEQ ID NO: 86305

SEQ ID NO: 112192 - DNA, 1491 bp, Homo Sapiens; identical to SEQ ID NO: 86306

SEQ ID NO: 112193 - DNA, 987 bp, Homo Sapiens; identical to SEQ ID NO: 86307
  misc_feature (963)..(963): n is a, c, g, or t

SEQ ID NO: 112194 - DNA, 1086 bp, Homo Sapiens; identical to SEQ ID NO: 86308

SEQ ID NO: 112195 - DNA, 1059 bp, Homo Sapiens; identical to SEQ ID NO: 86309
  misc_feature (733)..(733): n is a, c, g, or t

SEQ ID NO: 112196 - DNA, 875 bp, Homo Sapiens; identical to SEQ ID NO: 86318

SEQ ID NO: 112197 - DNA, 955 bp, Homo Sapiens; identical to SEQ ID NO: 86319

SEQ ID NO: 112198 - DNA, 2882 bp, Homo Sapiens; identical to SEQ ID NO: 86321
  misc_feature (70)..(141): n is a, c, g, or t
  misc_feature (1806)..(1836): n is a, c, g, or t
  misc_feature (2429)..(2429): n is a, c, g, or t
  misc_feature (2655)..(2655): n is a, c, g, or t

SEQ ID NO: 112199 - DNA, 489 bp, Homo Sapiens; identical to SEQ ID NO: 86322
  misc_feature (301)..(330): n is a, c, g, or t

SEQ ID NO: 112200 - DNA, 1388 bp, Homo Sapiens; identical to SEQ ID NO: 86323

SEQ ID NO: 112201 - DNA, 376 bp, Homo Sapiens; identical to SEQ ID NO: 86324

SEQ ID NO: 112202 - DNA, 1232 bp, Homo Sapiens; identical to SEQ ID NO: 86325

SEQ ID NO: 112203 - DNA, 777 bp, Homo Sapiens; identical to SEQ ID NO: 14957
  misc_feature (655)..(683): n is a, c, g, or t

SEQ ID NO: 112204 - DNA, 815 bp, Homo Sapiens; identical to SEQ ID NO: 86334
  misc_feature (538)..(538): n is a, c, g, or t
  misc_feature (587)..(587): n is a, c, g, or t
  misc_feature (601)..(627): n is a, c, g, or t

SEQ ID NO: 112205 - DNA, 3709 bp, Homo Sapiens; identical to SEQ ID NO: 86335
  misc_feature (3478)..(3478): n is a, c, g, or t
  misc_feature (3648)..(3648): n is a, c, g, or t

SEQ ID NO: 112206 - DNA, 975 bp, Homo Sapiens; identical to SEQ ID NO: 86336

SEQ ID NO: 112207 - DNA, 1002 bp, Homo Sapiens; identical to SEQ ID NO: 86337
  misc_feature (935)..(935): n is a, c, g, or t
  misc_feature (952)..(952): n is a, c, g, or t
  misc_feature (986)..(986): n is a, c, g, or t

SEQ ID NO: 112208 - DNA, 1143 bp, Homo Sapiens; identical to SEQ ID NO: 86344
  misc_feature (264)..(312): n is a, c, g, or t

SEQ ID NO: 112209 - DNA, 2717 bp, Homo Sapiens; identical to SEQ ID NO: 86345

SEQ ID NO: 112210 - DNA, 582 bp, Homo Sapiens; identical to SEQ ID NO: 86353

SEQ ID NO: 112211 - DNA, 894 bp, Homo Sapiens; identical to SEQ ID NO: 86354
  misc_feature (65)..(116): n is a, c, g, or t

SEQ ID NO: 112212 - DNA, 1874 bp, Homo Sapiens; identical to SEQ ID NO: 86358
  misc_feature (580)..(580): n is a, c, g, or t
  misc_feature (1337)..(1337): n is a, c, g, or t

SEQ ID NO: 112213 - DNA, 928 bp, Homo Sapiens; identical to SEQ ID NO: 86359

SEQ ID NO: 112214 - DNA, 960 bp, Homo Sapiens; identical to SEQ ID NO: 86362

SEQ ID NO: 112215 - DNA, 577 bp, Homo Sapiens; identical to SEQ ID NO: 86363

SEQ ID NO: 112216 - DNA, 1009 bp, Homo Sapiens; identical to SEQ ID NO: 86376

SEQ ID NO: 112217 - DNA, 847 bp, Homo Sapiens; identical to SEQ ID NO: 86377

SEQ ID NO: 112218 - DNA, 653 bp, Homo Sapiens; identical to SEQ ID NO: 86378
  misc_feature (387)..(400): n is a, c, g, or t

SEQ ID NO: 112219 - DNA, 451 bp, Homo Sapiens; identical to SEQ ID NO: 86379

SEQ ID NO: 112220 - DNA, 1776 bp, Homo Sapiens; identical to SEQ ID NO: 86382
  misc_feature (138)..(151): n is a, c, g, or t
  misc_feature (1625)..(1688): n is a, c, g, or t

SEQ ID NO: 112221 - DNA, 401 bp, Homo Sapiens; identical to SEQ ID NO: 86383

SEQ ID NO: 112222 - DNA, 885 bp, Homo Sapiens; identical to SEQ ID NO: 86396

SEQ ID NO: 112223 - DNA, 861 bp, Homo Sapiens; identical to SEQ ID NO: 86397

SEQ ID NO: 112224 - DNA, 846 bp, Homo Sapiens; identical to SEQ ID NO: 86398
  misc_feature (519)..(581): n is a, c, g, or t

SEQ ID NO: 112225 - DNA, 1397 bp, Homo Sapiens; identical to SEQ ID NO: 86399
  misc_feature (1288)..(1323): n is a, c, g, or t

SEQ ID NO: 112226 - DNA, 411 bp, Homo Sapiens; identical to SEQ ID NO: 86400
  misc_feature (138)..(138): n is a, c, g, or t
  misc_feature (258)..(313): n is a, c, g, or t

SEQ ID NO: 112227 - DNA, 534 bp, Homo Sapiens; identical to SEQ ID NO: 86401

SEQ ID NO: 112228 - DNA, 1034 bp, Homo Sapiens; identical to SEQ ID NO: 86402

SEQ ID NO: 112229 - DNA, 946 bp, Homo Sapiens; identical to SEQ ID NO: 86403
  misc_feature (234)..(234): n is a, c, g, or t

SEQ ID NO: 112230 - DNA, 1909 bp, Homo Sapiens; identical to SEQ ID NO: 86420
  misc_feature (88)..(88): n is a, c, g, or t

SEQ ID NO: 112231 - DNA, 379 bp, Homo Sapiens; identical to SEQ ID NO: 86421

SEQ ID NO: 112232 - DNA, 583 bp, Homo Sapiens; identical to SEQ ID NO: 86429

SEQ ID NO: 112233 - DNA, 1060 bp, Homo Sapiens; identical to SEQ ID NO: 86430

SEQ ID NO: 112234 - DNA, 1127 bp, Homo Sapiens; identical to SEQ ID NO: 86436

SEQ ID NO: 112235 - DNA, 869 bp, Homo Sapiens; identical to SEQ ID NO: 86437

SEQ ID NO: 112236 - DNA, 582 bp, Homo Sapiens; identical to SEQ ID NO: 86441

SEQ ID NO: 112237 - DNA, 377 bp, Homo Sapiens; identical to SEQ ID NO: 86442

SEQ ID NO: 112238 - DNA, 1690 bp, Homo Sapiens; identical to SEQ ID NO: 86443

SEQ ID NO: 112239 - DNA, 894 bp, Homo Sapiens; identical to SEQ ID NO: 86459
  misc_feature (670)..(670): n is a, c, g, or t
  misc_feature (710)..(710): n is a, c, g, or t
  misc_feature (772)..(772): n is a, c, g, or t
  misc_feature (801)..(801): n is a, c, g, or t

SEQ ID NO: 112240 - DNA, 921 bp, Homo Sapiens; identical to SEQ ID NO: 86460

SEQ ID NO: 112241 - DNA, 582 bp, Homo Sapiens; identical to SEQ ID NO: 86463

SEQ ID NO: 112242 - DNA, 1070 bp, Homo Sapiens; identical to SEQ ID NO: 86464

SEQ ID NO: 112243 - DNA, 746 bp, Homo Sapiens; identical to SEQ ID NO: 86477

SEQ ID NO: 112244 - DNA, 870 bp, Homo Sapiens; identical to SEQ ID NO: 86478

SEQ ID NO: 112245 - DNA, 1763 bp, Homo Sapiens; identical to SEQ ID NO: 86480
  misc_feature (1088)..(1088): n is a, c, g, or t

SEQ ID NO: 112246 - DNA, 1059 bp, Homo Sapiens; identical to SEQ ID NO: 86481
  misc_feature (45)..(87): n is a, c, g, or t
  misc_feature (92)..(126): n is a, c, g, or t
  misc_feature (810)..(810): n is a, c, g, or t

SEQ ID NO: 112247 - DNA, 533 bp, Homo Sapiens; identical to SEQ ID NO: 86539
  misc_feature (360)..(421): n is a, c, g, or t

SEQ ID NO: 112248 - DNA, 428 bp, Homo Sapiens; identical to SEQ ID NO: 86540

SEQ ID NO: 112249 - DNA, 715 bp, Homo Sapiens; identical to SEQ ID NO: 86546
  misc_feature (42)..(42): n is a, c, g, or t
  misc_feature (520)..(556): n is a, c, g, or t

SEQ ID NO: 112250 - DNA, 1469 bp, Homo Sapiens; identical to SEQ ID NO: 86547
  misc_feature (106)..(106): n is a, c, g, or t

SEQ ID NO: 112251 - DNA, 966 bp, Homo Sapiens; identical to SEQ ID NO: 86548

SEQ ID NO: 112252 - DNA, 676 bp, Homo Sapiens; identical to SEQ ID NO: 86560

SEQ ID NO: 112253 - DNA, 1151 bp, Homo Sapiens; identical to SEQ ID NO: 86561

SEQ ID NO: 112254 - DNA, 611 bp, Homo Sapiens; identical to SEQ ID NO: 86570

SEQ ID NO: 112255 - DNA, 421 bp, Homo Sapiens; identical to SEQ ID NO: 86571

SEQ ID NO: 112256 - DNA, 608 bp, Homo Sapiens; identical to SEQ ID NO: 86583

SEQ ID NO: 112257 - DNA, 519 bp, Homo Sapiens; identical to SEQ ID NO: 86584

SEQ ID NO: 112258 - DNA, 1049 bp, Homo Sapiens; identical to SEQ ID NO: 86607
  misc_feature (85)..(119): n is a, c, g, or t
  misc_feature (312)..(324): n is a, c, g, or t

SEQ ID NO: 112259 - DNA, 850 bp, Homo Sapiens; identical to SEQ ID NO: 86608
  misc_feature (179)..(191): n is a, c, g, or t

SEQ ID NO: 112260 - DNA, 609 bp, Homo Sapiens; identical to SEQ ID NO: 86672
  misc_feature (24)..(24): n is a, c, g, or t

SEQ ID NO: 112261 - DNA, 467 bp, Homo Sapiens; identical to SEQ ID NO: 86673

SEQ ID NO: 112262 - DNA, 998 bp, Homo Sapiens; identical to SEQ ID NO: 86747
  misc_feature (134)..(134): n is a, c, g, or t
  misc_feature (843)..(857): n is a, c, g, or t

SEQ ID NO: 112263 - DNA, 1305 bp, Homo Sapiens; identical to SEQ ID NO: 86748
  misc_feature (514)..(530): n is a, c, g, or t
  misc_feature (1195)..(1229): n is a, c, g, or t

SEQ ID NO: 112264 - DNA, 1150 bp, Homo Sapiens; identical to SEQ ID NO: 86782
  misc_feature (423)..(432): n is a, c, g, or t
  misc_feature (465)..(478): n is a, c, g, or t

SEQ ID NO: 112265 - DNA, 354 bp, Homo Sapiens; identical to SEQ ID NO: 86783
  misc_feature (66)..(66): n is a, c, g, or t

SEQ ID NO: 112266 - DNA, 499 bp, Homo Sapiens; identical to SEQ ID NO: 86784

SEQ ID NO: 112267 - DNA, 308 bp, Homo Sapiens; identical to SEQ ID NO: 86810

SEQ ID NO: 112268 - DNA, 571 bp, Homo Sapiens; identical to SEQ ID NO: 86811

SEQ ID NO: 112269 - DNA, 957 bp, Homo Sapiens; identical to SEQ ID NO: 86826
  misc_feature (746)..(878): n is a, c, g, or t

SEQ ID NO: 112270 - DNA, 420 bp, Homo Sapiens; identical to SEQ ID NO: 86827

SEQ ID NO: 112271 - DNA, 966 bp, Homo Sapiens; identical to SEQ ID NO: 86828
  misc_feature (83)..(117): n is a, c, g, or t

SEQ ID NO: 112272 - DNA, 461 bp, Homo Sapiens; identical to SEQ ID NO: 86829

SEQ ID NO: 112273 - DNA, 855 bp, Homo Sapiens; identical to SEQ ID NO: 86835

SEQ ID NO: 112274 - DNA, 1193 bp, Homo Sapiens; identical to SEQ ID NO: 86836
  misc_feature (80)..(114): n is a, c, g, or t
  misc_feature (1122)..(1140): n is a, c, g, or t

SEQ ID NO: 112275 - DNA, 622 bp, Homo Sapiens; identical to SEQ ID NO: 86866

SEQ ID NO: 112276 - DNA, 558 bp, Homo Sapiens; identical to SEQ ID NO: 86867

SEQ ID NO: 112277 - DNA, 600 bp, Homo Sapiens; identical to SEQ ID NO: 86870

SEQ ID NO: 112278 - DNA, 874 bp, Homo Sapiens; identical to SEQ ID NO: 86871

SEQ ID NO: 112279 - DNA, 470 bp, Homo Sapiens; identical to SEQ ID NO: 86897

SEQ ID NO: 112280 - DNA, 1080 bp, Homo Sapiens; identical to SEQ ID NO: 86898
  misc_feature (868)..(920): n is a, c, g, or t

SEQ ID NO: 112281 - DNA, 659 bp, Homo Sapiens; identical to SEQ ID NO: 86906

SEQ ID NO: 112282 - DNA, 416 bp, Homo Sapiens; identical to SEQ ID NO: 86907

SEQ ID NO: 112283 - DNA, 1317 bp, Homo Sapiens; identical to SEQ ID NO: 86914

SEQ ID NO: 112284 - DNA, 1329 bp, Homo Sapiens; identical to SEQ ID NO: 86915
  misc_feature (80)..(114): n is a, c, g, or t
  misc_feature (163)..(467): n is a, c, g, or t
  misc_feature (484)..(683): n is a, c, g, or t

SEQ ID NO: 112285 - DNA, 515 bp, Homo Sapiens; identical to SEQ ID NO: 86924

SEQ ID NO: 112286 - DNA, 179 bp, Homo Sapiens; identical to SEQ ID NO: 86925

SEQ ID NO: 112287 - DNA, 1054 bp, Homo Sapiens; identical to SEQ ID NO: 86926

SEQ ID NO: 112288 - DNA, 379 bp, Homo Sapiens; identical to SEQ ID NO: 86927

SEQ ID NO: 112289 - DNA, 473 bp, Homo Sapiens; identical to SEQ ID NO: 86928

SEQ ID NO: 112290 - DNA, 623 bp, Homo Sapiens; identical to SEQ ID NO: 86933
  misc_feature (112)..(112): n is a, c, g, or t
  misc_feature (144)..(178): n is a, c, g, or t

SEQ ID NO: 112291 - DNA, 450 bp, Homo Sapiens; identical to SEQ ID NO: 86934

SEQ ID NO: 112292 - DNA, 563 bp, Homo Sapiens; identical to SEQ ID NO: 86941

SEQ ID NO: 112293 - DNA, 496 bp, Homo Sapiens; identical to SEQ ID NO: 86942

SEQ ID NO: 112294 - DNA, 1133 bp, Homo Sapiens; identical to SEQ ID NO: 14920
  misc_feature (102)..(158): n is a, c, g, or t
  misc_feature (370)..(416): n is a, c, g, or t
  misc_feature (657)..(657): n is a, c, g, or t

SEQ ID NO: 112295 - DNA, 1520 bp, Homo Sapiens; identical to SEQ ID NO: 86948

SEQ ID NO: 112296 - DNA, 874 bp, Homo Sapiens; identical to SEQ ID NO: 86949

SEQ ID NO: 112297 - DNA, 790 bp, Homo Sapiens; identical to SEQ ID NO: 86977
  misc_feature (29)..(29): n is a, c, g, or t
  misc_feature (236)..(284): n is a, c, g, or t
  misc_feature (462)..(494): n is a, c, g, or t
  misc_feature (613)..(625): n is a, c, g, or t

SEQ ID NO: 112298 - DNA, 402 bp, Homo Sapiens; identical to SEQ ID NO: 86978
  misc_feature (24)..(24): n is a, c, g, or t
  misc_feature (53)..(53): n is a, c, g, or t
  misc_feature (62)..(64): n is a, c, g, or t
  misc_feature (222)..(234): n is a, c, g, or t

SEQ ID NO: 112299 - DNA, 443 bp, Homo Sapiens; identical to SEQ ID NO: 86982

SEQ ID NO: 112300 - DNA, 443 bp, Homo Sapiens; identical to SEQ ID NO: 86983

SEQ ID NO: 112301 - DNA, 1031 bp, Homo Sapiens; identical to SEQ ID NO: 86984
  misc_feature (590)..(699): n is a, c, g, or t
  misc_feature (730)..(790): n is a, c, g, or t

SEQ ID NO: 112302 - DNA, 537 bp, Homo Sapiens; identical to SEQ ID NO: 86985
  misc_feature (173)..(282): n is a, c, g, or t
  misc_feature (313)..(361): n is a, c, g, or t

SEQ ID NO: 112303 - DNA, 908 bp, Homo Sapiens; identical to SEQ ID NO: 86989

SEQ ID NO: 112304 - DNA, 1134 bp, Homo Sapiens; identical to SEQ ID NO: 86990
  misc_feature (93)..(93): n is a, c, g, or t
  misc_feature (118)..(118): n is a, c, g, or t
  misc_feature (128)..(128): n is a, c, g, or t
  misc_feature (151)..(151): n is a, c, g, or t
  misc_feature (916)..(916): n is a, c, g, or t
  misc_feature (1083)..(1083): n is a, c, g, or t

SEQ ID NO: 112305 - DNA, 400 bp, Homo Sapiens; identical to SEQ ID NO: 86991

SEQ ID NO: 112306 - DNA, 804 bp, Homo Sapiens; identical to SEQ ID NO: 86992

SEQ ID NO: 112307 - DNA, 578 bp, Homo Sapiens; identical to SEQ ID NO: 87025

SEQ ID NO: 112308 - DNA, 982 bp, Homo Sapiens; identical to SEQ ID NO: 87026
  misc_feature (66)..(66): n is a, c, g, or t
  misc_feature (224)..(224): n is a, c, g, or t
  misc_feature (703)..(703): n is a, c, g, or t
  misc_feature (947)..(947): n is a, c, g, or t
  misc_feature (964)..(964): n is a, c, g, or t

SEQ ID NO: 112309 - DNA, 730 bp, Homo Sapiens; identical to SEQ ID NO: 87031

SEQ ID NO: 112310 - DNA, 502 bp, Homo Sapiens; identical to SEQ ID NO: 87032

SEQ ID NO: 112311 - DNA, 629 bp, Homo Sapiens; identical to SEQ ID NO: 87044
  misc_feature (287)..(299): n is a, c, g, or t

SEQ ID NO: 112312 - DNA, 1180 bp, Homo Sapiens; identical to SEQ ID NO: 87045
  misc_feature (1071)..(1105): n is a, c, g, or t

SEQ ID NO: 112313 - DNA, 1125 bp, Homo Sapiens; identical to SEQ ID NO: 87056
  misc_feature (31)..(31): n is a, c, g, or t
  misc_feature (904)..(904): n is a, c, g, or t

SEQ ID NO: 112314 - DNA, 899 bp, Homo Sapiens; identical to SEQ ID NO: 87057
  misc_feature (420)..(420): n is a, c, g, or t
  misc_feature (517)..(545): n is a, c, g, or t
  misc_feature (727)..(727): n is a, c, g, or t

SEQ ID NO: 112315 - DNA, 1166 bp, Homo Sapiens; identical to SEQ ID NO: 87084

SEQ ID NO: 112316 - DNA, 1003 bp, Homo Sapiens; identical to SEQ ID NO: 87085

SEQ ID NO: 112317 - DNA, 543 bp, Homo Sapiens; identical to SEQ ID NO: 87094
  misc_feature (167)..(184): n is a, c, g, or t
  misc_feature (340)..(351): n is a, c, g, or t

SEQ ID NO: 112318 - DNA, 1125 bp, Homo Sapiens; identical to SEQ ID NO: 87095
  misc_feature (82)..(116): n is a, c, g, or t

SEQ ID NO: 112319 - DNA, 892 bp, Homo Sapiens; identical to SEQ ID NO: 87100

SEQ ID NO: 112320 - DNA, 528 bp, Homo Sapiens; identical to SEQ ID NO: 87101

SEQ ID NO: 112321 - DNA, 964 bp, Homo Sapiens; identical to SEQ ID NO: 87105

SEQ ID NO: 112322 - DNA, 689 bp, Homo Sapiens; identical to SEQ ID NO: 87106

SEQ ID NO: 112323 - DNA, 661 bp, Homo Sapiens; identical to SEQ ID NO: 87114
  misc_feature (200)..(229): n is a, c, g, or t
  misc_feature (438)..(500): n is a, c, g, or t

SEQ ID NO: 112324 - DNA, 792 bp, Homo Sapiens; identical to SEQ ID NO: 87115
  misc_feature (98)..(152): n is a, c, g, or t
  misc_feature (677)..(711): n is a, c, g, or t

SEQ ID NO: 112325 - DNA, 573 bp, Homo Sapiens; identical to SEQ ID NO: 87118

SEQ ID NO: 112326 - DNA, 745 bp, Homo Sapiens; identical to SEQ ID NO: 87119

SEQ ID NO: 112327 - DNA, 1170 bp, Homo Sapiens; identical to SEQ ID NO: 87120
  misc_feature (477)..(479): n is a, c, g, or t
  misc_feature (481)..(494): n is a, c, g, or t
  misc_feature (496)..(519): n is a, c, g, or t
  misc_feature (522)..(522): n is a, c, g, or t
  misc_feature (524)..(526): n is a, c, g, or t
  misc_feature (529)..(576): n is a, c, g, or t
  misc_feature (580)..(581): n is a, c, g, or t
  misc_feature (586)..(588): n is a, c, g, or t
  misc_feature (590)..(595): n is a, c, g, or t
  misc_feature (597)..(639): n is a, c, g, or t
  misc_feature (647)..(661): n is a, c, g, or t
  misc_feature (668)..(688): n is a, c, g, or t
  misc_feature (709)..(721): n is a, c, g, or t
  misc_feature (793)..(804): n is a, c, g, or t
  misc_feature (827)..(919): n is a, c, g, or t
  misc_feature (940)..(953): n is a, c, g, or t

SEQ ID NO: 112328 - DNA, 334 bp, Homo Sapiens; identical to SEQ ID NO: 87121

SEQ ID NO: 112329 - DNA, 748 bp, Homo Sapiens; identical to SEQ ID NO: 87135
  misc_feature (40)..(40): n is a, c, g, or t
  misc_feature (97)..(97): n is a, c, g, or t
  misc_feature (120)..(120): n is a, c, g, or t

SEQ ID NO: 112330 - DNA, 1483 bp, Homo Sapiens; identical to SEQ ID NO: 87136

SEQ ID NO: 112331 - DNA, 728 bp, Homo Sapiens; identical to SEQ ID NO: 87137

SEQ ID NO: 112332 - DNA, 1206 bp, Homo Sapiens; identical to SEQ ID NO: 87140
  misc_feature (89)..(123): n is a, c, g, or t
  misc_feature (295)..(303): n is a, c, g, or t

SEQ ID NO: 112333 - DNA, 986 bp, Homo Sapiens; identical to SEQ ID NO: 87141
  misc_feature (954)..(954): n is a, c, g, or t

SEQ ID NO: 112334 - DNA, 755 bp, Homo Sapiens; identical to SEQ ID NO: 87143

SEQ ID NO: 112335 - DNA, 1021 bp, Homo Sapiens; identical to SEQ ID NO: 87144
  misc_feature (404)..(475): n is a, c, g, or t
  misc_feature (909)..(943): n is a, c, g, or t

SEQ ID NO: 112336 - DNA, 310 bp, Homo Sapiens; identical to SEQ ID NO: 87145
  misc_feature (52)..(127): n is a, c, g, or t

SEQ ID NO: 112337 - DNA, 680 bp, Homo Sapiens; identical to SEQ ID NO: 87172

SEQ ID NO: 112338 - DNA, 943 bp, Homo Sapiens; identical to SEQ ID NO: 87173
  misc_feature (545)..(638): n is a, c, g, or t
  misc_feature (705)..(777): n is a, c, g, or t
  misc_feature (813)..(813): n is a, c, g, or t
  misc_feature (908)..(908): n is a, c, g, or t

SEQ ID NO: 112339 - DNA, 506 bp, Homo Sapiens; identical to SEQ ID NO: 87189

SEQ ID NO: 112340 - DNA, 950 bp, Homo Sapiens; identical to SEQ ID NO: 87190

SEQ ID NO: 112341 - DNA, 1128 bp, Homo Sapiens; identical to SEQ ID NO: 87191
  misc_feature (42)..(55): n is a, c, g, or t
  misc_feature (113)..(167): n is a, c, g, or t

SEQ ID NO: 112342 - DNA, 1896 bp, Homo Sapiens; identical to SEQ ID NO: 87196

SEQ ID NO: 112343 - DNA, 212 bp, Homo Sapiens; identical to SEQ ID NO: 87197

SEQ ID NO: 112344 - DNA, 801 bp, Homo Sapiens; identical to SEQ ID NO: 87199

SEQ ID NO: 112345 - DNA, 1770 bp, Homo Sapiens; identical to SEQ ID NO: 87200
  misc_feature (941)..(999): n is a, c, g, or t
  misc_feature (1692)..(1692): n is a, c, g, or t
  misc_feature (1743)..(1743): n is a, c, g, or t

SEQ ID NO: 112346 - DNA, 1062 bp, Homo Sapiens; identical to SEQ ID NO: 87201
  misc_feature (78)..(160): n is a, c, g, or t

SEQ ID NO: 112347 - DNA, 1164 bp, Homo Sapiens; identical to SEQ ID NO: 87202
  misc_feature (86)..(120): n is a, c, g, or t
  misc_feature (624)..(669): n is a, c, g, or t

SEQ ID NO: 112348 - DNA, 850 bp, Homo Sapiens; identical to SEQ ID NO: 87203

SEQ ID NO: 112349 - DNA, 572 bp, Homo Sapiens; identical to SEQ ID NO: 87207
  misc_feature (49)..(49): n is a, c, g, or t

SEQ ID NO: 112350 - DNA, 288 bp, Homo Sapiens; identical to SEQ ID NO: 87208

SEQ ID NO: 112351 - DNA, 646 bp, Homo Sapiens; identical to SEQ ID NO: 87238
  misc_feature (56)..(56): n is a, c, g, or t
  misc_feature (128)..(162): n is a, c, g, or t

SEQ ID NO: 112352 - DNA, 577 bp, Homo Sapiens; identical to SEQ ID NO: 87239
  misc_feature (64)..(98): n is a, c, g, or t

SEQ ID NO: 112353 - DNA, 903 bp, Homo Sapiens; identical to SEQ ID NO: 87250
  misc_feature (90)..(124): n is a, c, g, or t

SEQ ID NO: 112354 - DNA, 689 bp, Homo Sapiens; identical to SEQ ID NO: 87251
  misc_feature (79)..(113): n is a, c, g, or t

SEQ ID NO: 112355 - DNA, 773 bp, Homo Sapiens; identical to SEQ ID NO: 87296

SEQ ID NO: 112356 - DNA, 722 bp, Homo Sapiens; identical to SEQ ID NO: 87297

SEQ ID NO: 112357 - DNA, 792 bp, Homo Sapiens; identical to SEQ ID NO: 87298
  misc_feature (703)..(703): n is a, c, g, or t

SEQ ID NO: 112358 - DNA, 410 bp, Homo Sapiens; identical to SEQ ID NO: 87302

SEQ ID NO: 112359 - DNA, 829 bp, Homo Sapiens; identical to SEQ ID NO: 87303
  misc_feature (54)..(227): n is a, c, g, or t

SEQ ID NO: 112360 - DNA, 654 bp, Homo Sapiens; identical to SEQ ID NO: 87318
  misc_feature (70)..(70): n is a, c, g, or t

SEQ ID NO: 112361 - DNA, 991 bp, Homo Sapiens; identical to SEQ ID NO: 87319

SEQ ID NO: 112362 - DNA, 806 bp, Homo Sapiens; identical to SEQ ID NO: 87320

SEQ ID NO: 112363 - DNA, 615 bp, Homo Sapiens; identical to SEQ ID NO: 87321
  misc_feature (541)..(552): n is a, c, g, or t

SEQ ID NO: 112364 - DNA, 1546 bp, Homo Sapiens; identical to SEQ ID NO: 87337

SEQ ID NO: 112365 - DNA, 534 bp, Homo Sapiens; identical to SEQ ID NO: 87338

SEQ ID NO: 112366 - DNA, 616 bp, Homo Sapiens; identical to SEQ ID NO: 87356

SEQ ID NO: 112367 - DNA, 844 bp, Homo Sapiens; identical to SEQ ID NO: 87357
  misc_feature (426)..(426): n is a, c, g, or t
  misc_feature (700)..(782): n is a, c, g, or t

SEQ ID NO: 112368 - DNA, 930 bp, Homo Sapiens; identical to SEQ ID NO: 87368
  misc_feature (85)..(161): n is a, c, g, or t
  misc_feature (163)..(197): n is a, c, g, or t
  misc_feature (207)..(273): n is a, c, g, or t

SEQ ID NO: 112369 - DNA, 960 bp, Homo Sapiens; identical to SEQ ID NO: 87369
  misc_feature (204)..(212): n is a, c, g, or t
  misc_feature (433)..(752): n is a, c, g, or t
  misc_feature (897)..(910): n is a, c, g, or t

SEQ ID NO: 112370 - DNA, 618 bp, Homo Sapiens; identical to SEQ ID NO: 87371
  misc_feature (145)..(221): n is a, c, g, or t

SEQ ID NO: 112371 - DNA, 580 bp, Homo Sapiens; identical to SEQ ID NO: 87372
  misc_feature (229)..(271): n is a, c, g, or t

SEQ ID NO: 112372 - DNA, 305 bp, Homo Sapiens; identical to SEQ ID NO: 87401

SEQ ID NO: 112373 - DNA, 459 bp, Homo Sapiens; identical to SEQ ID NO: 87402

SEQ ID NO: 112374 - DNA, 558 bp, Homo Sapiens; identical to SEQ ID NO: 87403
  misc_feature (97)..(346): n is a, c, g, or t

SEQ ID NO: 112375 - DNA, 414 bp, Homo Sapiens; identical to SEQ ID NO: 87409

SEQ ID NO: 112376 - DNA, 275 bp, Homo Sapiens; identical to SEQ ID NO: 87410

SEQ ID NO: 112377 - DNA, 403 bp, Homo Sapiens; identical to SEQ ID NO: 87423

SEQ ID NO: 112378 - DNA, 411 bp, Homo Sapiens; identical to SEQ ID NO: 87424

SEQ ID NO: 112379 - DNA, 808 bp, Homo Sapiens; identical to SEQ ID NO: 87431
  misc_feature (642)..(642): n is a, c, g, or t
  misc_feature (656)..(656): n is a, c, g, or t

SEQ ID NO: 112380 - DNA, 563 bp, Homo Sapiens; identical to SEQ ID NO: 87432
  misc_feature (468)..(517): n is a, c, g, or t

SEQ ID NO: 112381 - DNA, 469 bp, Homo Sapiens; identical to SEQ ID NO: 87437

SEQ ID NO: 112382 - DNA, 468 bp, Homo Sapiens; identical to SEQ ID NO: 87438
  misc_feature (396)..(396): n is a, c, g, or t

SEQ ID NO: 112383 - DNA, 952 bp, Homo Sapiens; identical to SEQ ID NO: 87439

SEQ ID NO: 112384 - DNA, 497 bp, Homo Sapiens; identical to SEQ ID NO: 87451

SEQ ID NO: 112385 - DNA, 635 bp, Homo Sapiens; identical to SEQ ID NO: 87452

SEQ ID NO: 112386 - DNA, 906 bp, Homo Sapiens; identical to SEQ ID NO: 87459

SEQ ID NO: 112387 - DNA, 441 bp, Homo Sapiens; identical to SEQ ID NO: 87460

SEQ ID NO: 112388 - DNA, 780 bp, Homo Sapiens; identical to SEQ ID NO: 87461
  misc_feature (703)..(703): n is a, c, g, or t

SEQ ID NO: 112389 - DNA, 504 bp, Homo Sapiens; identical to SEQ ID NO: 87511
  misc_feature (62)..(62): n is a, c, g, or t
  misc_feature (68)..(68): n is a, c, g, or t

SEQ ID NO: 112390 - DNA, 516 bp, Homo Sapiens; identical to SEQ ID NO: 87512

SEQ ID NO: 112391 - DNA, 418 bp, Homo Sapiens; identical to SEQ ID NO: 87513

SEQ ID NO: 112392 - DNA, 641 bp, Homo Sapiens; identical to SEQ ID NO: 87517

SEQ ID NO: 112393 - DNA, 844 bp, Homo Sapiens; identical to SEQ ID NO: 87518
  misc_feature (564)..(640): n is a, c, g, or t
  misc_feature (654)..(662): n is a, c, g, or t
  misc_feature (669)..(677): n is a, c, g, or t
  misc_feature (683)..(683): n is a, c, g, or t
  misc_feature (692)..(760): n is a, c, g, or t
  misc_feature (797)..(797): n is a, c, g, or t
  misc_feature (799)..(801): n is a, c, g, or t
  misc_feature (811)..(811): n is a, c, g, or t
  misc_feature (834)..(834): n is a, c, g, or t

SEQ ID NO: 112394 - DNA, 634 bp, Homo Sapiens; identical to SEQ ID NO: 87519

SEQ ID NO: 112395 - DNA, 388 bp, Homo Sapiens; identical to SEQ ID NO: 87520

SEQ ID NO: 112396 - DNA, 321 bp, Homo Sapiens; identical to SEQ ID NO: 87523

SEQ ID NO: 112397 - DNA, 394 bp, Homo Sapiens; identical to SEQ ID NO: 87524

SEQ ID NO: 112398 - DNA, 1024 bp, Homo Sapiens; identical to SEQ ID NO: 87525

SEQ ID NO: 112399 - DNA, 416 bp, Homo Sapiens; identical to SEQ ID NO: 87540

SEQ ID NO: 112400 - DNA, 361 bp, Homo Sapiens; identical to SEQ ID NO: 87541

SEQ ID NO: 112401 - DNA, 613 bp, Homo Sapiens; identical to SEQ ID NO: 87547
  misc_feature (73)..(83): n is a, c, g, or t

SEQ ID NO: 112402 - DNA, 851 bp, Homo Sapiens; identical to SEQ ID NO: 87548
  misc_feature (274)..(274): n is a, c, g, or t

SEQ ID NO: 112403 - DNA, 736 bp, Homo Sapiens; identical to SEQ ID NO: 87549
  misc_feature (17)..(17): n is a, c, g, or t
  misc_feature (119)..(119): n is a, c, g, or t

SEQ ID NO: 112404 - DNA, 634 bp, Homo Sapiens; identical to SEQ ID NO: 87550

SEQ ID NO: 112405 - DNA, 554 bp, Homo Sapiens; identical to SEQ ID NO: 87551

SEQ ID NO: 112406 - DNA, 449 bp, Homo Sapiens; identical to SEQ ID NO: 87552
  misc_feature (248)..(374): n is a, c, g, or t

SEQ ID NO: 112407 - DNA, 545 bp, Homo Sapiens; identical to SEQ ID NO: 87557

SEQ ID NO: 112408 - DNA, 295 bp, Homo Sapiens; identical to SEQ ID NO: 87558

SEQ ID NO: 112409 - DNA, 459 bp, Homo Sapiens; identical to SEQ ID NO: 87586

SEQ ID NO: 112410 - DNA, 457 bp, Homo Sapiens; identical to SEQ ID NO: 87587

SEQ ID NO: 112411 - DNA, 825 bp, Homo Sapiens; identical to SEQ ID NO: 87588
  misc_feature (703)..(703): n is a, c, g, or t

SEQ ID NO: 112412 - DNA, 991 bp, Homo Sapiens; identical to SEQ ID NO: 87589

SEQ ID NO: 112413 - DNA, 481 bp, Homo Sapiens; identical to SEQ ID NO: 87604

SEQ ID NO: 112414 - DNA, 685 bp, Homo Sapiens; identical to SEQ ID NO: 87605

SEQ ID NO: 112415 - DNA, 1050 bp, Homo Sapiens; identical to SEQ ID NO: 87612
  misc_feature (943)..(943): n is a, c, g, or t
  misc_feature (999)..(999): n is a, c, g, or t

SEQ ID NO: 112416 - DNA, 559 bp, Homo Sapiens; identical to SEQ ID NO: 87613

SEQ ID NO: 112417 - DNA, 491 bp, Homo Sapiens; identical to SEQ ID NO: 87617

SEQ ID NO: 112418 - DNA, 651 bp, Homo Sapiens; identical to SEQ ID NO: 87618

SEQ ID NO: 112419 - DNA, 536 bp, Homo Sapiens; identical to SEQ ID NO: 87623

SEQ ID NO: 112420 - DNA, 760 bp, Homo Sapiens; identical to SEQ ID NO: 10654

SEQ ID NO: 112421 - DNA, 401 bp, Homo Sapiens; identical to SEQ ID NO: 87628
  misc_feature (96)..(96): n is a, c, g, or t

SEQ ID NO: 112422 - DNA, 433 bp, Homo Sapiens; identical to SEQ ID NO: 87629

SEQ ID NO: 112423 - DNA, 809 bp, Homo Sapiens; identical to SEQ ID NO: 87640

SEQ ID NO: 112424 - DNA, 600 bp, Homo Sapiens; identical to SEQ ID NO: 87641

SEQ ID NO: 112425 - DNA, 621 bp, Homo Sapiens; identical to SEQ ID NO: 87642

SEQ ID NO: 112426 - DNA, 773 bp, Homo Sapiens; identical to SEQ ID NO: 87648

SEQ ID NO: 112427 - DNA, 836 bp, Homo Sapiens; identical to SEQ ID NO: 87649
  misc_feature (154)..(183): n is a, c, g, or t

SEQ ID NO: 112428 - DNA, 669 bp, Homo Sapiens; identical to SEQ ID NO: 87659

SEQ ID NO: 112429 - DNA, 806 bp, Homo Sapiens; identical to SEQ ID NO: 87660

SEQ ID NO: 112430 - DNA, 550 bp, Homo Sapiens; identical to SEQ ID NO: 87682

SEQ ID NO: 112431 - DNA, 1295 bp, Homo Sapiens; identical to SEQ ID NO: 87683

SEQ ID NO: 112432 - DNA, 2770 bp, Homo Sapiens; identical to SEQ ID NO: 87698
  misc_feature (1508)..(1508): n is a, c, g, or t
  misc_feature (1630)..(1630): n is a, c, g, or t

SEQ ID NO: 112433 - DNA, 1092 bp, Homo Sapiens; identical to SEQ ID NO: 87699
  misc_feature (23)..(24): n is a, c, g, or t

SEQ ID NO: 112434 - DNA, 446 bp, Homo Sapiens; identical to SEQ ID NO: 87729

SEQ ID NO: 112435 - DNA, 421 bp, Homo Sapiens; identical to SEQ ID NO: 87730

SEQ ID NO: 112436 - DNA, 614 bp, Homo Sapiens; identical to SEQ ID NO: 87731

SEQ ID NO: 112437 - DNA, 1125 bp, Homo Sapiens; identical to SEQ ID NO: 87734

SEQ ID NO: 112438 - DNA, 427 bp, Homo Sapiens; identical to SEQ ID NO: 87735

SEQ ID NO: 112439 - DNA, 1133 bp, Homo Sapiens; identical to SEQ ID NO: 87741

SEQ ID NO: 112440 - DNA, 642 bp, Homo Sapiens; identical to SEQ ID NO: 87742

SEQ ID NO: 112441 - DNA, 493 bp, Homo Sapiens; identical to SEQ ID NO: 87753
  misc_feature (355)..(407): n is a, c, g, or t

SEQ ID NO: 112442 - DNA, 886 bp, Homo Sapiens; identical to SEQ ID NO: 87754
  misc_feature (337)..(390): n is a, c, g, or t

SEQ ID NO: 112443 - DNA, 536 bp, Homo Sapiens; identical to SEQ ID NO: 87755
  misc_feature (382)..(435): n is a, c, g, or t

SEQ ID NO: 112444 - DNA, 1322 bp, Homo Sapiens; identical to SEQ ID NO: 87791
  misc_feature (218)..(265): n is a, c, g, or t
  misc_feature (749)..(782): n is a, c, g, or t
  misc_feature (853)..(905): n is a, c, g, or t

SEQ ID NO: 112445 - DNA, 698 bp, Homo Sapiens; identical to SEQ ID NO: 87792

SEQ ID NO: 112446 - DNA, 1178 bp, Homo Sapiens; identical to SEQ ID NO: 87793
  misc_feature (41)..(125): n is a, c, g, or t
  misc_feature (170)..(220): n is a, c, g, or t

SEQ ID NO: 112447 - DNA, 1030 bp, Homo Sapiens; identical to SEQ ID NO: 87794
  misc_feature (26)..(26): n is a, c, g, or t
  misc_feature (97)..(143): n is a, c, g, or t

SEQ ID NO: 112448 - DNA, 1144 bp, Homo Sapiens; identical to SEQ ID NO: 87802

SEQ ID NO: 112449 - DNA, 332 bp, Homo Sapiens; identical to SEQ ID NO: 87803

SEQ ID NO: 112450 - DNA, 699 bp, Homo Sapiens; identical to SEQ ID NO: 87808

SEQ ID NO: 112451 - DNA, 1122 bp, Homo Sapiens; identical to SEQ ID NO: 87809

SEQ ID NO: 112452 - DNA, 879 bp, Homo Sapiens; identical to SEQ ID NO: 87828

SEQ ID NO: 112453 - DNA, 1579 bp, Homo Sapiens; identical to SEQ ID NO: 87829

SEQ ID NO: 112454 - DNA, 534 bp, Homo Sapiens; identical to SEQ ID NO: 87831

SEQ ID NO: 112455 - DNA, 589 bp, Homo Sapiens; identical to SEQ ID NO: 87832
  misc_feature (576)..(576): n is a, c, g, or t

SEQ ID NO: 112456 - DNA, 1792 bp, Homo Sapiens; identical to SEQ ID NO: 87834

SEQ ID NO: 112457 - DNA, 826 bp, Homo Sapiens; identical to SEQ ID NO: 87835

SEQ ID NO: 112458 - DNA, 498 bp, Homo Sapiens; identical to SEQ ID NO: 87845

SEQ ID NO: 112459 - DNA, 1018 bp, Homo Sapiens; identical to SEQ ID NO: 87846

SEQ ID NO: 112460 - DNA, 1577 bp, Homo Sapiens; identical to SEQ ID NO: 87851

SEQ ID NO: 112461 - DNA, 760 bp, Homo Sapiens; identical to SEQ ID NO: 87852

SEQ ID NO: 112462 - DNA, 942 bp, Homo Sapiens; identical to SEQ ID NO: 87853

SEQ ID NO: 112463 - DNA, 1231 bp, Homo Sapiens; identical to SEQ ID NO: 87854
  misc_feature (900)..(900): n is a, c, g, or t
  misc_feature (903)..(903): n is a, c, g, or t
  misc_feature (945)..(945): n is a, c, g, or t
  misc_feature (973)..(973): n is a, c, g, or t
  misc_feature (987)..(987): n is a, c, g, or t

SEQ ID NO: 112464 - DNA, 1255 bp, Homo Sapiens; identical to SEQ ID NO: 87855
  misc_feature (389)..(448): n is a, c, g, or t
  misc_feature (491)..(491): n is a, c, g, or t
  misc_feature (659)..(659): n is a, c, g, or t
  misc_feature (1149)..(1149): n is a, c, g, or t

SEQ ID NO: 112465 - DNA, 536 bp, Homo Sapiens; identical to SEQ ID NO: 87859
  misc_feature (256)..(302): n is a, c, g, or t

SEQ ID NO: 112466 - DNA, 706 bp, Homo Sapiens; identical to SEQ ID NO: 87860
  misc_feature (605)..(605): n is a, c, g, or t

SEQ ID NO: 112467 - DNA, 1009 bp, Homo Sapiens; identical to SEQ ID NO: 87870
  misc_feature (34)..(34): n is a, c, g, or t

SEQ ID NO: 112468 - DNA, 986 bp, Homo Sapiens; identical to SEQ ID NO: 87871

SEQ ID NO: 112469 - DNA, 462 bp, Homo Sapiens; identical to SEQ ID NO: 87878

SEQ ID NO: 112470 - DNA, 495 bp, Homo Sapiens; identical to SEQ ID NO: 87879

SEQ ID NO: 112471 - DNA, 467 bp, Homo Sapiens; identical to SEQ ID NO: 87880

SEQ ID NO: 112472 - DNA, 1023 bp, Homo Sapiens; identical to SEQ ID NO: 87881
  misc_feature (63)..(94): n is a, c, g, or t

SEQ ID NO: 112473 - DNA, 1066 bp, Homo Sapiens; identical to SEQ ID NO: 87882

SEQ ID NO: 112474 - DNA, 467 bp, Homo Sapiens; identical to SEQ ID NO: 87883

SEQ ID NO: 112475 - DNA, 907 bp, Homo Sapiens; identical to SEQ ID NO: 87901

SEQ ID NO: 112476 - DNA, 845 bp, Homo Sapiens; identical to SEQ ID NO: 87902

SEQ ID NO: 112477 - DNA, 916 bp, Homo Sapiens; identical to SEQ ID NO: 87903
  misc_feature (856)..(856): n is a, c, g, or t

SEQ ID NO: 112478 - DNA, 549 bp, Homo Sapiens; identical to SEQ ID NO: 87935

SEQ ID NO: 112479 - DNA, 606 bp, Homo Sapiens; identical to SEQ ID NO: 87936

SEQ ID NO: 112480 - DNA, 728 bp, Homo Sapiens; identical to SEQ ID NO: 87957
  misc_feature (69)..(69): n is a, c, g, or t

SEQ ID NO: 112481 - DNA, 940 bp, Homo Sapiens; identical to SEQ ID NO: 87958

SEQ ID NO: 112482 - DNA, 653 bp, Homo Sapiens; identical to SEQ ID NO: 87968

SEQ ID NO: 112483 - DNA, 602 bp, Homo Sapiens; identical to SEQ ID NO: 87969

SEQ ID NO: 112484 - DNA, 548 bp, Homo Sapiens; identical to SEQ ID NO: 88000
  misc_feature (41)..(41): n is a, c, g, or t
  misc_feature (312)..(312): n is a, c, g, or t

SEQ ID NO: 112485 - DNA, 990 bp, Homo Sapiens; identical to SEQ ID NO: 88001
  misc_feature (799)..(799): n is a, c, g, or t
  misc_feature (851)..(851): n is a, c, g, or t
  misc_feature (880)..(880): n is a, c, g, or t
  misc_feature (882)..(882): n is a, c, g, or t

SEQ ID NO: 112486 - DNA, 525 bp, Homo Sapiens; identical to SEQ ID NO: 88009

SEQ ID NO: 112487 - DNA, 732 bp, Homo Sapiens; identical to SEQ ID NO: 88010
  misc_feature (25)..(25): n is a, c, g, or t
  misc_feature (41)..(41): n is a, c, g, or t
  misc_feature (52)..(52): n is a, c, g, or t

SEQ ID NO: 112488 - DNA, 723 bp, Homo Sapiens; identical to SEQ ID NO: 88022
  misc_feature (418)..(488): n is a, c, g, or t

SEQ ID NO: 112489 - DNA, 490 bp, Homo Sapiens; identical to SEQ ID NO: 88023

SEQ ID NO: 112490 - DNA, 512 bp, Homo Sapiens; identical to SEQ ID NO: 88036

SEQ ID NO: 112491 - DNA, 762 bp, Homo Sapiens; identical to SEQ ID NO: 88037

SEQ ID NO: 112492 - DNA, 449 bp, Homo Sapiens; identical to SEQ ID NO: 88043

SEQ ID NO: 112493 - DNA, 844 bp, Homo Sapiens; identical to SEQ ID NO: 88044

SEQ ID NO: 112494 - DNA, 553 bp, Homo Sapiens; identical to SEQ ID NO: 88062

SEQ ID NO: 112495 - DNA, 367 bp, Homo Sapiens; identical to SEQ ID NO: 88063

SEQ ID NO: 112496 - DNA, 506 bp, Homo Sapiens; identical to SEQ ID NO: 88126

SEQ ID NO: 112497 - DNA, 465 bp, Homo Sapiens; identical to SEQ ID NO: 88127
  misc_feature (348)..(362): n is a, c, g, or t

SEQ ID NO: 112498 - DNA, 563 bp, Homo Sapiens; identical to SEQ ID NO: 88130

SEQ ID NO: 112499 - DNA, 620 bp, Homo Sapiens; identical to SEQ ID NO: 88131

SEQ ID NO: 112500 - DNA, 698 bp, Homo Sapiens; identical to SEQ ID NO: 88139
  misc_feature (61)..(61): n is a, c, g, or t
  misc_feature (96)..(96): n is a, c, g, or t

SEQ ID NO: 112501 - DNA, 698 bp, Homo Sapiens; identical to SEQ ID NO: 88140

SEQ ID NO: 112502 - DNA, 1045 bp, Homo Sapiens; identical to SEQ ID NO: 88170
  misc_feature (35)..(35): n is a, c, g, or t
  misc_feature (61)..(61): n is a, c, g, or t
  misc_feature (70)..(71): n is a, c, g, or t
  misc_feature (79)..(79): n is a, c, g, or t
  misc_feature (90)..(90): n is a, c, g, or t
  misc_feature (104)..(104): n is a, c, g, or t
  misc_feature (192)..(192): n is a, c, g, or t

SEQ ID NO: 112503 - DNA, 790 bp, Homo Sapiens; identical to SEQ ID NO: 88171

SEQ ID NO: 112504 - DNA, 320 bp, Homo Sapiens; identical to SEQ ID NO: 88222

SEQ ID NO: 112505 - DNA, 334 bp, Homo Sapiens; identical to SEQ ID NO: 88223

SEQ ID NO: 112506 - DNA, 375 bp, Homo Sapiens; identical to SEQ ID NO: 88233

SEQ ID NO: 112507 - DNA, 865 bp, Homo Sapiens; identical to SEQ ID NO: 88234

SEQ ID NO: 112508 - DNA, 644 bp, Homo Sapiens; identical to SEQ ID NO: 88272

SEQ ID NO: 112509 - DNA, 704 bp, Homo Sapiens; identical to SEQ ID NO: 88273
  misc_feature (537)..(537): n is a, c, g, or t

SEQ ID NO: 112510 - DNA, 589 bp, Homo Sapiens; identical to SEQ ID NO: 88283

SEQ ID NO: 112511 - DNA, 592 bp, Homo Sapiens; identical to SEQ ID NO: 88284

SEQ ID NO: 112512 - DNA, 505 bp, Homo Sapiens; identical to SEQ ID NO: 88289

SEQ ID NO: 112513 - DNA, 583 bp, Homo Sapiens; identical to SEQ ID NO: 88290

SEQ ID NO: 112514 - DNA, 402 bp, Homo Sapiens; identical to SEQ ID NO: 88291

SEQ ID NO: 112515 - DNA, 597 bp, Homo Sapiens; identical to SEQ ID NO: 88292

SEQ ID NO: 112516 - DNA, 450 bp, Homo Sapiens; identical to SEQ ID NO: 88293

SEQ ID NO: 112517 - DNA, 534 bp, Homo Sapiens; identical to SEQ ID NO: 88314

SEQ ID NO: 112518 - DNA, 821 bp, Homo Sapiens; identical to SEQ ID NO: 88315

SEQ ID NO: 112519 - DNA, 889 bp, Homo Sapiens; identical to SEQ ID NO: 88316
  misc_feature (84)..(92): n is a, c, g, or t

SEQ ID NO: 112520 - DNA, 1544 bp, Homo Sapiens; identical to SEQ ID NO: 88324

SEQ ID NO: 112521 - DNA, 1115 bp, Homo Sapiens; identical to SEQ ID NO: 88325

SEQ ID NO: 112522 - DNA, 1357 bp, Homo Sapiens; identical to SEQ ID NO: 88326
  misc_feature (30)..(30): n is a, c, g, or t
  misc_feature (750)..(834): n is a, c, g, or t

SEQ ID NO: 112523 - DNA, 413 bp, Homo Sapiens; identical to SEQ ID NO: 88335

SEQ ID NO: 112524 - DNA, 904 bp, Homo Sapiens; identical to SEQ ID NO: 88336
  misc_feature (129)..(191): n is a, c, g, or t
  misc_feature (639)..(639): n is a, c, g, or t
  misc_feature (709)..(709): n is a, c, g, or t

SEQ ID NO: 112525 - DNA, 624 bp, Homo Sapiens; identical to SEQ ID NO: 88342

SEQ ID NO: 112526 - DNA, 666 bp, Homo Sapiens; identical to SEQ ID NO: 88343

SEQ ID NO: 112527 - DNA, 551 bp, Homo Sapiens; identical to SEQ ID NO: 88344

SEQ ID NO: 112528 - DNA, 408 bp, Homo Sapiens; identical to SEQ ID NO: 88348

SEQ ID NO: 112529 - DNA, 405 bp, Homo Sapiens; identical to SEQ ID NO: 88349

SEQ ID NO: 112530 - DNA, 611 bp, Homo Sapiens; identical to SEQ ID NO: 88355

SEQ ID NO: 112531 - DNA, 933 bp, Homo Sapiens; identical to SEQ ID NO: 88356
  misc_feature (694)..(694): n is a, c, g, or t
  misc_feature (837)..(837): n is a, c, g, or t

SEQ ID NO: 112532 - DNA, 483 bp, Homo Sapiens; identical to SEQ ID NO: 88365

SEQ ID NO: 112533 - DNA, 681 bp, Homo Sapiens; identical to SEQ ID NO: 88366

SEQ ID NO: 112534 - DNA, 939 bp, Homo Sapiens; identical to SEQ ID NO: 88371
  misc_feature (134)..(147): n is a, c, g, or t
  misc_feature (870)..(890): n is a, c, g, or t

SEQ ID NO: 112535 - DNA, 1017 bp, Homo Sapiens; identical to SEQ ID NO: 88372

SEQ ID NO: 112536 - DNA, 475 bp, Homo Sapiens; identical to SEQ ID NO: 88376
  misc_feature (27)..(27): n is a, c, g, or t

SEQ ID NO: 112537 - DNA, 593 bp, Homo Sapiens; identical to SEQ ID NO: 88377
  misc_feature (529)..(529): n is a, c, g, or t

SEQ ID NO: 112538 - DNA, 812 bp, Homo Sapiens; identical to SEQ ID NO: 88379

SEQ ID NO: 112539 - DNA, 536 bp, Homo Sapiens; identical to SEQ ID NO: 88380

SEQ ID NO: 112540 - DNA, 598 bp, Homo Sapiens; identical to SEQ ID NO: 88392

SEQ ID NO: 112541 - DNA, 868 bp, Homo Sapiens; identical to SEQ ID NO: 88393

SEQ ID NO: 112542 - DNA, 987 bp, Homo Sapiens; identical to SEQ ID NO: 88413

SEQ ID NO: 112543 - DNA, 1000 bp, Homo Sapiens; identical to SEQ ID NO: 88414

SEQ ID NO: 112544 - DNA, 660 bp, Homo Sapiens; identical to SEQ ID NO: 88434
  misc_feature (21)..(21): n is a, c, g, or t
  misc_feature (23)..(23): n is a, c, g, or t
  misc_feature (119)..(119): n is a, c, g, or t

SEQ ID NO: 112545 - DNA, 557 bp, Homo Sapiens; identical to SEQ ID NO: 88435

SEQ ID NO: 112546 - DNA, 626 bp, Homo Sapiens; identical to SEQ ID NO: 88441

SEQ ID NO: 112547 - DNA, 474 bp, Homo Sapiens; identical to SEQ ID NO: 88442

SEQ ID NO: 112548 - DNA, 926 bp, Homo Sapiens; identical to SEQ ID NO: 88450

SEQ ID NO: 112549 - DNA, 333 bp, Homo Sapiens; identical to SEQ ID NO: 88451

SEQ ID NO: 112550 - DNA, 310 bp, Homo Sapiens; identical to SEQ ID NO: 88453

SEQ ID NO: 112551 - DNA, 393 bp, Homo Sapiens; identical to SEQ ID NO: 88454

SEQ ID NO: 112552 - DNA, 583 bp, Homo Sapiens; identical to SEQ ID NO: 88468

SEQ ID NO: 112553 - DNA, 258 bp, Homo Sapiens; identical to SEQ ID NO: 88469
  misc_feature (118)..(152): n is a, c, g, or t

SEQ ID NO: 112554 - DNA, 317 bp, Homo Sapiens; identical to SEQ ID NO: 88472

SEQ ID NO: 112555 - DNA, 442 bp, Homo Sapiens; identical to SEQ ID NO: 88473

SEQ ID NO: 112556 - DNA, 635 bp, Homo Sapiens; identical to SEQ ID NO: 88474
  misc_feature (604)..(604): n is a, c, g, or t

SEQ ID NO: 112557 - DNA, 619 bp, Homo Sapiens; identical to SEQ ID NO: 88475

SEQ ID NO: 112558 - DNA, 518 bp, Homo Sapiens; identical to SEQ ID NO: 88488
  misc_feature (292)..(383): n is a, c, g, or t

SEQ ID NO: 112559 - DNA, 304 bp, Homo Sapiens; identical to SEQ ID NO: 88489

SEQ ID NO: 112560 - DNA, 735 bp, Homo Sapiens; identical to SEQ ID NO: 88496
  misc_feature (137)..(137): n is a, c, g, or t

SEQ ID NO: 112561 - DNA, 652 bp, Homo Sapiens; identical to SEQ ID NO: 88497

SEQ ID NO: 112562 - DNA, 564 bp, Homo Sapiens; identical to SEQ ID NO: 88501
  misc_feature (61)..(61): n is a, c, g, or t

SEQ ID NO: 112563 - DNA, 389 bp, Homo Sapiens; identical to SEQ ID NO: 88502

SEQ ID NO: 112564 - DNA, 458 bp, Homo Sapiens; identical to SEQ ID NO: 88523
  misc_feature (41)..(90): n is a, c, g, or t
  misc_feature (212)..(225): n is a, c, g, or t

SEQ ID NO: 112565 - DNA, 762 bp, Homo Sapiens; identical to SEQ ID NO: 88524
  misc_feature (61)..(94): n is a, c, g, or t
  misc_feature (426)..(452): n is a, c, g, or t

SEQ ID NO: 112566 - DNA, 396 bp, Homo Sapiens; identical to SEQ ID NO: 88535

SEQ ID NO: 112567 - DNA, 716 bp, Homo Sapiens; identical to SEQ ID NO: 88536

SEQ ID NO: 112568 - DNA, 473 bp, Homo Sapiens; identical to SEQ ID NO: 88560

SEQ ID NO: 112569 - DNA, 465 bp, Homo Sapiens; identical to SEQ ID NO: 88561

SEQ ID NO: 112570 - DNA, 455 bp, Homo Sapiens; identical to SEQ ID NO: 88582
  misc_feature (205)..(247): n is a, c, g, or t

SEQ ID NO: 112571 - DNA, 601 bp, Homo Sapiens; identical to SEQ ID NO: 88583
  misc_feature (123)..(123): n is a, c, g, or t
  misc_feature (509)..(551): n is a, c, g, or t

SEQ ID NO: 112572 - DNA, 624 bp, Homo Sapiens; identical to SEQ ID NO: 88587
  misc_feature (31)..(31): n is a, c, g, or t

SEQ ID NO: 112573 - DNA, 466 bp, Homo Sapiens; identical to SEQ ID NO: 88588

SEQ ID NO: 112574 - DNA, 447 bp, Homo Sapiens; identical to SEQ ID NO: 88589

SEQ ID NO: 112575 - DNA, 511 bp, Homo Sapiens; identical to SEQ ID NO: 88591
  misc_feature (466)..(466): n is a, c, g, or t

SEQ ID NO: 112576 - DNA, 478 bp, Homo Sapiens; identical to SEQ ID NO: 88592
  misc_feature (63)..(107): n is a, c, g, or t

SEQ ID NO: 112577 - DNA, 1611 bp, Homo Sapiens; identical to SEQ ID NO: 88595

SEQ ID NO: 112578 - DNA, 1759 bp, Homo Sapiens; identical to SEQ ID NO: 88596
  misc_feature (1170)..(1183): n is a, c, g, or t

SEQ ID NO: 112579 - DNA, 495 bp, Homo Sapiens; identical to SEQ ID NO: 88637

SEQ ID NO: 112580 - DNA, 481 bp, Homo Sapiens; identical to SEQ ID NO: 88638

SEQ ID NO: 112581 - DNA, 430 bp, Homo Sapiens; identical to SEQ ID NO: 88640
  misc_feature (156)..(156): n is a, c, g, or t

SEQ ID NO: 112582 - DNA, 486 bp, Homo Sapiens; identical to SEQ ID NO: 88641

SEQ ID NO: 112583 - DNA, 489 bp, Homo Sapiens; identical to SEQ ID NO: 88716

SEQ ID NO: 112584 - DNA, 684 bp, Homo Sapiens; identical to SEQ ID NO: 88717
  misc_feature (180)..(275): n is a, c, g, or t

SEQ ID NO: 112585 - DNA, 591 bp, Homo Sapiens; identical to SEQ ID NO: 88719

SEQ ID NO: 112586 - DNA, 748 bp, Homo Sapiens; identical to SEQ ID NO: 88720

SEQ ID NO: 112587 - DNA, 668 bp, Homo Sapiens; identical to SEQ ID NO: 88751

SEQ ID NO: 112588 - DNA, 451 bp, Homo Sapiens; identical to SEQ ID NO: 88752

SEQ ID NO: 112589 - DNA, 884 bp, Homo Sapiens; identical to SEQ ID NO: 88771
  misc_feature (642)..(718): n is a, c, g, or t

SEQ ID NO: 112590 - DNA, 1658 bp, Homo Sapiens; identical to SEQ ID NO: 88772

SEQ ID NO: 112591 - DNA, 909 bp, Homo Sapiens; identical to SEQ ID NO: 88773
  misc_feature (755)..(755): n is a, c, g, or t
  misc_feature (767)..(767): n is a, c, g, or t
  misc_feature (861)..(861): n is a, c, g, or t

SEQ ID NO: 112592 - DNA, 533 bp, Homo Sapiens; identical to SEQ ID NO: 88779

SEQ ID NO: 112593 - DNA, 1933 bp, Homo Sapiens; identical to SEQ ID NO: 88780

SEQ ID NO: 112594 - DNA, 438 bp, Homo Sapiens; identical to SEQ ID NO: 88781

SEQ ID NO: 112595 - DNA, 585 bp, Homo Sapiens; identical to SEQ ID NO: 88782

SEQ ID NO: 112596 - DNA, 490 bp, Homo Sapiens; identical to SEQ ID NO: 88801

SEQ ID NO: 112597 - DNA, 492 bp, Homo Sapiens; identical to SEQ ID NO: 88802
  misc_feature (122)..(151): n is a, c, g, or t
  misc_feature (443)..(443): n is a, c, g, or t

SEQ ID NO: 112598 - DNA, 411 bp, Homo Sapiens; identical to SEQ ID NO: 88815

SEQ ID NO: 112599 - DNA, 462 bp, Homo Sapiens; identical to SEQ ID NO: 88816
  misc_feature (423)..(423): n is a, c, g, or t

SEQ ID NO: 112600 - DNA, 1185 bp, Homo Sapiens; identical to SEQ ID NO: 88817

SEQ ID NO: 112601 - DNA, 1196 bp, Homo Sapiens; identical to SEQ ID NO: 88818
  misc_feature (561)..(561): n is a, c, g, or t
  misc_feature (630)..(630): n is a, c, g, or t
  misc_feature (853)..(853): n is a, c, g, or t
  misc_feature (904)..(904): n is a, c, g, or t
  misc_feature (1026)..(1121): n is a, c, g, or t

SEQ ID NO: 112602 - DNA, 843 bp, Homo Sapiens; identical to SEQ ID NO: 88819

SEQ ID NO: 112603 - DNA, 509 bp, Homo Sapiens; identical to SEQ ID NO: 88833

SEQ ID NO: 112604 - DNA, 551 bp, Homo Sapiens; identical to SEQ ID NO: 88834

SEQ ID NO: 112605 - DNA, 501 bp, Homo Sapiens; identical to SEQ ID NO: 88841

SEQ ID NO: 112606 - DNA, 652 bp, Homo Sapiens; identical to SEQ ID NO: 88842

SEQ ID NO: 112607 - DNA, 451 bp, Homo Sapiens; identical to SEQ ID NO: 88846

SEQ ID NO: 112608 - DNA, 489 bp, Homo Sapiens; identical to SEQ ID NO: 88847
  misc_feature (168)..(168): n is a, c, g, or t

SEQ ID NO: 112609 - DNA, 717 bp, Homo Sapiens; identical to SEQ ID NO: 88855

SEQ ID NO: 112610 - DNA, 482 bp, Homo Sapiens; identical to SEQ ID NO: 88856
  misc_feature (442)..(442): n is a, c, g, or t

SEQ ID NO: 112611 - DNA, 1058 bp, Homo Sapiens; identical to SEQ ID NO: 88859

SEQ ID NO: 112612 - DNA, 423 bp, Homo Sapiens; identical to SEQ ID NO: 88860
  misc_feature (70)..(70): n is a, c, g, or t
  misc_feature (76)..(76): n is a, c, g, or t
  misc_feature (111)..(111): n is a, c, g, or t

SEQ ID NO: 112613 - DNA, 616 bp, Homo Sapiens; identical to SEQ ID NO: 88956

SEQ ID NO: 112614 - DNA, 436 bp, Homo Sapiens; identical to SEQ ID NO: 88957

SEQ ID NO: 112615 - DNA, 709 bp, Homo Sapiens; identical to SEQ ID NO: 88961

SEQ ID NO: 112616 - DNA, 391 bp, Homo Sapiens; identical to SEQ ID NO: 88962

SEQ ID NO: 112617 - DNA, 535 bp, Homo Sapiens; identical to SEQ ID NO: 88994

SEQ ID NO: 112618 - DNA, 562 bp, Homo Sapiens; identical to SEQ ID NO: 88995
  misc_feature (236)..(252): n is a, c, g, or t

SEQ ID NO: 112619 - DNA, 364 bp, Homo Sapiens; identical to SEQ ID NO: 88998

SEQ ID NO: 112620 - DNA, 879 bp, Homo Sapiens; identical to SEQ ID NO: 88999

SEQ ID NO: 112621 - DNA, 567 bp, Homo Sapiens; identical to SEQ ID NO: 89030

SEQ ID NO: 112622 - DNA, 513 bp, Homo Sapiens; identical to SEQ ID NO: 89031

SEQ ID NO: 112623 - DNA, 946 bp, Homo Sapiens; identical to SEQ ID NO: 89032

SEQ ID NO: 112624 - DNA, 1458 bp, Homo Sapiens; identical to SEQ ID NO: 89033

SEQ ID NO: 112625 - DNA, 499 bp, Homo Sapiens; identical to SEQ ID NO: 89043
  misc_feature (405)..(440): n is a, c, g, or t

SEQ ID NO: 112626 - DNA, 438 bp, Homo Sapiens; identical to SEQ ID NO: 89044
  misc_feature (319)..(319): n is a, c, g, or t

SEQ ID NO: 112627 - DNA, 637 bp, Homo Sapiens; identical to SEQ ID NO: 89046
  misc_feature (470)..(520): n is a, c, g, or t
  misc_feature (546)..(554): n is a, c, g, or t

SEQ ID NO: 112628 - DNA, 155 bp, Homo Sapiens; identical to SEQ ID NO: 89047
  misc_feature (92)..(92): n is a, c, g, or t

SEQ ID NO: 112629 - DNA, 963 bp, Homo Sapiens; identical to SEQ ID NO: 89049
  misc_feature (776)..(776): n is a, c, g, or t
  misc_feature (805)..(806): n is a, c, g, or t

SEQ ID NO: 112630 - DNA, 1544 bp, Homo Sapiens; identical to SEQ ID NO: 89050
  misc_feature (81)..(141): n is a, c, g, or t

SEQ ID NO: 112631 - DNA, 330 bp, Homo Sapiens; identical to SEQ ID NO: 89058

SEQ ID NO: 112632 - DNA, 741 bp, Homo Sapiens; identical to SEQ ID NO: 89059

SEQ ID NO: 112633 - DNA, 449 bp, Homo Sapiens; identical to SEQ ID NO: 89072

SEQ ID NO: 112634 - DNA, 812 bp, Homo Sapiens; identical to SEQ ID NO: 89073

SEQ ID NO: 112635 - DNA, 715 bp, Homo Sapiens; identical to SEQ ID NO: 89097
  misc_feature (516)..(516): n is a, c, g, or t
  misc_feature (561)..(561): n is a, c, g, or t
  misc_feature (617)..(617): n is a, c, g, or t

SEQ ID NO: 112636 - DNA, 1191 bp, Homo Sapiens; identical to SEQ ID NO: 89098
  misc_feature (550)..(614): n is a, c, g, or t
  misc_feature (712)..(712): n is a, c, g, or t
  misc_feature (987)..(987): n is a, c, g, or t
  misc_feature (1123)..(1123): n is a, c, g, or t
  misc_feature (1164)..(1164): n is a, c, g, or t

SEQ ID NO: 112637 - DNA, 471 bp, Homo Sapiens; identical to SEQ ID NO: 89100

SEQ ID NO: 112638 - DNA, 741 bp, Homo Sapiens; identical to SEQ ID NO: 89101

SEQ ID NO: 112639 - DNA, 505 bp, Homo Sapiens; identical to SEQ ID NO: 89146

SEQ ID NO: 112640 - DNA, 1035 bp, Homo Sapiens; identical to SEQ ID NO: 89147
  misc_feature (572)..(573): n is a, c, g, or t

SEQ ID NO: 112641 - DNA, 638 bp, Homo Sapiens; identical to SEQ ID NO: 89167

SEQ ID NO: 112642 - DNA, 414 bp, Homo Sapiens; identical to SEQ ID NO: 89168

SEQ ID NO: 112643 - DNA, 734 bp, Homo Sapiens; identical to SEQ ID NO: 89179
  misc_feature (424)..(479): n is a, c, g, or t

SEQ ID NO: 112644 - DNA, 1084 bp, Homo Sapiens; identical to SEQ ID NO: 89180
  misc_feature (670)..(715): n is a, c, g, or t

SEQ ID NO: 112645 - DNA, 1358 bp, Homo Sapiens; identical to SEQ ID NO: 89181
  misc_feature (1126)..(1126): n is a, c, g, or t

SEQ ID NO: 112646 - DNA, 2210 bp, Homo Sapiens; identical to SEQ ID NO: 89182
  misc_feature (1529)..(1552): n is a, c, g, or t
  misc_feature (1570)..(1998): n is a, c, g, or t
  misc_feature (2021)..(2021): n is a, c, g, or t

SEQ ID NO: 112647 - DNA, 455 bp, Homo Sapiens; identical to SEQ ID NO: 89183
  misc_feature (92)..(92): n is a, c, g, or t
  misc_feature (276)..(327): n is a, c, g, or t

SEQ ID NO: 112648 - DNA, 254 bp, Homo Sapiens; identical to SEQ ID NO: 89184

SEQ ID NO: 112649 - DNA, 609 bp, Homo Sapiens; identical to SEQ ID NO: 89193

SEQ ID NO: 112650 - DNA, 1290 bp, Homo Sapiens; identical to SEQ ID NO: 89194

SEQ ID NO: 112651 - DNA, 983 bp, Homo Sapiens; identical to SEQ ID NO: 89195
  misc_feature (872)..(935): n is a, c, g, or t

SEQ ID NO: 112652 - DNA, 322 bp, Homo Sapiens; identical to SEQ ID NO: 89198

SEQ ID NO: 112653 - DNA, 362 bp, Homo Sapiens; identical to SEQ ID NO: 89199

SEQ ID NO: 112654 - DNA, 319 bp, Homo Sapiens; identical to SEQ ID NO: 89211

SEQ ID NO: 112655 - DNA, 454 bp, Homo Sapiens; identical to SEQ ID NO: 89212

SEQ ID NO: 112656 - DNA, 906 bp, Homo Sapiens; identical to SEQ ID NO: 89251

SEQ ID NO: 112657 - DNA, 2094 bp, Homo Sapiens; identical to SEQ ID NO: 89252

SEQ ID NO: 112658 - DNA, 691 bp, Homo Sapiens; identical to SEQ ID NO: 89255

SEQ ID NO: 112659 - DNA, 497 bp, Homo Sapiens; identical to SEQ ID NO: 89256

SEQ ID NO: 112660 - DNA, 983 bp, Homo Sapiens; identical to SEQ ID NO: 89257

SEQ ID NO: 112661 - DNA, 1157 bp, Homo Sapiens; identical to SEQ ID NO: 89258
  misc_feature (399)..(399): n is a, c, g, or t

SEQ ID NO: 112662 - DNA, 543 bp, Homo Sapiens; identical to SEQ ID NO: 89259

SEQ ID NO: 112663 - DNA, 411 bp, Homo Sapiens; identical to SEQ ID NO: 89260

SEQ ID NO: 112664 - DNA, 1178 bp, Homo Sapiens; identical to SEQ ID NO: 89317
  misc_feature (41)..(75): n is a, c, g, or t
  misc_feature (367)..(380): n is a, c, g, or t

SEQ ID NO: 112665 - DNA, 580 bp, Homo Sapiens; identical to SEQ ID NO: 89318

SEQ ID NO: 112666 - DNA, 467 bp, Homo Sapiens; identical to SEQ ID NO: 89334
  misc_feature (37)..(37): n is a, c, g, or t

SEQ ID NO: 112667 - DNA, 491 bp, Homo Sapiens; identical to SEQ ID NO: 89335

SEQ ID NO: 112668 - DNA, 449 bp, Homo Sapiens; identical to SEQ ID NO: 89368

SEQ ID NO: 112669 - DNA, 409 bp, Homo Sapiens; identical to SEQ ID NO: 89369

SEQ ID NO: 112670 - DNA, 562 bp, Homo Sapiens; identical to SEQ ID NO: 89375

SEQ ID NO: 112671 - DNA, 954 bp, Homo Sapiens; identical to SEQ ID NO: 89376

SEQ ID NO: 112672 - DNA, 790 bp, Homo Sapiens; identical to SEQ ID NO: 89377

SEQ ID NO: 112673 - DNA, 636 bp, Homo Sapiens; identical to SEQ ID NO: 89378
  misc_feature (152)..(245): n is a, c, g, or t
  misc_feature (317)..(339): n is a, c, g, or t

SEQ ID NO: 112674 - DNA, 465 bp, Homo Sapiens; identical to SEQ ID NO: 89379

SEQ ID NO: 112675 - DNA, 848 bp, Homo Sapiens; identical to SEQ ID NO: 15346
  misc_feature (597)..(639): n is a, c, g, or t
  misc_feature (665)..(665): n is a, c, g, or t
  misc_feature (782)..(782): n is a, c, g, or t

SEQ ID NO: 112676 - DNA, 783 bp, Homo Sapiens; identical to SEQ ID NO: 89397

SEQ ID NO: 112677 - DNA, 435 bp, Homo Sapiens; identical to SEQ ID NO: 89424

SEQ ID NO: 112678 - DNA, 613 bp, Homo Sapiens; identical to SEQ ID NO: 89425

SEQ ID NO: 112679 - DNA, 543 bp, Homo Sapiens; identical to SEQ ID NO: 89447

SEQ ID NO: 112680 - DNA, 1121 bp, Homo Sapiens; identical to SEQ ID NO: 89448

SEQ ID NO: 112681 - DNA, 396 bp, Homo Sapiens; identical to SEQ ID NO: 89454
  misc_feature (110)..(167): n is a, c, g, or t

SEQ ID NO: 112682 - DNA, 403 bp, Homo Sapiens; identical to SEQ ID NO: 89455

SEQ ID NO: 112683 - DNA, 290 bp, Homo Sapiens; identical to SEQ ID NO: 89456

SEQ ID NO: 112684 - DNA, 939 bp, Homo Sapiens; identical to SEQ ID NO: 15850
  misc_feature (113)..(197): n is a, c, g, or t
  misc_feature (238)..(263): n is a, c, g, or t

SEQ ID NO: 112685 - DNA, 894 bp, Homo Sapiens; identical to SEQ ID NO: 89492

SEQ ID NO: 112686 - DNA, 464 bp, Homo Sapiens; identical to SEQ ID NO: 89493

SEQ ID NO: 112687 - DNA, 741 bp, Homo Sapiens; identical to SEQ ID NO: 89501

SEQ ID NO: 112688 - DNA, 589 bp, Homo Sapiens; identical to SEQ ID NO: 89502

SEQ ID NO: 112689 - DNA, 493 bp, Homo Sapiens; identical to SEQ ID NO: 89503

SEQ ID NO: 112690 - DNA, 560 bp, Homo Sapiens; identical to SEQ ID NO: 89518

SEQ ID NO: 112691 - DNA, 575 bp, Homo Sapiens; identical to SEQ ID NO: 89519

SEQ ID NO: 112692 - DNA, 455 bp, Homo Sapiens; identical to SEQ ID NO: 89533

SEQ ID NO: 112693 - DNA, 919 bp, Homo Sapiens; identical to SEQ ID NO: 89534
  misc_feature (294)..(294): n is a, c, g, or t

SEQ ID NO: 112694 - DNA, 496 bp, Homo Sapiens; identical to SEQ ID NO: 89539

SEQ ID NO: 112695 - DNA, 1011 bp, Homo Sapiens; identical to SEQ ID NO: 89540

SEQ ID NO: 112696 - DNA, 555 bp, Homo Sapiens; identical to SEQ ID NO: 89543

SEQ ID NO: 112697 - DNA, 570 bp, Homo Sapiens; identical to SEQ ID NO: 89544

SEQ ID NO: 112698 - DNA, 645 bp, Homo Sapiens; identical to SEQ ID NO: 89557
  misc_feature (398)..(448): n is a, c, g, or t

SEQ ID NO: 112699 - DNA, 654 bp, Homo Sapiens; identical to SEQ ID NO: 89558

SEQ ID NO: 112700 - DNA, 483 bp, Homo Sapiens; identical to SEQ ID NO: 89589
  misc_feature (458)..(458): n is a, c, g, or t

SEQ ID NO: 112701 - DNA, 1065 bp, Homo Sapiens; identical to SEQ ID NO: 89590

SEQ ID NO: 112702 - DNA, 559 bp, Homo Sapiens; identical to SEQ ID NO: 89597

SEQ ID NO: 112703 - DNA, 505 bp, Homo Sapiens; identical to SEQ ID NO: 89598
  misc_feature (25)..(25): n is a, c, g, or t
  misc_feature (46)..(46): n is a, c, g, or t

SEQ ID NO: 112704 - DNA, 702 bp, Homo Sapiens; identical to SEQ ID NO: 89611

SEQ ID NO: 112705 - DNA, 1052 bp, Homo Sapiens; identical to SEQ ID NO: 89612

SEQ ID NO: 112706 - DNA, 1105 bp, Homo Sapiens; identical to SEQ ID NO: 89613

SEQ ID NO: 112707 - DNA, 890 bp, Homo Sapiens; identical to SEQ ID NO: 89614
  misc_feature (79)..(113): n is a, c, g, or t

SEQ ID NO: 112708 - DNA, 603 bp, Homo Sapiens; identical to SEQ ID NO: 89648

SEQ ID NO: 112709 - DNA, 951 bp, Homo Sapiens; identical to SEQ ID NO: 89649

SEQ ID NO: 112710 - DNA, 1572 bp, Homo Sapiens; identical to SEQ ID NO: 89674
  misc_feature (1429)..(1513): n is a, c, g, or t

SEQ ID NO: 112711 - DNA, 632 bp, Homo Sapiens; identical to SEQ ID NO: 89675

SEQ ID NO: 112712 - DNA, 834 bp, Homo Sapiens; identical to SEQ ID NO: 89683
  misc_feature (693)..(693): n is a, c, g, or t
  misc_feature (750)..(751): n is a, c, g, or t

SEQ ID NO: 112713 - DNA, 409 bp, Homo Sapiens; identical to SEQ ID NO: 89684

SEQ ID NO: 112714 - DNA, 546 bp, Homo Sapiens; identical to SEQ ID NO: 89688
  misc_feature (93)..(103): n is a, c, g, or t
  misc_feature (191)..(221): n is a, c, g, or t

SEQ ID NO: 112715 - DNA, 895 bp, Homo Sapiens; identical to SEQ ID NO: 89689
  misc_feature (795)..(843): n is a, c, g, or t

SEQ ID NO: 112716 - DNA, 775 bp, Homo Sapiens; identical to SEQ ID NO: 89700
  misc_feature (213)..(248): n is a, c, g, or t

SEQ ID NO: 112717 - DNA, 453 bp, Homo Sapiens; identical to SEQ ID NO: 89701

SEQ ID NO: 112718 - DNA, 477 bp, Homo Sapiens; identical to SEQ ID NO: 89738

SEQ ID NO: 112719 - DNA, 355 bp, Homo Sapiens; identical to SEQ ID NO: 89739

SEQ ID NO: 112720 - DNA, 494 bp, Homo Sapiens; identical to SEQ ID NO: 89764

SEQ ID NO: 112721 - DNA, 699 bp, Homo Sapiens; identical to SEQ ID NO: 89765
  misc_feature (539)..(567): n is a, c, g, or t

SEQ ID NO: 112722 - DNA, 329 bp, Homo Sapiens; identical to SEQ ID NO: 89774

SEQ ID NO: 112723 - DNA, 463 bp, Homo Sapiens; identical to SEQ ID NO: 89775

SEQ ID NO: 112724 - DNA, 942 bp, Homo Sapiens; identical to SEQ ID NO: 89803
  misc_feature (686)..(686): n is a, c, g, or t

SEQ ID NO: 112725 - DNA, 1056 bp, Homo Sapiens; identical to SEQ ID NO: 89804

SEQ ID NO: 112726 - DNA, 1324 bp, Homo Sapiens; identical to SEQ ID NO: 89805

SEQ ID NO: 112727 - DNA, 1540 bp, Homo Sapiens; identical to SEQ ID NO: 89811

SEQ ID NO: 112728 - DNA, 414 bp, Homo Sapiens; identical to SEQ ID NO: 89812

SEQ ID NO: 112729 - DNA, 608 bp, Homo Sapiens; identical to SEQ ID NO: 89830

SEQ ID NO: 112730 - DNA, 484 bp, Homo Sapiens; identical to SEQ ID NO: 89831

SEQ ID NO: 112731 - DNA, 477 bp, Homo Sapiens; identical to SEQ ID NO: 89857

SEQ ID NO: 112732 - DNA, 517 bp, Homo Sapiens; identical to SEQ ID NO: 89858

SEQ ID NO: 112733 - DNA, 605 bp, Homo Sapiens; identical to SEQ ID NO: 89861
  misc_feature (117)..(117): n is a, c, g, or t
  misc_feature (228)..(228): n is a, c, g, or t
  misc_feature (271)..(271): n is a, c, g, or t

SEQ ID NO: 112734 - DNA, 845 bp, Homo Sapiens; identical to SEQ ID NO: 89862

SEQ ID NO: 112735 - DNA, 1633 bp, Homo Sapiens; identical to SEQ ID NO: 89883
  misc_feature (1599)..(1599): n is a, c, g, or t

SEQ ID NO: 112736 - DNA, 1016 bp, Homo Sapiens; identical to SEQ ID NO: 89884

SEQ ID NO: 112737 - DNA, 1122 bp, Homo Sapiens; identical to SEQ ID NO: 89892
  misc_feature (601)..(601): n is a, c, g, or t
  misc_feature (796)..(796): n is a, c, g, or t

SEQ ID NO: 112738 - DNA, 970 bp, Homo Sapiens; identical to SEQ ID NO: 89893
  misc_feature (617)..(617): n is a, c, g, or t
  misc_feature (621)..(621): n is a, c, g, or t
  misc_feature (623)..(697): n is a, c, g, or t
  misc_feature (705)..(764): n is a, c, g, or t
  misc_feature (817)..(840): n is a, c, g, or t
  misc_feature (902)..(911): n is a, c, g, or t

SEQ ID NO: 112739 - DNA, 252 bp, Homo Sapiens; identical to SEQ ID NO: 89894

SEQ ID NO: 112740 - DNA, 624 bp, Homo Sapiens; identical to SEQ ID NO: 89914

SEQ ID NO: 112741 - DNA, 366 bp, Homo Sapiens; identical to SEQ ID NO: 89915

SEQ ID NO: 112742 - DNA, 556 bp, Homo Sapiens; identical to SEQ ID NO: 89942

SEQ ID NO: 112743 - DNA, 614 bp, Homo Sapiens; identical to SEQ ID NO: 89943

SEQ ID NO: 112744 - DNA, 1169 bp, Homo Sapiens; identical to SEQ ID NO: 89948
  misc_feature (83)..(117): n is a, c, g, or t

SEQ ID NO: 112745 - DNA, 702 bp, Homo Sapiens; identical to SEQ ID NO: 89949

SEQ ID NO: 112746 - DNA, 417 bp, Homo Sapiens; identical to SEQ ID NO: 89952

SEQ ID NO: 112747 - DNA, 386 bp, Homo Sapiens; identical to SEQ ID NO: 89953

SEQ ID NO: 112748 - DNA, 1789 bp, Homo Sapiens; identical to SEQ ID NO: 89969
  misc_feature (75)..(109): n is a, c, g, or t
  misc_feature (200)..(243): n is a, c, g, or t
  misc_feature (762)..(770): n is a, c, g, or t

SEQ ID NO: 112749 - DNA, 442 bp, Homo Sapiens; identical to SEQ ID NO: 89970

SEQ ID NO: 112750 - DNA, 959 bp, Homo Sapiens; identical to SEQ ID NO: 90035

SEQ ID NO: 112751 - DNA, 280 bp, Homo Sapiens; identical to SEQ ID NO: 90036

SEQ ID NO: 112752 - DNA, 432 bp, Homo Sapiens; identical to SEQ ID NO: 90048

SEQ ID NO: 112753 - DNA, 733 bp, Homo Sapiens; identical to SEQ ID NO: 90049

SEQ ID NO: 112754 - DNA, 1043 bp, Homo Sapiens; identical to SEQ ID NO: 90054

SEQ ID NO: 112755 - DNA, 987 bp, Homo Sapiens; identical to SEQ ID NO: 90055
  misc_feature (68)..(68): n is a, c, g, or t
  misc_feature (73)..(73): n is a, c, g, or t
  misc_feature (126)..(126): n is a, c, g, or t
  misc_feature (174)..(174): n is a, c, g, or t
  misc_feature (343)..(343): n is a, c, g, or t

SEQ ID NO: 112756 - DNA, 983 bp, Homo Sapiens; identical to SEQ ID NO: 90071

SEQ ID NO: 112757 - DNA, 949 bp, Homo Sapiens; identical to SEQ ID NO: 90072
  misc_feature (25)..(25): n is a, c, g, or t

SEQ ID NO: 112758 - DNA, 458 bp, Homo Sapiens; identical to SEQ ID NO: 90097

SEQ ID NO: 112759 - DNA, 583 bp, Homo Sapiens; identical to SEQ ID NO: 90098

SEQ ID NO: 112760 - DNA, 424 bp, Homo Sapiens; identical to SEQ ID NO: 90100
  misc_feature (210)..(229): n is a, c, g, or t

SEQ ID NO: 112761 - DNA, 332 bp, Homo Sapiens; identical to SEQ ID NO: 90101
  misc_feature (164)..(175): n is a, c, g, or t

SEQ ID NO: 112762 - DNA, 398 bp, Homo Sapiens; identical to SEQ ID NO: 90102
  misc_feature (78)..(89): n is a, c, g, or t
  misc_feature (249)..(309): n is a, c, g, or t
  misc_feature (314)..(325): n is a, c, g, or t

SEQ ID NO: 112763 - DNA, 338 bp, Homo Sapiens; identical to SEQ ID NO: 90113

SEQ ID NO: 112764 - DNA, 433 bp, Homo Sapiens; identical to SEQ ID NO: 90114

SEQ ID NO: 112765 - DNA, 458 bp, Homo Sapiens; identical to SEQ ID NO: 90118
  misc_feature (207)..(226): n is a, c, g, or t

SEQ ID NO: 112766 - DNA, 964 bp, Homo Sapiens; identical to SEQ ID NO: 90119
  misc_feature (45)..(71): n is a, c, g, or t
  misc_feature (181)..(189): n is a, c, g, or t
  misc_feature (253)..(320): n is a, c, g, or t
  misc_feature (332)..(389): n is a, c, g, or t
  misc_feature (408)..(427): n is a, c, g, or t
  misc_feature (820)..(857): n is a, c, g, or t

SEQ ID NO: 112767 - DNA, 355 bp, Homo Sapiens; identical to SEQ ID NO: 90143

SEQ ID NO: 112768 - DNA, 898 bp, Homo Sapiens; identical to SEQ ID NO: 90144
  misc_feature (44)..(78): n is a, c, g, or t

SEQ ID NO: 112769 - DNA, 556 bp, Homo Sapiens; identical to SEQ ID NO: 90199

SEQ ID NO: 112770 - DNA, 729 bp, Homo Sapiens; identical to SEQ ID NO: 90200
  misc_feature (135)..(192): n is a, c, g, or t

SEQ ID NO: 112771 - DNA, 998 bp, Homo Sapiens; identical to SEQ ID NO: 90208
  misc_feature (54)..(54): n is a, c, g, or t
  misc_feature (532)..(574): n is a, c, g, or t
  misc_feature (648)..(661): n is a, c, g, or t
  misc_feature (700)..(720): n is a, c, g, or t
  misc_feature (758)..(863): n is a, c, g, or t
  misc_feature (880)..(891): n is a, c, g, or t
  misc_feature (925)..(935): n is a, c, g, or t

SEQ ID NO: 112772 - DNA, 504 bp, Homo Sapiens; identical to SEQ ID NO: 90209

SEQ ID NO: 112773 - DNA, 1852 bp, Homo Sapiens; identical to SEQ ID NO: 90218

SEQ ID NO: 112774 - DNA, 969 bp, Homo Sapiens; identical to SEQ ID NO: 90219

SEQ ID NO: 112775 - DNA, 363 bp, Homo Sapiens; identical to SEQ ID NO: 90243

SEQ ID NO: 112776 - DNA, 636 bp, Homo Sapiens; identical to SEQ ID NO: 90244
  misc_feature (452)..(462): n is a, c, g, or t

SEQ ID NO: 112777 - DNA, 917 bp, Homo Sapiens; identical to SEQ ID NO: 90265
  misc_feature (477)..(549): n is a, c, g, or t
  misc_feature (635)..(693): n is a, c, g, or t
  misc_feature (790)..(853): n is a, c, g, or t

SEQ ID NO: 112778 - DNA, 442 bp, Homo Sapiens; identical to SEQ ID NO: 90266

SEQ ID NO: 112779 - DNA, 1108 bp, Homo Sapiens; identical to SEQ ID NO: 90267

SEQ ID NO: 112780 - DNA, 567 bp, Homo Sapiens; identical to SEQ ID NO: 90271

SEQ ID NO: 112781 - DNA, 579 bp, Homo Sapiens; identical to SEQ ID NO: 90272

SEQ ID NO: 112782 - DNA, 428 bp, Homo Sapiens; identical to SEQ ID NO: 90275

SEQ ID NO: 112783 - DNA, 1025 bp, Homo Sapiens; identical to SEQ ID NO: 90276
  misc_feature (41)..(83): n is a, c, g, or t
  misc_feature (87)..(121): n is a, c, g, or t
  misc_feature (368)..(379): n is a, c, g, or t

SEQ ID NO: 112784 - DNA, 729 bp, Homo Sapiens; identical to SEQ ID NO: 90306

SEQ ID NO: 112785 - DNA, 412 bp, Homo Sapiens; identical to SEQ ID NO: 90307

SEQ ID NO: 112786 - DNA, 824 bp, Homo Sapiens; identical to SEQ ID NO: 90334

SEQ ID NO: 112787 - DNA, 459 bp, Homo Sapiens; identical to SEQ ID NO: 90335

SEQ ID NO: 112788 - DNA, 507 bp, Homo Sapiens; identical to SEQ ID NO: 90336
  misc_feature (96)..(154): n is a, c, g, or t

SEQ ID NO: 112789 - DNA, 826 bp, Homo Sapiens; identical to SEQ ID NO: 90340

SEQ ID NO: 112790 - DNA, 532 bp, Homo Sapiens; identical to SEQ ID NO: 90341

SEQ ID NO: 112791 - DNA, 594 bp, Homo Sapiens; identical to SEQ ID NO: 90368

SEQ ID NO: 112792 - DNA, 478 bp, Homo Sapiens; identical to SEQ ID NO: 90369
  misc_feature (27)..(27): n is a, c, g, or t

SEQ ID NO: 112793 - DNA, 585 bp, Homo Sapiens; identical to SEQ ID NO: 90375

SEQ ID NO: 112794 - DNA, 983 bp, Homo Sapiens; identical to SEQ ID NO: 90376

SEQ ID NO: 112795 - DNA, 812 bp, Homo Sapiens; identical to SEQ ID NO: 90386
  misc_feature (310)..(332): n is a, c, g, or t
  misc_feature (429)..(429): n is a, c, g, or t

SEQ ID NO: 112796 - DNA, 1909 bp, Homo Sapiens; identical to SEQ ID NO: 90387
  misc_feature (290)..(343): n is a, c, g, or t
  misc_feature (1183)..(1218): n is a, c, g, or t

SEQ ID NO: 112797 - DNA, 518 bp, Homo Sapiens; identical to SEQ ID NO: 90404

SEQ ID NO: 112798 - DNA, 473 bp, Homo Sapiens; identical to SEQ ID NO: 90405

SEQ ID NO: 112799 - DNA, 642 bp, Homo Sapiens; identical to SEQ ID NO: 90419

SEQ ID NO: 112800 - DNA, 483 bp, Homo Sapiens; identical to SEQ ID NO: 90420
  misc_feature (339)..(352): n is a, c, g, or t

SEQ ID NO: 112801 - DNA, 492 bp, Homo Sapiens; identical to SEQ ID NO: 90432

SEQ ID NO: 112802 - DNA, 326 bp, Homo Sapiens; identical to SEQ ID NO: 90433

SEQ ID NO: 112803 - DNA, 2303 bp, Homo Sapiens; identical to SEQ ID NO: 90453

SEQ ID NO: 112804 - DNA, 796 bp, Homo Sapiens; identical to SEQ ID NO: 90454

SEQ ID NO: 112805 - DNA, 568 bp, Homo Sapiens; identical to SEQ ID NO: 90472

SEQ ID NO: 112806 - DNA, 952 bp, Homo Sapiens; identical to SEQ ID NO: 90473
  misc_feature (43)..(77): n is a, c, g, or t

SEQ ID NO: 112807 - DNA, 435 bp, Homo Sapiens; identical to SEQ ID NO: 90514

SEQ ID NO: 112808 - DNA, 487 bp, Homo Sapiens; identical to SEQ ID NO: 90515

SEQ ID NO: 112809 - DNA, 651 bp, Homo Sapiens; identical to SEQ ID NO: 90519

SEQ ID NO: 112810 - DNA, 910 bp, Homo Sapiens; identical to SEQ ID NO: 90520

SEQ ID NO: 112811 - DNA, 476 bp, Homo Sapiens; identical to SEQ ID NO: 90539

SEQ ID NO: 112812 - DNA, 836 bp, Homo Sapiens; identical to SEQ ID NO: 90540
  misc_feature (146)..(173): n is a, c, g, or t

SEQ ID NO: 112813 - DNA, 901 bp, Homo Sapiens; identical to SEQ ID NO: 90541
  misc_feature (330)..(354): n is a, c, g, or t

SEQ ID NO: 112814 - DNA, 508 bp, Homo Sapiens; identical to SEQ ID NO: 90549

SEQ ID NO: 112815 - DNA, 951 bp, Homo Sapiens; identical to SEQ ID NO: 90550

SEQ ID NO: 112816 - DNA, 401 bp, Homo Sapiens; identical to SEQ ID NO: 90600

SEQ ID NO: 112817 - DNA, 475 bp, Homo Sapiens; identical to SEQ ID NO: 90601

SEQ ID NO: 112818 - DNA, 417 bp, Homo Sapiens; identical to SEQ ID NO: 90602

SEQ ID NO: 112819 - DNA, 494 bp, Homo Sapiens; identical to SEQ ID NO: 90657

SEQ ID NO: 112820 - DNA, 1261 bp, Homo Sapiens; identical to SEQ ID NO: 90658
  misc_feature (545)..(584): n is a, c, g, or t
  misc_feature (690)..(750): n is a, c, g, or t
  misc_feature (771)..(961): n is a, c, g, or t

SEQ ID NO: 112821 - DNA, 1308 bp, Homo Sapiens; identical to SEQ ID NO: 90678
  misc_feature (1108)..(1173): n is a, c, g, or t
  misc_feature (1183)..(1197): n is a, c, g, or t

SEQ ID NO: 112822 - DNA, 824 bp, Homo Sapiens; identical to SEQ ID NO: 90679

SEQ ID NO: 112823 - DNA, 501 bp, Homo Sapiens; identical to SEQ ID NO: 90693

SEQ ID NO: 112824 - DNA, 392 bp, Homo Sapiens; identical to SEQ ID NO: 90694

SEQ ID NO: 112825 - DNA, 530 bp, Homo Sapiens; identical to SEQ ID NO: 90709
  misc_feature (123)..(123): n is a, c, g, or t

SEQ ID NO: 112826 - DNA, 346 bp, Homo Sapiens; identical to SEQ ID NO: 90710

SEQ ID NO: 112827 - DNA, 1093 bp, Homo Sapiens; identical to SEQ ID NO: 90724

SEQ ID NO: 112828 - DNA, 1476 bp, Homo Sapiens; identical to SEQ ID NO: 90725
  misc_feature (1150)..(1150): n is a, c, g, or t

SEQ ID NO: 112829 - DNA, 587 bp, Homo Sapiens; identical to SEQ ID NO: 90729

SEQ ID NO: 112830 - DNA, 1117 bp, Homo Sapiens; identical to SEQ ID NO: 90730
  misc_feature (24)..(24): n is a, c, g, or t

SEQ ID NO: 112831 - DNA, 932 bp, Homo Sapiens; identical to SEQ ID NO: 90731

SEQ ID NO: 112832 - DNA, 462 bp, Homo Sapiens; identical to SEQ ID NO: 90766

SEQ ID NO: 112833 - DNA, 803 bp, Homo Sapiens; identical to SEQ ID NO: 90767
  misc_feature (74)..(106): n is a, c, g, or t

SEQ ID NO: 112834 - DNA, 407 bp, Homo Sapiens; identical to SEQ ID NO: 90812
  misc_feature (260)..(260): n is a, c, g, or t

SEQ ID NO: 112835 - DNA, 462 bp, Homo Sapiens; identical to SEQ ID NO: 90813

SEQ ID NO: 112836 - DNA, 1084 bp, Homo Sapiens; identical to SEQ ID NO: 90817
  misc_feature (84)..(118): n is a, c, g, or t

SEQ ID NO: 112837 - DNA, 925 bp, Homo Sapiens; identical to SEQ ID NO: 90818

SEQ ID NO: 112838 - DNA, 638 bp, Homo Sapiens; identical to SEQ ID NO: 90826

SEQ ID NO: 112839 - DNA, 460 bp, Homo Sapiens; identical to SEQ ID NO: 90827
  misc_feature (267)..(279): n is a, c, g, or t

SEQ ID NO: 112840 - DNA, 935 bp, Homo Sapiens; identical to SEQ ID NO: 90868
  misc_feature (597)..(615): n is a, c, g, or t
  misc_feature (732)..(743): n is a, c, g, or t

SEQ ID NO: 112841 - DNA, 1168 bp, Homo Sapiens; identical to SEQ ID NO: 5953
  misc_feature (733)..(741): n is a, c, g, or t
  misc_feature (757)..(820): n is a, c, g, or t
  misc_feature (834)..(834): n is a, c, g, or t
  misc_feature (859)..(859): n is a, c, g, or t
  misc_feature (1049)..(1049): n is a, c, g, or t
  misc_feature (1074)..(1086): n is a, c, g, or t

SEQ ID NO: 112842 - DNA, 523 bp, Homo Sapiens; identical to SEQ ID NO: 90872

SEQ ID NO: 112843 - DNA, 511 bp, Homo Sapiens; identical to SEQ ID NO: 90873

SEQ ID NO: 112844 - DNA, 530 bp, Homo Sapiens; identical to SEQ ID NO: 90887
  misc_feature (42)..(42): n is a, c, g, or t

SEQ ID NO: 112845 - DNA, 506 bp, Homo Sapiens; identical to SEQ ID NO: 90888
  misc_feature (57)..(57): n is a, c, g, or t
  misc_feature (105)..(105): n is a, c, g, or t

SEQ ID NO: 112846 - DNA, 824 bp, Homo Sapiens; identical to SEQ ID NO: 90908
  misc_feature (37)..(37): n is a, c, g, or t
  misc_feature (67)..(67): n is a, c, g, or t

SEQ ID NO: 112847 - DNA, 633 bp, Homo Sapiens; identical to SEQ ID NO: 90909

SEQ ID NO: 112848 - DNA, 449 bp, Homo Sapiens; identical to SEQ ID NO: 90910
  misc_feature (326)..(326): n is a, c, g, or t
  misc_feature (408)..(409): n is a, c, g, or t

SEQ ID NO: 112849 - DNA, 616 bp, Homo Sapiens; identical to SEQ ID NO: 90949
  misc_feature (539)..(539): n is a, c, g, or t
  misc_feature (549)..(549): n is a, c, g, or t

SEQ ID NO: 112850 - DNA, 969 bp, Homo Sapiens; identical to SEQ ID NO: 90950
  misc_feature (889)..(889): n is a, c, g, or t
  misc_feature (946)..(946): n is a, c, g, or t

SEQ ID NO: 112851 - DNA, 2763 bp, Homo Sapiens; identical to SEQ ID NO: 90955
  misc_feature (411)..(439): n is a, c, g, or t
  misc_feature (1588)..(1647): n is a, c, g, or t
  misc_feature (2221)..(2249): n is a, c, g, or t

SEQ ID NO: 112852 - DNA, 1095 bp, Homo Sapiens; identical to SEQ ID NO: 90956

SEQ ID NO: 112853 - DNA, 491 bp, Homo Sapiens; identical to SEQ ID NO: 90967

SEQ ID NO: 112854 - DNA, 495 bp, Homo Sapiens; identical to SEQ ID NO: 90968
  misc_feature (120)..(143): n is a, c, g, or t

SEQ ID NO: 112855 - DNA, 1695 bp, Homo Sapiens; identical to SEQ ID NO: 91007
  misc_feature (1461)..(1468): n is a, c, g, or t
  misc_feature (1471)..(1474): n is a, c, g, or t
  misc_feature (1478)..(1532): n is a, c, g, or t

SEQ ID NO: 112856 - DNA, 979 bp, Homo Sapiens; identical to SEQ ID NO: 91008
  misc_feature (306)..(462): n is a, c, g, or t
  misc_feature (737)..(737): n is a, c, g, or t

SEQ ID NO: 112857 - DNA, 459 bp, Homo Sapiens; identical to SEQ ID NO: 91026

SEQ ID NO: 112858 - DNA, 597 bp, Homo Sapiens; identical to SEQ ID NO: 91027

SEQ ID NO: 112859 - DNA, 353 bp, Homo Sapiens; identical to SEQ ID NO: 91029

SEQ ID NO: 112860 - DNA, 972 bp, Homo Sapiens; identical to SEQ ID NO: 91030

SEQ ID NO: 112861 - DNA, 1130 bp, Homo Sapiens; identical to SEQ ID NO: 91043

SEQ ID NO: 112862 - DNA, 729 bp, Homo Sapiens; identical to SEQ ID NO: 91044

SEQ ID NO: 112863 - DNA, 1067 bp, Homo Sapiens; identical to SEQ ID NO: 91054
  misc_feature (381)..(381): n is a, c, g, or t
  misc_feature (724)..(740): n is a, c, g, or t

SEQ ID NO: 112864 - DNA, 776 bp, Homo Sapiens; identical to SEQ ID NO: 91055

SEQ ID NO: 112865 - DNA, 1142 bp, Homo Sapiens; identical to SEQ ID NO: 91062
  misc_feature (843)..(905): n is a, c, g, or t

SEQ ID NO: 112866 - DNA, 453 bp, Homo Sapiens; identical to SEQ ID NO: 91063

SEQ ID NO: 112867 - DNA, 542 bp, Homo Sapiens; identical to SEQ ID NO: 91069
  misc_feature (99)..(99): n is a, c, g, or t

SEQ ID NO: 112868 - DNA, 728 bp, Homo Sapiens; identical to SEQ ID NO: 91070

SEQ ID NO: 112869 - DNA, 437 bp, Homo Sapiens; identical to SEQ ID NO: 91084

SEQ ID NO: 112870 - DNA, 434 bp, Homo Sapiens; identical to SEQ ID NO: 91085

SEQ ID NO: 112871 - DNA, 1057 bp, Homo Sapiens; identical to SEQ ID NO: 91092

SEQ ID NO: 112872 - DNA, 1834 bp, Homo Sapiens; identical to SEQ ID NO: 91093

SEQ ID NO: 112873 - DNA, 831 bp, Homo Sapiens; identical to SEQ ID NO: 91177

SEQ ID NO: 112874 - DNA, 720 bp, Homo Sapiens; identical to SEQ ID NO: 91178
  misc_feature (581)..(590): n is a, c, g, or t

SEQ ID NO: 112875 - DNA, 392 bp, Homo Sapiens; identical to SEQ ID NO: 91220

SEQ ID NO: 112876 - DNA, 912 bp, Homo Sapiens; identical to SEQ ID NO: 91221

SEQ ID NO: 112877 - DNA, 480 bp, Homo Sapiens; identical to SEQ ID NO: 91236

SEQ ID NO: 112878 - DNA, 420 bp, Homo Sapiens; identical to SEQ ID NO: 91237

SEQ ID NO: 112879 - DNA, 490 bp, Homo Sapiens; identical to SEQ ID NO: 91304
  misc_feature (378)..(378): n is a, c, g, or t
  misc_feature (380)..(380): n is a, c, g, or t
  misc_feature (382)..(383): n is a, c, g, or t
  misc_feature (387)..(387): n is a, c, g, or t
  misc_feature (389)..(389): n is a, c, g, or t
  misc_feature (395)..(395): n is a, c, g, or t
  misc_feature (404)..(404): n is a, c, g, or t

SEQ ID NO: 112880 - DNA, 1006 bp, Homo Sapiens; identical to SEQ ID NO: 91305
  misc_feature (42)..(76): n is a, c, g, or t

SEQ ID NO: 112881 - DNA, 1068 bp, Homo Sapiens; identical to SEQ ID NO: 91349

SEQ ID NO: 112882 - DNA, 844 bp, Homo Sapiens; identical to SEQ ID NO: 91350
  misc_feature (687)..(687): n is a, c, g, or t

SEQ ID NO: 112883 - DNA, 1882 bp, Homo Sapiens; identical to SEQ ID NO: 91358

SEQ ID NO: 112884 - DNA, 420 bp, Homo Sapiens; identical to SEQ ID NO: 91359

SEQ ID NO: 112885 - DNA, 383 bp, Homo Sapiens; identical to SEQ ID NO: 91360

SEQ ID NO: 112886 - DNA, 566 bp, Homo Sapiens; identical to SEQ ID NO: 91361
  misc_feature (177)..(194): n is a, c, g, or t
  misc_feature (403)..(513): n is a, c, g, or t

SEQ ID NO: 112887 - DNA, 882 bp, Homo Sapiens; identical to SEQ ID NO: 91369

SEQ ID NO: 112888 - DNA, 554 bp, Homo Sapiens; identical to SEQ ID NO: 91370

SEQ ID NO: 112889 - DNA, 620 bp, Homo Sapiens; identical to SEQ ID NO: 91390

SEQ ID NO: 112890 - DNA, 738 bp, Homo Sapiens; identical to SEQ ID NO: 91391

SEQ ID NO: 112891 - DNA, 1183 bp, Homo Sapiens; identical to SEQ ID NO: 91393

SEQ ID NO: 112892 - DNA, 791 bp, Homo Sapiens; identical to SEQ ID NO: 91394
  misc_feature (617)..(633): n is a, c, g, or t
  misc_feature (635)..(642): n is a, c, g, or t

SEQ ID NO: 112893 - DNA, 768 bp, Homo Sapiens; identical to SEQ ID NO: 91397
  misc_feature (27)..(28): n is a, c, g, or t
  misc_feature (31)..(31): n is a, c, g, or t
  misc_feature (48)..(48): n is a, c, g, or t
  misc_feature (247)..(247): n is a, c, g, or t

SEQ ID NO: 112894 - DNA, 1440 bp, Homo Sapiens; identical to SEQ ID NO: 91398

SEQ ID NO: 112895 - DNA, 1211 bp, Homo Sapiens; identical to SEQ ID NO: 91399
  misc_feature (991)..(1001): n is a, c, g, or t
  misc_feature (1057)..(1057): n is a, c, g, or t

SEQ ID NO: 112896 - DNA, 748 bp, Homo Sapiens; identical to SEQ ID NO: 91447
  misc_feature (356)..(356): n is a, c, g, or t
  misc_feature (547)..(580): n is a, c, g, or t

SEQ ID NO: 112897 - DNA, 989 bp, Homo Sapiens; identical to SEQ ID NO: 91448
  misc_feature (139)..(194): n is a, c, g, or t
  misc_feature (915)..(949): n is a, c, g, or t

SEQ ID NO: 112898 - DNA, 991 bp, Homo Sapiens; identical to SEQ ID NO: 91451
  misc_feature (547)..(601): n is a, c, g, or t

SEQ ID NO: 112899 - DNA, 910 bp, Homo Sapiens; identical to SEQ ID NO: 91452
  misc_feature (709)..(723): n is a, c, g, or t

SEQ ID NO: 112900 - DNA, 916 bp, Homo Sapiens; identical to SEQ ID NO: 91508

SEQ ID NO: 112901 - DNA, 901 bp, Homo Sapiens; identical to SEQ ID NO: 91509

SEQ ID NO: 112902 - DNA, 510 bp, Homo Sapiens; identical to SEQ ID NO: 91513

SEQ ID NO: 112903 - DNA, 594 bp, Homo Sapiens; identical to SEQ ID NO: 91514

SEQ ID NO: 112904 - DNA, 504 bp, Homo Sapiens; identical to SEQ ID NO: 91528

SEQ ID NO: 112905 - DNA, 905 bp, Homo Sapiens; identical to SEQ ID NO: 91529

SEQ ID NO: 112906 - DNA, 548 bp, Homo Sapiens; identical to SEQ ID NO: 91543

SEQ ID NO: 112907 - DNA, 434 bp, Homo Sapiens; identical to SEQ ID NO: 91544

SEQ ID NO: 112908 - DNA, 1233 bp, Homo Sapiens; identical to SEQ ID NO: 91563

SEQ ID NO: 112909 - DNA, 950 bp, Homo Sapiens; identical to SEQ ID NO: 91564

SEQ ID NO: 112910 - DNA, 476 bp, Homo Sapiens; identical to SEQ ID NO: 91574

SEQ ID NO: 112911 - DNA, 1102 bp, Homo Sapiens; identical to SEQ ID NO: 91575

SEQ ID NO: 112912 - DNA, 1596 bp, Homo Sapiens; identical to SEQ ID NO: 91576

SEQ ID NO: 112913 - DNA, 1314 bp, Homo Sapiens; identical to SEQ ID NO: 91577

SEQ ID NO: 112914 - DNA, 1559 bp, Homo Sapiens; identical to SEQ ID NO: 91589
  misc_feature (1201)..(1486): n is a, c, g, or t

SEQ ID NO: 112915 - DNA, 977 bp, Homo Sapiens; identical to SEQ ID NO: 91590

SEQ ID NO: 112916 - DNA, 1080 bp, Homo Sapiens; identical to SEQ ID NO: 91591
  misc_feature (792)..(792): n is a, c, g, or t
  misc_feature (913)..(913): n is a, c, g, or t
  misc_feature (921)..(921): n is a, c, g, or t

SEQ ID NO: 112917 - DNA, 596 bp, Homo Sapiens; identical to SEQ ID NO: 91630

SEQ ID NO: 112918 - DNA, 1089 bp, Homo Sapiens; identical to SEQ ID NO: 91631

SEQ ID NO: 112919 - DNA, 501 bp, Homo Sapiens; identical to SEQ ID NO: 91667
  misc_feature (203)..(219): n is a, c, g, or t

SEQ ID NO: 112920 - DNA, 644 bp, Homo Sapiens; identical to SEQ ID NO: 91668

SEQ ID NO: 112921 - DNA, 563 bp, Homo Sapiens; identical to SEQ ID NO: 91702

SEQ ID NO: 112922 - DNA, 463 bp, Homo Sapiens; identical to SEQ ID NO: 91703

SEQ ID NO: 112923 - DNA, 939 bp, Homo Sapiens; identical to SEQ ID NO: 91762

SEQ ID NO: 112924 - DNA, 985 bp, Homo Sapiens; identical to SEQ ID NO: 91763

SEQ ID NO: 112925 - DNA, 1039 bp, Homo Sapiens; identical to SEQ ID NO: 91766

SEQ ID NO: 112926 - DNA, 206 bp, Homo Sapiens; identical to SEQ ID NO: 91767

SEQ ID NO: 112927 - DNA, 661 bp, Homo Sapiens; identical to SEQ ID NO: 91773

SEQ ID NO: 112928 - DNA, 533 bp, Homo Sapiens; identical to SEQ ID NO: 91774

SEQ ID NO: 112929 - DNA, 571 bp, Homo Sapiens; identical to SEQ ID NO: 91776

SEQ ID NO: 112930 - DNA, 1021 bp, Homo Sapiens; identical to SEQ ID NO: 91777
  misc_feature (925)..(925): n is a, c, g, or t
  misc_feature (957)..(957): n is a, c, g, or t
  misc_feature (976)..(976): n is a, c, g, or t
  misc_feature (988)..(988): n is a, c, g, or t

SEQ ID NO: 112931 - DNA, 548 bp, Homo Sapiens; identical to SEQ ID NO: 91778

SEQ ID NO: 112932 - DNA, 845 bp, Homo Sapiens; identical to SEQ ID NO: 91779
  misc_feature (80)..(114): n is a, c, g, or t
  misc_feature (718)..(718): n is a, c, g, or t

SEQ ID NO: 112933 - DNA, 691 bp, Homo Sapiens; identical to SEQ ID NO: 91780

SEQ ID NO: 112934 - DNA, 413 bp, Homo Sapiens; identical to SEQ ID NO: 91781

SEQ ID NO: 112935 - DNA, 517 bp, Homo Sapiens; identical to SEQ ID NO: 91788

SEQ ID NO: 112936 - DNA, 561 bp, Homo Sapiens; identical to SEQ ID NO: 91789

SEQ ID NO: 112937 - DNA, 1312 bp, Homo Sapiens; identical to SEQ ID NO: 91826

SEQ ID NO: 112938 - DNA, 1368 bp, Homo Sapiens; identical to SEQ ID NO: 91827

SEQ ID NO: 112939 - DNA, 728 bp, Homo Sapiens; identical to SEQ ID NO: 91828

SEQ ID NO: 112940 - DNA, 462 bp, Homo Sapiens; identical to SEQ ID NO: 91869

SEQ ID NO: 112941 - DNA, 444 bp, Homo Sapiens; identical to SEQ ID NO: 91870

SEQ ID NO: 112942 - DNA, 527 bp, Homo Sapiens; identical to SEQ ID NO: 91880

SEQ ID NO: 112943 - DNA, 549 bp, Homo Sapiens; identical to SEQ ID NO: 91881

SEQ ID NO: 112944 - DNA, 970 bp, Homo Sapiens; identical to SEQ ID NO: 91909

SEQ ID NO: 112945 - DNA, 550 bp, Homo Sapiens; identical to SEQ ID NO: 91910

SEQ ID NO: 112946 - DNA, 441 bp, Homo Sapiens; identical to SEQ ID NO: 91981

SEQ ID NO: 112947 - DNA, 973 bp, Homo Sapiens; identical to SEQ ID NO: 91982
  misc_feature (807)..(807): n is a, c, g, or t
  misc_feature (936)..(936): n is a, c, g, or t

SEQ ID NO: 112948 - DNA, 748 bp, Homo Sapiens; identical to SEQ ID NO: 92017

SEQ ID NO: 112949 - DNA, 530 bp, Homo Sapiens; identical to SEQ ID NO: 92018

SEQ ID NO: 112950 - DNA, 807 bp, Homo Sapiens; identical to SEQ ID NO: 92020

SEQ ID NO: 112951 - DNA, 475 bp, Homo Sapiens; identical to SEQ ID NO: 92021

SEQ ID NO: 112952 - DNA, 466 bp, Homo Sapiens; identical to SEQ ID NO: 92025

SEQ ID NO: 112953 - DNA, 1287 bp, Homo Sapiens; identical to SEQ ID NO: 92026
  misc_feature (1042)..(1042): n is a, c, g, or t
  misc_feature (1060)..(1060): n is a, c, g, or t
  misc_feature (1072)..(1072): n is a, c, g, or t
  misc_feature (1098)..(1098): n is a, c, g, or t
  misc_feature (1108)..(1108): n is a, c, g, or t
  misc_feature (1154)..(1154): n is a, c, g, or t

SEQ ID NO: 112954 - DNA, 403 bp, Homo Sapiens; identical to SEQ ID NO: 92030
  misc_feature (365)..(365): n is a, c, g, or t

SEQ ID NO: 112955 - DNA, 503 bp, Homo Sapiens; identical to SEQ ID NO: 92031
  misc_feature (154)..(181): n is a, c, g, or t

SEQ ID NO: 112956 - DNA, 759 bp, Homo Sapiens; identical to SEQ ID NO: 92069

SEQ ID NO: 112957 - DNA, 477 bp, Homo Sapiens; identical to SEQ ID NO: 92070
  misc_feature (94)..(102): n is a, c, g, or t

SEQ ID NO: 112958 - DNA, 961 bp, Homo Sapiens; identical to SEQ ID NO: 92098
  misc_feature (221)..(233): n is a, c, g, or t

SEQ ID NO: 112959 - DNA, 345 bp, Homo Sapiens; identical to SEQ ID NO: 92099

SEQ ID NO: 112960 - DNA, 2166 bp, Homo Sapiens; identical to SEQ ID NO: 92118

SEQ ID NO: 112961 - DNA, 840 bp, Homo Sapiens; identical to SEQ ID NO: 92119

SEQ ID NO: 112962 - DNA, 843 bp, Homo Sapiens; identical to SEQ ID NO: 92120

SEQ ID NO: 112963 - DNA, 904 bp, Homo Sapiens; identical to SEQ ID NO: 92121

SEQ ID NO: 112964 - DNA, 427 bp, Homo Sapiens; identical to SEQ ID NO: 92188

SEQ ID NO: 112965 - DNA, 1410 bp, Homo Sapiens; identical to SEQ ID NO: 92189
  misc_feature (806)..(834): n is a, c, g, or t
  misc_feature (982)..(1040): n is a, c, g, or t
  misc_feature (1046)..(1107): n is a, c, g, or t
  misc_feature (1266)..(1278): n is a, c, g, or t

SEQ ID NO: 112966 - DNA, 518 bp, Homo Sapiens; identical to SEQ ID NO: 92190

SEQ ID NO: 112967 - DNA, 552 bp, Homo Sapiens; identical to SEQ ID NO: 92191

SEQ ID NO: 112968 - DNA, 623 bp, Homo Sapiens; identical to SEQ ID NO: 92203

SEQ ID NO: 112969 - DNA, 762 bp, Homo Sapiens; identical to SEQ ID NO: 92204
  misc_feature (380)..(393): n is a, c, g, or t

SEQ ID NO: 112970 - DNA, 491 bp, Homo Sapiens; identical to SEQ ID NO: 92205

SEQ ID NO: 112971 - DNA, 869 bp, Homo Sapiens; identical to SEQ ID NO: 92207

SEQ ID NO: 112972 - DNA, 1155 bp, Homo Sapiens; identical to SEQ ID NO: 92208
  misc_feature (45)..(79): n is a, c, g, or t
  misc_feature (981)..(981): n is a, c, g, or t
  misc_feature (1039)..(1039): n is a, c, g, or t
  misc_feature (1090)..(1090): n is a, c, g, or t
  misc_feature (1139)..(1139): n is a, c, g, or t

SEQ ID NO: 112973 - DNA, 958 bp, Homo Sapiens; identical to SEQ ID NO: 92223

SEQ ID NO: 112974 - DNA, 432 bp, Homo Sapiens; identical to SEQ ID NO: 92224

SEQ ID NO: 112975 - DNA, 689 bp, Homo Sapiens; identical to SEQ ID NO: 92225
  misc_feature (309)..(309): n is a, c, g, or t
  misc_feature (312)..(315): n is a, c, g, or t
  misc_feature (318)..(318): n is a, c, g, or t
  misc_feature (322)..(324): n is a, c, g, or t
  misc_feature (326)..(327): n is a, c, g, or t
  misc_feature (336)..(336): n is a, c, g, or t
  misc_feature (475)..(475): n is a, c, g, or t

SEQ ID NO: 112976 - DNA, 469 bp, Homo Sapiens; identical to SEQ ID NO: 92226
  misc_feature (17)..(17): n is a, c, g, or t
  misc_feature (90)..(145): n is a, c, g, or t

SEQ ID NO: 112977 - DNA, 450 bp, Homo Sapiens; identical to SEQ ID NO: 92227
  misc_feature (329)..(384): n is a, c, g, or t

SEQ ID NO: 112978 - DNA, 727 bp, Homo Sapiens; identical to SEQ ID NO: 92228
  misc_feature (338)..(384): n is a, c, g, or t
  misc_feature (703)..(703): n is a, c, g, or t

SEQ ID NO: 112979 - DNA, 445 bp, Homo Sapiens; identical to SEQ ID NO: 92229
  misc_feature (321)..(376): n is a, c, g, or t

SEQ ID NO: 112980 - DNA, 435 bp, Homo Sapiens; identical to SEQ ID NO: 92230
  misc_feature (54)..(115): n is a, c, g, or t

SEQ ID NO: 112981 - DNA, 1324 bp, Homo Sapiens; identical to SEQ ID NO: 92242

SEQ ID NO: 112982 - DNA, 1271 bp, Homo Sapiens; identical to SEQ ID NO: 92243
  misc_feature (69)..(77): n is a, c, g, or t
  misc_feature (1228)..(1228): n is a, c, g, or t
  misc_feature (1230)..(1230): n is a, c, g, or t
  misc_feature (1253)..(1253): n is a, c, g, or t

SEQ ID NO: 112983 - DNA, 167 bp, Homo Sapiens; identical to SEQ ID NO: 92249

SEQ ID NO: 112984 - DNA, 537 bp, Homo Sapiens; identical to SEQ ID NO: 92250

SEQ ID NO: 112985 - DNA, 1774 bp, Homo Sapiens; identical to SEQ ID NO: 92254

SEQ ID NO: 112986 - DNA, 897 bp, Homo Sapiens; identical to SEQ ID NO: 92255

SEQ ID NO: 112987 - DNA, 487 bp, Homo Sapiens; identical to SEQ ID NO: 92264
  misc_feature (61)..(71): n is a, c, g, or t

SEQ ID NO: 112988 - DNA, 927 bp, Homo Sapiens; identical to SEQ ID NO: 92265
  misc_feature (285)..(285): n is a, c, g, or t
  misc_feature (406)..(416): n is a, c, g, or t

SEQ ID NO: 112989 - DNA, 889 bp, Homo Sapiens; identical to SEQ ID NO: 92289

SEQ ID NO: 112990 - DNA, 936 bp, Homo Sapiens; identical to SEQ ID NO: 92290
  misc_feature (63)..(63): n is a, c, g, or t

SEQ ID NO: 112991 - DNA, 924 bp, Homo Sapiens; identical to SEQ ID NO: 92295
  misc_feature (83)..(117): n is a, c, g, or t

SEQ ID NO: 112992 - DNA, 552 bp, Homo Sapiens; identical to SEQ ID NO: 7022

SEQ ID NO: 112993 - DNA, 945 bp, Homo Sapiens; identical to SEQ ID NO: 92335

SEQ ID NO: 112994 - DNA, 455 bp, Homo Sapiens; identical to SEQ ID NO: 92336

SEQ ID NO: 112995 - DNA, 430 bp, Homo Sapiens; identical to SEQ ID NO: 92348

SEQ ID NO: 112996 - DNA, 1149 bp, Homo Sapiens; identical to SEQ ID NO: 92349

SEQ ID NO: 112997 - DNA, 335 bp, Homo Sapiens; identical to SEQ ID NO: 92356

SEQ ID NO: 112998 - DNA, 413 bp, Homo Sapiens; identical to SEQ ID NO: 92357

SEQ ID NO: 112999 - DNA, 1318 bp, Homo Sapiens; identical to SEQ ID NO: 92409

SEQ ID NO: 113000 - DNA, 1574 bp, Homo Sapiens; identical to SEQ ID NO: 92410

SEQ ID NO: 113001 - DNA, 496 bp, Homo Sapiens; identical to SEQ ID NO: 92411

SEQ ID NO: 113002 - DNA, 523 bp, Homo Sapiens; identical to SEQ ID NO: 92430

SEQ ID NO: 113003 - DNA, 776 bp, Homo Sapiens; identical to SEQ ID NO: 92431
  misc_feature (738)..(738): n is a, c, g, or t

SEQ ID NO: 113004 - DNA, 1177 bp, Homo Sapiens; identical to SEQ ID NO: 92441

SEQ ID NO: 113005 - DNA, 999 bp, Homo Sapiens; identical to SEQ ID NO: 92442

SEQ ID NO: 113006 - DNA, 513 bp, Homo Sapiens; identical to SEQ ID NO: 92452

SEQ ID NO: 113007 - DNA, 570 bp, Homo Sapiens; identical to SEQ ID NO: 92453

SEQ ID NO: 113008 - DNA, 532 bp, Homo Sapiens; identical to SEQ ID NO: 92461

SEQ ID NO: 113009 - DNA, 784 bp, Homo Sapiens; identical to SEQ ID NO: 92462

SEQ ID NO: 113010 - DNA, 387 bp, Homo Sapiens; identical to SEQ ID NO: 92472

SEQ ID NO: 113011 - DNA, 561 bp, Homo Sapiens; identical to SEQ ID NO: 92473
  misc_feature (25)..(25): n is a, c, g, or t

SEQ ID NO: 113012 - DNA, 401 bp, Homo Sapiens; identical to SEQ ID NO: 92479

SEQ ID NO: 113013 - DNA, 1221 bp, Homo Sapiens; identical to SEQ ID NO: 92480
  misc_feature (157)..(166): n is a, c, g, or t
  misc_feature (1105)..(1105): n is a, c, g, or t

SEQ ID NO: 113014 - DNA, 518 bp, Homo Sapiens; identical to SEQ ID NO: 92501

SEQ ID NO: 113015 - DNA, 435 bp, Homo Sapiens; identical to SEQ ID NO: 92502

SEQ ID NO: 113016 - DNA, 556 bp, Homo Sapiens; identical to SEQ ID NO: 92549

SEQ ID NO: 113017 - DNA, 847 bp, Homo Sapiens; identical to SEQ ID NO: 92550

SEQ ID NO: 113018 - DNA, 438 bp, Homo Sapiens; identical to SEQ ID NO: 92578

SEQ ID NO: 113019 - DNA, 457 bp, Homo Sapiens; identical to SEQ ID NO: 92579

SEQ ID NO: 113020 - DNA, 419 bp, Homo Sapiens; identical to SEQ ID NO: 92580
  misc_feature (182)..(300): n is a, c, g, or t

SEQ ID NO: 113021 - DNA, 783 bp, Homo Sapiens; identical to SEQ ID NO: 92589

SEQ ID NO: 113022 - DNA, 460 bp, Homo Sapiens; identical to SEQ ID NO: 92590

SEQ ID NO: 113023 - DNA, 824 bp, Homo Sapiens; identical to SEQ ID NO: 92604
  misc_feature (154)..(208): n is a, c, g, or t
  misc_feature (244)..(325): n is a, c, g, or t
  misc_feature (737)..(745): n is a, c, g, or t

SEQ ID NO: 113024 - DNA, 837 bp, Homo Sapiens; identical to SEQ ID NO: 92605

SEQ ID NO: 113025 - DNA, 429 bp, Homo Sapiens; identical to SEQ ID NO: 92606
  misc_feature (333)..(341): n is a, c, g, or t

SEQ ID NO: 113026 - DNA, 477 bp, Homo Sapiens; identical to SEQ ID NO: 92636

SEQ ID NO: 113027 - DNA, 410 bp, Homo Sapiens; identical to SEQ ID NO: 92637

SEQ ID NO: 113028 - DNA, 770 bp, Homo Sapiens; identical to SEQ ID NO: 92665

SEQ ID NO: 113029 - DNA, 432 bp, Homo Sapiens; identical to SEQ ID NO: 92666

SEQ ID NO: 113030 - DNA, 940 bp, Homo Sapiens; identical to SEQ ID NO: 92694

SEQ ID NO: 113031 - DNA, 1577 bp, Homo Sapiens; identical to SEQ ID NO: 92695

SEQ ID NO: 113032 - DNA, 651 bp, Homo Sapiens; identical to SEQ ID NO: 92706

SEQ ID NO: 113033 - DNA, 1373 bp, Homo Sapiens; identical to SEQ ID NO: 92707
  misc_feature (862)..(862): n is a, c, g, or t
  misc_feature (1203)..(1203): n is a, c, g, or t

SEQ ID NO: 113034 - DNA, 449 bp, Homo Sapiens; identical to SEQ ID NO: 92725

SEQ ID NO: 113035 - DNA, 443 bp, Homo Sapiens; identical to SEQ ID NO: 92726

SEQ ID NO: 113036 - DNA, 413 bp, Homo Sapiens; identical to SEQ ID NO: 92727

SEQ ID NO: 113037 - DNA, 1030 bp, Homo Sapiens; identical to SEQ ID NO: 92752

SEQ ID NO: 113038 - DNA, 882 bp, Homo Sapiens; identical to SEQ ID NO: 92753

SEQ ID NO: 113039 - DNA, 1465 bp, Homo Sapiens; identical to SEQ ID NO: 92764
  misc_feature (62)..(120): n is a, c, g, or t
  misc_feature (1239)..(1239): n is a, c, g, or t
  misc_feature (1301)..(1301): n is a, c, g, or t
  misc_feature (1306)..(1306): n is a, c, g, or t
  misc_feature (1314)..(1314): n is a, c, g, or t
  misc_feature (1328)..(1328): n is a, c, g, or t
  misc_feature (1333)..(1333): n is a, c, g, or t
  misc_feature (1352)..(1352): n is a, c, g, or t
  misc_feature (1356)..(1356): n is a, c, g, or t
  misc_feature (1386)..(1386): n is a, c, g, or t
  misc_feature (1410)..(1410): n is a, c, g, or t

SEQ ID NO: 113040 - DNA, 1705 bp, Homo Sapiens; identical to SEQ ID NO: 92765
  misc_feature (990)..(1073): n is a, c, g, or t
  misc_feature (1212)..(1232): n is a, c, g, or t
  misc_feature (1282)..(1315): n is a, c, g, or t

SEQ ID NO: 113041 - DNA, 567 bp, Homo Sapiens; identical to SEQ ID NO: 92797
  misc_feature (363)..(372): n is a, c, g, or t

SEQ ID NO: 113042 - DNA, 839 bp, Homo Sapiens; identical to SEQ ID NO: 92798
  misc_feature (746)..(746): n is a, c, g, or t
  misc_feature (790)..(790): n is a, c, g, or t

SEQ ID NO: 113043 - DNA, 942 bp, Homo Sapiens; identical to SEQ ID NO: 92833
  misc_feature (772)..(772): n is a, c, g, or t

SEQ ID NO: 113044 - DNA, 1891 bp, Homo Sapiens; identical to SEQ ID NO: 92834

SEQ ID NO: 113045 - DNA, 696 bp, Homo Sapiens; identical to SEQ ID NO: 92887
  misc_feature (105)..(113): n is a, c, g, or t

SEQ ID NO: 113046 - DNA, 1641 bp, Homo Sapiens; identical to SEQ ID NO: 92888
  misc_feature (80)..(162): n is a, c, g, or t

SEQ ID NO: 113047 - DNA, 1021 bp, Homo Sapiens; identical to SEQ ID NO: 92944

SEQ ID NO: 113048 - DNA, 1360 bp, Homo Sapiens; identical to SEQ ID NO: 92945
  misc_feature (166)..(175): n is a, c, g, or t
  misc_feature (1222)..(1232): n is a, c, g, or t
  misc_feature (1235)..(1235): n is a, c, g, or t
  misc_feature (1240)..(1240): n is a, c, g, or t

SEQ ID NO: 113049 - DNA, 478 bp, Homo Sapiens; identical to SEQ ID NO: 92946
  misc_feature (297)..(297): n is a, c, g, or t
  misc_feature (380)..(391): n is a, c, g, or t

SEQ ID NO: 113050 - DNA, 912 bp, Homo Sapiens; identical to SEQ ID NO: 92947
  misc_feature (41)..(84): n is a, c, g, or t
  misc_feature (87)..(121): n is a, c, g, or t
  misc_feature (477)..(487): n is a, c, g, or t
  misc_feature (645)..(813): n is a, c, g, or t

SEQ ID NO: 113051 - DNA, 476 bp, Homo Sapiens; identical to SEQ ID NO: 92949

SEQ ID NO: 113052 - DNA, 381 bp, Homo Sapiens; identical to SEQ ID NO: 92950

SEQ ID NO: 113053 - DNA, 226 bp, Homo Sapiens; identical to SEQ ID NO: 92951

SEQ ID NO: 113054 - DNA, 1327 bp, Homo Sapiens; identical to SEQ ID NO: 92956
  misc_feature (1182)..(1182): n is a, c, g, or t
  misc_feature (1193)..(1193): n is a, c, g, or t
  misc_feature (1203)..(1204): n is a, c, g, or t
  misc_feature (1222)..(1223): n is a, c, g, or t

SEQ ID NO: 113055 - DNA, 819 bp, Homo Sapiens; identical to SEQ ID NO: 92957

SEQ ID NO: 113056 - DNA, 344 bp, Homo Sapiens; identical to SEQ ID NO: 92984

SEQ ID NO: 113057 - DNA, 602 bp, Homo Sapiens; identical to SEQ ID NO: 92985

SEQ ID NO: 113058 - DNA, 373 bp, Homo Sapiens; identical to SEQ ID NO: 92992
  misc_feature (165)..(199): n is a, c, g, or t

SEQ ID NO: 113059 - DNA, 544 bp, Homo Sapiens; identical to SEQ ID NO: 92993

SEQ ID NO: 113060 - DNA, 344 bp, Homo Sapiens; identical to SEQ ID NO: 93000
  misc_feature (124)..(124): n is a, c, g, or t

SEQ ID NO: 113061 - DNA, 518 bp, Homo Sapiens; identical to SEQ ID NO: 93001

SEQ ID NO: 113062 - DNA, 778 bp, Homo Sapiens; identical to SEQ ID NO: 93066

SEQ ID NO: 113063 - DNA, 1117 bp, Homo Sapiens; identical to SEQ ID NO: 93067
  misc_feature (89)..(123): n is a, c, g, or t

SEQ ID NO: 113064 - DNA, 813 bp, Homo Sapiens; identical to SEQ ID NO: 93116

SEQ ID NO: 113065 - DNA, 1315 bp, Homo Sapiens; identical to SEQ ID NO: 93117

SEQ ID NO: 113066 - DNA, 398 bp, Homo Sapiens; identical to SEQ ID NO: 93118

SEQ ID NO: 113067 - DNA, 1313 bp, Homo Sapiens; identical to SEQ ID NO: 93119

SEQ ID NO: 113068 - DNA, 789 bp, Homo Sapiens; identical to SEQ ID NO: 93165

SEQ ID NO: 113069 - DNA, 532 bp, Homo Sapiens; identical to SEQ ID NO: 93166

SEQ ID NO: 113070 - DNA, 539 bp, Homo Sapiens; identical to SEQ ID NO: 93173

SEQ ID NO: 113071 - DNA, 796 bp, Homo Sapiens; identical to SEQ ID NO: 93174
  misc_feature (671)..(672): n is a, c, g, or t

SEQ ID NO: 113072 - DNA, 600 bp, Homo Sapiens; identical to SEQ ID NO: 93184

SEQ ID NO: 113073 - DNA, 795 bp, Homo Sapiens; identical to SEQ ID NO: 93185
  misc_feature (23)..(23): n is a, c, g, or t

SEQ ID NO: 113074 - DNA, 690 bp, Homo Sapiens; identical to SEQ ID NO: 93264

SEQ ID NO: 113075 - DNA, 507 bp, Homo Sapiens; identical to SEQ ID NO: 93265

SEQ ID NO: 113076 - DNA, 878 bp, Homo Sapiens; identical to SEQ ID NO: 93319

SEQ ID NO: 113077 - DNA, 897 bp, Homo Sapiens; identical to SEQ ID NO: 93320

SEQ ID NO: 113078 - DNA, 964 bp, Homo Sapiens; identical to SEQ ID NO: 93321

SEQ ID NO: 113079 - DNA, 687 bp, Homo Sapiens; identical to SEQ ID NO: 93329

SEQ ID NO: 113080 - DNA, 728 bp, Homo Sapiens; identical to SEQ ID NO: 93330

SEQ ID NO: 113081 - DNA, 1001 bp, Homo Sapiens; identical to SEQ ID NO: 93356
  misc_feature (873)..(897): n is a, c, g, or t

SEQ ID NO: 113082 - DNA, 535 bp, Homo Sapiens; identical to SEQ ID NO: 93357
  misc_feature (310)..(340): n is a, c, g, or t

SEQ ID NO: 113083 - DNA, 892 bp, Homo Sapiens; identical to SEQ ID NO: 93428

SEQ ID NO: 113084 - DNA, 621 bp, Homo Sapiens; identical to SEQ ID NO: 93429

SEQ ID NO: 113085 - DNA, 877 bp, Homo Sapiens; identical to SEQ ID NO: 93443

SEQ ID NO: 113086 - DNA, 628 bp, Homo Sapiens; identical to SEQ ID NO: 93444
  misc_feature (475)..(475): n is a, c, g, or t
  misc_feature (574)..(574): n is a, c, g, or t
  misc_feature (590)..(590): n is a, c, g, or t
  misc_feature (601)..(601): n is a, c, g, or t

SEQ ID NO: 113087 - DNA, 1009 bp, Homo Sapiens; identical to SEQ ID NO: 93448
  misc_feature (981)..(981): n is a, c, g, or t

SEQ ID NO: 113088 - DNA, 912 bp, Homo Sapiens; identical to SEQ ID NO: 93449
  misc_feature (848)..(848): n is a, c, g, or t
  misc_feature (865)..(865): n is a, c, g, or t

SEQ ID NO: 113089 - DNA, 555 bp, Homo Sapiens; identical to SEQ ID NO: 93476
  misc_feature (95)..(257): n is a, c, g, or t
  misc_feature (347)..(491): n is a, c, g, or t

SEQ ID NO: 113090 - DNA, 484 bp, Homo Sapiens; identical to SEQ ID NO: 93477
  misc_feature (42)..(120): n is a, c, g, or t
  misc_feature (150)..(160): n is a, c, g, or t

SEQ ID NO: 113091 - DNA, 1236 bp, Homo Sapiens; identical to SEQ ID NO: 93478
  misc_feature (736)..(752): n is a, c, g, or t
  misc_feature (1002)..(1034): n is a, c, g, or t

SEQ ID NO: 113092 - DNA, 1829 bp, Homo Sapiens; identical to SEQ ID NO: 93479
  misc_feature (239)..(310): n is a, c, g, or t
  misc_feature (736)..(752): n is a, c, g, or t
  misc_feature (1002)..(1032): n is a, c, g, or t

SEQ ID NO: 113093 - DNA, 859 bp, Homo Sapiens; identical to SEQ ID NO: 93480

SEQ ID NO: 113094 - DNA, 384 bp, Homo Sapiens; identical to SEQ ID NO: 93523

SEQ ID NO: 113095 - DNA, 220 bp, Homo Sapiens; identical to SEQ ID NO: 93524

SEQ ID NO: 113096 - DNA, 375 bp, Homo Sapiens; identical to SEQ ID NO: 93590

SEQ ID NO: 113097 - DNA, 1255 bp, Homo Sapiens; identical to SEQ ID NO: 93591
  misc_feature (798)..(906): n is a, c, g, or t
  misc_feature (930)..(930): n is a, c, g, or t
  misc_feature (958)..(1002): n is a, c, g, or t
  misc_feature (1179)..(1179): n is a, c, g, or t

SEQ ID NO: 113098 - DNA, 667 bp, Homo Sapiens; identical to SEQ ID NO: 93661

SEQ ID NO: 113099 - DNA, 625 bp, Homo Sapiens; identical to SEQ ID NO: 93662

SEQ ID NO: 113100 - DNA, 673 bp, Homo Sapiens; identical to SEQ ID NO: 93710
  misc_feature (260)..(269): n is a, c, g, or t
  misc_feature (343)..(367): n is a, c, g, or t

SEQ ID NO: 113101 - DNA, 644 bp, Homo Sapiens; identical to SEQ ID NO: 93711

SEQ ID NO: 113102 - DNA, 492 bp, Homo Sapiens; identical to SEQ ID NO: 93712

SEQ ID NO: 113103 - DNA, 886 bp, Homo Sapiens; identical to SEQ ID NO: 93713

SEQ ID NO: 113104 - DNA, 407 bp, Homo Sapiens; identical to SEQ ID NO: 93714
  misc_feature (232)..(241): n is a, c, g, or t
  misc_feature (315)..(339): n is a, c, g, or t
  misc_feature (349)..(349): n is a, c, g, or t

SEQ ID NO: 113105 - DNA, 1144 bp, Homo Sapiens; identical to SEQ ID NO: 93715
  misc_feature (754)..(811): n is a, c, g, or t

SEQ ID NO: 113106 - DNA, 438 bp, Homo Sapiens; identical to SEQ ID NO: 93772

SEQ ID NO: 113107 - DNA, 515 bp, Homo Sapiens; identical to SEQ ID NO: 93773

SEQ ID NO: 113108 - DNA, 1018 bp, Homo Sapiens; identical to SEQ ID NO: 93774

SEQ ID NO: 113109 - DNA, 927 bp, Homo Sapiens; identical to SEQ ID NO: 93775

SEQ ID NO: 113110 - DNA, 599 bp, Homo Sapiens; identical to SEQ ID NO: 93791
  misc_feature (284)..(284): n is a, c, g, or t

SEQ ID NO: 113111 - DNA, 436 bp, Homo Sapiens; identical to SEQ ID NO: 93792
  misc_feature (90)..(156): n is a, c, g, or t

SEQ ID NO: 113112 - DNA, 833 bp, Homo Sapiens; identical to SEQ ID NO: 93836

SEQ ID NO: 113113 - DNA, 1827 bp, Homo Sapiens; identical to SEQ ID NO: 93837
  misc_feature (1634)..(1643): n is a, c, g, or t
  misc_feature (1759)..(1759): n is a, c, g, or t

SEQ ID NO: 113114 - DNA, 942 bp, Homo Sapiens; identical to SEQ ID NO: 93846

SEQ ID NO: 113115 - DNA, 1060 bp, Homo Sapiens; identical to SEQ ID NO: 93847

SEQ ID NO: 113116 - DNA, 812 bp, Homo Sapiens; identical to SEQ ID NO: 93862

SEQ ID NO: 113117 - DNA, 751 bp, Homo Sapiens; identical to SEQ ID NO: 93863

SEQ ID NO: 113118 - DNA, 1371 bp, Homo Sapiens; identical to SEQ ID NO: 93864

SEQ ID NO: 113119 - DNA, 740 bp, Homo Sapiens; identical to SEQ ID NO: 93865

SEQ ID NO: 113120 - DNA, 263 bp, Homo Sapiens; identical to SEQ ID NO: 93866
  misc_feature (234)..(234): n is a, c, g, or t

SEQ ID NO: 113121 - DNA, 616 bp, Homo Sapiens; identical to SEQ ID NO: 93867
  misc_feature (319)..(331): n is a, c, g, or t
  misc_feature (370)..(487): n is a, c, g, or t

SEQ ID NO: 113122 - DNA, 931 bp, Homo Sapiens; identical to SEQ ID NO: 93868
  misc_feature (215)..(227): n is a, c, g, or t
  misc_feature (266)..(383): n is a, c, g, or t
  misc_feature (738)..(789): n is a, c, g, or t

SEQ ID NO: 113123 - DNA, 544 bp, Homo Sapiens; identical to SEQ ID NO: 93869
  misc_feature (169)..(181): n is a, c, g, or t
  misc_feature (229)..(336): n is a, c, g, or t

SEQ ID NO: 113124 - DNA, 881 bp, Homo Sapiens; identical to SEQ ID NO: 93870

SEQ ID NO: 113125 - DNA, 1886 bp, Homo Sapiens; identical to SEQ ID NO: 93871
  misc_feature (70)..(88): n is a, c, g, or t
  misc_feature (125)..(145): n is a, c, g, or t

SEQ ID NO: 113126 - DNA, 1012 bp, Homo Sapiens; identical to SEQ ID NO: 93872

SEQ ID NO: 113127 - DNA, 957 bp, Homo Sapiens; identical to SEQ ID NO: 93873
  misc_feature (671)..(671): n is a, c, g, or t

SEQ ID NO: 113128 - DNA, 791 bp, Homo Sapiens; identical to SEQ ID NO: 93887

SEQ ID NO: 113129 - DNA, 990 bp, Homo Sapiens; identical to SEQ ID NO: 93888

SEQ ID NO: 113130 - DNA, 733 bp, Homo Sapiens; identical to SEQ ID NO: 93900

SEQ ID NO: 113131 - DNA, 1674 bp, Homo Sapiens; identical to SEQ ID NO: 93901
  misc_feature (1286)..(1286): n is a, c, g, or t

SEQ ID NO: 113132 - DNA, 530 bp, Homo Sapiens; identical to SEQ ID NO: 93925
  misc_feature (391)..(404): n is a, c, g, or t
  misc_feature (407)..(444): n is a, c, g, or t
  misc_feature (446)..(470): n is a, c, g, or t

SEQ ID NO: 113133 - DNA, 676 bp, Homo Sapiens; identical to SEQ ID NO: 93926
  misc_feature (157)..(170): n is a, c, g, or t
  misc_feature (173)..(210): n is a, c, g, or t
  misc_feature (212)..(236): n is a, c, g, or t

SEQ ID NO: 113134 - DNA, 563 bp, Homo Sapiens; identical to SEQ ID NO: 93932

SEQ ID NO: 113135 - DNA, 943 bp, Homo Sapiens; identical to SEQ ID NO: 93933

SEQ ID NO: 113136 - DNA, 345 bp, Homo Sapiens; identical to SEQ ID NO: 93954
  misc_feature (96)..(135): n is a, c, g, or t

SEQ ID NO: 113137 - DNA, 499 bp, Homo Sapiens; identical to SEQ ID NO: 93955
  misc_feature (258)..(297): n is a, c, g, or t

SEQ ID NO: 113138 - DNA, 574 bp, Homo Sapiens; identical to SEQ ID NO: 93961
  misc_feature (132)..(206): n is a, c, g, or t

SEQ ID NO: 113139 - DNA, 484 bp, Homo Sapiens; identical to SEQ ID NO: 93962
  misc_feature (47)..(121): n is a, c, g, or t

SEQ ID NO: 113140 - DNA, 1251 bp, Homo Sapiens; identical to SEQ ID NO: 93982

SEQ ID NO: 113141 - DNA, 958 bp, Homo Sapiens; identical to SEQ ID NO: 93983

SEQ ID NO: 113142 - DNA, 1141 bp, Homo Sapiens; identical to SEQ ID NO: 93984

SEQ ID NO: 113143 - DNA, 1231 bp, Homo Sapiens; identical to SEQ ID NO: 94010
  misc_feature (54)..(89): n is a, c, g, or t

SEQ ID NO: 113144 - DNA, 731 bp, Homo Sapiens; identical to SEQ ID NO: 94011

SEQ ID NO: 113145 - DNA, 1038 bp, Homo Sapiens; identical to SEQ ID NO: 94027
  misc_feature (1004)..(1004): n is a, c, g, or t

SEQ ID NO: 113146 - DNA, 676 bp, Homo Sapiens; identical to SEQ ID NO: 94028
  misc_feature (652)..(652): n is a, c, g, or t
  misc_feature (659)..(659): n is a, c, g, or t

SEQ ID NO: 113147 - DNA, 847 bp, Homo Sapiens; identical to SEQ ID NO: 94029

SEQ ID NO: 113148 - DNA, 808 bp, Homo Sapiens; identical to SEQ ID NO: 94030
  misc_feature (694)..(694): n is a, c, g, or t

SEQ ID NO: 113149 - DNA, 1977 bp, Homo Sapiens; identical to SEQ ID NO: 94041
  misc_feature (1510)..(1510): n is a, c, g, or t
  misc_feature (1602)..(1602): n is a, c, g, or t
  misc_feature (1705)..(1705): n is a, c, g, or t
  misc_feature (1956)..(1956): n is a, c, g, or t

SEQ ID NO: 113150 - DNA, 574 bp, Homo Sapiens; identical to SEQ ID NO: 94042

SEQ ID NO: 113151 - DNA, 1038 bp, Homo Sapiens; identical to SEQ ID NO: 94045
  misc_feature (42)..(84): n is a, c, g, or t
  misc_feature (87)..(121): n is a, c, g, or t

SEQ ID NO: 113152 - DNA, 969 bp, Homo Sapiens; identical to SEQ ID NO: 94046
  misc_feature (703)..(703): n is a, c, g, or t

SEQ ID NO: 113153 - DNA, 1246 bp, Homo Sapiens; identical to SEQ ID NO: 94052
  misc_feature (66)..(100): n is a, c, g, or t

SEQ ID NO: 113154 - DNA, 1200 bp, Homo Sapiens; identical to SEQ ID NO: 94053
  misc_feature (166)..(166): n is a, c, g, or t

SEQ ID NO: 113155 - DNA, 629 bp, Homo Sapiens; identical to SEQ ID NO: 94055
  misc_feature (21)..(21): n is a, c, g, or t

SEQ ID NO: 113156 - DNA, 1021 bp, Homo Sapiens; identical to SEQ ID NO: 94056

SEQ ID NO: 113157 - DNA, 1381 bp, Homo Sapiens; identical to SEQ ID NO: 94079
  misc_feature (42)..(81): n is a, c, g, or t
  misc_feature (85)..(119): n is a, c, g, or t
  misc_feature (660)..(713): n is a, c, g, or t

SEQ ID NO: 113158 - DNA, 946 bp, Homo Sapiens; identical to SEQ ID NO: 94080
  misc_feature (827)..(861): n is a, c, g, or t

SEQ ID NO: 113159 - DNA, 1150 bp, Homo Sapiens; identical to SEQ ID NO: 94082
  misc_feature (56)..(94): n is a, c, g, or t
  misc_feature (98)..(132): n is a, c, g, or t
  misc_feature (596)..(679): n is a, c, g, or t
  misc_feature (909)..(917): n is a, c, g, or t

SEQ ID NO: 113160 - DNA, 622 bp, Homo Sapiens; identical to SEQ ID NO: 94083

SEQ ID NO: 113161 - DNA, 800 bp, Homo Sapiens; identical to SEQ ID NO: 94097
  misc_feature (81)..(115): n is a, c, g, or t

SEQ ID NO: 113162 - DNA, 966 bp, Homo Sapiens; identical to SEQ ID NO: 94098
  misc_feature (102)..(151): n is a, c, g, or t
  misc_feature (250)..(250): n is a, c, g, or t

SEQ ID NO: 113163 - DNA, 707 bp, Homo Sapiens; identical to SEQ ID NO: 94103

SEQ ID NO: 113164 - DNA, 958 bp, Homo Sapiens; identical to SEQ ID NO: 94104

SEQ ID NO: 113165 - DNA, 2528 bp, Homo Sapiens; identical to SEQ ID NO: 94107
  misc_feature (1791)..(1791): n is a, c, g, or t
  misc_feature (1927)..(1927): n is a, c, g, or t
  misc_feature (1929)..(1929): n is a, c, g, or t
  misc_feature (2007)..(2008): n is a, c, g, or t
  misc_feature (2025)..(2025): n is a, c, g, or t
  misc_feature (2473)..(2473): n is a, c, g, or t

SEQ ID NO: 113166 - DNA, 1341 bp, Homo Sapiens; identical to SEQ ID NO: 94108

SEQ ID NO: 113167 - DNA, 1228 bp, Homo Sapiens; identical to SEQ ID NO: 94111
  misc_feature (235)..(284): n is a, c, g, or t

SEQ ID NO: 113168 - DNA, 380 bp, Homo Sapiens; identical to SEQ ID NO: 94112

SEQ ID NO: 113169 - DNA, 886 bp, Homo Sapiens; identical to SEQ ID NO: 94122
  misc_feature (262)..(284): n is a, c, g, or t

SEQ ID NO: 113170 - DNA, 1009 bp, Homo Sapiens; identical to SEQ ID NO: 94123
  misc_feature (161)..(211): n is a, c, g, or t
  misc_feature (957)..(957): n is a, c, g, or t
  misc_feature (964)..(964): n is a, c, g, or t

SEQ ID NO: 113171 - DNA, 1625 bp, Homo Sapiens; identical to SEQ ID NO: 94144
  misc_feature (980)..(1039): n is a, c, g, or t
  misc_feature (1231)..(1243): n is a, c, g, or t
  misc_feature (1480)..(1530): n is a, c, g, or t

SEQ ID NO: 113172 - DNA, 586 bp, Homo Sapiens; identical to SEQ ID NO: 94145
  misc_feature (22)..(22): n is a, c, g, or t

SEQ ID NO: 113173 - DNA, 881 bp, Homo Sapiens; identical to SEQ ID NO: 94156
  misc_feature (856)..(856): n is a, c, g, or t

SEQ ID NO: 113174 - DNA, 1114 bp, Homo Sapiens; identical to SEQ ID NO: 94157

SEQ ID NO: 113175 - DNA, 535 bp, Homo Sapiens; identical to SEQ ID NO: 94158
  misc_feature (221)..(253): n is a, c, g, or t
  misc_feature (479)..(494): n is a, c, g, or t

SEQ ID NO: 113176 - DNA, 616 bp, Homo Sapiens; identical to SEQ ID NO: 94159

SEQ ID NO: 113177 - DNA, 1874 bp, Homo Sapiens; identical to SEQ ID NO: 94161
  misc_feature (1366)..(1366): n is a, c, g, or t
  misc_feature (1444)..(1444): n is a, c, g, or t
  misc_feature (1635)..(1635): n is a, c, g, or t
  misc_feature (1698)..(1698): n is a, c, g, or t

SEQ ID NO: 113178 - DNA, 774 bp, Homo Sapiens; identical to SEQ ID NO: 94162

SEQ ID NO: 113179 - DNA, 958 bp, Homo Sapiens; identical to SEQ ID NO: 94165
  misc_feature (43)..(77): n is a, c, g, or t

SEQ ID NO: 113180 - DNA, 934 bp, Homo Sapiens; identical to SEQ ID NO: 94166
  misc_feature (16)..(16): n is a, c, g, or t

SEQ ID NO: 113181 - DNA, 2251 bp, Homo Sapiens; identical to SEQ ID NO: 94179
  misc_feature (1555)..(1802): n is a, c, g, or t
  misc_feature (1834)..(1875): n is a, c, g, or t
  misc_feature (2109)..(2159): n is a, c, g, or t
  misc_feature (2184)..(2196): n is a, c, g, or t

SEQ ID NO: 113182 - DNA, 1123 bp, Homo Sapiens; identical to SEQ ID NO: 94180
  misc_feature (266)..(374): n is a, c, g, or t
  misc_feature (720)..(966): n is a, c, g, or t

SEQ ID NO: 113183 - DNA, 1428 bp, Homo Sapiens; identical to SEQ ID NO: 94185

SEQ ID NO: 113184 - DNA, 829 bp, Homo Sapiens; identical to SEQ ID NO: 94186

SEQ ID NO: 113185 - DNA, 1097 bp, Homo Sapiens; identical to SEQ ID NO: 94203

SEQ ID NO: 113186 - DNA, 1205 bp, Homo Sapiens; identical to SEQ ID NO: 94204

SEQ ID NO: 113187 - DNA, 1102 bp, Homo Sapiens; identical to SEQ ID NO: 94205

SEQ ID NO: 113188 - DNA, 638 bp, Homo Sapiens; identical to SEQ ID NO: 94206

SEQ ID NO: 113189 - DNA, 1045 bp, Homo Sapiens; identical to SEQ ID NO: 94207
  misc_feature (83)..(117): n is a, c, g, or t

SEQ ID NO: 113190 - DNA, 939 bp, Homo Sapiens; identical to SEQ ID NO: 94208

SEQ ID NO: 113191 - DNA, 1088 bp, Homo Sapiens; identical to SEQ ID NO: 94215
  misc_feature (57)..(74): n is a, c, g, or t
  misc_feature (534)..(534): n is a, c, g, or t

SEQ ID NO: 113192 - DNA, 928 bp, Homo Sapiens; identical to SEQ ID NO: 94216
  misc_feature (41)..(104): n is a, c, g, or t

SEQ ID NO: 113193 - DNA, 931 bp, Homo Sapiens; identical to SEQ ID NO: 94234
  misc_feature (52)..(110): n is a, c, g, or t

SEQ ID NO: 113194 - DNA, 680 bp, Homo Sapiens; identical to SEQ ID NO: 94235
  misc_feature (20)..(20): n is a, c, g, or t
  misc_feature (250)..(302): n is a, c, g, or t

SEQ ID NO: 113195 - DNA, 933 bp, Homo Sapiens; identical to SEQ ID NO: 94236
  misc_feature (50)..(94): n is a, c, g, or t
  misc_feature (97)..(131): n is a, c, g, or t
  misc_feature (723)..(733): n is a, c, g, or t

SEQ ID NO: 113196 - DNA, 1031 bp, Homo Sapiens; identical to SEQ ID NO: 94237

SEQ ID NO: 113197 - DNA, 966 bp, Homo Sapiens; identical to SEQ ID NO: 94245
  misc_feature (83)..(117): n is a, c, g, or t
  misc_feature (369)..(377): n is a, c, g, or t

SEQ ID NO: 113198 - DNA, 868 bp, Homo Sapiens; identical to SEQ ID NO: 94246

SEQ ID NO: 113199 - DNA, 827 bp, Homo Sapiens; identical to SEQ ID NO: 94272

SEQ ID NO: 113200 - DNA, 881 bp, Homo Sapiens; identical to SEQ ID NO: 94273
  misc_feature (669)..(669): n is a, c, g, or t
  misc_feature (812)..(812): n is a, c, g, or t

SEQ ID NO: 113201 - DNA, 806 bp, Homo Sapiens; identical to SEQ ID NO: 94295
  misc_feature (648)..(691): n is a, c, g, or t

SEQ ID NO: 113202 - DNA, 865 bp, Homo Sapiens; identical to SEQ ID NO: 94296

SEQ ID NO: 113203 - DNA, 1627 bp, Homo Sapiens; identical to SEQ ID NO: 94300
  misc_feature (85)..(128): n is a, c, g, or t
  misc_feature (383)..(383): n is a, c, g, or t
  misc_feature (421)..(432): n is a, c, g, or t
  misc_feature (544)..(597): n is a, c, g, or t
  misc_feature (678)..(741): n is a, c, g, or t
  misc_feature (863)..(863): n is a, c, g, or t
  misc_feature (879)..(879): n is a, c, g, or t
  misc_feature (928)..(928): n is a, c, g, or t
  misc_feature (972)..(972): n is a, c, g, or t
  misc_feature (1034)..(1034): n is a, c, g, or t
  misc_feature (1041)..(1041): n is a, c, g, or t
  misc_feature (1097)..(1097): n is a, c, g, or t
  misc_feature (1146)..(1146): n is a, c, g, or t
  misc_feature (1183)..(1183): n is a, c, g, or t
  misc_feature (1189)..(1189): n is a, c, g, or t
  misc_feature (1201)..(1201): n is a, c, g, or t
  misc_feature (1205)..(1205): n is a, c, g, or t
  misc_feature (1325)..(1325): n is a, c, g, or t
  misc_feature (1380)..(1380): n is a, c, g, or t
  misc_feature (1401)..(1401): n is a, c, g, or t
  misc_feature (1422)..(1422): n is a, c, g, or t
  misc_feature (1495)..(1495): n is a, c, g, or t
  misc_feature (1601)..(1602): n is a, c, g, or t

SEQ ID NO: 113204 - DNA, 1400 bp, Homo Sapiens; identical to SEQ ID NO: 94301
  misc_feature (51)..(94): n is a, c, g, or t
  misc_feature (1057)..(1057): n is a, c, g, or t

SEQ ID NO: 113205 - DNA, 778 bp, Homo Sapiens; identical to SEQ ID NO: 94323

SEQ ID NO: 113206 - DNA, 566 bp, Homo Sapiens; identical to SEQ ID NO: 94324

SEQ ID NO: 113207 - DNA, 1082 bp, Homo Sapiens; identical to SEQ ID NO: 94326
  misc_feature (828)..(940): n is a, c, g, or t

SEQ ID NO: 113208 - DNA, 522 bp, Homo Sapiens; identical to SEQ ID NO: 94327

SEQ ID NO: 113209 - DNA, 776 bp, Homo Sapiens; identical to SEQ ID NO: 94333
  misc_feature (82)..(116): n is a, c, g, or t

SEQ ID NO: 113210 - DNA, 859 bp, Homo Sapiens; identical to SEQ ID NO: 94334

SEQ ID NO: 113211 - DNA, 924 bp, Homo Sapiens; identical to SEQ ID NO: 94350

SEQ ID NO: 113212 - DNA, 740 bp, Homo Sapiens; identical to SEQ ID NO: 94351

SEQ ID NO: 113213 - DNA, 1003 bp, Homo Sapiens; identical to SEQ ID NO: 94385

SEQ ID NO: 113214 - DNA, 856 bp, Homo Sapiens; identical to SEQ ID NO: 94386

SEQ ID NO: 113215 - DNA, 807 bp, Homo Sapiens; identical to SEQ ID NO: 94389
  misc_feature (687)..(721): n is a, c, g, or t

SEQ ID NO: 113216 - DNA, 915 bp, Homo Sapiens; identical to SEQ ID NO: 94390

SEQ ID NO: 113217 - DNA, 782 bp, Homo Sapiens; identical to SEQ ID NO: 94426

SEQ ID NO: 113218 - DNA, 467 bp, Homo Sapiens; identical to SEQ ID NO: 94427

SEQ ID NO: 113219 - DNA, 1055 bp, Homo Sapiens; identical to SEQ ID NO: 94437

SEQ ID NO: 113220 - DNA, 382 bp, Homo Sapiens; identical to SEQ ID NO: 94438

SEQ ID NO: 113221 - DNA, 891 bp, Homo Sapiens; identical to SEQ ID NO: 94457
  misc_feature (794)..(823): n is a, c, g, or t

SEQ ID NO: 113222 - DNA, 792 bp, Homo Sapiens; identical to SEQ ID NO: 94458

SEQ ID NO: 113223 - DNA, 788 bp, Homo Sapiens; identical to SEQ ID NO: 94459
  misc_feature (501)..(535): n is a, c, g, or t
  misc_feature (575)..(635): n is a, c, g, or t

SEQ ID NO: 113224 - DNA, 724 bp, Homo Sapiens; identical to SEQ ID NO: 94492

SEQ ID NO: 113225 - DNA, 974 bp, Homo Sapiens; identical to SEQ ID NO: 94493
  misc_feature (21)..(21): n is a, c, g, or t
  misc_feature (27)..(27): n is a, c, g, or t
  misc_feature (48)..(48): n is a, c, g, or t
  misc_feature (57)..(57): n is a, c, g, or t
  misc_feature (88)..(88): n is a, c, g, or t
  misc_feature (164)..(164): n is a, c, g, or t

SEQ ID NO: 113226 - DNA, 941 bp, Homo Sapiens; identical to SEQ ID NO: 94503
  misc_feature (82)..(116): n is a, c, g, or t

SEQ ID NO: 113227 - DNA, 319 bp, Homo Sapiens; identical to SEQ ID NO: 94504

SEQ ID NO: 113228 - DNA, 1048 bp, Homo Sapiens; identical to SEQ ID NO: 94605
  misc_feature (104)..(145): n is a, c, g, or t
  misc_feature (972)..(996): n is a, c, g, or t

SEQ ID NO: 113229 - DNA, 416 bp, Homo Sapiens; identical to SEQ ID NO: 94606
  misc_feature (32)..(32): n is a, c, g, or t
  misc_feature (37)..(37): n is a, c, g, or t
  misc_feature (45)..(45): n is a, c, g, or t
  misc_feature (366)..(366): n is a, c, g, or t
  misc_feature (369)..(369): n is a, c, g, or t
  misc_feature (371)..(371): n is a, c, g, or t

SEQ ID NO: 113230 - DNA, 1112 bp, Homo Sapiens; identical to SEQ ID NO: 94757

SEQ ID NO: 113231 - DNA, 806 bp, Homo Sapiens; identical to SEQ ID NO: 94758

SEQ ID NO: 113232 - DNA, 1189 bp, Homo Sapiens; identical to SEQ ID NO: 94761
  misc_feature (162)..(214): n is a, c, g, or t

SEQ ID NO: 113233 - DNA, 147 bp, Homo Sapiens; identical to SEQ ID NO: 94762

SEQ ID NO: 113234 - DNA, 990 bp, Homo Sapiens; identical to SEQ ID NO: 94766
  misc_feature (773)..(773): n is a, c, g, or t
  misc_feature (878)..(878): n is a, c, g, or t
  misc_feature (881)..(881): n is a, c, g, or t
  misc_feature (888)..(888): n is a, c, g, or t

SEQ ID NO: 113235 - DNA, 1116 bp, Homo Sapiens; identical to SEQ ID NO: 94767
  misc_feature (854)..(854): n is a, c, g, or t

SEQ ID NO: 113236 - DNA, 1022 bp, Homo Sapiens; identical to SEQ ID NO: 94768

SEQ ID NO: 113237 - DNA, 1059 bp, Homo Sapiens; identical to SEQ ID NO: 94830

SEQ ID NO: 113238 - DNA, 656 bp, Homo Sapiens; identical to SEQ ID NO: 94831
  misc_feature (262)..(262): n is a, c, g, or t
  misc_feature (273)..(274): n is a, c, g, or t

SEQ ID NO: 113239 - DNA, 404 bp, Homo Sapiens; identical to SEQ ID NO: 94852

SEQ ID NO: 113240 - DNA, 243 bp, Homo Sapiens; identical to SEQ ID NO: 94853

SEQ ID NO: 113241 - DNA, 1027 bp, Homo Sapiens; identical to SEQ ID NO: 94891
  misc_feature (771)..(798): n is a, c, g, or t

SEQ ID NO: 113242 - DNA, 959 bp, Homo Sapiens; identical to SEQ ID NO: 94892

SEQ ID NO: 113243 - DNA, 515 bp, Homo Sapiens; identical to SEQ ID NO: 94952

SEQ ID NO: 113244 - DNA, 953 bp, Homo Sapiens; identical to SEQ ID NO: 94953

SEQ ID NO: 113245 - DNA, 534 bp, Homo Sapiens; identical to SEQ ID NO: 94954

SEQ ID NO: 113246 - DNA, 624 bp, Homo Sapiens; identical to SEQ ID NO: 94955

SEQ ID NO: 113247 - DNA, 719 bp, Homo Sapiens; identical to SEQ ID NO: 94966
  misc_feature (127)..(127): n is a, c, g, or t

SEQ ID NO: 113248 - DNA, 1276 bp, Homo Sapiens; identical to SEQ ID NO: 94967
  misc_feature (1108)..(1108): n is a, c, g, or t
  misc_feature (1179)..(1179): n is a, c, g, or t

SEQ ID NO: 113249 - DNA, 489 bp, Homo Sapiens; identical to SEQ ID NO: 95039

SEQ ID NO: 113250 - DNA, 620 bp, Homo Sapiens; identical to SEQ ID NO: 95040

SEQ ID NO: 113251 - DNA, 580 bp, Homo Sapiens; identical to SEQ ID NO: 95041

SEQ ID NO: 113252 - DNA, 346 bp, Homo Sapiens; identical to SEQ ID NO: 95042
  misc_feature (105)..(117): n is a, c, g, or t

SEQ ID NO: 113253 - DNA, 1654 bp, Homo Sapiens; identical to SEQ ID NO: 95072

SEQ ID NO: 113254 - DNA, 990 bp, Homo Sapiens; identical to SEQ ID NO: 95073

SEQ ID NO: 113255 - DNA, 648 bp, Homo Sapiens; identical to SEQ ID NO: 95153
  misc_feature (502)..(573): n is a, c, g, or t

SEQ ID NO: 113256 - DNA, 995 bp, Homo Sapiens; identical to SEQ ID NO: 95154
  misc_feature (250)..(307): n is a, c, g, or t
  misc_feature (390)..(398): n is a, c, g, or t
  misc_feature (589)..(732): n is a, c, g, or t

SEQ ID NO: 113257 - DNA, 472 bp, Homo Sapiens; identical to SEQ ID NO: 95159
  misc_feature (122)..(216): n is a, c, g, or t
  misc_feature (396)..(432): n is a, c, g, or t

SEQ ID NO: 113258 - DNA, 419 bp, Homo Sapiens; identical to SEQ ID NO: 95160
  misc_feature (69)..(163): n is a, c, g, or t
  misc_feature (343)..(379): n is a, c, g, or t

SEQ ID NO: 113259 - DNA, 622 bp, Homo Sapiens; identical to SEQ ID NO: 95161
  misc_feature (462)..(559): n is a, c, g, or t

SEQ ID NO: 113260 - DNA, 1138 bp, Homo Sapiens; identical to SEQ ID NO: 95162
  misc_feature (272)..(369): n is a, c, g, or t

SEQ ID NO: 113261 - DNA, 462 bp, Homo Sapiens; identical to SEQ ID NO: 95210

SEQ ID NO: 113262 - DNA, 1002 bp, Homo Sapiens; identical to SEQ ID NO: 95211

SEQ ID NO: 113263 - DNA, 962 bp, Homo Sapiens; identical to SEQ ID NO: 95235
  misc_feature (701)..(701): n is a, c, g, or t
  misc_feature (781)..(781): n is a, c, g, or t

SEQ ID NO: 113264 - DNA, 676 bp, Homo Sapiens; identical to SEQ ID NO: 95236

SEQ ID NO: 113265 - DNA, 868 bp, Homo Sapiens; identical to SEQ ID NO: 95352
  misc_feature (261)..(273): n is a, c, g, or t

SEQ ID NO: 113266 - DNA, 487 bp, Homo Sapiens; identical to SEQ ID NO: 95353

SEQ ID NO: 113267 - DNA, 1143 bp, Homo Sapiens; identical to SEQ ID NO: 95363
  misc_feature (521)..(521): n is a, c, g, or t

SEQ ID NO: 113268 - DNA, 884 bp, Homo Sapiens; identical to SEQ ID NO: 95364

SEQ ID NO: 113269 - DNA, 906 bp, Homo Sapiens; identical to SEQ ID NO: 95378

SEQ ID NO: 113270 - DNA, 754 bp, Homo Sapiens; identical to SEQ ID NO: 95379

SEQ ID NO: 113271 - DNA, 1957 bp, Homo Sapiens; identical to SEQ ID NO: 95380
  misc_feature (1944)..(1944): n is a, c, g, or t

SEQ ID NO: 113272 - DNA, 976 bp, Homo Sapiens; identical to SEQ ID NO: 95390

SEQ ID NO: 113273 - DNA, 1010 bp, Homo Sapiens; identical to SEQ ID NO: 95391

SEQ ID NO: 113274 - DNA, 704 bp, Homo Sapiens; identical to SEQ ID NO: 95396

SEQ ID NO: 113275 - DNA, 424 bp, Homo Sapiens; identical to SEQ ID NO: 95397

SEQ ID NO: 113276 - DNA, 536 bp, Homo Sapiens; identical to SEQ ID NO: 95497

SEQ ID NO: 113277 - DNA, 865 bp, Homo Sapiens; identical to SEQ ID NO: 95498

SEQ ID NO: 113278 - DNA, 398 bp, Homo Sapiens; identical to SEQ ID NO: 95619

SEQ ID NO: 113279 - DNA, 501 bp, Homo Sapiens; identical to SEQ ID NO: 95620

SEQ ID NO: 113280 - DNA, 497 bp, Homo Sapiens; identical to SEQ ID NO: 95652

SEQ ID NO: 113281 - DNA, 940 bp, Homo Sapiens; identical to SEQ ID NO: 95653
  misc_feature (60)..(60): n is a, c, g, or t

SEQ ID NO: 113282 - DNA, 708 bp, Homo Sapiens; identical to SEQ ID NO: 95665

SEQ ID NO: 113283 - DNA, 1031 bp, Homo Sapiens; identical to SEQ ID NO: 95666

SEQ ID NO: 113284 - DNA, 424 bp, Homo Sapiens; identical to SEQ ID NO: 95691

SEQ ID NO: 113285 - DNA, 496 bp, Homo Sapiens; identical to SEQ ID NO: 95692

SEQ ID NO: 113286 - DNA, 643 bp, Homo Sapiens; identical to SEQ ID NO: 95897

SEQ ID NO: 113287 - DNA, 457 bp, Homo Sapiens; identical to SEQ ID NO: 95898

SEQ ID NO: 113288 - DNA, 696 bp, Homo Sapiens; identical to SEQ ID NO: 95949
  misc_feature (512)..(631): n is a, c, g, or t

SEQ ID NO: 113289 - DNA, 255 bp, Homo Sapiens; identical to SEQ ID NO: 95950

SEQ ID NO: 113290 - DNA, 539 bp, Homo Sapiens; identical to SEQ ID NO: 95992

SEQ ID NO: 113291 - DNA, 498 bp, Homo Sapiens; identical to SEQ ID NO: 95993

SEQ ID NO: 113292 - DNA, 1014 bp, Homo Sapiens; identical to SEQ ID NO: 96010

SEQ ID NO: 113293 - DNA, 1057 bp, Homo Sapiens; identical to SEQ ID NO: 96011

SEQ ID NO: 113294 - DNA, 1076 bp, Homo Sapiens; identical to SEQ ID NO: 96030

SEQ ID NO: 113295 - DNA, 1109 bp, Homo Sapiens; identical to SEQ ID NO: 96031

SEQ ID NO: 113296 - DNA, 383 bp, Homo Sapiens; identical to SEQ ID NO: 96048

SEQ ID NO: 113297 - DNA, 563 bp, Homo Sapiens; identical to SEQ ID NO: 96049
  misc_feature (74)..(120): n is a, c, g, or t

SEQ ID NO: 113298 - DNA, 530 bp, Homo Sapiens; identical to SEQ ID NO: 96050
  misc_feature (48)..(93): n is a, c, g, or t

SEQ ID NO: 113299 - DNA, 493 bp, Homo Sapiens; identical to SEQ ID NO: 96052
  misc_feature (302)..(302): n is a, c, g, or t
  misc_feature (366)..(421): n is a, c, g, or t

SEQ ID NO: 113300 - DNA, 950 bp, Homo Sapiens; identical to SEQ ID NO: 96053
  misc_feature (156)..(217): n is a, c, g, or t
  misc_feature (898)..(898): n is a, c, g, or t
  misc_feature (907)..(907): n is a, c, g, or t

SEQ ID NO: 113301 - DNA, 590 bp, Homo Sapiens; identical to SEQ ID NO: 96070

SEQ ID NO: 113302 - DNA, 752 bp, Homo Sapiens; identical to SEQ ID NO: 96071

SEQ ID NO: 113303 - DNA, 1125 bp, Homo Sapiens; identical to SEQ ID NO: 96098

SEQ ID NO: 113304 - DNA, 1171 bp, Homo Sapiens; identical to SEQ ID NO: 96099
  misc_feature (604)..(770): n is a, c, g, or t
  misc_feature (779)..(793): n is a, c, g, or t
  misc_feature (818)..(827): n is a, c, g, or t
  misc_feature (837)..(1002): n is a, c, g, or t
  misc_feature (1013)..(1022): n is a, c, g, or t
  misc_feature (1067)..(1129): n is a, c, g, or t

SEQ ID NO: 113305 - DNA, 749 bp, Homo Sapiens; identical to SEQ ID NO: 96155
  misc_feature (739)..(739): n is a, c, g, or t

SEQ ID NO: 113306 - DNA, 1024 bp, Homo Sapiens; identical to SEQ ID NO: 96156

SEQ ID NO: 113307 - DNA, 907 bp, Homo Sapiens; identical to SEQ ID NO: 96222
  misc_feature (662)..(662): n is a, c, g, or t
  misc_feature (700)..(700): n is a, c, g, or t
  misc_feature (769)..(769): n is a, c, g, or t
  misc_feature (848)..(848): n is a, c, g, or t

SEQ ID NO: 113308 - DNA, 502 bp, Homo Sapiens; identical to SEQ ID NO: 96223

SEQ ID NO: 113309 - DNA, 1011 bp, Homo Sapiens; identical to SEQ ID NO: 96252

SEQ ID NO: 113310 - DNA, 560 bp, Homo Sapiens; identical to SEQ ID NO: 96253

SEQ ID NO: 113311 - DNA, 990 bp, Homo Sapiens; identical to SEQ ID NO: 96360
  misc_feature (257)..(318): n is a, c, g, or t
  misc_feature (422)..(475): n is a, c, g, or t
  misc_feature (571)..(579): n is a, c, g, or t
  misc_feature (832)..(903): n is a, c, g, or t

SEQ ID NO: 113312 - DNA, 748 bp, Homo Sapiens; identical to SEQ ID NO: 96361
  misc_feature (135)..(239): n is a, c, g, or t
  misc_feature (521)..(680): n is a, c, g, or t
  misc_feature (693)..(708): n is a, c, g, or t

SEQ ID NO: 113313 - DNA, 1006 bp, Homo Sapiens; identical to SEQ ID NO: 96387

SEQ ID NO: 113314 - DNA, 1098 bp, Homo Sapiens; identical to SEQ ID NO: 96388

SEQ ID NO: 113315 - DNA, 898 bp, Homo Sapiens; identical to SEQ ID NO: 96418
  misc_feature (733)..(733): n is a, c, g, or t
  misc_feature (740)..(771): n is a, c, g, or t
  misc_feature (776)..(776): n is a, c, g, or t

SEQ ID NO: 113316 - DNA, 891 bp, Homo Sapiens; identical to SEQ ID NO: 96419
  misc_feature (641)..(706): n is a, c, g, or t

SEQ ID NO: 113317 - DNA, 1451 bp, Homo Sapiens; identical to SEQ ID NO: 96423
  misc_feature (1354)..(1354): n is a, c, g, or t

SEQ ID NO: 113318 - DNA, 1028 bp, Homo Sapiens; identical to SEQ ID NO: 96424

SEQ ID NO: 113319 - DNA, 1391 bp, Homo Sapiens; identical to SEQ ID NO: 96452
  misc_feature (1254)..(1254): n is a, c, g, or t
  misc_feature (1301)..(1301): n is a, c, g, or t

SEQ ID NO: 113320 - DNA, 895 bp, Homo Sapiens; identical to SEQ ID NO: 96453
  misc_feature (23)..(23): n is a, c, g, or t

SEQ ID NO: 113321 - DNA, 951 bp, Homo Sapiens; identical to SEQ ID NO: 96463
  misc_feature (820)..(830): n is a, c, g, or t

SEQ ID NO: 113322 - DNA, 816 bp, Homo Sapiens; identical to SEQ ID NO: 96464
  misc_feature (473)..(666): n is a, c, g, or t
  misc_feature (670)..(683): n is a, c, g, or t

SEQ ID NO: 113323 - DNA, 1045 bp, Homo Sapiens; identical to SEQ ID NO: 96483
  misc_feature (118)..(118): n is a, c, g, or t

SEQ ID NO: 113324 - DNA, 1194 bp, Homo Sapiens; identical to SEQ ID NO: 96484

SEQ ID NO: 113325 - DNA, 1205 bp, Homo Sapiens; identical to SEQ ID NO: 96486

SEQ ID NO: 113326 - DNA, 827 bp, Homo Sapiens; identical to SEQ ID NO: 96487

SEQ ID NO: 113327 - DNA, 230 bp, Homo Sapiens; identical to SEQ ID NO: 96488

SEQ ID NO: 113328 - DNA, 703 bp, Homo Sapiens; identical to SEQ ID NO: 96489
  misc_feature (680)..(680): n is a, c, g, or t
  misc_feature (686)..(686): n is a, c, g, or t

SEQ ID NO: 113329 - DNA, 964 bp, Homo Sapiens; identical to SEQ ID NO: 96493

SEQ ID NO: 113330 - DNA, 1016 bp, Homo Sapiens; identical to SEQ ID NO: 96494
  misc_feature (898)..(898): n is a, c, g, or t
  misc_feature (958)..(958): n is a, c, g, or t
  misc_feature (970)..(970): n is a, c, g, or t
  misc_feature (974)..(974): n is a, c, g, or t

SEQ ID NO: 113331 - DNA, 1886 bp, Homo Sapiens; identical to SEQ ID NO: 96497
  misc_feature (1698)..(1742): n is a, c, g, or t

SEQ ID NO: 113332 - DNA, 2817 bp, Homo Sapiens; identical to SEQ ID NO: 96498
  misc_feature (2239)..(2253): n is a, c, g, or t
  misc_feature (2351)..(2351): n is a, c, g, or t
  misc_feature (2610)..(2618): n is a, c, g, or t

SEQ ID NO: 113333 - DNA, 247 bp, Homo Sapiens; identical to SEQ ID NO: 96499

SEQ ID NO: 113334 - DNA, 1114 bp, Homo Sapiens; identical to SEQ ID NO: 96502
  misc_feature (1072)..(1072): n is a, c, g, or t

SEQ ID NO: 113335 - DNA, 441 bp, Homo Sapiens; identical to SEQ ID NO: 96503

SEQ ID NO: 113336 - DNA, 1986 bp, Homo Sapiens; identical to SEQ ID NO: 96506

SEQ ID NO: 113337 - DNA, 1345 bp, Homo Sapiens; identical to SEQ ID NO: 96507
  misc_feature (21)..(21): n is a, c, g, or t

SEQ ID NO: 113338 - DNA, 1064 bp, Homo Sapiens; identical to SEQ ID NO: 96512

SEQ ID NO: 113339 - DNA, 929 bp, Homo Sapiens; identical to SEQ ID NO: 96513

SEQ ID NO: 113340 - DNA, 900 bp, Homo Sapiens; identical to SEQ ID NO: 96514

SEQ ID NO: 113341 - DNA, 2899 bp, Homo Sapiens; identical to SEQ ID NO: 96534
  misc_feature (1809)..(1809): n is a, c, g, or t

SEQ ID NO: 113342 - DNA, 785 bp, Homo Sapiens; identical to SEQ ID NO: 96535

SEQ ID NO: 113343 - DNA, 1511 bp, Homo Sapiens; identical to SEQ ID NO: 96538
  misc_feature (1254)..(1254): n is a, c, g, or t
  misc_feature (1433)..(1444): n is a, c, g, or t
  misc_feature (1449)..(1458): n is a, c, g, or t

SEQ ID NO: 113344 - DNA, 1465 bp, Homo Sapiens; identical to SEQ ID NO: 96539
  misc_feature (1170)..(1170): n is a, c, g, or t

SEQ ID NO: 113345 - DNA, 1275 bp, Homo Sapiens; identical to SEQ ID NO: 96540
  misc_feature (135)..(135): n is a, c, g, or t

SEQ ID NO: 113346 - DNA, 965 bp, Homo Sapiens; identical to SEQ ID NO: 96541
  misc_feature (152)..(152): n is a, c, g, or t
  misc_feature (266)..(266): n is a, c, g, or t

SEQ ID NO: 113347 - DNA, 1122 bp, Homo Sapiens; identical to SEQ ID NO: 96557

SEQ ID NO: 113348 - DNA, 402 bp, Homo Sapiens; identical to SEQ ID NO: 96558

SEQ ID NO: 113349 - DNA, 1001 bp, Homo Sapiens; identical to SEQ ID NO: 96559

SEQ ID NO: 113350 - DNA, 1303 bp, Homo Sapiens; identical to SEQ ID NO: 96566
  misc_feature (43)..(55): n is a, c, g, or t

SEQ ID NO: 113351 - DNA, 694 bp, Homo Sapiens; identical to SEQ ID NO: 96567

SEQ ID NO: 113352 - DNA, 775 bp, Homo Sapiens; identical to SEQ ID NO: 96575

SEQ ID NO: 113353 - DNA, 1093 bp, Homo Sapiens; identical to SEQ ID NO: 96576
  misc_feature (1051)..(1051): n is a, c, g, or t

SEQ ID NO: 113354 - DNA, 731 bp, Homo Sapiens; identical to SEQ ID NO: 96577
  misc_feature (150)..(150): n is a, c, g, or t

SEQ ID NO: 113355 - DNA, 1183 bp, Homo Sapiens; identical to SEQ ID NO: 96605

SEQ ID NO: 113356 - DNA, 882 bp, Homo Sapiens; identical to SEQ ID NO: 96606

SEQ ID NO: 113357 - DNA, 777 bp, Homo Sapiens; identical to SEQ ID NO: 96608

SEQ ID NO: 113358 - DNA, 855 bp, Homo Sapiens; identical to SEQ ID NO: 96609
  misc_feature (752)..(752): n is a, c, g, or t

SEQ ID NO: 113359 - DNA, 922 bp, Homo Sapiens; identical to SEQ ID NO: 96623
  misc_feature (54)..(54): n is a, c, g, or t
  misc_feature (91)..(91): n is a, c, g, or t

SEQ ID NO: 113360 - DNA, 1430 bp, Homo Sapiens; identical to SEQ ID NO: 96624

SEQ ID NO: 113361 - DNA, 865 bp, Homo Sapiens; identical to SEQ ID NO: 96644

SEQ ID NO: 113362 - DNA, 555 bp, Homo Sapiens; identical to SEQ ID NO: 96645

SEQ ID NO: 113363 - DNA, 1484 bp, Homo Sapiens; identical to SEQ ID NO: 96651

SEQ ID NO: 113364 - DNA, 1231 bp, Homo Sapiens; identical to SEQ ID NO: 96652

SEQ ID NO: 113365 - DNA, 1032 bp, Homo Sapiens; identical to SEQ ID NO: 96658
  misc_feature (861)..(861): n is a, c, g, or t

SEQ ID NO: 113366 - DNA, 1006 bp, Homo Sapiens; identical to SEQ ID NO: 96659

SEQ ID NO: 113367 - DNA, 1109 bp, Homo Sapiens; identical to SEQ ID NO: 96671
  misc_feature (1041)..(1059): n is a, c, g, or t

SEQ ID NO: 113368 - DNA, 822 bp, Homo Sapiens; identical to SEQ ID NO: 96672

SEQ ID NO: 113369 - DNA, 958 bp, Homo Sapiens; identical to SEQ ID NO: 96682

SEQ ID NO: 113370 - DNA, 1023 bp, Homo Sapiens; identical to SEQ ID NO: 96683

SEQ ID NO: 113371 - DNA, 984 bp, Homo Sapiens; identical to SEQ ID NO: 96685

SEQ ID NO: 113372 - DNA, 922 bp, Homo Sapiens; identical to SEQ ID NO: 96686

SEQ ID NO: 113373 - DNA, 855 bp, Homo Sapiens; identical to SEQ ID NO: 96733

SEQ ID NO: 113374 - DNA, 899 bp, Homo Sapiens; identical to SEQ ID NO: 96734

SEQ ID NO: 113375 - DNA, 1107 bp, Homo Sapiens; identical to SEQ ID NO: 96745
  misc_feature (183)..(233): n is a, c, g, or t
  misc_feature (862)..(893): n is a, c, g, or t

SEQ ID NO: 113376 - DNA, 762 bp, Homo Sapiens; identical to SEQ ID NO: 96746
  misc_feature (369)..(370): n is a, c, g, or t

SEQ ID NO: 113377 - DNA, 1157 bp, Homo Sapiens; identical to SEQ ID NO: 96747
  misc_feature (163)..(213): n is a, c, g, or t
  misc_feature (910)..(982): n is a, c, g, or t

SEQ ID NO: 113378 - DNA, 959 bp, Homo Sapiens; identical to SEQ ID NO: 96750
  misc_feature (174)..(289): n is a, c, g, or t
  misc_feature (695)..(695): n is a, c, g, or t
  misc_feature (811)..(811): n is a, c, g, or t

SEQ ID NO: 113379 - DNA, 863 bp, Homo Sapiens; identical to SEQ ID NO: 96751
  misc_feature (138)..(253): n is a, c, g, or t

SEQ ID NO: 113380 - DNA, 984 bp, Homo Sapiens; identical to SEQ ID NO: 96754
  misc_feature (929)..(929): n is a, c, g, or t

SEQ ID NO: 113381 - DNA, 1095 bp, Homo Sapiens; identical to SEQ ID NO: 96755
  misc_feature (1000)..(1000): n is a, c, g, or t

SEQ ID NO: 113382 - DNA, 953 bp, Homo Sapiens; identical to SEQ ID NO: 96758

SEQ ID NO: 113383 - DNA, 936 bp, Homo Sapiens; identical to SEQ ID NO: 96759

SEQ ID NO: 113384 - DNA, 901 bp, Homo Sapiens; identical to SEQ ID NO: 96765

SEQ ID NO: 113385 - DNA, 893 bp, Homo Sapiens; identical to SEQ ID NO: 5060
  misc_feature (476)..(482): n is a, c, g, or t
  misc_feature (484)..(500): n is a, c, g, or t
  misc_feature (504)..(508): n is a, c, g, or t
  misc_feature (511)..(511): n is a, c, g, or t
  misc_feature (513)..(591): n is a, c, g, or t
  misc_feature (615)..(618): n is a, c, g, or t
  misc_feature (629)..(645): n is a, c, g, or t

SEQ ID NO: 113386 - DNA, 1436 bp, Homo Sapiens; identical to SEQ ID NO: 96771
  misc_feature (246)..(254): n is a, c, g, or t
  misc_feature (1311)..(1311): n is a, c, g, or t
  misc_feature (1330)..(1330): n is a, c, g, or t
  misc_feature (1357)..(1357): n is a, c, g, or t

SEQ ID NO: 113387 - DNA, 638 bp, Homo Sapiens; identical to SEQ ID NO: 96772

SEQ ID NO: 113388 - DNA, 770 bp, Homo Sapiens; identical to SEQ ID NO: 96799

SEQ ID NO: 113389 - DNA, 937 bp, Homo Sapiens; identical to SEQ ID NO: 96800

SEQ ID NO: 113390 - DNA, 1304 bp, Homo Sapiens; identical to SEQ ID NO: 96815
  misc_feature (41)..(54): n is a, c, g, or t

SEQ ID NO: 113391 - DNA, 1735 bp, Homo Sapiens; identical to SEQ ID NO: 96816

SEQ ID NO: 113392 - DNA, 1468 bp, Homo Sapiens; identical to SEQ ID NO: 96818
  misc_feature (1452)..(1452): n is a, c, g, or t

SEQ ID NO: 113393 - DNA, 964 bp, Homo Sapiens; identical to SEQ ID NO: 96819

SEQ ID NO: 113394 - DNA, 1089 bp, Homo Sapiens; identical to SEQ ID NO: 96837

SEQ ID NO: 113395 - DNA, 308 bp, Homo Sapiens; identical to SEQ ID NO: 96838

SEQ ID NO: 113396 - DNA, 1142 bp, Homo Sapiens; identical to SEQ ID NO: 96841
  misc_feature (118)..(118): n is a, c, g, or t
  misc_feature (121)..(121): n is a, c, g, or t
  misc_feature (222)..(223): n is a, c, g, or t

SEQ ID NO: 113397 - DNA, 1677 bp, Homo Sapiens; identical to SEQ ID NO: 96842
  misc_feature (58)..(58): n is a, c, g, or t

SEQ ID NO: 113398 - DNA, 884 bp, Homo Sapiens; identical to SEQ ID NO: 96865
  misc_feature (21)..(21): n is a, c, g, or t
  misc_feature (108)..(108): n is a, c, g, or t
  misc_feature (163)..(163): n is a, c, g, or t
  misc_feature (181)..(181): n is a, c, g, or t
  misc_feature (233)..(233): n is a, c, g, or t

SEQ ID NO: 113399 - DNA, 1285 bp, Homo Sapiens; identical to SEQ ID NO: 96866
  misc_feature (895)..(895): n is a, c, g, or t

SEQ ID NO: 113400 - DNA, 1026 bp, Homo Sapiens; identical to SEQ ID NO: 96867
  misc_feature (107)..(107): n is a, c, g, or t
  misc_feature (232)..(232): n is a, c, g, or t

SEQ ID NO: 113401 - DNA, 1030 bp, Homo Sapiens; identical to SEQ ID NO: 96868
  misc_feature (879)..(893): n is a, c, g, or t

SEQ ID NO: 113402 - DNA, 620 bp, Homo Sapiens; identical to SEQ ID NO: 96880

SEQ ID NO: 113403 - DNA, 1801 bp, Homo Sapiens; identical to SEQ ID NO: 96881
  misc_feature (91)..(99): n is a, c, g, or t
  misc_feature (173)..(181): n is a, c, g, or t

SEQ ID NO: 113404 - DNA, 1451 bp, Homo Sapiens; identical to SEQ ID NO: 96884

SEQ ID NO: 113405 - DNA, 878 bp, Homo Sapiens; identical to SEQ ID NO: 96885

SEQ ID NO: 113406 - DNA, 1271 bp, Homo Sapiens; identical to SEQ ID NO: 96899
  misc_feature (1202)..(1202): n is a, c, g, or t
  misc_feature (1236)..(1237): n is a, c, g, or t

SEQ ID NO: 113407 - DNA, 1143 bp, Homo Sapiens; identical to SEQ ID NO: 96900
  misc_feature (157)..(157): n is a, c, g, or t
  misc_feature (377)..(386): n is a, c, g, or t

SEQ ID NO: 113408 - DNA, 955 bp, Homo Sapiens; identical to SEQ ID NO: 96903
  misc_feature (931)..(931): n is a, c, g, or t
  misc_feature (936)..(936): n is a, c, g, or t

SEQ ID NO: 113409 - DNA, 885 bp, Homo Sapiens; identical to SEQ ID NO: 96904

SEQ ID NO: 113410 - DNA, 861 bp, Homo Sapiens; identical to SEQ ID NO: 96931

SEQ ID NO: 113411 - DNA, 1175 bp, Homo Sapiens; identical to SEQ ID NO: 96932

SEQ ID NO: 113412 - DNA, 1339 bp, Homo Sapiens; identical to SEQ ID NO: 96934

SEQ ID NO: 113413 - DNA, 876 bp, Homo Sapiens; identical to SEQ ID NO: 96935

SEQ ID NO: 113414 - DNA, 1455 bp, Homo Sapiens; identical to SEQ ID NO: 96937

SEQ ID NO: 113415 - DNA, 1615 bp, Homo Sapiens; identical to SEQ ID NO: 96938
  misc_feature (1488)..(1488): n is a, c, g, or t
  misc_feature (1573)..(1573): n is a, c, g, or t

SEQ ID NO: 113416 - DNA, 1205 bp, Homo Sapiens; identical to SEQ ID NO: 96939
  misc_feature (935)..(949): n is a, c, g, or t

SEQ ID NO: 113417 - DNA, 949 bp, Homo Sapiens; identical to SEQ ID NO: 96940

SEQ ID NO: 113418 - DNA, 939 bp, Homo Sapiens; identical to SEQ ID NO: 96944

SEQ ID NO: 113419 - DNA, 1374 bp, Homo Sapiens; identical to SEQ ID NO: 96945

SEQ ID NO: 113420 - DNA, 977 bp, Homo Sapiens; identical to SEQ ID NO: 96946

SEQ ID NO: 113421 - DNA, 728 bp, Homo Sapiens; identical to SEQ ID NO: 96948

SEQ ID NO: 113422 - DNA, 301 bp, Homo Sapiens; identical to SEQ ID NO: 96949

SEQ ID NO: 113423 - DNA, 846 bp, Homo Sapiens; identical to SEQ ID NO: 96952

SEQ ID NO: 113424 - DNA, 842 bp, Homo Sapiens; identical to SEQ ID NO: 96953

SEQ ID NO: 113425 - DNA, 1538 bp, Homo Sapiens; identical to SEQ ID NO: 96955

SEQ ID NO: 113426 - DNA, 1478 bp, Homo Sapiens; identical to SEQ ID NO: 96956
  misc_feature (549)..(605): n is a, c, g, or t
  misc_feature (1074)..(1074): n is a, c, g, or t
  misc_feature (1138)..(1138): n is a, c, g, or t
  misc_feature (1285)..(1342): n is a, c, g, or t

SEQ ID NO: 113427 - DNA, 956 bp, Homo Sapiens; identical to SEQ ID NO: 96958

SEQ ID NO: 113428 - DNA, 1052 bp, Homo Sapiens; identical to SEQ ID NO: 96959
  misc_feature (22)..(22): n is a, c, g, or t
  misc_feature (895)..(926): n is a, c, g, or t
  misc_feature (1018)..(1018): n is a, c, g, or t

SEQ ID NO: 113429 - DNA, 1069 bp, Homo Sapiens; identical to SEQ ID NO: 96960

SEQ ID NO: 113430 - DNA, 677 bp, Homo Sapiens; identical to SEQ ID NO: 96966
  misc_feature (147)..(398): n is a, c, g, or t
  misc_feature (537)..(579): n is a, c, g, or t

SEQ ID NO: 113431 - DNA, 986 bp, Homo Sapiens; identical to SEQ ID NO: 96967
  misc_feature (69)..(320): n is a, c, g, or t
  misc_feature (902)..(922): n is a, c, g, or t

SEQ ID NO: 113432 - DNA, 906 bp, Homo Sapiens; identical to SEQ ID NO: 96972
  misc_feature (650)..(651): n is a, c, g, or t
  misc_feature (654)..(655): n is a, c, g, or t
  misc_feature (657)..(657): n is a, c, g, or t
  misc_feature (660)..(660): n is a, c, g, or t
  misc_feature (668)..(669): n is a, c, g, or t
  misc_feature (674)..(674): n is a, c, g, or t
  misc_feature (694)..(702): n is a, c, g, or t

SEQ ID NO: 113433 - DNA, 1097 bp, Homo Sapiens; identical to SEQ ID NO: 96973

SEQ ID NO: 113434 - DNA, 774 bp, Homo Sapiens; identical to SEQ ID NO: 97036

SEQ ID NO: 113435 - DNA, 1138 bp, Homo Sapiens; identical to SEQ ID NO: 97037

SEQ ID NO: 113436 - DNA, 688 bp, Homo Sapiens; identical to SEQ ID NO: 97039

SEQ ID NO: 113437 - DNA, 917 bp, Homo Sapiens; identical to SEQ ID NO: 97040

SEQ ID NO: 113438 - DNA, 1062 bp, Homo Sapiens; identical to SEQ ID NO: 97056

SEQ ID NO: 113439 - DNA, 1319 bp, Homo Sapiens; identical to SEQ ID NO: 97057

SEQ ID NO: 113440 - DNA, 771 bp, Homo Sapiens; identical to SEQ ID NO: 97058
  misc_feature (727)..(727): n is a, c, g, or t
  misc_feature (738)..(738): n is a, c, g, or t

SEQ ID NO: 113441 - DNA, 714 bp, Homo Sapiens; identical to SEQ ID NO: 97069

SEQ ID NO: 113442 - DNA, 1193 bp, Homo Sapiens; identical to SEQ ID NO: 97070
  misc_feature (1026)..(1087): n is a, c, g, or t

SEQ ID NO: 113443 - DNA, 1703 bp, Homo Sapiens; identical to SEQ ID NO: 97071
  misc_feature (1642)..(1642): n is a, c, g, or t

SEQ ID NO: 113444 - DNA, 905 bp, Homo Sapiens; identical to SEQ ID NO: 97072

SEQ ID NO: 113445 - DNA, 1016 bp, Homo Sapiens; identical to SEQ ID NO: 97073

SEQ ID NO: 113446 - DNA, 865 bp, Homo Sapiens; identical to SEQ ID NO: 97074
  misc_feature (15)..(15): n is a, c, g, or t
  misc_feature (61)..(61): n is a, c, g, or t

SEQ ID NO: 113447 - DNA, 770 bp, Homo Sapiens; identical to SEQ ID NO: 97083
  misc_feature (179)..(179): n is a, c, g, or t
  misc_feature (182)..(182): n is a, c, g, or t

SEQ ID NO: 113448 - DNA, 486 bp, Homo Sapiens; identical to SEQ ID NO: 97084

SEQ ID NO: 113449 - DNA, 1167 bp, Homo Sapiens; identical to SEQ ID NO: 97091

SEQ ID NO: 113450 - DNA, 701 bp, Homo Sapiens; identical to SEQ ID NO: 97092

SEQ ID NO: 113451 - DNA, 700 bp, Homo Sapiens; identical to SEQ ID NO: 97093

SEQ ID NO: 113452 - DNA, 829 bp, Homo Sapiens; identical to SEQ ID NO: 97094

SEQ ID NO: 113453 - DNA, 933 bp, Homo Sapiens; identical to SEQ ID NO: 97095

SEQ ID NO: 113454 - DNA, 908 bp, Homo Sapiens; identical to SEQ ID NO: 97122
  misc_feature (802)..(802): n is a, c, g, or t

SEQ ID NO: 113455 - DNA, 907 bp, Homo Sapiens; identical to SEQ ID NO: 97123

SEQ ID NO: 113456 - DNA, 1689 bp, Homo Sapiens; identical to SEQ ID NO: 97131
  misc_feature (1638)..(1638): n is a, c, g, or t

SEQ ID NO: 113457 - DNA, 754 bp, Homo Sapiens; identical to SEQ ID NO: 97132

SEQ ID NO: 113458 - DNA, 911 bp, Homo Sapiens; identical to SEQ ID NO: 97133

SEQ ID NO: 113459 - DNA, 781 bp, Homo Sapiens; identical to SEQ ID NO: 97134
  misc_feature (651)..(651): n is a, c, g, or t

SEQ ID NO: 113460 - DNA, 811 bp, Homo Sapiens; identical to SEQ ID NO: 97136

SEQ ID NO: 113461 - DNA, 549 bp, Homo Sapiens; identical to SEQ ID NO: 97137

SEQ ID NO: 113462 - DNA, 906 bp, Homo Sapiens; identical to SEQ ID NO: 97140

SEQ ID NO: 113463 - DNA, 712 bp, Homo Sapiens; identical to SEQ ID NO: 97141

SEQ ID NO: 113464 - DNA, 2198 bp, Homo Sapiens; identical to SEQ ID NO: 97153
  misc_feature (1769)..(1803): n is a, c, g, or t

SEQ ID NO: 113465 - DNA, 1058 bp, Homo Sapiens; identical to SEQ ID NO: 97154

SEQ ID NO: 113466 - DNA, 967 bp, Homo Sapiens; identical to SEQ ID NO: 97155
  misc_feature (13)..(13): n is a, c, g, or t
  misc_feature (834)..(835): n is a, c, g, or t

SEQ ID NO: 113467 - DNA, 849 bp, Homo Sapiens; identical to SEQ ID NO: 97173

SEQ ID NO: 113468 - DNA, 140 bp, Homo Sapiens; identical to SEQ ID NO: 97174

SEQ ID NO: 113469 - DNA, 896 bp, Homo Sapiens; identical to SEQ ID NO: 97190

SEQ ID NO: 113470 - DNA, 553 bp, Homo Sapiens; identical to SEQ ID NO: 97191

SEQ ID NO: 113471 - DNA, 857 bp, Homo Sapiens; identical to SEQ ID NO: 97197
  misc_feature (750)..(750): n is a, c, g, or t

SEQ ID NO: 113472 - DNA, 877 bp, Homo Sapiens; identical to SEQ ID NO: 97198

SEQ ID NO: 113473 - DNA, 998 bp, Homo Sapiens; identical to SEQ ID NO: 97200

SEQ ID NO: 113474 - DNA, 587 bp, Homo Sapiens; identical to SEQ ID NO: 97201

SEQ ID NO: 113475 - DNA, 849 bp, Homo Sapiens; identical to SEQ ID NO: 97219
  misc_feature (67)..(127): n is a, c, g, or t

SEQ ID NO: 113476 - DNA, 975 bp, Homo Sapiens; identical to SEQ ID NO: 97220
  misc_feature (324)..(382): n is a, c, g, or t

SEQ ID NO: 113477 - DNA, 911 bp, Homo Sapiens; identical to SEQ ID NO: 97221
  misc_feature (594)..(645): n is a, c, g, or t

SEQ ID NO: 113478 - DNA, 730 bp, Homo Sapiens; identical to SEQ ID NO: 97229

SEQ ID NO: 113479 - DNA, 1003 bp, Homo Sapiens; identical to SEQ ID NO: 97230

SEQ ID NO: 113480 - DNA, 538 bp, Homo Sapiens; identical to SEQ ID NO: 97240

SEQ ID NO: 113481 - DNA, 908 bp, Homo Sapiens; identical to SEQ ID NO: 97241

SEQ ID NO: 113482 - DNA, 1774 bp, Homo Sapiens; identical to SEQ ID NO: 97246

SEQ ID NO: 113483 - DNA, 255 bp, Homo Sapiens; identical to SEQ ID NO: 97247

SEQ ID NO: 113484 - DNA, 1275 bp, Homo Sapiens; identical to SEQ ID NO: 97273
  misc_feature (965)..(983): n is a, c, g, or t

SEQ ID NO: 113485 - DNA, 1244 bp, Homo Sapiens; identical to SEQ ID NO: 97274

SEQ ID NO: 113486 - DNA, 824 bp, Homo Sapiens; identical to SEQ ID NO: 97280

SEQ ID NO: 113487 - DNA, 1120 bp, Homo Sapiens; identical to SEQ ID NO: 97281

SEQ ID NO: 113488 - DNA, 894 bp, Homo Sapiens; identical to SEQ ID NO: 97291

SEQ ID NO: 113489 - DNA, 749 bp, Homo Sapiens; identical to SEQ ID NO: 97292

SEQ ID NO: 113490 - DNA, 2479 bp, Homo Sapiens; identical to SEQ ID NO: 97304

SEQ ID NO: 113491 - DNA, 1017 bp, Homo Sapiens; identical to SEQ ID NO: 97305
  misc_feature (871)..(879): n is a, c, g, or t

SEQ ID NO: 113492 - DNA, 631 bp, Homo Sapiens; identical to SEQ ID NO: 97340

SEQ ID NO: 113493 - DNA, 952 bp, Homo Sapiens; identical to SEQ ID NO: 97341
  misc_feature (731)..(764): n is a, c, g, or t

SEQ ID NO: 113494 - DNA, 790 bp, Homo Sapiens; identical to SEQ ID NO: 97346

SEQ ID NO: 113495 - DNA, 759 bp, Homo Sapiens; identical to SEQ ID NO: 97347

SEQ ID NO: 113496 - DNA, 921 bp, Homo Sapiens; identical to SEQ ID NO: 97348

SEQ ID NO: 113497 - DNA, 1417 bp, Homo Sapiens; identical to SEQ ID NO: 97351
  misc_feature (141)..(188): n is a, c, g, or t

SEQ ID NO: 113498 - DNA, 1271 bp, Homo Sapiens; identical to SEQ ID NO: 97352

SEQ ID NO: 113499 - DNA, 1182 bp, Homo Sapiens; identical to SEQ ID NO: 97360

SEQ ID NO: 113500 - DNA, 1508 bp, Homo Sapiens; identical to SEQ ID NO: 97361
  misc_feature (1421)..(1421): n is a, c, g, or t

SEQ ID NO: 113501 - DNA, 908 bp, Homo Sapiens; identical to SEQ ID NO: 97366

SEQ ID NO: 113502 - DNA, 1015 bp, Homo Sapiens; identical to SEQ ID NO: 97367

SEQ ID NO: 113503 - DNA, 1168 bp, Homo Sapiens; identical to SEQ ID NO: 97370
  misc_feature (256)..(256): n is a, c, g, or t
  misc_feature (1035)..(1035): n is a, c, g, or t

SEQ ID NO: 113504 - DNA, 556 bp, Homo Sapiens; identical to SEQ ID NO: 97371

SEQ ID NO: 113505 - DNA, 748 bp, Homo Sapiens; identical to SEQ ID NO: 97374

SEQ ID NO: 113506 - DNA, 990 bp, Homo Sapiens; identical to SEQ ID NO: 97375

SEQ ID NO: 113507 - DNA, 942 bp, Homo Sapiens; identical to SEQ ID NO: 97383

SEQ ID NO: 113508 - DNA, 1071 bp, Homo Sapiens; identical to SEQ ID NO: 97384

SEQ ID NO: 113509 - DNA, 822 bp, Homo Sapiens; identical to SEQ ID NO: 97385

SEQ ID NO: 113510 - DNA, 796 bp, Homo Sapiens; identical to SEQ ID NO: 97399

SEQ ID NO: 113511 - DNA, 1114 bp, Homo Sapiens; identical to SEQ ID NO: 97400

SEQ ID NO: 113512 - DNA, 473 bp, Homo Sapiens; identical to SEQ ID NO: 97401

SEQ ID NO: 113513 - DNA, 530 bp, Homo Sapiens; identical to SEQ ID NO: 97402
  misc_feature (443)..(455): n is a, c, g, or t

SEQ ID NO: 113514 - DNA, 632 bp, Homo Sapiens; identical to SEQ ID NO: 97403

SEQ ID NO: 113515 - DNA, 1116 bp, Homo Sapiens; identical to SEQ ID NO: 97408

SEQ ID NO: 113516 - DNA, 881 bp, Homo Sapiens; identical to SEQ ID NO: 97409

SEQ ID NO: 113517 - DNA, 816 bp, Homo Sapiens; identical to SEQ ID NO: 97414

SEQ ID NO: 113518 - DNA, 1087 bp, Homo Sapiens; identical to SEQ ID NO: 97415
  misc_feature (982)..(982): n is a, c, g, or t
  misc_feature (1077)..(1077): n is a, c, g, or t

SEQ ID NO: 113519 - DNA, 925 bp, Homo Sapiens; identical to SEQ ID NO: 97422
  misc_feature (651)..(876): n is a, c, g, or t

SEQ ID NO: 113520 - DNA, 223 bp, Homo Sapiens; identical to SEQ ID NO: 97423

SEQ ID NO: 113521 - DNA, 1232 bp, Homo Sapiens; identical to SEQ ID NO: 97451
  misc_feature (1086)..(1086): n is a, c, g, or t
  misc_feature (1114)..(1122): n is a, c, g, or t
  misc_feature (1169)..(1180): n is a, c, g, or t

SEQ ID NO: 113522 - DNA, 528 bp, Homo Sapiens; identical to SEQ ID NO: 97452

SEQ ID NO: 113523 - DNA, 1201 bp, Homo Sapiens; identical to SEQ ID NO: 97453
  misc_feature (942)..(974): n is a, c, g, or t

SEQ ID NO: 113524 - DNA, 993 bp, Homo Sapiens; identical to SEQ ID NO: 97454
  misc_feature (809)..(839): n is a, c, g, or t
  misc_feature (976)..(976): n is a, c, g, or t

SEQ ID NO: 113525 - DNA, 1698 bp, Homo Sapiens; identical to SEQ ID NO: 97458

SEQ ID NO: 113526 - DNA, 262 bp, Homo Sapiens; identical to SEQ ID NO: 97459

SEQ ID NO: 113527 - DNA, 1136 bp, Homo Sapiens; identical to SEQ ID NO: 97470

SEQ ID NO: 113528 - DNA, 1051 bp, Homo Sapiens; identical to SEQ ID NO: 97471
  misc_feature (907)..(907): n is a, c, g, or t

SEQ ID NO: 113529 - DNA, 908 bp, Homo Sapiens; identical to SEQ ID NO: 97474
  misc_feature (406)..(406): n is a, c, g, or t

SEQ ID NO: 113530 - DNA, 1453 bp, Homo Sapiens; identical to SEQ ID NO: 97475

SEQ ID NO: 113531 - DNA, 1477 bp, Homo Sapiens; identical to SEQ ID NO: 97492

SEQ ID NO: 113532 - DNA, 897 bp, Homo Sapiens; identical to SEQ ID NO: 97493
  misc_feature (809)..(809): n is a, c, g, or t

SEQ ID NO: 113533 - DNA, 908 bp, Homo Sapiens; identical to SEQ ID NO: 97495
  misc_feature (56)..(56): n is a, c, g, or t
  misc_feature (78)..(78): n is a, c, g, or t

SEQ ID NO: 113534 - DNA, 1461 bp, Homo Sapiens; identical to SEQ ID NO: 97496
  misc_feature (48)..(48): n is a, c, g, or t
  misc_feature (83)..(83): n is a, c, g, or t
  misc_feature (111)..(111): n is a, c, g, or t
  misc_feature (193)..(193): n is a, c, g, or t
  misc_feature (319)..(369): n is a, c, g, or t

SEQ ID NO: 113535 - DNA, 1355 bp, Homo Sapiens; identical to SEQ ID NO: 97509

SEQ ID NO: 113536 - DNA, 1122 bp, Homo Sapiens; identical to SEQ ID NO: 97510
  misc_feature (101)..(115): n is a, c, g, or t

SEQ ID NO: 113537 - DNA, 648 bp, Homo Sapiens; identical to SEQ ID NO: 97512
  misc_feature (473)..(473): n is a, c, g, or t
  misc_feature (484)..(485): n is a, c, g, or t

SEQ ID NO: 113538 - DNA, 729 bp, Homo Sapiens; identical to SEQ ID NO: 97513

SEQ ID NO: 113539 - DNA, 2001 bp, Homo Sapiens; identical to SEQ ID NO: 97514
  misc_feature (19)..(19): n is a, c, g, or t
  misc_feature (34)..(34): n is a, c, g, or t
  misc_feature (1975)..(1975): n is a, c, g, or t

SEQ ID NO: 113540 - DNA, 1042 bp, Homo Sapiens; identical to SEQ ID NO: 97515
  misc_feature (945)..(945): n is a, c, g, or t

SEQ ID NO: 113541 - DNA, 1088 bp, Homo Sapiens; identical to SEQ ID NO: 97516

SEQ ID NO: 113542 - DNA, 1123 bp, Homo Sapiens; identical to SEQ ID NO: 97517
  misc_feature (76)..(124): n is a, c, g, or t

SEQ ID NO: 113543 - DNA, 902 bp, Homo Sapiens; identical to SEQ ID NO: 97518
  misc_feature (85)..(140): n is a, c, g, or t

SEQ ID NO: 113544 - DNA, 808 bp, Homo Sapiens; identical to SEQ ID NO: 97523

SEQ ID NO: 113545 - DNA, 851 bp, Homo Sapiens; identical to SEQ ID NO: 97524

SEQ ID NO: 113546 - DNA, 875 bp, Homo Sapiens; identical to SEQ ID NO: 97535

SEQ ID NO: 113547 - DNA, 471 bp, Homo Sapiens; identical to SEQ ID NO: 97536

SEQ ID NO: 113548 - DNA, 912 bp, Homo Sapiens; identical to SEQ ID NO: 97537

SEQ ID NO: 113549 - DNA, 1051 bp, Homo Sapiens; identical to SEQ ID NO: 97538
  misc_feature (895)..(895): n is a, c, g, or t

SEQ ID NO: 113550 - DNA, 867 bp, Homo Sapiens; identical to SEQ ID NO: 97539

SEQ ID NO: 113551 - DNA, 979 bp, Homo Sapiens; identical to SEQ ID NO: 97577

SEQ ID NO: 113552 - DNA, 505 bp, Homo Sapiens; identical to SEQ ID NO: 97578

SEQ ID NO: 113553 - DNA, 1509 bp, Homo Sapiens; identical to SEQ ID NO: 97584

SEQ ID NO: 113554 - DNA, 885 bp, Homo Sapiens; identical to SEQ ID NO: 97585
  misc_feature (775)..(775): n is a, c, g, or t

SEQ ID NO: 113555 - DNA, 1588 bp, Homo Sapiens; identical to SEQ ID NO: 97599

SEQ ID NO: 113556 - DNA, 577 bp, Homo Sapiens; identical to SEQ ID NO: 97600

SEQ ID NO: 113557 - DNA, 1066 bp, Homo Sapiens; identical to SEQ ID NO: 97605

SEQ ID NO: 113558 - DNA, 959 bp, Homo Sapiens; identical to SEQ ID NO: 97606

SEQ ID NO: 113559 - DNA, 776 bp, Homo Sapiens; identical to SEQ ID NO: 97611

SEQ ID NO: 113560 - DNA, 1266 bp, Homo Sapiens; identical to SEQ ID NO: 97612
  misc_feature (62)..(107): n is a, c, g, or t

SEQ ID NO: 113561 - DNA, 889 bp, Homo Sapiens; identical to SEQ ID NO: 97618

SEQ ID NO: 113562 - DNA, 826 bp, Homo Sapiens; identical to SEQ ID NO: 97619

SEQ ID NO: 113563 - DNA, 2228 bp, Homo Sapiens; identical to SEQ ID NO: 97620
  misc_feature (1641)..(1702): n is a, c, g, or t

SEQ ID NO: 113564 - DNA, 858 bp, Homo Sapiens; identical to SEQ ID NO: 97621

SEQ ID NO: 113565 - DNA, 1360 bp, Homo Sapiens; identical to SEQ ID NO: 97622
  misc_feature (190)..(310): n is a, c, g, or t

SEQ ID NO: 113566 - DNA, 1142 bp, Homo Sapiens; identical to SEQ ID NO: 97623
  misc_feature (1049)..(1075): n is a, c, g, or t

SEQ ID NO: 113567 - DNA, 555 bp, Homo Sapiens; identical to SEQ ID NO: 97624
  misc_feature (470)..(496): n is a, c, g, or t

SEQ ID NO: 113568 - DNA, 820 bp, Homo Sapiens; identical to SEQ ID NO: 97626

SEQ ID NO: 113569 - DNA, 1096 bp, Homo Sapiens; identical to SEQ ID NO: 97627

SEQ ID NO: 113570 - DNA, 998 bp, Homo Sapiens; identical to SEQ ID NO: 97631
  misc_feature (629)..(629): n is a, c, g, or t
  misc_feature (842)..(842): n is a, c, g, or t

SEQ ID NO: 113571 - DNA, 922 bp, Homo Sapiens; identical to SEQ ID NO: 97632

SEQ ID NO: 113572 - DNA, 1449 bp, Homo Sapiens; identical to SEQ ID NO: 97644

SEQ ID NO: 113573 - DNA, 606 bp, Homo Sapiens; identical to SEQ ID NO: 97645

SEQ ID NO: 113574 - DNA, 889 bp, Homo Sapiens; identical to SEQ ID NO: 97653

SEQ ID NO: 113575 - DNA, 874 bp, Homo Sapiens; identical to SEQ ID NO: 97654

SEQ ID NO: 113576 - DNA, 842 bp, Homo Sapiens; identical to SEQ ID NO: 97665

SEQ ID NO: 113577 - DNA, 1506 bp, Homo Sapiens; identical to SEQ ID NO: 97666

SEQ ID NO: 113578 - DNA, 505 bp, Homo Sapiens; identical to SEQ ID NO: 97667

SEQ ID NO: 113579 - DNA, 850 bp, Homo Sapiens; identical to SEQ ID NO: 97681

SEQ ID NO: 113580 - DNA, 468 bp, Homo Sapiens; identical to SEQ ID NO: 97682

SEQ ID NO: 113581 - DNA, 1151 bp, Homo Sapiens; identical to SEQ ID NO: 97708

SEQ ID NO: 113582 - DNA, 861 bp, Homo Sapiens; identical to SEQ ID NO: 97709

SEQ ID NO: 113583 - DNA, 942 bp, Homo Sapiens; identical to SEQ ID NO: 97710
  misc_feature (724)..(724): n is a, c, g, or t

SEQ ID NO: 113584 - DNA, 732 bp, Homo Sapiens; identical to SEQ ID NO: 97711
  misc_feature (572)..(572): n is a, c, g, or t

SEQ ID NO: 113585 - DNA, 997 bp, Homo Sapiens; identical to SEQ ID NO: 97778
  misc_feature (62)..(70): n is a, c, g, or t
  misc_feature (237)..(246): n is a, c, g, or t
  misc_feature (357)..(370): n is a, c, g, or t
  misc_feature (378)..(453): n is a, c, g, or t
  misc_feature (757)..(831): n is a, c, g, or t

SEQ ID NO: 113586 - DNA, 720 bp, Homo Sapiens; identical to SEQ ID NO: 97779

SEQ ID NO: 113587 - DNA, 886 bp, Homo Sapiens; identical to SEQ ID NO: 97823
  misc_feature (778)..(786): n is a, c, g, or t
  misc_feature (827)..(827): n is a, c, g, or t

SEQ ID NO: 113588 - DNA, 396 bp, Homo Sapiens; identical to SEQ ID NO: 97824

SEQ ID NO: 113589 - DNA, 877 bp, Homo Sapiens; identical to SEQ ID NO: 97827

SEQ ID NO: 113590 - DNA, 881 bp, Homo Sapiens; identical to SEQ ID NO: 97828
  misc_feature (733)..(733): n is a, c, g, or t

SEQ ID NO: 113591 - DNA, 1840 bp, Homo Sapiens; identical to SEQ ID NO: 97839
  misc_feature (130)..(130): n is a, c, g, or t
  misc_feature (143)..(143): n is a, c, g, or t
  misc_feature (152)..(152): n is a, c, g, or t
  misc_feature (280)..(280): n is a, c, g, or t
  misc_feature (305)..(305): n is a, c, g, or t
  misc_feature (784)..(792): n is a, c, g, or t
  misc_feature (839)..(879): n is a, c, g, or t
  misc_feature (1494)..(1518): n is a, c, g, or t

SEQ ID NO: 113592 - DNA, 522 bp, Homo Sapiens; identical to SEQ ID NO: 97840
  misc_feature (220)..(244): n is a, c, g, or t

SEQ ID NO: 113593 - DNA, 775 bp, Homo Sapiens; identical to SEQ ID NO: 97846

SEQ ID NO: 113594 - DNA, 443 bp, Homo Sapiens; identical to SEQ ID NO: 97847

SEQ ID NO: 113595 - DNA, 761 bp, Homo Sapiens; identical to SEQ ID NO: 15839

SEQ ID NO: 113596 - DNA, 603 bp, Homo Sapiens; identical to SEQ ID NO: 15840
  misc_feature (540)..(540): n is a, c, g, or t
  misc_feature (543)..(544): n is a, c, g, or t
  misc_feature (549)..(549): n is a, c, g, or t
  misc_feature (551)..(552): n is a, c, g, or t
  misc_feature (556)..(556): n is a, c, g, or t
  misc_feature (558)..(558): n is a, c, g, or t
  misc_feature (589)..(589): n is a, c, g, or t

SEQ ID NO: 113597 - DNA, 1229 bp, Homo Sapiens; identical to SEQ ID NO: 3568
  misc_feature (427)..(427): n is a, c, g, or t
  misc_feature (1055)..(1055): n is a, c, g, or t

SEQ ID NO: 113598 - DNA, 618 bp, Homo Sapiens; identical to SEQ ID NO: 97875

SEQ ID NO: 113599 - DNA, 1665 bp, Homo Sapiens; identical to SEQ ID NO: 15407
  misc_feature (577)..(587): n is a, c, g, or t
  misc_feature (645)..(665): n is a, c, g, or t
  misc_feature (1341)..(1341): n is a, c, g, or t

SEQ ID NO: 113600 - DNA, 914 bp, Homo Sapiens; identical to SEQ ID NO: 15408
  misc_feature (38)..(38): n is a, c, g, or t

SEQ ID NO: 113601 - DNA, 1598 bp, Homo Sapiens; identical to SEQ ID NO: 97882
  misc_feature (293)..(293): n is a, c, g, or t
  misc_feature (1268)..(1346): n is a, c, g, or t
  misc_feature (1353)..(1412): n is a, c, g, or t
  misc_feature (1465)..(1484): n is a, c, g, or t

SEQ ID NO: 113602 - DNA, 518 bp, Homo Sapiens; identical to SEQ ID NO: 97883
  misc_feature (302)..(302): n is a, c, g, or t
  misc_feature (400)..(400): n is a, c, g, or t

SEQ ID NO: 113603 - DNA, 747 bp, Homo Sapiens; identical to SEQ ID NO: 97884

SEQ ID NO: 113604 - DNA, 819 bp, Homo Sapiens; identical to SEQ ID NO: 97961
  misc_feature (49)..(49): n is a, c, g, or t
  misc_feature (147)..(147): n is a, c, g, or t

SEQ ID NO: 113605 - DNA, 1084 bp, Homo Sapiens; identical to SEQ ID NO: 97962

SEQ ID NO: 113606 - DNA, 878 bp, Homo Sapiens; identical to SEQ ID NO: 97967

SEQ ID NO: 113607 - DNA, 504 bp, Homo Sapiens; identical to SEQ ID NO: 97968

SEQ ID NO: 113608 - DNA, 1016 bp, Homo Sapiens; identical to SEQ ID NO: 97972
  misc_feature (466)..(485): n is a, c, g, or t
  misc_feature (909)..(909): n is a, c, g, or t
  misc_feature (919)..(919): n is a, c, g, or t

SEQ ID NO: 113609 - DNA, 412 bp, Homo Sapiens; identical to SEQ ID NO: 97973
  misc_feature (33)..(33): n is a, c, g, or t

SEQ ID NO: 113610 - DNA, 1098 bp, Homo Sapiens; identical to SEQ ID NO: 98023
  misc_feature (1)..(1): n is a, c, g, or t

SEQ ID NO: 113611 - DNA, 425 bp, Homo Sapiens; identical to SEQ ID NO: 98024

SEQ ID NO: 113612 - DNA, 1107 bp, Homo Sapiens; identical to SEQ ID NO: 98040

SEQ ID NO: 113613 - DNA, 853 bp, Homo Sapiens; identical to SEQ ID NO: 98041

SEQ ID NO: 113614 - DNA, 1468 bp, Homo Sapiens; identical to SEQ ID NO: 98071
  misc_feature (1181)..(1181): n is a, c, g, or t
  misc_feature (1201)..(1201): n is a, c, g, or t
  misc_feature (1206)..(1207): n is a, c, g, or t

SEQ ID NO: 113615 - DNA, 982 bp, Homo Sapiens; identical to SEQ ID NO: 98072
  misc_feature (768)..(768): n is a, c, g, or t
  misc_feature (776)..(777): n is a, c, g, or t
  misc_feature (785)..(785): n is a, c, g, or t
  misc_feature (794)..(794): n is a, c, g, or t
  misc_feature (826)..(826): n is a, c, g, or t
  misc_feature (834)..(835): n is a, c, g, or t
  misc_feature (842)..(842): n is a, c, g, or t
  misc_feature (845)..(846): n is a, c, g, or t
  misc_feature (860)..(860): n is a, c, g, or t
  misc_feature (868)..(868): n is a, c, g, or t
  misc_feature (938)..(938): n is a, c, g, or t
  misc_feature (972)..(972): n is a, c, g, or t

SEQ ID NO: 113616 - DNA, 1894 bp, Homo Sapiens; identical to SEQ ID NO: 98117

SEQ ID NO: 113617 - DNA, 395 bp, Homo Sapiens; identical to SEQ ID NO: 98118

SEQ ID NO: 113618 - DNA, 1013 bp, Homo Sapiens; identical to SEQ ID NO: 98135

SEQ ID NO: 113619 - DNA, 1150 bp, Homo Sapiens; identical to SEQ ID NO: 98136
  misc_feature (1058)..(1058): n is a, c, g, or t

SEQ ID NO: 113620 - DNA, 1112 bp, Homo Sapiens; identical to SEQ ID NO: 98138

SEQ ID NO: 113621 - DNA, 840 bp, Homo Sapiens; identical to SEQ ID NO: 98139
  misc_feature (723)..(723): n is a, c, g, or t
  misc_feature (768)..(768): n is a, c, g, or t
  misc_feature (782)..(782): n is a, c, g, or t

SEQ ID NO: 113622 - DNA, 797 bp, Homo Sapiens; identical to SEQ ID NO: 98140
  misc_feature (36)..(36): n is a, c, g, or t
  misc_feature (124)..(124): n is a, c, g, or t

SEQ ID NO: 113623 - DNA, 858 bp, Homo Sapiens; identical to SEQ ID NO: 98141

SEQ ID NO: 113624 - DNA, 839 bp, Homo Sapiens; identical to SEQ ID NO: 98142

SEQ ID NO: 113625 - DNA, 799 bp, Homo Sapiens; identical to SEQ ID NO: 98143

SEQ ID NO: 113626 - DNA, 798 bp, Homo Sapiens; identical to SEQ ID NO: 98144
  misc_feature (704)..(704): n is a, c, g, or t

SEQ ID NO: 113627 - DNA, 917 bp, Homo Sapiens; identical to SEQ ID NO: 98145
  misc_feature (737)..(737): n is a, c, g, or t

SEQ ID NO: 113628 - DNA, 947 bp, Homo Sapiens; identical to SEQ ID NO: 98146

SEQ ID NO: 113629 - DNA, 748 bp, Homo Sapiens; identical to SEQ ID NO: 98147

SEQ ID NO: 113630 - DNA, 812 bp, Homo Sapiens; identical to SEQ ID NO: 98153

SEQ ID NO: 113631 - DNA, 725 bp, Homo Sapiens; identical to SEQ ID NO: 98154
  misc_feature (452)..(452): n is a, c, g, or t
  misc_feature (541)..(541): n is a, c, g, or t

SEQ ID NO: 113632 - DNA, 862 bp, Homo Sapiens; identical to SEQ ID NO: 98155
  misc_feature (174)..(174): n is a, c, g, or t

SEQ ID NO: 113633 - DNA, 842 bp, Homo Sapiens; identical to SEQ ID NO: 98156
  misc_feature (702)..(702): n is a, c, g, or t

SEQ ID NO: 113634 - DNA, 1763 bp, Homo Sapiens; identical to SEQ ID NO: 98160
  misc_feature (23)..(23): n is a, c, g, or t

SEQ ID NO: 113635 - DNA, 845 bp, Homo Sapiens; identical to SEQ ID NO: 98161

SEQ ID NO: 113636 - DNA, 1495 bp, Homo Sapiens; identical to SEQ ID NO: 98165
  misc_feature (1451)..(1451): n is a, c, g, or t

SEQ ID NO: 113637 - DNA, 849 bp, Homo Sapiens; identical to SEQ ID NO: 98166
  misc_feature (825)..(825): n is a, c, g, or t

SEQ ID NO: 113638 - DNA, 654 bp, Homo Sapiens; identical to SEQ ID NO: 98173
  misc_feature (601)..(601): n is a, c, g, or t
  misc_feature (634)..(634): n is a, c, g, or t

SEQ ID NO: 113639 - DNA, 846 bp, Homo Sapiens; identical to SEQ ID NO: 98174

SEQ ID NO: 113640 - DNA, 1248 bp, Homo Sapiens; identical to SEQ ID NO: 98177
  misc_feature (263)..(293): n is a, c, g, or t
  misc_feature (308)..(329): n is a, c, g, or t
  misc_feature (788)..(848): n is a, c, g, or t

SEQ ID NO: 113641 - DNA, 946 bp, Homo Sapiens; identical to SEQ ID NO: 98178
  misc_feature (257)..(318): n is a, c, g, or t

SEQ ID NO: 113642 - DNA, 875 bp, Homo Sapiens; identical to SEQ ID NO: 98179

SEQ ID NO: 113643 - DNA, 900 bp, Homo Sapiens; identical to SEQ ID NO: 98180
  misc_feature (769)..(769): n is a, c, g, or t

SEQ ID NO: 113644 - DNA, 866 bp, Homo Sapiens; identical to SEQ ID NO: 98181

SEQ ID NO: 113645 - DNA, 970 bp, Homo Sapiens; identical to SEQ ID NO: 98182

SEQ ID NO: 113646 - DNA, 843 bp, Homo Sapiens; identical to SEQ ID NO: 98183

SEQ ID NO: 113647 - DNA, 558 bp, Homo Sapiens; identical to SEQ ID NO: 98185

SEQ ID NO: 113648 - DNA, 925 bp, Homo Sapiens; identical to SEQ ID NO: 98186

SEQ ID NO: 113649 - DNA, 832 bp, Homo Sapiens; identical to SEQ ID NO: 98204
  misc_feature (455)..(455): n is a, c, g, or t
  misc_feature (775)..(783): n is a, c, g, or t

SEQ ID NO: 113650 - DNA, 895 bp, Homo Sapiens; identical to SEQ ID NO: 98205

SEQ ID NO: 113651 - DNA, 1101 bp, Homo Sapiens; identical to SEQ ID NO: 98206
  misc_feature (941)..(941): n is a, c, g, or t
  misc_feature (990)..(990): n is a, c, g, or t
  misc_feature (1037)..(1037): n is a, c, g, or t

SEQ ID NO: 113652 - DNA, 814 bp, Homo Sapiens; identical to SEQ ID NO: 98207
  misc_feature (792)..(792): n is a, c, g, or t
  misc_feature (804)..(804): n is a, c, g, or t

SEQ ID NO: 113653 - DNA, 941 bp, Homo Sapiens; identical to SEQ ID NO: 98234

SEQ ID NO: 113654 - DNA, 1019 bp, Homo Sapiens; identical to SEQ ID NO: 98235
  misc_feature (992)..(993): n is a, c, g, or t

SEQ ID NO: 113655 - DNA, 763 bp, Homo Sapiens; identical to SEQ ID NO: 98253

SEQ ID NO: 113656 - DNA, 860 bp, Homo Sapiens; identical to SEQ ID NO: 98254

SEQ ID NO: 113657 - DNA, 941 bp, Homo Sapiens; identical to SEQ ID NO: 98264

SEQ ID NO: 113658 - DNA, 1045 bp, Homo Sapiens; identical to SEQ ID NO: 98265

SEQ ID NO: 113659 - DNA, 1123 bp, Homo Sapiens; identical to SEQ ID NO: 98266

SEQ ID NO: 113660 - DNA, 538 bp, Homo Sapiens; identical to SEQ ID NO: 98267

SEQ ID NO: 113661 - DNA, 1186 bp, Homo Sapiens; identical to SEQ ID NO: 98274
  misc_feature (1041)..(1041): n is a, c, g, or t

SEQ ID NO: 113662 - DNA, 996 bp, Homo Sapiens; identical to SEQ ID NO: 98275

SEQ ID NO: 113663 - DNA, 842 bp, Homo Sapiens; identical to SEQ ID NO: 98278

SEQ ID NO: 113664 - DNA, 520 bp, Homo Sapiens; identical to SEQ ID NO: 98279
  misc_feature (26)..(26): n is a, c, g, or t
  misc_feature (68)..(68): n is a, c, g, or t

SEQ ID NO: 113665 - DNA, 893 bp, Homo Sapiens; identical to SEQ ID NO: 98282

SEQ ID NO: 113666 - DNA, 1113 bp, Homo Sapiens; identical to SEQ ID NO: 98283

SEQ ID NO: 113667 - DNA, 785 bp, Homo Sapiens; identical to SEQ ID NO: 98293

SEQ ID NO: 113668 - DNA, 881 bp, Homo Sapiens; identical to SEQ ID NO: 98294

SEQ ID NO: 113669 - DNA, 1547 bp, Homo Sapiens; identical to SEQ ID NO: 98335

SEQ ID NO: 113670 - DNA, 624 bp, Homo Sapiens; identical to SEQ ID NO: 98336

SEQ ID NO: 113671 - DNA, 767 bp, Homo Sapiens; identical to SEQ ID NO: 98352

SEQ ID NO: 113672 - DNA, 856 bp, Homo Sapiens; identical to SEQ ID NO: 98353

SEQ ID NO: 113673 - DNA, 825 bp, Homo Sapiens; identical to SEQ ID NO: 98364

SEQ ID NO: 113674 - DNA, 702 bp, Homo Sapiens; identical to SEQ ID NO: 98365

SEQ ID NO: 113675 - DNA, 846 bp, Homo Sapiens; identical to SEQ ID NO: 98370
  misc_feature (58)..(58): n is a, c, g, or t
  misc_feature (143)..(143): n is a, c, g, or t
  misc_feature (486)..(530): n is a, c, g, or t

SEQ ID NO: 113676 - DNA, 1283 bp, Homo Sapiens; identical to SEQ ID NO: 98371

SEQ ID NO: 113677 - DNA, 1111 bp, Homo Sapiens; identical to SEQ ID NO: 98377
  misc_feature (905)..(905): n is a, c, g, or t
  misc_feature (1007)..(1007): n is a, c, g, or t
  misc_feature (1025)..(1025): n is a, c, g, or t

SEQ ID NO: 113678 - DNA, 694 bp, Homo Sapiens; identical to SEQ ID NO: 98378

SEQ ID NO: 113679 - DNA, 1018 bp, Homo Sapiens; identical to SEQ ID NO: 98379
  misc_feature (225)..(261): n is a, c, g, or t
  misc_feature (900)..(900): n is a, c, g, or t
  misc_feature (931)..(931): n is a, c, g, or t
  misc_feature (934)..(936): n is a, c, g, or t

SEQ ID NO: 113680 - DNA, 1771 bp, Homo Sapiens; identical to SEQ ID NO: 98389
  misc_feature (1457)..(1457): n is a, c, g, or t
  misc_feature (1669)..(1719): n is a, c, g, or t

SEQ ID NO: 113681 - DNA, 1035 bp, Homo Sapiens; identical to SEQ ID NO: 98390
  misc_feature (20)..(20): n is a, c, g, or t
  misc_feature (63)..(63): n is a, c, g, or t
  misc_feature (215)..(215): n is a, c, g, or t
  misc_feature (386)..(424): n is a, c, g, or t
  misc_feature (830)..(957): n is a, c, g, or t

SEQ ID NO: 113682 - DNA, 1292 bp, Homo Sapiens; identical to SEQ ID NO: 98391

SEQ ID NO: 113683 - DNA, 1021 bp, Homo Sapiens; identical to SEQ ID NO: 98392
  misc_feature (437)..(437): n is a, c, g, or t

SEQ ID NO: 113684 - DNA, 878 bp, Homo Sapiens; identical to SEQ ID NO: 98393
  misc_feature (76)..(203): n is a, c, g, or t

SEQ ID NO: 113685 - DNA, 789 bp, Homo Sapiens; identical to SEQ ID NO: 98397

SEQ ID NO: 113686 - DNA, 1082 bp, Homo Sapiens; identical to SEQ ID NO: 98398
  misc_feature (444)..(444): n is a, c, g, or t
  misc_feature (579)..(588): n is a, c, g, or t

SEQ ID NO: 113687 - DNA, 1078 bp, Homo Sapiens; identical to SEQ ID NO: 98439

SEQ ID NO: 113688 - DNA, 811 bp, Homo Sapiens; identical to SEQ ID NO: 98440

SEQ ID NO: 113689 - DNA, 1279 bp, Homo Sapiens; identical to SEQ ID NO: 98446

SEQ ID NO: 113690 - DNA, 505 bp, Homo Sapiens; identical to SEQ ID NO: 98447

SEQ ID NO: 113691 - DNA, 982 bp, Homo Sapiens; identical to SEQ ID NO: 98468

SEQ ID NO: 113692 - DNA, 1114 bp, Homo Sapiens; identical to SEQ ID NO: 98469

SEQ ID NO: 113693 - DNA, 991 bp, Homo Sapiens; identical to SEQ ID NO: 98475
  misc_feature (964)..(964): n is a, c, g, or t
  misc_feature (979)..(979): n is a, c, g, or t

SEQ ID NO: 113694 - DNA, 548 bp, Homo Sapiens; identical to SEQ ID NO: 98476

SEQ ID NO: 113695 - DNA, 1622 bp, Homo Sapiens; identical to SEQ ID NO: 98488

SEQ ID NO: 113696 - DNA, 873 bp, Homo Sapiens; identical to SEQ ID NO: 98489

SEQ ID NO: 113697 - DNA, 1160 bp, Homo Sapiens; identical to SEQ ID NO: 98528
  misc_feature (984)..(984): n is a, c, g, or t
  misc_feature (1102)..(1102): n is a, c, g, or t

SEQ ID NO: 113698 - DNA, 774 bp, Homo Sapiens; identical to SEQ ID NO: 98529

SEQ ID NO: 113699 - DNA, 1031 bp, Homo Sapiens; identical to SEQ ID NO: 98549

SEQ ID NO: 113700 - DNA, 1010 bp, Homo Sapiens; identical to SEQ ID NO: 98550

SEQ ID NO: 113701 - DNA, 1405 bp, Homo Sapiens; identical to SEQ ID NO: 98553
  misc_feature (522)..(531): n is a, c, g, or t
  misc_feature (604)..(614): n is a, c, g, or t

SEQ ID NO: 113702 - DNA, 486 bp, Homo Sapiens; identical to SEQ ID NO: 98554

SEQ ID NO: 113703 - DNA, 857 bp, Homo Sapiens; identical to SEQ ID NO: 98555

SEQ ID NO: 113704 - DNA, 858 bp, Homo Sapiens; identical to SEQ ID NO: 98556

SEQ ID NO: 113705 - DNA, 987 bp, Homo Sapiens; identical to SEQ ID NO: 98559
  misc_feature (63)..(63): n is a, c, g, or t

SEQ ID NO: 113706 - DNA, 559 bp, Homo Sapiens; identical to SEQ ID NO: 98560
  misc_feature (72)..(189): n is a, c, g, or t

SEQ ID NO: 113707 - DNA, 966 bp, Homo Sapiens; identical to SEQ ID NO: 98581
  misc_feature (832)..(832): n is a, c, g, or t

SEQ ID NO: 113708 - DNA, 1081 bp, Homo Sapiens; identical to SEQ ID NO: 98582

SEQ ID NO: 113709 - DNA, 1561 bp, Homo Sapiens; identical to SEQ ID NO: 98585
  misc_feature (148)..(148): n is a, c, g, or t
  misc_feature (1194)..(1269): n is a, c, g, or t

SEQ ID NO: 113710 - DNA, 858 bp, Homo Sapiens; identical to SEQ ID NO: 98586

SEQ ID NO: 113711 - DNA, 1119 bp, Homo Sapiens; identical to SEQ ID NO: 98595

SEQ ID NO: 113712 - DNA, 279 bp, Homo Sapiens; identical to SEQ ID NO: 98596

SEQ ID NO: 113713 - DNA, 974 bp, Homo Sapiens; identical to SEQ ID NO: 98640

SEQ ID NO: 113714 - DNA, 661 bp, Homo Sapiens; identical to SEQ ID NO: 98641

SEQ ID NO: 113715 - DNA, 1056 bp, Homo Sapiens; identical to SEQ ID NO: 98657

SEQ ID NO: 113716 - DNA, 852 bp, Homo Sapiens; identical to SEQ ID NO: 98658

SEQ ID NO: 113717 - DNA, 721 bp, Homo Sapiens; identical to SEQ ID NO: 98675

SEQ ID NO: 113718 - DNA, 797 bp, Homo Sapiens; identical to SEQ ID NO: 98676

SEQ ID NO: 113719 - DNA, 815 bp, Homo Sapiens; identical to SEQ ID NO: 98677

SEQ ID NO: 113720 - DNA, 1025 bp, Homo Sapiens; identical to SEQ ID NO: 98678
  misc_feature (906)..(907): n is a, c, g, or t
  misc_feature (914)..(914): n is a, c, g, or t
  misc_feature (947)..(947): n is a, c, g, or t
  misc_feature (964)..(964): n is a, c, g, or t
  misc_feature (990)..(990): n is a, c, g, or t

SEQ ID NO: 113721 - DNA, 915 bp, Homo Sapiens; identical to SEQ ID NO: 98685
  misc_feature (874)..(874): n is a, c, g, or t

SEQ ID NO: 113722 - DNA, 341 bp, Homo Sapiens; identical to SEQ ID NO: 98686

SEQ ID NO: 113723 - DNA, 823 bp, Homo Sapiens; identical to SEQ ID NO: 98699

SEQ ID NO: 113724 - DNA, 1088 bp, Homo Sapiens; identical to SEQ ID NO: 98700

SEQ ID NO: 113725 - DNA, 983 bp, Homo Sapiens; identical to SEQ ID NO: 98705

SEQ ID NO: 113726 - DNA, 923 bp, Homo Sapiens; identical to SEQ ID NO: 98706

SEQ ID NO: 113727 - DNA, 1114 bp, Homo Sapiens; identical to SEQ ID NO: 98737

SEQ ID NO: 113728 - DNA, 374 bp, Homo Sapiens; identical to SEQ ID NO: 98738

SEQ ID NO: 113729 - DNA, 853 bp, Homo Sapiens; identical to SEQ ID NO: 98751

SEQ ID NO: 113730 - DNA, 869 bp, Homo Sapiens; identical to SEQ ID NO: 98752

SEQ ID NO: 113731 - DNA, 1463 bp, Homo Sapiens; identical to SEQ ID NO: 98796

SEQ ID NO: 113732 - DNA, 1311 bp, Homo Sapiens; identical to SEQ ID NO: 98797
  misc_feature (324)..(372): n is a, c, g, or t

SEQ ID NO: 113733 - DNA, 1327 bp, Homo Sapiens; identical to SEQ ID NO: 98817
  misc_feature (779)..(1039): n is a, c, g, or t
  misc_feature (1052)..(1052): n is a, c, g, or t
  misc_feature (1066)..(1066): n is a, c, g, or t
  misc_feature (1071)..(1109): n is a, c, g, or t
  misc_feature (1141)..(1141): n is a, c, g, or t
  misc_feature (1146)..(1146): n is a, c, g, or t
  misc_feature (1221)..(1221): n is a, c, g, or t
  misc_feature (1225)..(1225): n is a, c, g, or t

SEQ ID NO: 113734 - DNA, 1213 bp, Homo Sapiens; identical to SEQ ID NO: 98818

SEQ ID NO: 113735 - DNA, 771 bp, Homo Sapiens; identical to SEQ ID NO: 98819

SEQ ID NO: 113736 - DNA, 413 bp, Homo Sapiens; identical to SEQ ID NO: 98820

SEQ ID NO: 113737 - DNA, 927 bp, Homo Sapiens; identical to SEQ ID NO: 98824

SEQ ID NO: 113738 - DNA, 878 bp, Homo Sapiens; identical to SEQ ID NO: 98825

SEQ ID NO: 113739 - DNA, 1141 bp, Homo Sapiens; identical to SEQ ID NO: 98840
  misc_feature (958)..(958): n is a, c, g, or t
  misc_feature (1029)..(1029): n is a, c, g, or t

SEQ ID NO: 113740 - DNA, 975 bp, Homo Sapiens; identical to SEQ ID NO: 98841

SEQ ID NO: 113741 - DNA, 860 bp, Homo Sapiens; identical to SEQ ID NO: 98851

SEQ ID NO: 113742 - DNA, 808 bp, Homo Sapiens; identical to SEQ ID NO: 98852

SEQ ID NO: 113743 - DNA, 907 bp, Homo Sapiens; identical to SEQ ID NO: 98853

SEQ ID NO: 113744 - DNA, 805 bp, Homo Sapiens; identical to SEQ ID NO: 98868

SEQ ID NO: 113745 - DNA, 903 bp, Homo Sapiens; identical to SEQ ID NO: 98869

SEQ ID NO: 113746 - DNA, 1581 bp, Homo Sapiens; identical to SEQ ID NO: 98871
  misc_feature (1278)..(1312): n is a, c, g, or t

SEQ ID NO: 113747 - DNA, 1107 bp, Homo Sapiens; identical to SEQ ID NO: 98872
  misc_feature (26)..(26): n is a, c, g, or t

SEQ ID NO: 113748 - DNA, 1167 bp, Homo Sapiens; identical to SEQ ID NO: 98894

SEQ ID NO: 113749 - DNA, 1521 bp, Homo Sapiens; identical to SEQ ID NO: 98895
  misc_feature (645)..(645): n is a, c, g, or t
  misc_feature (803)..(803): n is a, c, g, or t
  misc_feature (1281)..(1281): n is a, c, g, or t

SEQ ID NO: 113750 - DNA, 744 bp, Homo Sapiens; identical to SEQ ID NO: 98914

SEQ ID NO: 113751 - DNA, 1100 bp, Homo Sapiens; identical to SEQ ID NO: 98915

SEQ ID NO: 113752 - DNA, 1154 bp, Homo Sapiens; identical to SEQ ID NO: 98934

SEQ ID NO: 113753 - DNA, 774 bp, Homo Sapiens; identical to SEQ ID NO: 98935

SEQ ID NO: 113754 - DNA, 1082 bp, Homo Sapiens; identical to SEQ ID NO: 98938

SEQ ID NO: 113755 - DNA, 1102 bp, Homo Sapiens; identical to SEQ ID NO: 98939
  misc_feature (895)..(895): n is a, c, g, or t

SEQ ID NO: 113756 - DNA, 880 bp, Homo Sapiens; identical to SEQ ID NO: 98960

SEQ ID NO: 113757 - DNA, 1215 bp, Homo Sapiens; identical to SEQ ID NO: 98961

SEQ ID NO: 113758 - DNA, 1469 bp, Homo Sapiens; identical to SEQ ID NO: 99006
  misc_feature (209)..(351): n is a, c, g, or t
  misc_feature (353)..(354): n is a, c, g, or t
  misc_feature (358)..(359): n is a, c, g, or t
  misc_feature (364)..(511): n is a, c, g, or t
  misc_feature (513)..(515): n is a, c, g, or t
  misc_feature (517)..(517): n is a, c, g, or t
  misc_feature (519)..(526): n is a, c, g, or t
  misc_feature (528)..(532): n is a, c, g, or t
  misc_feature (534)..(541): n is a, c, g, or t
  misc_feature (543)..(706): n is a, c, g, or t

SEQ ID NO: 113759 - DNA, 1033 bp, Homo Sapiens; identical to SEQ ID NO: 99007

SEQ ID NO: 113760 - DNA, 1064 bp, Homo Sapiens; identical to SEQ ID NO: 99009
  misc_feature (927)..(927): n is a, c, g, or t

SEQ ID NO: 113761 - DNA, 794 bp, Homo Sapiens; identical to SEQ ID NO: 99010

SEQ ID NO: 113762 - DNA, 653 bp, Homo Sapiens; identical to SEQ ID NO: 99011

SEQ ID NO: 113763 - DNA, 666 bp, Homo Sapiens; identical to SEQ ID NO: 99012

SEQ ID NO: 113764 - DNA, 1016 bp, Homo Sapiens; identical to SEQ ID NO: 99014

SEQ ID NO: 113765 - DNA, 533 bp, Homo Sapiens; identical to SEQ ID NO: 99015

SEQ ID NO: 113766 - DNA, 598 bp, Homo Sapiens; identical to SEQ ID NO: 99069

SEQ ID NO: 113767 - DNA, 582 bp, Homo Sapiens; identical to SEQ ID NO: 99070

SEQ ID NO: 113768 - DNA, 957 bp, Homo Sapiens; identical to SEQ ID NO: 99085

SEQ ID NO: 113769 - DNA, 759 bp, Homo Sapiens; identical to SEQ ID NO: 99086

SEQ ID NO: 113770 - DNA, 1060 bp, Homo Sapiens; identical to SEQ ID NO: 99119

SEQ ID NO: 113771 - DNA, 810 bp, Homo Sapiens; identical to SEQ ID NO: 99120

SEQ ID NO: 113772 - DNA, 1100 bp, Homo Sapiens; identical to SEQ ID NO: 99132
  misc_feature (1013)..(1013): n is a, c, g, or t
  misc_feature (1015)..(1017): n is a, c, g, or t
  misc_feature (1030)..(1060): n is a, c, g, or t

SEQ ID NO: 113773 - DNA, 343 bp, Homo Sapiens; identical to SEQ ID NO: 99133

SEQ ID NO: 113774 - DNA, 1125 bp, Homo Sapiens; identical to SEQ ID NO: 99135
  misc_feature (647)..(678): n is a, c, g, or t

SEQ ID NO: 113775 - DNA, 319 bp, Homo Sapiens; identical to SEQ ID NO: 99136

SEQ ID NO: 113776 - DNA, 1257 bp, Homo Sapiens; identical to SEQ ID NO: 99181
  misc_feature (1151)..(1197): n is a, c, g, or t

SEQ ID NO: 113777 - DNA, 592 bp, Homo Sapiens; identical to SEQ ID NO: 99182

SEQ ID NO: 113778 - DNA, 899 bp, Homo Sapiens; identical to SEQ ID NO: 99202

SEQ ID NO: 113779 - DNA, 828 bp, Homo Sapiens; identical to SEQ ID NO: 99203

SEQ ID NO: 113780 - DNA, 686 bp, Homo Sapiens; identical to SEQ ID NO: 99209
  misc_feature (358)..(380): n is a, c, g, or t
  misc_feature (405)..(550): n is a, c, g, or t
  misc_feature (580)..(640): n is a, c, g, or t

SEQ ID NO: 113781 - DNA, 986 bp, Homo Sapiens; identical to SEQ ID NO: 99210
  misc_feature (400)..(461): n is a, c, g, or t

SEQ ID NO: 113782 - DNA, 967 bp, Homo Sapiens; identical to SEQ ID NO: 99214

SEQ ID NO: 113783 - DNA, 333 bp, Homo Sapiens; identical to SEQ ID NO: 99215

SEQ ID NO: 113784 - DNA, 140 bp, Homo Sapiens; identical to SEQ ID NO: 99251

SEQ ID NO: 113785 - DNA, 450 bp, Homo Sapiens; identical to SEQ ID NO: 99252

SEQ ID NO: 113786 - DNA, 891 bp, Homo Sapiens; identical to SEQ ID NO: 99270

SEQ ID NO: 113787 - DNA, 836 bp, Homo Sapiens; identical to SEQ ID NO: 99271

SEQ ID NO: 113788 - DNA, 1061 bp, Homo Sapiens; identical to SEQ ID NO: 99341

SEQ ID NO: 113789 - DNA, 442 bp, Homo Sapiens; identical to SEQ ID NO: 99342
  misc_feature (410)..(410): n is a, c, g, or t

SEQ ID NO: 113790 - DNA, 471 bp, Homo Sapiens; identical to SEQ ID NO: 99379

SEQ ID NO: 113791 - DNA, 188 bp, Homo Sapiens; identical to SEQ ID NO: 99380

SEQ ID NO: 113792 - DNA, 905 bp, Homo Sapiens; identical to SEQ ID NO: 99412
  misc_feature (747)..(747): n is a, c, g, or t

SEQ ID NO: 113793 - DNA, 943 bp, Homo Sapiens; identical to SEQ ID NO: 99413

SEQ ID NO: 113794 - DNA, 1187 bp, Homo Sapiens; identical to SEQ ID NO: 99414
  misc_feature (835)..(835): n is a, c, g, or t
  misc_feature (1070)..(1078): n is a, c, g, or t
  misc_feature (1086)..(1087): n is a, c, g, or t
  misc_feature (1092)..(1092): n is a, c, g, or t
  misc_feature (1094)..(1094): n is a, c, g, or t

SEQ ID NO: 113795 - DNA, 913 bp, Homo Sapiens; identical to SEQ ID NO: 99415

SEQ ID NO: 113796 - DNA, 948 bp, Homo Sapiens; identical to SEQ ID NO: 99416

SEQ ID NO: 113797 - DNA, 905 bp, Homo Sapiens; identical to SEQ ID NO: 99417

SEQ ID NO: 113798 - DNA, 865 bp, Homo Sapiens; identical to SEQ ID NO: 99418

SEQ ID NO: 113799 - DNA, 758 bp, Homo Sapiens; identical to SEQ ID NO: 99450
  misc_feature (619)..(619): n is a, c, g, or t
  misc_feature (652)..(652): n is a, c, g, or t

SEQ ID NO: 113800 - DNA, 536 bp, Homo Sapiens; identical to SEQ ID NO: 99451
  misc_feature (381)..(394): n is a, c, g, or t

SEQ ID NO: 113801 - DNA, 534 bp, Homo Sapiens; identical to SEQ ID NO: 99462

SEQ ID NO: 113802 - DNA, 500 bp, Homo Sapiens; identical to SEQ ID NO: 99463

SEQ ID NO: 113803 - DNA, 615 bp, Homo Sapiens; identical to SEQ ID NO: 99464

SEQ ID NO: 113804 - DNA, 157 bp, Homo Sapiens; identical to SEQ ID NO: 99530

SEQ ID NO: 113805 - DNA, 1253 bp, Homo Sapiens; identical to SEQ ID NO: 99531
  misc_feature (292)..(292): n is a, c, g, or t

SEQ ID NO: 113806 - DNA, 1021 bp, Homo Sapiens; identical to SEQ ID NO: 99535

SEQ ID NO: 113807 - DNA, 541 bp, Homo Sapiens; identical to SEQ ID NO: 99536

SEQ ID NO: 113808 - DNA, 725 bp, Homo Sapiens; identical to SEQ ID NO: 99686
  misc_feature (684)..(684): n is a, c, g, or t
  misc_feature (709)..(709): n is a, c, g, or t

SEQ ID NO: 113809 - DNA, 511 bp, Homo Sapiens; identical to SEQ ID NO: 99687

SEQ ID NO: 113810 - DNA, 530 bp, Homo Sapiens; identical to SEQ ID NO: 100015
  misc_feature (161)..(208): n is a, c, g, or t
  misc_feature (243)..(285): n is a, c, g, or t

SEQ ID NO: 113811 - DNA, 482 bp, Homo Sapiens; identical to SEQ ID NO: 100016
  misc_feature (161)..(212): n is a, c, g, or t
  misc_feature (247)..(289): n is a, c, g, or t

SEQ ID NO: 113812 - DNA, 384 bp, Homo Sapiens; identical to SEQ ID NO: 100061

SEQ ID NO: 113813 - DNA, 362 bp, Homo Sapiens; identical to SEQ ID NO: 100062

SEQ ID NO: 113814 - DNA, 537 bp, Homo Sapiens; identical to SEQ ID NO: 100138

SEQ ID NO: 113815 - DNA, 500 bp, Homo Sapiens; identical to SEQ ID NO: 100139

SEQ ID NO: 113816 - DNA, 501 bp, Homo Sapiens; identical to SEQ ID NO: 100236

SEQ ID NO: 113817 - DNA, 625 bp, Homo Sapiens; identical to SEQ ID NO: 100237

SEQ ID NO: 113818 - DNA, 310 bp, Homo Sapiens; identical to SEQ ID NO: 100271

SEQ ID NO: 113819 - DNA, 263 bp, Homo Sapiens; identical to SEQ ID NO: 100272

SEQ ID NO: 113820 - DNA, 496 bp, Homo Sapiens; identical to SEQ ID NO: 100463

SEQ ID NO: 113821 - DNA, 699 bp, Homo Sapiens; identical to SEQ ID NO: 100464

SEQ ID NO: 113822 - DNA, 274 bp, Homo Sapiens; identical to SEQ ID NO: 100584
  misc_feature (52)..(138): n is a, c, g, or t

SEQ ID NO: 113823 - DNA, 461 bp, Homo Sapiens; identical to SEQ ID NO: 100585
  misc_feature (174)..(219): n is a, c, g, or t

SEQ ID NO: 113824 - DNA, 564 bp, Homo Sapiens; identical to SEQ ID NO: 100607
  misc_feature (111)..(312): n is a, c, g, or t

SEQ ID NO: 113825 - DNA, 495 bp, Homo Sapiens; identical to SEQ ID NO: 100608
  misc_feature (111)..(312): n is a, c, g, or t

SEQ ID NO: 113826 - DNA, 518 bp, Homo Sapiens; identical to SEQ ID NO: 100734

SEQ ID NO: 113827 - DNA, 633 bp, Homo Sapiens; identical to SEQ ID NO: 100735

SEQ ID NO: 113828 - DNA, 880 bp, Homo Sapiens; identical to SEQ ID NO: 100883
  misc_feature (32)..(33): n is a, c, g, or t
  misc_feature (55)..(55): n is a, c, g, or t
  misc_feature (670)..(670): n is a, c, g, or t
  misc_feature (711)..(711): n is a, c, g, or t
  misc_feature (719)..(719): n is a, c, g, or t
  misc_feature (799)..(799): n is a, c, g, or t
  misc_feature (844)..(844): n is a, c, g, or t

SEQ ID NO: 113829 - DNA, 648 bp, Homo Sapiens; identical to SEQ ID NO: 100884
  misc_feature (35)..(35): n is a, c, g, or t
  misc_feature (139)..(139): n is a, c, g, or t
  misc_feature (332)..(389): n is a, c, g, or t

SEQ ID NO: 113830 - DNA, 296 bp, Homo Sapiens; identical to SEQ ID NO: 101082

SEQ ID NO: 113831 - DNA, 203 bp, Homo Sapiens; identical to SEQ ID NO: 101083
  misc_feature (188)..(188): n is a, c, g, or t

SEQ ID NO: 113832 - DNA, 642 bp, Homo Sapiens; identical to SEQ ID NO: 101585

SEQ ID NO: 113833 - DNA, 1001 bp, Homo Sapiens; identical to SEQ ID NO: 101586

SEQ ID NO: 113834 - DNA, 685 bp, Homo Sapiens; identical to SEQ ID NO: 101657
  misc_feature (269)..(284): n is a, c, g, or t
  misc_feature (498)..(565): n is a, c, g, or t
  misc_feature (665)..(665): n is a, c, g, or t

SEQ ID NO: 113835 - DNA, 542 bp, Homo Sapiens; identical to SEQ ID NO: 101658
  misc_feature (40)..(40): n is a, c, g, or t

SEQ ID NO: 113836 - DNA, 266 bp, Homo Sapiens; identical to SEQ ID NO: 101703

SEQ ID NO: 113837 - DNA, 600 bp, Homo Sapiens; identical to SEQ ID NO: 101704
  misc_feature (188)..(279): n is a, c, g, or t
  misc_feature (378)..(431): n is a, c, g, or t
  misc_feature (433)..(479): n is a, c, g, or t

SEQ ID NO: 113838 - DNA, 534 bp, Homo Sapiens; identical to SEQ ID NO: 101734

SEQ ID NO: 113839 - DNA, 647 bp, Homo Sapiens; identical to SEQ ID NO: 101735
  misc_feature (586)..(586): n is a, c, g, or t
  misc_feature (608)..(608): n is a, c, g, or t

SEQ ID NO: 113840 - DNA, 636 bp, Homo Sapiens; identical to SEQ ID NO: 101821
  misc_feature (11)..(11): n is a, c, g, or t
  misc_feature (91)..(357): n is a, c, g, or t

SEQ ID NO: 113841 - DNA, 500 bp, Homo Sapiens; identical to SEQ ID NO: 101822
  misc_feature (44)..(295): n is a, c, g, or t

SEQ ID NO: 113842 - DNA, 794 bp, Homo Sapiens; identical to SEQ ID NO: 102443

SEQ ID NO: 113843 - DNA, 265 bp, Homo Sapiens; identical to SEQ ID NO: 102444

SEQ ID NO: 113844 - DNA, 540 bp, Homo Sapiens; identical to SEQ ID NO: 102757
  misc_feature (241)..(419): n is a, c, g, or t

SEQ ID NO: 113845 - DNA, 501 bp, Homo Sapiens; identical to SEQ ID NO: 102758
  misc_feature (78)..(126): n is a, c, g, or t

SEQ ID NO: 113846 - DNA, 632 bp, Homo Sapiens; identical to SEQ ID NO: 102943

SEQ ID NO: 113847 - DNA, 334 bp, Homo Sapiens; identical to SEQ ID NO: 102944

SEQ ID NO: 113848 - DNA, 592 bp, Homo Sapiens; identical to SEQ ID NO: 102945

SEQ ID NO: 113849 - DNA, 289 bp, Homo Sapiens; identical to SEQ ID NO: 102946

SEQ ID NO: 113850 - DNA, 447 bp, Homo Sapiens; identical to SEQ ID NO: 102948

SEQ ID NO: 113851 - DNA, 376 bp, Homo Sapiens; identical to SEQ ID NO: 102949

SEQ ID NO: 113852 - DNA, 344 bp, Homo Sapiens; identical to SEQ ID NO: 103018

SEQ ID NO: 113853 - DNA, 527 bp, Homo Sapiens; identical to SEQ ID NO: 103019

SEQ ID NO: 113854 - DNA, 546 bp, Homo Sapiens; identical to SEQ ID NO: 103084

SEQ ID NO: 113855 - DNA, 398 bp, Homo Sapiens; identical to SEQ ID NO: 103085

SEQ ID NO: 113856 - DNA, 446 bp, Homo Sapiens; identical to SEQ ID NO: 103230
  misc_feature (198)..(250): n is a, c, g, or t

SEQ ID NO: 113857 - DNA, 422 bp, Homo Sapiens; identical to SEQ ID NO: 103231
  misc_feature (169)..(221): n is a, c, g, or t

SEQ ID NO: 113858 - DNA, 348 bp, Homo Sapiens; identical to SEQ ID NO: 103394

SEQ ID NO: 113859 - DNA, 345 bp, Homo Sapiens; identical to SEQ ID NO: 103395

SEQ ID NO: 113860 - DNA, 386 bp, Homo Sapiens; identical to SEQ ID NO: 103585

SEQ ID NO: 113861 - DNA, 431 bp, Homo Sapiens; identical to SEQ ID NO: 103586

SEQ ID NO: 113862 - DNA, 305 bp, Homo Sapiens; identical to SEQ ID NO: 103606

SEQ ID NO: 113863 - DNA, 363 bp, Homo Sapiens; identical to SEQ ID NO: 103607

SEQ ID NO: 113864 - DNA, 304 bp, Homo Sapiens; identical to SEQ ID NO: 103610

SEQ ID NO: 113865 - DNA, 302 bp, Homo Sapiens; identical to SEQ ID NO: 103611

SEQ ID NO: 113866 - DNA, 416 bp, Homo Sapiens; identical to SEQ ID NO: 103702

SEQ ID NO: 113867 - DNA, 712 bp, Homo Sapiens; identical to SEQ ID NO: 103703

SEQ ID NO: 113868 - DNA, 687 bp, Homo Sapiens; identical to SEQ ID NO: 104038

SEQ ID NO: 113869 - DNA, 774 bp, Homo Sapiens; identical to SEQ ID NO: 104039

SEQ ID NO: 113870 - DNA, 401 bp, Homo Sapiens; identical to SEQ ID NO: 104079

SEQ ID NO: 113871 - DNA, 537 bp, Homo Sapiens; identical to SEQ ID NO: 104080

SEQ ID NO: 113872 - DNA, 618 bp, Homo Sapiens; identical to SEQ ID NO: 104385

SEQ ID NO: 113873 - DNA, 296 bp, Homo Sapiens; identical to SEQ ID NO: 104386

SEQ ID NO: 113874 - DNA, 54 bp, Homo Sapiens
cagtcgacggtaccggacatatgcccgggaattcggccattacggccgggtgct

SEQ ID NO: 113875 - DNA, 425 bp, Homo Sapiens
cagtcgacggtaccggacatatgcccgggaattcggccattacggccggggtaagatcctgagctatcaggaaattgactgaatgaaacgaacaatcatatttaaataacgtacacattgctgttgtaggtggctacagtgtcaatggaggatctggggaaaatacttatggtcggaagtcgttggggcaagagctgagggttaacaatgtgaccagccctgagttcaccagtgttcagcatggcagtcgtgctttagccaccaaagacatgaggaaatcacaggagagatcaatgtcttatggtgatgagtctcgactgtcaaatcttcttcagaggatcacccgggaaaacgacagagaccgaagattggccactgtaaagcagttgaaagaatttattcagcaaccagaaaataagctggta

SEQ ID NO: 113876 - DNA, 1233 bp, Homo Sapiens
gccatataggttgaactataaacacgttggttaaaaaagcaggctggtacggtcggaatcccgggatatcgtcgacccacgcgtcgtccttctgcgtgggcgtggcgggcgcgcgcgggtctccgtggaagtccgtttcgtgagcagcgccaagggaaaggggctgtttgccacacagctcatccggaagggggagaccatcttcgtagaacggcccctggtggctgcacagtttctctggaatgcactttatcgctaccgagcctgtgaccactgccttagggcactagagaaggcagaggagaatgcccagaggctgaccgggaaaccaggccaggttctgcctcacccagagctgtgcactgtgcgcaaagacctccaccagaactgtccccattgccaagtgatgtactgcagtgcagaatgtcggttggcagccactgagcaataccaccaggtcctgtgcccaggcccctcccaggatgaccccttgcatcctctcaataagcttcaggaggcatggaggagtattcactacccacctgagactgcaagcatcatgttgatggctaggatggtggccacagtgaagcaggcgaaggacaaggaccgttggatcagactcttttcccagttttgtaacaaaacagccaatgaagaggaggaaattgtccataaacttctgggagacaaattcaagggccaactggaacttctgcggagactcttcacagaggccctctatgaggaagcagtcagccagtggttcactccagatggattccggtctctctttgctcttgttgggaccaatggccaaggaatcgggaccagctccctaagccagtgggtccatgcctgtgacactctggagttgaagcctcaggaccgtgagcagcttgacgccttcattgaccagctatacaaggacatcgaggcagcaactggagagtttcttaactgtgaaggatctggcctctttgtgcttcagagctgctgcaaccacagttgtgtgcccaatgcagagacctcctttccagaaaacaacttccttttgcatgtcactgctctggaggatattaagccaggagaggaaatttgtatcagctacttggactgctgtcagcgggagcgcagccgccacagccgccacaagatcctcagggagaactatctatttgtctgttcctgtcccaaatgcctggcagaggctgatgaacccaatgtgacctc

SEQ ID NO: 113877 - DNA, 599 bp, Homo Sapiens
  misc_feature (102)..(132): n is a, c, g, or t
actccttaaagttccatttgctaatgattaatacactgtttgggctggccagtttttcatgcatgcagcttgacgattgagcacagtcaggcctttgtattnnnnnnnnnnnnnnnnnnnnnnnnnnnnnnncctattcaaatgggttctagttcaatttgtttagtataaattgtcatagctggtttactgaaaacaaacacatttaaaattggtttacctcaggatgacgtgcagaaaaatgggtgaaggataaaccgttgagacgtggccccactggtaggatggtcctcttgtacttcgtgtgctccgacccatggtgacgatgacacaccctggtggcatgcccgtgtatgttggtttagcgttgtctgcattgttctagagtgaaacaggtgtcaggctgtcactgttcacacaaatttttaataagaaacatttaccaagggagcatctttggactctctgtttttaaaaccttctgaaccatgacttggagccggcagagtaggctgtggctgtggacttcagcacaaccatcaacattgctgttcaaagaaattacagtttacgtccattccaagttgtaaatgctagtc

SEQ ID NO: 113878 - DNA, 1001 bp, Homo Sapiens
ggaggctatgtgaactatagaacagtgtgttaaaaaaagcaggctggtaccggtccggaatcccgggatatcgtcgacccacgcgtccgcttcaaggccggtgccgctttggagatcggtgctggaacgaacatcccggtgctaggggtgcaggaggaggacggcagcaaccgcagcagcagccttcaggtaataatagacgtggatggaatacaactagccagagatattccaatgtcatccagccatccagtttctccaaatccacaccatgggggggcagcgagagatcaagaaaagccatatttcagttcttttgattctggagcttcaactaacaggaaggaaggctttggattgtcgtgagaacccatttgcttcacttagtcctgatgagcagaaagatgagaaagaaacgttctggaaggaattgtaaaagatatggaggttgggaatcatcagggcagtggatgtttgctgtttattcaccagtgaaaaagaaacctaatatttcagatgtgttcggagtttattccttctggtggggtccgtggtctcgctggctcaggagtgaagctgtggaccttcgcggtgagtgttacggcgtcttaaggcgggccgtctggagttgtttgttcctcccagtgggttcgtggtctcgctggcttcaggagtgaggctgaagaccttcgcggtttcacgggacattgcaccagaggactgaggcttgaataccataacttgtttaagcagcaatactttaccagagttatcctaaaagctgtccaacgtttactaatccactggggaccgggaatgacccggacagcctattctttcactaaggtgccttcgctcgacgtaaggacgggtaacaaccgcccggttggttggacgccaggcgcactttgttccaggtccgcaaaaggggagtgccacttcttaacaaccggtgtggcgcctgacctggttggcccccaggggcccaaagcatcccctgg

SEQ ID NO: 113879 - DNA, 1889 bp, Homo Sapiens
  misc_feature (109)..(185): n is a, c, g, or t
  misc_feature (190)..(198): n is a, c, g, or t
  misc_feature (443)..(453): n is a, c, g, or t
  misc_feature (767)..(888): n is a, c, g, or t
  misc_feature (932)..(1155): n is a, c, g, or t
  misc_feature (1162)..(1406): n is a, c, g, or t
  misc_feature (1412)..(1472): n is a, c, g, or t
  misc_feature (1508)..(1603): n is a, c, g, or t
  misc_feature (1636)..(1752): n is a, c, g, or t
  misc_feature (1796)..(1849): n is a, c, g, or t
ggcgcgattgtggaactatagaacaagtgtggttcaaaaaaagcaggctggtaccggccggaattcccgggatatcgtcgacccacgcgtcgcccacgcgtcgatctcnnnnnnnnnnnnnnnnnnnnnnnnnnnnnnnnnnnnnnnnnnnnnnnnnnnnnnnnnnnnnnnnnnnnnnnnnnnnngagannnnnnnnncgcgcacgaagacttctctctcctgtggggggccccacaattcggcgcgccgaccccgatgttttgtgggtacaaggggggcccccatatgagggggggtgatatatttactacactagtgaggagcgagtggggaggagtattattatataaaagatggtgaaagaggagggagagaaacagcgggtgaaaaggaggagagagattactttgtgggaaaaaagagggaaccttattataggttnnnnnnnnnnnagagagaaaagtatggtgtggagagaaaaactattatcattgtgggagtgtatatattaagaagctgcattatagtgggggtgataatatattagatatatatttaagagagaggtgataatagagaggggggtgagataaaacaaaatgggtgggagtatctatatatagggaggggggagaaggataagaaagaaatgttttgtggagtgaatatagggagtagggattttgtatttatattatgtgagatagagtatatatatatatctatcgacgaggagcgagggggagattttattttatattttatnnnnnnnnnnnnnnnnnnnnnnnnnnnnnnnnnnnnnnnnnnnnnnnnnnnnnnnnnnnnnnnnnnnnnnnnnnnnnnnnnnnnnnnnnnnnnnnnnnnnnnnnnnnnnnnnnnnnnnnnnnggatggcaaagagagaggaagcagatagcagttaaagaaggaannnnnnnnnnnnnnnnnnnnnnnnnnnnnnnnnnnnnnnnnnnnnnnnnnnnnnnnnnnnnnnnnnnnnnnnnnnnnnnnnnnnnnnnnnnnnnnnnnnnnnnnnnnnnnnnnnnnnnnnnnnnnnnnnnnnnnnnnnnnnnnnnnnnnnnnnnnnnnnnnnnnnnnnnnnnnnnnnnnnnnnnnnnnnnnnnnnnnnnnnnnnnnnnnnnnnnnnnnnnnnnnaatgacnnnnnnnnnnnnnnnnnnnnnnnnnnnnnnnnnnnnnnnnnnnnnnnnnnnnnnnnnnnnnnnnnnnnnnnnnnnnnnnnnnnnnnnnnnnnnnnnnnnnnnnnnnnnnnnnnnnnnnnnnnnnnnnnnnnnnnnnnnnnnnnnnnnnnnnnnnnnnnnnnnnnnnnnnnnnnnnnnnnnnnnnnnnnnnnnnnnnnnnnnnnnnnnnnnnnnnnnnnnnnnnnnnnnnnnnnnnnnnnnnnnnnaggacnnnnnnnnnnnnnnnnnnnnnnnnnnnnnnnnnnnnnnnnnnnnnnnnnnnnnnnnnnnnncacatagagacgggagcaggaggtaagggcgagcannnnnnnnnnnnnnnnnnnnnnnnnnnnnnnnnnnnnnnnnnnnnnnnnnnnnnnnnnnnnnnnnnnnnnnnnnnnnnnnnnnnnnnnnnnnnnnnggacagacagcgcaccgaagagagcaaaaaagnnnnnnnnnnnnnnnnnnnnnnnnnnnnnnnnnnnnnnnnnnnnnnnnnnnnnnnnnnnnnnnnnnnnnnnnnnnnnnnnnnnnnnnnnnnnnnnnnnnnnnnnnnnnnnnnnnnnncgagcgcccaacgagcagacagaaagcgacggagaagcggaacnnnnnnnnnnnnnnnnnnnnnnnnnnnnnnnnnnnnnnnnnnnnnnnnnnnnnncaaaggcacagagcagacaaagcaggagaaagagagaaag

SEQ ID NO: 113880 - DNA, 923 bp, Homo Sapiens
cagtcgacggtaccggacatatgcccgggaattcggccattacggccggggagggcgggcctgtttccgggaggcgcgtggggcttgaggccgagaacggcccttgctgccaccaacatggagactttgtaccgtgtcccgttcttagtgctcgaatgtcccaacctgaagctgaagaagccgccctggttgcacatgccgtcggccatgactgtgtatgctctggtggtggtgtcttacttcctcatcaccggaggaataatttatgatgttattgttgaacctccaagtgtcggttctatgactgatgaacatgggcatcagaggccagtagctttcttggcctacaggggctatctgatgggttagagtgcctttgagaagaaatcagtggatactgggatttgctcctgtcaatgaagttttaaaggctgtaccaatcctctaatatgaaatgtggaaaagaatgaagagcagcagtaaaagaaatatctagtgaaaaaacaggaagcgtattgaagcttggactagaatttcttcttggtattaaagagacaagtttatcacagaattttttttcctgctggcctattgctataccaatgatgttgagtggcattttctttttagtttttcattaaaatatattccatatctacaactataatatcaaataaagtgattattttttacaaccctcttaacattttttggagatgacatttctgattttcagaaattaacataaaatccagaagcaagattccgtaagctgagaactctggacagttgatcagctttacctatggtgctttgcctttaactagagtgtgtgatggtagattatttcagatatgtatgtaaaactgtttcctgaacaataagatgtatgaacggagcagaaataaatactttttctaatt

SEQ ID NO: 113881 - DNA, 54 bp, Homo Sapiens
cagtcgacggtaccggacatatgcccgggaattcggccattacggccgggcctc

SEQ ID NO: 113882 - DNA, 53 bp, Homo Sapiens
gatcccggccgtaatggccgaattcccgggcatatgtccggtaccgtcgactg

SEQ ID NO: 113883 - DNA, 946 bp, Homo Sapiens
ggcccagcatgtgactatagaaacacgtggttacaaaaaagcaggctggtacggtccggaatcccgggatatcgtcgacccacgcgtcgccggttcgctgtcccgcctggcgtcccttcgcctcgggtgctaactttgagtacatcatcgcagaaaaaagagggaagaataacaccgtggggttgatccaactgaaccgccccaaggccctcaatgcactttgcgatggcctgattgacgagctcaaccaggccctgaagatcttcgaggaggacccggccgtgggggccattgtcctcaccggcggggataaggcctttgcagctggagctgatatcaaggaaatgcagaacctgagtttccaggactgttactccagcaagttcttgaagcactgggaccacctcacccaggtcaagaagccagtcatcgctgctgtcaatggctatgcctttggcgggggctgtgagcttgccatgatgtgtgatatcatctatgccggtgagaaggcccagtttgcacagccggagatcttaataggaaccatcccaggtgcgggcggcacccagagactcacccgtgctgttgggaagtcgctggcgatggagatggtcctcaccggtgaccggatctcagcccaggacgccaagcaagcaggtcttgtcagcaagatttgtcctgttgagacactggtggaagaagccatccagtgtgcagaaaaaatgcagcaattctaaaatggtagtagcgatggcaaagaatcagtgaatgccagtttgaaatgacattaacagaaggagtagtgggaagaactctttaatgcaaccttgcactgtggaacggaagaagggtgaccgggtgggacagcgcacgccactcaaggacagtggaacagtgccggtcaactcgtgggagaaaggccggcgtaaacagaacacccttagaa

SEQ ID NO: 113884 - DNA, 549 bp, Homo Sapiens
gtgcttcaaataaatagaaaaatagttataatattgatcttcaactttgccattcatgcttctatgcatattaggctacgtattccacattgaaagcatgagagtgtctaggcctttgaatggcatatgccatttctgggaaatgcatctggaggctaagtattgctttctacaaataattgccccctttgttttaaaaagaagaaatgcatattgaagtagtttgatgatttgtttggcatataggaagcacgctggtgctaagtattttttaaatggttatgtaagcaaagctgaactgtaaatcttcaggaatatgtattaagattgtggaatgggtgtaagacaattggtagggggtgaaagtgggtttgattaaatggatcttttatggccctatgatctatcctttacttgaaagcttttgaaaagtggaaaggtcattttgttgcatttccccatttcttgtttttaaaagaccaacaaatctcaagccctataaatggcttgtattgaacttttacatttgaattaaagatgttaaacatg

SEQ ID NO: 113885 - DNA, 1011 bp, Homo Sapiens
cagtcgacggtaccggacatatgcccgggaattcggccattacggccgggaggaacgagatggcggttctctggaggctgagtgccgtttgcggtgccctaggaggccgagctctgttgcttcgaactccagtggtcagacctgctcatatctcagcatttcttcaggaccgacctatcccagaatggtgtggagtgcagcacatacacttgtcaccgagccaccattctggctccaaggctgcatctctccactggactagcgagagggttgtcagtgttttgctcctgggtctgcttccggctgcttatttgaatccttgctctgcgatggactattccctggctgcagccctcactcttcatggtcactgtctccagtgccagatagtccacagctgtcctctcttggaaaatcagattcatctttctctgaaatttccggactattttataaagatgaagccttggagaaagatttaaatgttttcaaacaggtacatgggaaatactcctcagaaaaaagccgtctttgggcagtgtcggggtctgccatgtgttgcaccgctgctgaccacagtggaagaggctccacggggcatctctgctcgagtctggggacattttcctaagtggctcaatggctctctacttcgaattggacctgggaaattcgagtttgggaaggataagtacaatcattggtttgatgggatggcgctgcttcaccagttcagaatggcaaagggcacagtgacatacaggagcaagtttctacagagtgatacattataaggccaacagtgctaaaaaccgaatgtgatctcagaatttggcacactggctctccggatccatgcaagaatgttttgaacgtttcatgtccaggtttgagctgcctggtaagctgcaggtgatagggacgattattaaactatacgatattttacctttatacaacataattttgaaatagattaggggattttgcacaggttttaaactgttttcc

SEQ ID NO: 113886 - DNA, 1414 bp, Homo Sapiens
ggcagtaactataacggtctctaaggtagcgaggcctgggtggcgaattcggcacgaggcgaaaaaaataaccgtccgcgacgccgagacaaaccggacccgcaaccaccatgaacagcaaaggtcaatatccaacacagccaacctaccctgtgcagcctcctgggaatccagtataccctcagaccttgcatcttcctcaggctccaccctataccgatgctccacctgcctactcagagctctatcgtccgagctttgtgcacccaggggctgccacagtccccaccatgtcagccgcatttcctggagcctctctgtatcttcccatggcccagtctgtggctgttgggcctttaggttccacaatccccatggcttattatccagtcgggcccatctatccacctggctccacagtgctggtggaaggagggtatgatgcaggtgccagatttggagctggggctactgctggcaacattcctcctccacctcctggatgccctcccaatgctgctcagcttgcagtcatgcaggggagccaacgtcctcgtaactcagcggaagggggaacttcttcatgggtggttcagatggtggctacaccatctggtgaggaaccaaggccacctttgtgccgggaaagacatcacataccttcagcacttctcacaagtgtaacttgctttagtcatattaacctgaagttgcagtttagacacatgttgtcaggcggctgtcttactggtgcccaaactttcaggcacttttcaaatttaataaggaaccatgtaatggtagcagtacctccctaaagcattttgaggtaggggaggtatccattcataaaatgaatgtgggtgaagccgccctaaggattttcctttaatttctctggagtaatactgtaccatactggtctttgcttttagtaataaaacatcaaattaggtttggagggaactttgatcttcctaagaattaaagttgccaaattattctgattggtctttaatctcctttaagtctttgatatatattacttggtataaatggaacgcattagttgtctgccttttcctttccatcccttgccccacccatcccatctccaaccctagtcttccatttcctccccgccagtctccattgaatcaatgggtgcaggacagaaagccagtcagactaatttccttctttcctcgcacttctcccccactcgtcatcttttaactagtgtttcacaaggatcctcctgaaaacctctctgtgccccaagtacagatccccttactttctggctttccgatccccttcaggcaaaaaggggagggtgccctatggggccctccctcataaggttggtctctggcatacccgaaaccaaacccaaatttggctttgggggccc

SEQ ID NO: 113887 - DNA, 171 bp, Homo Sapiens
cagtcgacggtaccggacatatgcccgggaattcggccattacggccgggggactttgaaaaaagaattcctcgtgaagagatgttacaaatgcaagatattgtactaaatgaagttaaaaaagtggattctgaatacattgctacagtctgtggcagtttcagaagaggt

SEQ ID NO: 113888 - DNA, 121 bp, Homo Sapiens
acagttgtatgtttgctgattatttatgacctgaaataatatatttcttcttctaagaagacattttgttacataaggatgacttttttatacaatggaataaattatggcatttctattg

SEQ ID NO: 113889 - DNA, 1344 bp, Homo Sapiens
  misc_feature (799)..(826): n is a, c, g, or t
  misc_feature (1283)..(1292): n is a, c, g, or t
gccaagatatgtggtggcttagacccgggagacacttgtaggctggtaccggtccggaattcccgggatatcgtcgacccacgcgtccgggaagagcgagcccggacggcgcctctcgaacgagtgtgggcgcgaggcaggatgacgacctcaggcgcgctctttccaagcctggtgccaggctctcggggcgcctccaacaagtacttggtggagtttcgggcgggaaagatgtccctgaaggggaccaccgtgactccggataagcggaaagggctggtgtacattcagcagacggacgactcgcttattcacttctgctggaaggacaggacgtccgggaacgtggaagacgacttgatcatcttccctgacgactgtgagttcaagcgggtgccgcagtgccccagcgggagggtctacgtgctgaagttcaaggcagggtccaagcggcttttcttctggatgcaggaacccaagacagaccaggatgaggagcattgccggaaagtcaacgagtatctgaacaaccccccgatgcctggggcactgggggccagcggaagcagcggccacgaactctctgcgctaggcggtgagggtggcctgcagagcctgctgggaaacatgagccacagccagctcatgcagctcatcggaccagccggcctcggaggactgggtgggctgggggccctgactggacctggcctggccagcttactggggagcagtgggcctccagggagcagctcctcctccagctcccggagccagtcggcagcggtcaccccgtcannnnnnnnnnnnnnnnnnnnnnnnnnnncagccccttctgctccagcagctgcctcagcaactagcccgagccccgcgcccagttccgggaatggagccagcacagcagccagcccgacccagcccatccagctggagcgacctccaaagcatcctgggccacgatgaaacgtaccagccggggcccagcaagtgggccaagcaaagtgggaccctgggcccagttgtggctggacgccccggaaaaataaatgggttccccatccttcgcccaaacgcgggtattgttccagggaaccgccttgggcttccctaaattggcccattctggggggaagtcctctgcaccgcaaaaaaccggcgggatggaacatcccctaaataccccctggaacccctcacccccaatttttcccgcaaggccccctggggaacaggttttcagcgtccgcctcttgcgcccttcggggggaatattgtggtgnnnnnnnnnnatagtggcgcaactttcaggtcacgtgatatctcgcacaagggattttcgca

SEQ ID NO: 113890 - DNA, 343 bp, Homo Sapiens
agtatttaaagagatttattaaatcatcttatcacaaagatggaaacatatacaaactagaaacatgcaaccatcatcttccacagtcaagtcacaatgtcaaatatttttcttgcctctgcagatgaaaagttcagatcttatacccaactacttactcaccccgaatatttaagtcagtcttcctgaaagtactcagggtagcaagtaacaaaatgcaaacgattatataaagaaagtgcagttaaaaaggaaactatgtggcaagtaccctctttcccttcccaccccccaattaaaggcaaacaatggcactttgctcttgcttaacctagattgtctt

SEQ ID NO: 113891 - DNA, 144 bp, Homo Sapiens
ctgaggcaggggcagcagctgctgctttcatcgctgctggttcaatttcatcttcatcctcatcctcgtcctcgtcatcccgacgcgtggcgacgcgtggtcgacgatatcccgggattccggaccgtaccagcctgctttttt

SEQ ID NO: 113892 - DNA, 55 bp, Homo Sapiens
cagtcgacggtaccggacatatgcccgggaattcggccattacggccggggacat

SEQ ID NO: 113893 - DNA, 843 bp, Homo Sapiens
aaacacaacacacgcacacaaacaagagagggagcatttagttggcctatagaacccagtgtgttacaaaaagcaggctggtacggtccggaattcccgggatatcgtcgacccacgcgtcgaaacagaagaataagtggtatgttcctaatgatattatttctactaatggaataaactgtaatattagaaattatgctgctaattatatctgctctgaggtaatttctgaaatgttcagactcagtcggaacaaattggaaaatttaaatttttattcttagctataaagcaagaaagtaaacacattaatttcctcaacatttttaagccaattaaaaatataaaagatacacaccaatatcttcttcaggctctgacaggcctcctggaaacttccacatatttttcaactgcagtataaagtcagaaaataaagttaacataactttcactaacacacacatatgtagatttcacaaaatccacctataattggtcaaagtggttgagaatatattttttagtaattgcatgcaaaatttttctagcttccatcctttctccctcgtttcttcttttttgggggagctggtaactgatgaaatcttttcccaccttttctcttcaggaaatataagtggtttcgtttggttaacgtgatacattctgtatgaatgaaaccattggagggaaacatctactgaatttctgtaatttaaaatattttgctgctagttaactatgaacagatagaagaatcttacagatgctgtataaataagtagaaaatataaatttcatcactaaaatatgctattttaaaatctatttcctatatga

SEQ ID NO: 113894 - DNA, 1049 bp, Homo Sapiens
  misc_feature (598)..(675): n is a, c, g, or t
  misc_feature (712)..(761): n is a, c, g, or t
cagtcgacggtaccggacatatgcccgggaattcggccattacggccggggggtaaacagacatggccggcgaaggagatcagcaggacgctgcgcacaacatgggcaaccacctgccgctcctgcctgcagagagtgaggaagaagatgaaatggaagttgaagaccaggatagtaaagaagccaaaaaaccaaacatcataaattttgacaccagtctgccgacatcacatacatacctaggtgctgatatggaagaatttcatggcaggactttgcacgatgacgacagctgtcaggtgattccagttcttccacaagtgatgatgatcctgattcccggacagacattacctcttcagctttttcaccctcaagaagtcagtatggtgcggaatttaattcagaaagatagaacctttgctgttcttgcatacagcaatgtacaggaaagggaagcacagtttggaacaacagcagagatatatgcctatcgagaagaacaggattttggaattgagatagtgaaagtgaaagcaattggaagacaaaggttcaaagtccttgagctaagaacacagtcagatgggtatagccnnnnnnnnnnnnnnnnnnnnnnnnnnnnnnnnnnnnnnnnnnnnnnnnnnnnnnnnnnnnnnnnnnnnnnnnnnnnnntctcccatctccagagagtgatgaggctgcagcatcnnnnnnnnnnnnnnnnnnnnnnnnnnnnnnnnnnnnnnnnnnnnnnnnnnaatcatgtaaatccaaagggaagtgttgtttgggatttggcttctttaggattgaaggcctctcggagcataagaggatagggagaccagaggcttgtgagctgttcgtgtgctcaccaggacagctgtggtttttgtagcattgctatgatgtttgaaagccacactggttacatctgcctactgctccagctgagctataaaagccatttatatttcgtgtccctctcccagtgtgaattttatatcacccagaaatgctatttacataataaatgatcaataaat

SEQ ID NO: 113895 - DNA, 446 bp, Homo Sapiens
tgctccaggagtttctgcctctgcttttctctgattttatctttaaatggaatcgtgtcggtattaacgtccacgggcacaaaatctggaaactgctttcctctcaattctggcatcttgggcatcctcagcagggcaaaacctcgagcaaggctggcaaaatcaagatcctttaatctgaaaatcaggttgcattcatgctttgcataagcttggacatatgacacaaaagctttcatgcccttttcaaacacagctctgtcagccagggccatggacttgagttttgggcagaaggtccgctgtgtttctctggggcttcatctcctgcagggggcatttttggttaattgcaaggaaattgatgtatgactcttccatgggcaggaggaacaccccggccgtaatggccgaattcccgggcatatgtccggtaccgtcgactg

SEQ ID NO: 113896 - DNA, 82 bp, Homo Sapiens
cagtcgacggtaccggacatatgcccgggaattcggccattacggccgggctcccgagtagctgggactacagacatgtgcc

SEQ ID NO: 113897 - DNA, 251 bp, Homo Sapiens
cagtcgacggtaccggacatatgcccgggaattcggccattacggccggggaagatccacaatcacacacatatctggggatcgtactggaaagaaggccgatggggatacaaatgctgtcactcttttttcaagtattcctattgtactggagaagctgggaaggagactgttaactctgaggagtgtattataaatgagataactggggaagaatctgtgaaaaaacctcaaaccctcatggagctgca

SEQ ID NO: 113898 - DNA, 56 bp, Homo Sapiens
cagtcgacggtaccggacatatgcccgggaattcggccattacggccggggagtta

SEQ ID NO: 113899 - DNA, 790 bp, Homo Sapiens
  misc_feature (546)..(582): n is a, c, g, or t
cagtcgacggtaccggacatatgcccgggaattcggccattacggccgggggcagttagtcggctgcaatggcgccggtgaggcggtccgcgaagtggcggcctggtggtattgaggcgcgtggtgaaggggtttccacatgtcgggtacaggaataagaatgtgagacagaagacatggcggcctaaccacccgcaagccttcgtggggagcgttcgcgagggacaaggcttgcttttcgaagaaaactgaaaatacagcgaagttacaagaaatgctacggaaggaaaagaaggctcaaacgtcactggaatctcaattcacagatcgatacccagataatctgaaacatctctatttagctgaagaggaaagacataggaagcaagcaagaaaagtcgaccatccttggtcagaacaagttcaccagccgttgcttgaagaacagtgtagcattgacgagcctttatttggaagatcagtgtagctttgaccagcctcagccagaagaacaatgtattaaaacagtaaactcctttacaattnnnnnnnnnnnnnnnnnnnnnnnnnnnnnnnnnnnnngcacaagaagaatatgaacagatacaagccaaacgtgctgctaagaaacaagaattcgagaggagaaaacaggagagagaagaagcccaaaggcagtacaaaaagaagaaaatggaagtgtttaaaatactgaacaaaaaagactaaaaagggcaaacaagattgaatgtgcaaatggagtaacttcttcaaaaaatccagaaaatgc

SEQ ID NO: 113900 - DNA, 1246 bp, Homo Sapiens
  misc_feature (675)..(688): n is a, c, g, or t
ggcctgggtggcgattcaacacgagggcgggtcggagctcggtcctgctggaggccacgggtgccacacactcggtcccgacatgatggcgagcatgcgagtggtgaaggagctggaggatcttcagaagaagcctcccccatacctgcggaacctgtccagcgatgatgccaatgtcctggtgtggcacgctctcctcctacccgaccaacctccctaccacctgaaagccttcaacctgcgcatcagcttcccgccggagtatccgttcaagcctcccatgatcaaattcacaaccaagatctaccaccccaacgtggacgagaacggacagatttgcctgcccatcatcagcagtgagaactggaagccttgcaccaagacttgccaagtcctggaggccctcaatgtgctggtgaatagaccgaatatcagggagcccctgcggatggacctcgctgacctgctgacacagaatccggagctgttcagaaagaatgccgaagagttcaccctccgattcggagtggaccggccctcctaactcatgttctgaccctctgtgcactggatcctcggcatagcggacggacacacctcatggactgaggccagagccccctgtggcccattccccattcatttttcccttcttaggttgttagtcattagttnnnnnnnnnnnnnngtggaaggaaaggagctatgagtgtgtgtgttgtgtatggactcactcccaggttcacctggccacaggtgcacccttcccacaccctttacattccccagagccaagggagtttacagtttggcagttaacaggccagtttctaccagctctccatcttagaggagacaggtcaccttggtcaggcctgcttgcaggaaatgaatccagcagccaactcgaatccccctagggctcaggcactgagggcctggggacagtggagcatatgggtgggagacagatggagggtaccctatttacaactgagtcagccaagccactgatgggaatatacagatttaggtgctaaaccatttattttccacggatgagtcacaatctgaagaatcaaacttccatcctgaaaatctatatgtttcaaaaccacttgccatcctgttagattgccagttcctgggaccaggcctcagactgtgaagtatatatcctccagcattcagtccagggggagccacggaaaccatgttcttgcttaagccattaaagtcagagatg

SEQ ID NO: 113901 - DNA, 53 bp, Homo Sapiens
cagtcgacggtaccggacatatgcccgggaattcggccattacggccgggcac

SEQ ID NO: 113902 - DNA, 77 bp, Homo Sapiens
cagtcgacggtaccggacatatgcccgggaattcggccattacggccgggattctagagcccgaggcggccaacatg

SEQ ID NO: 113903 - DNA, 681 bp, Homo Sapiens
caagtcgacggtaccggacatatgcccgggaattcggccattacggccggggactcaacttgctagtatcgggcagcagccaggaccacagctcctccagctcctttgtgaccttttccttcagcttcttcaaatactgggttagacacctgcctggaatatagtgagtgttaggataaagtaaacatagaccagaggaagaagtcaaatacgcatttgcctcagatatacttttaaaaaactccccgtagaaggcagcgaagaagacaaatcacaaactggtgtgaatagagccagcaaaggaggtcttatctatgggaactacctgcattggaaaaagttttgaatgcacaagaactgcaaagtgaaacaaaaggaaataaaatccatgatgaacgtctttttatcataactcatcaagcttatgaactctggtttaagcaaatcctctgggagttggattctgttcgagagatctttcagaatggccatgtcagagatgaaaggaacatgcttaaggttgtttctcggatgcaccgagtgtcagtgatcctgaaactgctggtgcagcagttttccattctggagacgatgacagccttggacttcaatgacttcagagagtacttatctccagcatcaggcttccagagttgcaattccgactattagaaaacaaga

SEQ ID NO: 113904 - DNA, 510 bp, Homo Sapiens
cagtcgacggtaccggacatatgcccgggaattcggccattacggccgggagaaacattctttcctaaatataaatgaaaatctatcctttaaactcttccactagacgtgtaatgcacacttatttttttcccaaggagtaaccaatttctttctaaaacacatttaaaattttaaaactatttatgaatattaaaaaaagacataattcacacattaataaacaatctcccaagtattgatttaacttcatttttctaataatcataaactatattctgtggacatgctaattattattaaatgtaagtcgttagttcgaaagcctctcactaagtatgatctatgctatattcaaaattcaacccatttactttggtcaatatttgatctaagttgcatctttaatcctggtggtcttgccttctgatttttaatttggtatccttttctattaagatatatttgtcattttctcttgaatatgtattaaaatatcccaagcaatcc

SEQ ID NO: 113905 - DNA, 54 bp, Homo Sapiens
tggccccggccgtaatggccgaattcccgggcatatgtccggtaccgtcgactg

SEQ ID NO: 113906 - DNA, 680 bp, Homo Sapiens
  misc_feature (503)..(626): n is a, c, g, or t
cagtcgacggtaccggacatatgcccgggaattcggccattacggccgggggactgtaatttataaatccagtagctacgcagggtggaggctgggctgaggattaccataatgaaatgtactaaatcttcatttaggtatgcaattgtgaagtgaaggcatctgctttctttacagtatcagagtccaagaacaggatgtcaccatagataaaagcctcatacaaaggcagaactacactccaaatttaatgtgtttaaattggtggggcaccagcagaaaatacttctagctcagctttactcttcttccacactaggctgggcccagcaatacaggcagaggcatgaagggaggagctccaggaggcgagggaagagccctagcagggcggccatcacaaccactcactgagagttgcccttcttaaaaatgtattttattttagccagtgggtcccttcctttctcctttcctctctactgctcaagaacagatttgannnnnnnnnnnnnnnnnnnnnnnnnnnnnnnnnnnnnnnnnnnnnnnnnnnnnnnnnnnnnnnnnnnnnnnnnnnnnnnnnnnnnnnnnnnnnnnnnnnnnnnnnnnnnnnnnnnnnnnnnnnntaacagacttgaggaacccctctcccttccataattcccgtcttccacagccta

SEQ ID NO: 113907 - DNA, 59 bp, Homo Sapiens
cagtcgacggtaccggacatatgcccgggaattcggccattacggccgggggtagtctc

SEQ ID NO: 113908 - DNA, 374 bp, Homo Sapiens
cagtcgacggtaccggacatatgcccgggaattcggccattacggccgggggagtgcgcggcggccgcagctgccacaaaccaggtgaagctttgttctaagaatatttgtttcatctagtttatgagtccaaatgatatagactgtaaatgtcacagcagtggtgaaagactgctcggtcatgagcaccgacagtaactcactggcacgtgaatttctgaccgatgtcaaccggctttgcaatgcagtggtccagagggtggaggccagggaggaagaagaggaggagacgcacatggcaaaccttggacagtaccttgtccatggtcgaggatttctattacttaccaagctaaattctataattgatcagg

SEQ ID NO: 113909 - DNA, 53 bp, Homo Sapiens
tagcccggccgtaatggccgaattcccgggcatatgtccggtaccgtcgactg

SEQ ID NO: 113910 - DNA, 55 bp, Homo Sapiens
cagtcgacggtaccggacatatgcccgggaattcggccattacggccggggtatt

SEQ ID NO: 113911 - DNA, 352 bp, Homo Sapiens
cagtcgacggtaccggacatatgcccgggaattcggccattacggccggggaaagtattttggggaagacatcttggttgcacccctcattgcatcttgactaattgcttccaatctccggcgggcttccagggacaatctcattgttcttttctctccaagggtcagccatgttaaccatttgttaatttcttctgaacagatcaagcaacaagtagataatcagccagaagaattagtgcgtagtgctgaagatgtttccacagtgcctacacaacctgataatccattttctcaccctgacaaactcaaaaggatgagcaagtctgttccagcatttctccaagatgag

SEQ ID NO: 113912 - DNA, 374 bp, Homo Sapiens
ctggcccatccatgatgtctgacggttggagcacctcatatgagcagggatccctgggcattgggactggctccatttcggacagggcaggcagagacagctggctggagctcagggactgcccattttctagggagtcctcttcattggatatagagagttccccatctttatcatagatttccttcaggactcctcgctttatcagctcttctctgctttgcctcatagatattttccttatccagggctgctgacgtgtgtttgaacttttcgcttttcttcttcctccatttccaaggcttgaaaatccttcccaggttccccggccgtaatggccgaattcccgggcatatgtccggtaccgtcgactg

SEQ ID NO: 113913 - DNA, 79 bp, Homo Sapiens
cagtcgacggtaccggacatatgcccgggaattcggccattacggccggggaggaggcacaggtataagagggaagagc

SEQ ID NO: 113914 - DNA, 757 bp, Homo Sapiens
  misc_feature (83)..(117): n is a, c, g, or t
aagactgttcatcactatagggcgctagctctccgtagccgaacgacgagcgcagcgaagtcagtgagcgaggaagcggccgnnnnnnnnnnnnnnnnnnnnnnnnnnnnnnnnnnncagtcgacggtaccggacatatgcccgggaattcggccattacggccggggagttaatggtcaggcatcatgagtgggaggcagcatcgtaatgacaggatgccaccaagtgtgaagttggtgttcattgttggggctggaggaagctggtctgcattccattcagagggatttggatcactccatggagatgagggtgtggcctggattattccaatggggcagggatggacagggaggctccatgaagagtagtgaaagggggtattgtgctatttgagggagatggaggaactgatgtgctaaagagatggacggtggagagtactggattttcccacctgcctgggagggtactgggacgaggggatccagatgagagggatggcctgtggtgacaggaatagagtggcagacgacctcaggttttcaccatgttgtcagcctccaactcctcctctagaattttctaacagatttagcactcagagcctggtcgccccccgttagcccagattcaaaaggtgaacatctgtttgcagaatctgattcatgagaagttctccccaagtccactgaacaaggctagttcctgcacaccaggattcaaaggaaagacgaagggagcagaaacttgtgg

SEQ ID NO: 113915 - DNA, 850 bp, Homo Sapiens
  misc_feature (70)..(104): n is a, c, g, or t
tatgggcgctagctccggttgcaccgaacgacgagcgcagcgaaggtccagtgagcgaggaagcggccgnnnnnnnnnnnnnnnnnnnnnnnnnnnnnnnnnnncagtcgacggtaccggacatatgcccgggaattcggccattacggccggggggaagcggagagcggctgatcgcagtccggaggcagatatcctccctttcctcctcggctgctgctcttactttgacaagccaggctaacattgaaggtggtccattatggctgacatgcaaaatctggtagaaagattggagagggcagtgggccgcctggaggcagtatctcatacctctgacatgcaccgtgggtatgcagacagtccttcaaaagcaggagcagctccatatgtgcaggcatttgactcgctgcttgctggtcctgtggcagagtacttgaagatcagtaaagagattgggggagacgtgcagaaacatgcggagatggtccacacaggtttgaacgttggagcgagctctgttggttacagcttctcagtgtcaacagccagcagaaaataagctttccgatttgtggcacccatctcagagcagatcaaagaagtgatacacctttcgggagaagaaccgaggcagcaagttgtttaatcacctgtcagctgtcagcgaaagtatccaggccctgggctgggtggctatgggtcccaagcctggccttatgtgaaagaaattgatgatgccgccatgttttatacaaaccgagtctgcttcccgctcagcactgttcgcgcagattaatcagggggagagcattacaatgccctgaaacatgtatctggtgacttgaag

SEQ ID NO: 113916 - DNA, 973 bp, Homo Sapiens
  misc_feature (718)..(799): n is a, c, g, or t
  misc_feature (859)..(893): n is a, c, g, or t
ccaaatccctcgtacgtccccttaacccccacacactccggttatacactgagtgtccaatcgaattttcaagtaagatcatccaattaaaggaatctcagttcacactttaaaaaattctccttccaaattctctacgaatccacacccctcgccgttcttgcactacctagtttgtattgtcctttccaccttcattctgtttgatgcctgtctgtttccctctcttatgcttcccattaatgttttcttaatgtttaccttctttaccatttttctcagtgtgcatctgaattttcaaatgttggactatgatcttcatcctttattttggcatttgatttttcaccaattctaagtggaaatctttctgatgtttgcttttttccttatgcttacaagattttacacttgaactttctggcaagaattcagattctgtattatcataccgaacaagatcaggctgtaatgacatttcagaacttcctggtgataaacatgttttagtatgttcttgttttagtggtgttgactgtttttcacttaatccacaagaatgtttgggagatttaccagtggaaatatgaaataaatgtaatgaagtatcatcttttgggctaaaagatttcctaaagttcccctcctctctggtcttttctgaacaatctagtccagtatttactgtcaagtttgttattcttgtattttcttttcnnnnnnnnnnnnnnnnnnnnnnnnnnnnnnnnnnnnnnnnnnnnnnnnnnnnnnnnnnnnnnnnnnnnnnnnnnnnnnnnnntgttcacctcccggccgtaatggccgaattcccgggcatatgtccggtaccgtcgactgnnnnnnnnnnnnnnnnnnnnnnnnnnnnnnnnnnncgccgcttcctcgctcaacatgactcgtctgcgctctgtcgttcgaaaaaaaagcgtaagcccctatagtgatcgataat

SEQ ID NO: 113917 - DNA, 1013 bp, Homo Sapiens
  misc_feature (78)..(112): n is a, c, g, or t
agatgttagactatatagggctacgcggtagcagccgaacgacgagcgcagcgaagtagtgagcgaggaagcggccgnnnnnnnnnnnnnnnnnnnnnnnnnnnnnnnnnnncagtcgacggtaccggacatatgcccgggaattcggccattacggccgggcagcaaatccagcaagcacagcatgagttagaactcagactcccataactagacttactagtaaccatctgctttacagatttgattgcttggaagactcaagcctgccactgctgttttctcacttgaaagtatatgctttctgctttgatcaaacccagcaagctgtcttaagtatcaggaccttctttgggaatagtttttccttttcaagtttttcaagatgtaggtatatccatgaatgcaatttgcatttaaattccacgtatcctgtagttttaattcctcattgttcttaaaagactgttgatactataaacatcagtgaatcattatattttaaaacagaaaagggcttctcagataccctccatctactggcccatcccctctcctaaacaaaactccttcaaaacaggttaaaaaaaatatgttgtcatgaatcttcacagtaacatttcagaaaggtgctttttaggtactcttcatgggaacagtttagcagccatgagtgatcttcctttgaaagagaatgaaagaccctgtgacatttcacttcaaaaataagccctgtagctctttacggtcgcatagtatgaaatttataccctggcatgctgaccctcgcttgggaatggaatgccagaaatgcattggagcagtaataagtaaaagctgattaactatttatttgtcatgttatcattaatgagctttcacatgtgattggtttcagaatttaatttttaatgtttggaactttttcatgggactaatattcctatttgattgggtgatagaaattgaatactgtgtagaatgaacatgaatattaagtctctataaattag

SEQ ID NO: 113918 - DNA, 973 bp, Homo Sapiens
  misc_feature (85)..(119): n is a, c, g, or t
  misc_feature (407)..(407): n is a, c, g, or t
aaagtgtatagactcactatagggcgctagcgtcgttacagccgaacgacgagcgcagcgaagtagtgagcgaggaagcggccgnnnnnnnnnnnnnnnnnnnnnnnnnnnnnnnnnnncagtcgacggtaccggacatatgcccgggaattcggccattacggccgggggactcgcactgaagcgccgattcctggctttgcaaggctgtggtcggtggtcatcagtgctcttgacccaggtccagcgagccttttccctggtgttgcagctgttgttgtaccgccgccgtcgccgccgtcgccgcctgctctgcggggtcatggtgtgcttccgcctcttcccggttccgggctcagggctcgtcctggtctgcctagtcctgggagctgtgcggtcttatgcantggaacttaatttgacagattcagaaaatgccacttgcctttatgcaaaatggcagatgaatttcacagtacgctatgaaactacaaataaaacttataaaactgtaaccatttcagaccatggcactgtgacatataatggaagcatttgtggggatgatcagaatggtcccaaaatagcagtgcagttcggacctggcttttcctggattgcgaattttaccaaggcagcatctacttattcaattgacagcgtctcattttcctacaacactggtgataacacaacatttcctgatgctgaagataaaggaattcttactgttgatgaacttttggccatcagaattccattgaatgacctttttagatgcaatagtttatcaaccttggaaaaagaatgatgttgtccaacactactgggatgttcttgtaccaagcttttgtccaaaaatgggcacagtgagcacaaatgagttcctgtgtgataaagaccaaaattcaacaagtggcaccccacatatacaccactgtgccatctccttataaaaacctatccaaggaaa

SEQ ID NO: 113919 - DNA, 1007 bp, Homo Sapiens
  misc_feature (42)..(84): n is a, c, g, or t
  misc_feature (88)..(122): n is a, c, g, or t
  misc_feature (483)..(535): n is a, c, g, or t
aaagactgtatagactcactatagggcgctagcgtcttattnnnnnnnnnnnnnnnnnnnnnnnnnnnnnnnnnnnnnnnnnnnccgnnnnnnnnnnnnnnnnnnnnnnnnnnnnnnnnnnncagtcgacggtaccggacatatgcccgggaattcggccattacggccgggggctgggggaaggaaaacgccgctttgactgtgccttgttctcacagctggcgggaagcaagcgccttttcgaaagccagaggctcgagttacccctcttaccaccgtcatggcagtcccaggttgcaacaaggacagtgtcagagcaggctgtaaaaaatgtggctaccctggtcacctgacttttgaatgccgcaattttctccgagtagaccctaaaagggacatagttttggatgtcagcagtacaagtagtgaagatagcgatgaagagaatgaagaactgaataaattgcaggcattacaggaannnnnnnnnnnnnnnnnnnnnnnnnnnnnnnnnnnnnnnnnnnnnnnnnnnnntcaaattgacacacaacaaccggaaagggtcttactcatccagttccactgaagaggacacttcaaaacaaaagaaccaaaaatatcagaagacagaacagacacaacgaaaaacaagagtacctcacaacacggggcaaccatcgactagaagacaacgcacaggacgcgcaagacacacaacaactgtggtgggccgcgctatgggaccctgaggagagggtgtttaagacccctgtcggtgggggcgcggggtccccagtagggtatacggggaacagggcgcacaaagcgggtgtccaaagggaaaacgggggacagagaaaaaggggcgggaactcccacgcgaaataaaaagcgcccggcgaggaacaccggacggctcgcggacgaacgcccagaggggaggctgagagacccaatcaggggtctaataacaggagagcacagagaaggccagaagtaaataccg

SEQ ID NO: 113920 - DNA, 870 bp, Homo Sapiens
  misc_feature (655)..(663): n is a, c, g, or t
aggcatgttgtctatgaacagttggttaaaaaagcaggctggtaccggtccggaattcccgggatatcgtcgaccacgcgtcgggtccggggcgcctcaactctatagctctaactggctagaagtgcccaacgtggaatgtttcttttttaaaggcggctcttgaagcgacccggaagcggaagtggaagaaagttctagtggcttgagattaagcctgatcaagatgacaacctcccaaaagcaccgagacttcgtggcagagcccatgggggagaagccagtggggagcctggctgggattggtgaagtcctgggcaagaagctggaggaaaggggttttgacaaggcctatgttgtccttggccagtttctggtgctaaagaaagatgaagacctcttccgggaatggctgaaagacacttgtggcgccaacgccaagcagtcccgggactgcttcggatgccttcgagagtggtgcgacgccttcttgtgatgctctctgggaagctctcaatccccagccctcatccagagtttgcagccgagtagggactcctcccctgtcctctacgaaggaaaagattgtattgtcgtactcacctccgacgtactccggggtctttgggagttttctcccctaaccatttcaacnnnnnnnnngtggattctcgctcttgcatgcctcccccgtcctttttcccttgccagttccctggtgacagttaccagctttcctgaatggattcccggccccatccctcacccccaccctcactttcaatccgtttgataccatttggctccttttttggcagaacagtcactgtccttgtaaagttttttagatcaataaagtcagtggctttc

SEQ ID NO: 113921 - DNA, 581 bp, Homo Sapiens
  misc_feature (486)..(520): n is a, c, g, or t
ggcatccccttctgcccaccccatccttcttcctctccagagatgcccacgagggcagaggccggtgctaaggggatggggaagaagggacaagattcccagagaggagaggaggctgttggtaggaaagtggcagggctgggggagacccagccccaagggtccggggcggaggatgctttgttcttttctggttttggttcctctttcgcggggggtgggggaggtcaacagggactgagtggggcagaggcccagaagtgccagcctggggagccgtttgggggcagccccttctgcccaccccatccttcttcctctccagagatgccaggggggcgtgtatgctctaccccttccctcagacaggggctgggtggggaggctctttaggctcaggagaagcattttaaagaaacccccaccctgccgcccgcattataaacacaggagaataatcaatagaataaaagtgaccgactgtcnnnnnnnnnnnnnnnnnnnnnnnnnnnnnnnnnnngcctacagccgcggccgcaagcttattccctttagttgagggttaattttagcttggcact

SEQ ID NO: 113922 - DNA, 943 bp, Homo Sapiens
  misc_feature (42)..(76): n is a, c, g, or t
  misc_feature (450)..(511): n is a, c, g, or t
  misc_feature (589)..(589): n is a, c, g, or t
aacgacgagcgcagcgacgtcagtgagcgaggaagcggccgnnnnnnnnnnnnnnnnnnnnnnnnnnnnnnnnnnncagtcgacggtaccggacatatgcccgggaattcggccattacggccgggggtgggtgttcgtttctcaggtaaaacatggctaaaagcttacggagtaagtggaaaagaaagatgcgtgctgaaaagagaaaaaagaatgccccaaaggaggccagcaggcttaaaagtattctcaaactagacggtgatgttttaatgaaagatgttcaagagatagcaactgtggtggtacccaaacccaaacattgccaagagaaaatgcaatgtgaggtaaaagatgaaaaagatgacatgaaaatggagactgatattaagagaaacaaaaagactcttctagaccagcatggacagtacccaatatggatgaaccannnnnnnnnnnnnnnnnnnnnnnnnnnnnnnnnnnnnnnnnnnnnnnnnnnnnnnnnnnnnncagtgaaagtggcaaagggtttggcctggtagactcttaaaaccttggaaaatgccacatgggatagatgacggattnagaatgtatacacatgtatacctttgattttcacctgccacccaaatgaaaaccattttgttttccctaattttaacttggccctttttttcttcaattccaacccagccatacctcctcaaggtttgtttttgggaaactttgaataaaatatttttcctttggatacctcccagcctccacactgaatactttaacctggaatggctacccccatattccagtttaataattcaggccccttcaacgtttctggccgggaattaaataaggggtataaaattgttcctttacaacctggggaaaatttaaggcccaataagaaattaaaaccgcgagggttggacctgccac

SEQ ID NO: 113923 - DNA, 604 bp, Homo Sapiens
  misc_feature (271)..(271): n is a, c, g, or t
  misc_feature (488)..(522): n is a, c, g, or t
  misc_feature (525)..(563): n is a, c, g, or t
aatgggctgtggctttaaggttccgaaaactgaatgaaatccaaaacatgcttgaaggccctggtccggggtcaatgccgaaaaagaaggttcccaataccaaaacaccttctgaagaaagtcccaggaaagctggtgtcataggttttcagcaccatcgtgaggtccttggaatctgggtatctttttttccccctgttgttggttatatttttaggaaaacctttggaatcaaagaatgtctgtctcctggaggctgtctgaatgaaancggctggcggcagacccagcacctccatgatgcaggccagctgctccacctcattctccccggggaacagggggtagcccgtgtacaactccgccgtgatgcagcccaggctccacatgtcaatggccacgtcgtaggggtggcccaggatcacttctggggatcccccggccgtaatggccgaattcccgggcatatgtccggtaccgtcgactgnnnnnnnnnnnnnnnnnnnnnnnnnnnnnnnnnnncgnnnnnnnnnnnnnnnnnnnnnnnnnnnnnnnnnnnnnnnctttagacgcgtagcgccctatatgatctaattccagtttt

SEQ ID NO: 113924 - DNA, 924 bp, Homo Sapiens
  misc_feature (64)..(99): n is a, c, g, or t
  misc_feature (645)..(651): n is a, c, g, or t
  misc_feature (844)..(844): n is a, c, g, or t
  misc_feature (864)..(864): n is a, c, g, or t
  misc_feature (877)..(877): n is a, c, g, or t
  misc_feature (902)..(902): n is a, c, g, or t
taccatattagggcaccttgagcgaacgacgagcgcagcgagcagtgagcgaaggaagccggcnnnnnnnnnnnnnnnnnnnnnnnnnnnnnnnnnnnncagtcgacggtagcggacatatgcccgggaattcggccattacggccgggaccgtatttttttcttgtccaattatttctaaagacacactacatagaaagaggccctataaactcaaaaagtcattgggaaacttaaagtctattctactttgcaagaggagaaatgtgttttatgaacgatagatcacatcagaactcctgtggggaggaaaccttataaattaaacacatggcccccttagagaccacaggcgatgtctgtctccatccttccctctccttttctgtcacctttccccctagctggctcctttggacctacccctgtccttgctgacttgtgttgcattgtattccaaacgtgtttacaggttctcttaagcaatgttgtatttgcaggcttttctgaataccaaatctgctttttgtaaagcgtaaaaacatcacaaagtaggtcattccatcaccacccttgtctctctacacattttgctttggggatctggttggggttagggtcaagtgtgtggtaattggttatttnnnnnnntaaaggtaaattgcacttttaaaaaaataattggttgacttaatatatttgctttttttctcacctgcacttagaggaaatttgaacaagttggaaaaaaacaatttttgtttcaattctaagaaacacttgcagctctagtattcacttgagtcttcctgtttttcctgtaccgggtcatggtatttttggntgttttggttgttttcttanaaaacaagttaanacctgacgatttctgcaggctgtgntagcatgtttacctgttggctt

SEQ ID NO: 113925 - DNA, 1274 bp, Homo Sapiens
  misc_feature (76)..(110): n is a, c, g, or t
acattacaactatatggggtaccctttgcagcgaacgaacgagcgcagcgaaggtagtgagcgaggaagcggccgnnnnnnnnnnnnnnnnnnnnnnnnnnnnnnnnnnncagtcgacggtaccggacatatgcccgggaattcggccattacggccgggggccatagctacagctgctctggtgggccaaaccaaaagcatcactgagtttgggcacttgaagtttcagacagctgggagtctccatagaaccggaagggaaaacacttccaaggatatgagcatgtcttgtccctgcctttgggccacccatgcacaccagctccacagcagctgaagcagagcagatccagaggaggctgtcggagggaccactgtccttcctgctgaattcatactgaccctctggattctccagattttctccaaagttcttccattctagcctggccaaacatttgggctcagcaaactcagacgaagctaccccacacatgcccgacaattcctatggccattacggccaaggtagtaatgggatatatgtcttggaacccccaagcatatgtcacgtgcaaaacaccgtgggaagcagtgggggtgtggtaaagagatgggctggaaaggctctttgtcctcaataagctggccatctgatggggagatagaggagtgaagcgagtccgaactaataggcatgtgtatttggaggcaacaaggaagagagaaccattctgactgggaagctccctggaggaggtagcggacatttgactggggttttggcatattcaaaaaatgtggatgagcaaagaggaccagagcagcagatattccaagcgagaaaacataacgagcatagcatcctcccatgtcctaccatttataagcagaatgttaatgtgagaactgctcagtctcctgacagacccgggggctgcaggcacattttccctaggggtaggtctgttagcttttcaagatcatgaagtatttttaggtccaagttgtcaccagcattcaaagccaccgtgcatcctccagctgttcccagcgcataccgggctcttgcttgtcatagcttggatgtcccctggatcatcagatacagactgactcctgcacttgttttcccccgtaagcagatcacgtgtcagtgtgtaaatgtatatcacgctggtcctcatgttaggtgttgcaagtttcgtccatttatacacatccattagcaccacacatgaattgccatcctcttcaagaagtaagcagatag

SEQ ID NO: 113926 - DNA, 999 bp, Homo Sapiens
  misc_feature (164)..(835): n is a, c, g, or t
  misc_feature (874)..(874): n is a, c, g, or t
  misc_feature (920)..(920): n is a, c, g, or t
  misc_feature (959)..(959): n is a, c, g, or t
  misc_feature (961)..(961): n is a, c, g, or t
  misc_feature (972)..(972): n is a, c, g, or t
ctgcaattctgagcagccactttattcttacccctcctacgcatatcccattccctgtagaaaaaatcattaacctccctgttgttgacttcaacgaaatgatgtccaaagagcagttcaatgaagctcaacttgcattaattcggcctcgtgccgaattcttnnnnnnnnnnnnnnnnnnnnnnnnnnnnnnnnnnnnnnnnnnnnnnnnnnnnnnnnnnnnnnnnnnnnnnnnnnnnnnnnnnnnnnnnnnnnnnnnnnnnnnnnnnnnnnnnnnnnnnnnnnnnnnnnnnnnnnnnnnnnnnnnnnnnnnnnnnnnnnnnnnnnnnnnnnnnnnnnnnnnnnnnnnnnnnnnnnnnnnnnnnnnnnnnnnnnnnnnnnnnnnnnnnnnnnnnnnnnnnnnnnnnnnnnnnnnnnnnnnnnnnnnnnnnnnnnnnnnnnnnnnnnnnnnnnnnnnnnnnnnnnnnnnnnnnnnnnnnnnnnnnnnnnnnnnnnnnnnnnnnnnnnnnnnnnnnnnnnnnnnnnnnnnnnnnnnnnnnnnnnnnnnnnnnnnnnnnnnnnnnnnnnnnnnnnnnnnnnnnnnnnnnnnnnnnnnnnnnnnnnnnnnnnnnnnnnnnnnnnnnnnnnnnnnnnnnnnnnnnnnnnnnnnnnnnnnnnnnnnnnnnnnnnnnnnnnnnnnnnnnnnnnnnnnnnnnnnnnnnnnnnnnnnnnnnnnnnnnnnnnnnnnnnnnnnnnnnnnnnnnnnnnnnnnnnnnnnnnnnnnnnnnnnnnnnnnnnnnnnnnnnnnnnnnnnnnnnnnnnnnnnnnnnnnnnnnnnnnnnnnnnnnnnnnnnnncggtgtaggtcgtcgctcaagctggctgtgtgcagaccnccgttcagccgacgctgcgctatcggtactacgtctgagtccaccnggtagaagactatcgcactggacagcactgtacagatananagcgagtagtnggcgtgtcaagtctgaattggtgctaa

SEQ ID NO: 113927 - DNA, 789 bp, Homo Sapiens
ggatatgaaccaagtggtaaaaaagcaggctggtacggtccggatatcccgggatatcgtcgacccacgcgtcgctggggtctaagcctgtgcggctgagcgtggcaatccctaaagcgagccgtgtaaagccagtggaatatagtcagatgtacagttatagctacaaccagtattatcagcagtaccagaactactatgctcagtggggctatgaccagaacacaggcagctacagctacagttacccccagtatggctatacccagagcaccatgcagacatatgaagaagttggagatgatgcattggaagaccccatgccacagctggatgtgactgaggccaacaaggagttcatggaacagagtgaggagctgtatgacgctctgatggactgtcactggcagcccctggacacagtgtcttcagagatccctgccatgatgtacgccaggccaaaggacaagccaggtcgcatgatgtgagggagatgagagactccttctttaaacaattgtgaaaccttttctggcaaactatgatttgtaagatttctaccaacccaccaccccccccacacgggcgcgcgctctagaggtatcccttcgggggcgccacggctttaccgggtaccccggctttttcctggtcctacctgtgcgtccctaatacgtcgagctcgatatataagctaggcacttggcccgccgcttctcccacgcgtcgtgcccggggcccacctggtcgctggcgcatctccgccgacgcgccctacctcctggcgcg

SEQ ID NO: 113928 - DNA, 980 bp, Homo Sapiens
  misc_feature (77)..(111): n is a, c, g, or t
  misc_feature (450)..(450): n is a, c, g, or t
cagtcgtatcgatcatatagggcgcccgtgcatagcgaacgacgagcgcagcgagtctatgagcgaggaagcggcgnnnnnnnnnnnnnnnnnnnnnnnnnnnnnnnnnnncagtcgacggtaccggacatatgcccgggaattcggccattacggccggggcagaatgtacgaggtgtgccatcccaaaaccagctgctaccctgtccttttaatgtaagtcactccccttcactgtggcctcgctgatgtctgataagtattgtcagtgtgcaaaaggctttacttcagaatggtttatttatagcaaactaagttgaaaattttagaaacagtctttgtgggtggatgttattaactgtcattgttgttgcccagagccatgggttttttaaccccaaattatccacatggtgtgtattatgaattctttgaactcttaaggttttngtgagaaaaggactgtgaattcaaaacaataaggcacttgtgggtgcactacatagattctgacagtgttgtgattctgtataggatttttaaaaatgacaacattcacaaaatttattactttttaaaaaataacatgcctattaactggttgcactgatataaaagaaatatatttgtgtatcgtttgtactaaaatgcaaaagcaagagtgcaatttttaaaatctagaagttaggggtctgtcggagaaaaatggactgatctttaaactattcagtcttactgggatttttatgcatagaaactcacatataaacatgaaataaacagtgcagtattcataggaaagtgagaaactgtaatatttgggcattaatttctattcaacaggttttagaaggaagccaacaattttttcctttatattttgggttaattttttaaagtggtcatttaattcttaaacgtgtcattatttgagatgggacattagatctaaagttaagtgggcttgccggtaaacaagt

SEQ ID NO: 113929 - DNA, 1081 bp, Homo Sapiens
  misc_feature (66)..(81): n is a, c, g, or t
  misc_feature (481)..(499): n is a, c, g, or t
  misc_feature (536)..(964): n is a, c, g, or t
  misc_feature (1053)..(1053): n is a, c, g, or t
gggcagtgccaagctaaaattaaccctcaactaaagggaataagcttgcggccgcggctgtaggcnnnnnnnnnnnnnnnnagataatttatctaagcacttgaattatctaaaaataagaagaaaacctctcttagggtaagcaaaaacacatcatcttggggagctgaataggagggtactgatgactcagtgaggtaatcctttagctggtatttaaaaacctaatacacaacaaggatattttcaagaatacagattttcaaaagcaattttgaactatgtctttaaaagatatcagaacttggtgaaggtcttacaaataatcatagaacacaatgttaagaaattaacttctcttgtggtatgttgaaattgtggagcattcatgattttcttttattgagaagttcttggtgtaaattcaaaactagtcatattttatcaacatttaagcttcttagtcatgccaagaaaaccnnnnnnnnnnnnnnnnnnngcctacagccgcggccccccctcgtgccgaattcttnnnnnnnnnnnnnnnnnnnnnnnnnnnnnnnnnnnnnnnnnnnnnnnnnnnnnnnnnnnnnnnnnnnnnnnnnnnnnnnnnnnnnnnnnnnnnnnnnnnnnnnnnnnnnnnnnnnnnnnnnnnnnnnnnnnnnnnnnnnnnnnnnnnnnnnnnnnnnnnnnnnnnnnnnnnnnnnnnnnnnnnnnnnnnnnnnnnnnnnnnnnnnnnnnnnnnnnnnnnnnnnnnnnnnnnnnnnnnnnnnnnnnnnnnnnnnnnnnnnnnnnnnnnnnnnnnnnnnnnnnnnnnnnnnnnnnnnnnnnnnnnnnnnnnnnnnnnnnnnnnnnnnnnnnnnnnnnnnnnnnnnnnnnnnnnnnnnnnnnnnnnnnnnnnnnnnnnnnnnnnnnnnnnnnnnnnnnnnnnnnnnnnnnnnnnnnnnnnnnnnnnnnnnnngggcggtgctgggttttcataggctcgcccctgacagcacaaaatcgagtcagtcaagtggaaccgaagatatagaacagcgtccctgnagtctctggtcctgtcgactgggtacgg

SEQ ID NO: 113930 - DNA, 513 bp, Homo Sapiens
  misc_feature (196)..(212): n is a, c, g, or t
  misc_feature (215)..(243): n is a, c, g, or t
  misc_feature (269)..(304): n is a, c, g, or t
  misc_feature (430)..(453): n is a, c, g, or t
ctgcctcctcagcctcattctccattcactcaccatgcttctggagctgcctctcttcctctgctaaaccaagccctttgctgactggatgtgctcagtttcaggagcctgggatcccttctgtcctctcacctgtcagggcttggctcatatgtcaccttctttgatcacccccacagtcaatcagtgcctcttnnnnnnnnnnnnnnnnnatnnnnnnnnnnnnnnnnnnnnnnnnnnnnngaaaatatactgtaaagaaagagagnnnnnnnnnnnnnnnnnnnnnnnnnnnnnnnnnnnncctgttaactccaagggagcaccacccacagaacctccaccaactgacagtttctcttctagacttgccacccatcgctggatgttgtccactttatccaccatataaaacagtaagcagctgctnnnnnnnnnnnnnnnnnnnnnnnngcctacagccgcggccgcaagcttattccctttagttgagggttaattttagcttggcac

SEQ ID NO: 113931 - DNA, 839 bp, Homo Sapiens
  misc_feature (73)..(132): n is a, c, g, or t
  misc_feature (791)..(791): n is a, c, g, or t
ataaatccctttttggaggatatttattcccaaaccaactctaaatggtaattgaacaaacatatgatctctnnnnnnnnnnnnnnnnnnnnnnnnnnnnnnnnnnnnnnnnnnnnnnnnnnnnnnnnnnnnggcactagcaggtttactgccatatagccctcaatgatatctgatgttacactagtatctagtgttgcatttttacttcagtctaaaacgtgtgagaattatgaattctcaaaagagctagtctcctctgagagatagcttataaactgaaataacaatttatattataaactgaaatgttatgacctacacccacatatacatatataaaaatagtcccactgaacgtttgacatgtttagattatgcagctcaaataatctgttataaaatattttaaagcttagtttcatgtaattaagacaaaactccatttttaccacttctccccacataaagcgtgtgtcctttactatgactcgagcaggcttcccagaatgaggtgtccaaaggtgctgctttagaaaagataagtgaagggctcagtcagtatttcacaaattctagtaacactcacacagagcagagtaatgaggacacagaaagctgtctcaagaaaagctaataattctagttagttaagctttgctttttaaaaaccagtagcatttcttccaacacaaaaccttcaaagtgagaatcttgcattttaagaaaaggctgcgactgcgtgggtcgacgatatcccgggaattccggaccggtaccagcctgctttntttaaaacactggttctatagtgtactaggtgcgggaggggaggggaa

SEQ ID NO: 113932 - DNA, 718 bp, Homo Sapiens
  misc_feature (41)..(80): n is a, c, g, or t
  misc_feature (84)..(118): n is a, c, g, or t
aaagatgtatagactcactatagggcgctagctctttgagnnnnnnnnnnnnnnnnnnnnnnnnnnnnnnnnnnnnnnnnccgnnnnnnnnnnnnnnnnnnnnnnnnnnnnnnnnnnncagtcgacggtaccggacatatgcccgggaattcggccattacggccgggggcacttttctaccctctgagcttggttcttaataagcataatgtgagggtgaatatgtagtatctcctaattatgagcactgcatgagaattaaaaaactcatgtaagtaaaatagttgaaaaatcagtatgttctctgtttttaaaatgtcaaagtttatgtcagggttaatttagttataacaaagtgatcataatggtgaaatttaataaatatactctagtatgatcagcctatgtgagactacattttgattttttgtgtggcatgcagatgtcatgaactatagtgcagcttttagtgtgttctaattttaattggtttatatcctggaaaaccaagggtggaaaaggttaatttcattggaggggtggcttttccaatggctgtgagatagagcttaaaggaatatctgtgaatatatggagacatcttcatttatatctttcttatataaaatatatgtgggtttaattggtgtgaagagttggggtctctttaaattcagattgggtcttaggacagtaaaacccaggttgagttgaccc

SEQ ID NO: 113933 - DNA, 1242 bp, Homo Sapiens
  misc_feature (664)..(699): n is a, c, g, or t
  misc_feature (1136)..(1170): n is a, c, g, or t
ctcttgctgggcgcactctgccgtagatttgtaggctgtgtttcgctcgtccccgatcgcgtaatgttagtctagcccggtgactgatattccgatggtccagaatgatcaatgcggctgtgggtaactgtgttcttgtagaggtttgtggccaaagagttagcggctcgatgtgattctccgaaggtaggtacgttgagagtgagcttcgaattgtctttgcgtaggccctgtgtgttcctcaaaggagttctagggcaatggccaccaagcaggggcaagtgcccaaaggaggggtttttagccaatgccaaaggaggaagttcttgttctgaggacacctgtgaaagttgtgccggcccgggctgtttgtttcctgaaggtaattttctaaagaacgtgaagaatagtgtatttcagaaataccagtgacagttttaggtcctttgaaaagtaccacccagtgctttgcccattggcacaactgtgtatcacgagttccagaacatgtgatgcatgagtcccctaccgcccgtgccagccgtgcccgaaaagtgcatgctctgttagcggttcctctattgcgctgcccgtggttgcccagaccctggcgaacactaaatgtactgtctctatggattttccagtctttttgatactcgtnnnnnnnnnnnnnnnnnnnnnnnnnnnnnnnnnnnngagctgcaagtcacttagagagtaaggttagaatacaagtatttacaggaacttttaagtgtataaaaattagtgaaaatatgtttaggtcacctatatatatgctaaatgcagctataagaccatctgattttgttagagtccttagaagagtcattctcaggcagtgtgtctggccaaggagagacaggggtatagggatttaggaatcactaaagaggaagagacaggccactggtggaagggaatttcatttatggaccggggaaatatgaggatatgtggtttagaggacagacatttttgttttccacccagggtagtgaaattggtgctaatatgtccaggtgcccattgcttccttttatagtggtccaagtgggccccccggccgtaatggccgaattcccgggcatatgtccggtaccgtcgactgnnnnnnnnnnnnnnnnnnnnnnnnnnnnnnnnnnncgccgcttcctcgctcaatacttcgctgcgctcgtcgttcgatatagcggagccccatagagctcaattcag

SEQ ID NO: 113934 - DNA, 948 bp, Homo Sapiens
  misc_feature (92)..(126): n is a, c, g, or t
taggtgggcgcccccccaccggcgggggctgttttttatttatttatgtcgaacgaccgagcgcagcgagtaatatagcgaggaagcggcgnnnnnnnnnnnnnnnnnnnnnnnnnnnnnnnnnnncagtcgacggtaccggacatatgcccgggaattcggccattacggccgggtccaattcacagagcacaggtgccaccaacatttcaaaacaattaccatgggtcagggtggcattaaaatggactccaaaaacatttttttaaatgttctgtaagataaactgtatatttcatatgtacctgttaaggtactttttaaagcttgtacatgaacctttgtataaaaaacaccagtgctctttcgttgtatttttctcatttttgctttttaaaattcctttaaaaaatgtgctgttaagccagtattaggtatctttattttgtaagtgaacattccagctgtgtttttctgggagatctgatgctgatttgatgctgtatgatcttttttgattgtgtttaatattgtagaagtcgccattgaaatgagaatggtgcgaattagtgtttaacatgcccattaaggtgactcgggtaaggtaagggggcactatggagggagtttgagaagattttccgcggtaaagcagcagtgtttgggaaggcctctcagggtataaaaacggcgataacaagatattttcataattcgagggcggggggaccagggggctaaattatggtgttaagccaagtctgttttgggacagcactggtggtaatttactgggtctaagattaattcgaagagtggttcgcttgagaaagcgggtaatatcacgggagtatatagaggcgaaataaaattggtcgcaacaattttcctgcatggaaaatataagatgggtcttataacaaatgtcttgcgaacctggtgacttgg

SEQ ID NO: 113935 - DNA, 734 bp, Homo Sapiens
  misc_feature (531)..(591): n is a, c, g, or t
cagtcgacggtaccggacatatgcccgggaattcggccattacggccgggggcgcgcccccggggcttgcgtcagcggctgttccagaagcgggtgggccaggctctgcgcaccgctggggttcggggcccgggacgccgccgggaggagggcaccgcgcggggtccgacgcggaggcgtgctcggaacgccgggggctgcggagtgcatcatgcgcggtccagccctccgcctgccgggcgccgagcgtctccgccgcccggacctgggctgggctgccgtggcgttgcctcggagctcgctgcccgcggggcgcgcaccgcctttgaccctgggcggccccgcggcaggcaggcgcccgcagttccatggttggttcggagcgcgatgagccgccctgtcctccaccggccccagcgctaattaaaccctgcagcaagcagcctgccgccgcagcccccagcacactccgtccccggctgcgccccccggctcgccgccaccatctcggcttgcgggccccggctcgtnnnnnnnnnnnnnnnnnnnnnnnnnnnnnnnnnnnnnnnnnnnnnnnnnnnnnnnnnnnnnggtgtccccgcagcaccacgagctgacctcgctcttcgagtgtccggtctgctttgactatgtcctgcctcctattctgcagtgccaggccgggcacctggtgtgtaaccaatgccgccagaagttgagctgctgcccgacgt

SEQ ID NO: 113936 - DNA, 645 bp, Homo Sapiens
  misc_feature (80)..(114): n is a, c, g, or t
  misc_feature (522)..(556): n is a, c, g, or t
  misc_feature (560)..(605): n is a, c, g, or t
aatgtatagactcactatagggcgctactcgtcgcagccgaacgacgagcgcagcgagtagtgagcgaggaagcggccgnnnnnnnnnnnnnnnnnnnnnnnnnnnnnnnnnnncagtcgacggtaccggacatatgcccgggaattcggccattacggccggggctactgtatctttggatgtctttgttacaacaaactaatctttaccctagctaatacatattgtgcttaattaaccctattatctccaagataaagtccaaatttcacatcttggggtgagagaacgtcttgctctacaccctgtttatcactctagcttctctcaccagtctcctactcctactctacttccattctgaattaccctgaattcatcataaatgccatggtttctttcagcttttggcctctgaatgtggtcttcttgccccacccattcctatctcctctacttccagaattttccccggccgtaatggccgaattcccgggcatatgtccggtaccgtcgactgnnnnnnnnnnnnnnnnnnnnnnnnnnnnnnnnnnncggnnnnnnnnnnnnnnnnnnnnnnnnnnnnnnnnnnnnnnnnnnnnnntgacaggacggagcgccctataggtgagtcgatagacttt

SEQ ID NO: 113937 - DNA, 515 bp, Homo Sapiens
  misc_feature (86)..(120): n is a, c, g, or t
taagagttataactcacttatagggcgctagctcggccgcagcgaacgaccgagcgcagcgaagtagtgagcgaggaagcggccgnnnnnnnnnnnnnnnnnnnnnnnnnnnnnnnnnnncagtcgacggtaccggacatatgcccgggaattcggccattacggccggggtagcggatcacttcctttcgcccacacattggcggaggagaaaccggaaagttaatcactgccctgctctgagaactcgggcctttaggggcacgttcgcctgctgaccggtcttctgatctccccattcttttccatgcaggaggattggccaccaaagcctgtttattagcagctgccatttgttgaaagaaatttggattattttagaaacaaatttggaaagaaaaagaatggcgtccgtttcagctctaactgaggaactggattctataaccagtgagctacatgcagtagaaattcaaattcaagaacttacggaaaggcaacaagagcttattcag

SEQ ID NO: 113938 - DNA, 1415 bp, Homo Sapiens
  misc_feature (41)..(75): n is a, c, g, or t
gaccgagcgcagcgaggtcatttgagcgaggaagcgggcgnnnnnnnnnnnnnnnnnnnnnnnnnnnnnnnnnnncagtcgacggtaccggacatatgcccgggaattcggccattacggccgggggcccgagcgtcagttcctcatgtgttataaggtaactgtttaagagcaatgacccactcctactttcagcaaagaggtgcacagtagcagtagacccatagaagaggaaggatctgagaagggagtttgaaaaaagtgtaggagaggctgcgagaaaacaaggcaggtgtcctggctgagggcaggaatggagacattgcgatggaaatagtgccccattttctctggaggattgggaagaggacctgtggactgggcggcccacacaactgctgtaacctcaggcagttttcaagcagattgaccttcctgctggaacacggcacatgaggtgaagttctcctctacccaggtctgtccttagcaccttatgcagggtttaacccccatgggcataaacagggtgtgtatctggggtggttggggattaggtcccatgagcactgggacctgaagatgcttggtctagagaagggacggtgttggtctgggaaacatgggggtcatgtcaactatcatatagacagtcacatgggatatttacttagccaatgtggaatttagagagaggcacgtattcacttcacctttgggaagtactaggttctaacacacctccctcgcctggaaagagattgaactaccacagatcgaactcccttggaaggaaggaatttcatgtcccttgaatggtggaccgcctgaaggctggattgacgacacagacgagaatgtcagatgtccaagcttctgtgttacaacttcctctgaaaaggtcaccaaggggcgcagccagtacattaatgggtatcctcatgtaccatcctcccatgaacagcagagtataccgcacgccaggacccaactccccatgctgggcccatacctggagccgcggaaaaccatggttcaacattactcttccccatgaaggacacagggcactaaccaataaccccacccagcgacaaacactccacagtccgaacaaaatcgctaacatcggaacgcaccagcccacataacaataccaacaacatgcccaggggatcaacggaccagcagacccgggcacacggcaaccgtgcacgggcctctacacgcaggcacatctcaagcacagctacacacacacacgcagcgcacaacccacccaccgcaagtgaggacacgagtcaccaagcggctaatacgagcagccgcacaccaccacgacgcacccccccaccccaaacagccgactcgactccgctctcgatccaagcatcacaacaaaccacgccaacacc

SEQ ID NO: 113939 - DNA, 1152 bp, Homo Sapiens
  misc_feature (83)..(117): n is a, c, g, or t
  misc_feature (552)..(560): n is a, c, g, or t
  misc_feature (568)..(676): n is a, c, g, or t
tgactgtatagatcactatagggcgccagctcttagttagccgaacgacgagcgcagcgagtctgtgagcgaggaagcggcgnnnnnnnnnnnnnnnnnnnnnnnnnnnnnnnnnnncagtcgacggtaccggacatatgcccgggaattcggccattacggccgggggagactggaaaaatcctgagcaaacaaaaccacctggcccttagaaatagctttaacttgcttaaactacaaacacaagcaaaacttcacggggtcatactacatacaagcataagcaaaacttaacttggatcatttctggtaaatgcttatgttagaaataagacaaccccagccaatcacaagcagcctactaacatataattaggtgactagggactttctaagaagatacctacccccaaaaaacaattatgtaattgaaaaccaaccgattgcctttattttgcttccacattttcccaataaatacttgcctgtgacattttgccactggaacactaaacttcatgaatcgcgcctcagatttttcctttaacatcnnnnnnnnnggacagannnnnnnnnnnnnnnnnnnnnnnnnnnnnnnnnnnnnnnnnnnnnnnnnnnnnnnnnnnnnnnnnnnnnnnnnnnnnnnnnnnnnnnnnnnnnnnnnnnnnnnnnnnnnagaggcaatgtgccatcataacccagctaattcaggtattagtatgatatttataagtagagacagggtatcgaaatgtgggccaggcgcgattctcgaacgtattcggggcatattagacgagatttgcacgcttggacatcccaaaagtgctggaattgaccagaataagcccaagtggtcagccttatgaacatttactatcatatgccctctatggggaagaccaaagggaagagtatacgaagcaatactcacagggtgtagaagaaccgcaactatacacgtaaattaacacagacttatagacaagtgcggaaagtctacaggaatgacaccagagaagccatgcattacaagaaaccggattaatggtccccaatggtaagagactgtagaatagggaaaacgaagatgccaacagataagagttgcggtatatacgggagaaaacactctcagatgacgaatacaac

SEQ ID NO: 113940 - DNA, 214 bp, Homo Sapiens
gggtccggaattcccgggatatcgtcgacccacgcgtccgcggacgcgtgggaaaatatagtggaatacaattgtctgccgtttccccttcttaatgtatatattgtgagtatttattagattcgtaggtcatattacttatcaactgagccaaatgtctgtgtgcaattgtgtttcctttaccttgtaaaattttgtacagcataaataagta

SEQ ID NO: 113941 - DNA, 353 bp, Homo Sapiens
  misc_feature (278)..(296): n is a, c, g, or t
ggtaccggtccggaattcccgggatatcgtcgacccacgcgtccgcccacgcgtccggcaggccagaaggtgggagccagcgggggcatcgccgcccgcgcccctctaagtgccgggccgcaagctccaccgcagccgcctgcaagcagcggcgcctcggccctcgacctgcgcgcaaagcctggtgctggagccgtcctccccgcgggggggaacgggacggggaacccaaaccaaatcgaaagctcccaccatggccctgggggttctttcccccnnnnnnnnnnnnnnnnnnnacggcccataattaaaccaccccggtggtggttcccccggggaaaaaacccccaagt

SEQ ID NO: 113942 - DNA, 745 bp, Homo Sapiens
cagtcgacggtaccggacatatgcccgggaattcggccattacggccggggagtcatggcggagtcctggtctgggcaggccttgcaggctctgccggccacggtgctgggcgcgctgggcagcgagttcttgcgggagtgggaggcgcaggacatgcgcgtgaccctcttcaagctgctgctgctagtggttggtgttaaagtctcctgggcatccagctggcgtgggggttctacgggaatacagtgaccgggttgtatcaccgtccaggtctgggtggtcagaatggatccacgcctgatggctccacgcatttcccttcgtgggaaatggcagcaaacgaacctctcaaaacccacagagaataagggaatggcagcagagggtctccaagggcatcactgggtctgctggcttctacactgggttctgctactccccagacctcagggacaactgccgggggttcagggtatggtagcagggagtacccagtgcctacagggctgtggcctcttctgcctcttaatgcctgctccctcacccatggcactggtgcaagtgaagagtttgcctgtactcttatctgggtgccttaaggagagagatcgtgttcttcctctctcaggggtgataactcaggaagcctctgggtagggaagaccatcaggtctattgtcttaggtagcctattcctgtccctcttccatccccaaagatgtgacccataaaaaatttttcctg

SEQ ID NO: 113943 - DNA, 771 bp, Homo Sapiens
  misc_feature (41)..(79): n is a, c, g, or t
  misc_feature (82)..(116): n is a, c, g, or t
  misc_feature (245)..(306): n is a, c, g, or t
  misc_feature (700)..(700): n is a, c, g, or t
caagcactgatagactcactatagggcgctactcgtcgagnnnnnnnnnnnnnnnnnnnnnnnnnnnnnnnnnnnnnnncgnnnnnnnnnnnnnnnnnnnnnnnnnnnnnnnnnnncagtcgacggtaccggacatatgcccgggaattcggccattacggccggggggtgggttgtctttttcttatgattgttaaaactctttataacagaaatggtcattgtgatatgagtctgaactgtgnnnnnnnnnnnnnnnnnnnnnnnnnnnnnnnnnnnnnnnnnnnnnnnnnnnnnnnnnnnnnnaatgcaggtggaattatcagtctttcatttttttcttctgtgttctacctgtttcacaggtagaaaagccttagctctttgagattatgtttaaatgccctgtattttcatctagtggttttatggtttattttgtatgtttttttcatccacctggaatttattttgctgttaaaatatgaattagagatccaacttaatttttttcagatggttgttgacttattgcaatatcatgtgttatataatccatctttactgattcgttgctaattggtttctggacttttaaggctatctgatgaactgttgatctggtaccacactgtttcaattattgtagtcttaaaattgctgtacgcttgtggtagggataattttctgttaagtgtcngttgtttataattttccaattagtcttgctcattttttatataaactttgaaatcaatttttctgattttc

SEQ ID NO: 113944 - DNA, 940 bp, Homo Sapiens
  misc_feature (86)..(120): n is a, c, g, or t
aagacgtatagaatcatatagggcgctccgcttagtatccgaacgaacccgagcgcagcgaagtcagtgagcgaggaagcggccgnnnnnnnnnnnnnnnnnnnnnnnnnnnnnnnnnnncagtcgacggtaccggacatatgcccgggaattcggccattacggccgggaatctttgttgatgtgtcagctccgcaggggttggggaaacggccgctgagtgaggcatcggctgtgtttctcaccgcggtcttttcctcccactcttggctggttggaccccgctatggaaaagttggcccctgagccagagctccagcagccttgttagggcgtggcctgaggcttggataagtgggatgtaaaacgaagatcaggagcagatttgaagaattacaaagtgaattggtgccagtcagcatgtcagagacagaccacatagcctctacttcctctgataaaaatgttgggaaaacacctgaattaaaggaagactcatgcaacttgttttctggcaatgaaagcagcaaattagaaaatgagtccaaactattgtcattaaacactgataaaactttatgtcaacctaatgagcataataatcgaattgaagcccaggaaaattatattccagatcatggtggaggtgaggattcttgtgccaaaacagacacaggctcagaaaattctgaacaaatagctaattttcctagtggaaattttgctaaacatatttcaaaaacaaatgaaacagaacagaaagtaacacaaaatatcggtggaattaaggtcatctacatttccagaatcagctaatgaaaagattattcagaaagccctatgatacagactgaccaagaaaatttatttccaaaataaggagcgttcagcatcagaggatttggtggaagaaatagaatctgagtcttatctaggagtg

SEQ ID NO: 113945 - DNA, 849 bp, Homo Sapiens
  misc_feature (45)..(79): n is a, c, g, or t
  misc_feature (345)..(377): n is a, c, g, or t
aaaaaccggacgagcgcagcgagtcttgagcgaggaagcggccgnnnnnnnnnnnnnnnnnnnnnnnnnnnnnnnnnnncagtcgacggtaccggacatatgcccgggaattcggccattacggccgggggggaatgtctgtatcagacatcatgggagcagatccaggcgacatcaaagggaagcatgagtctccaggaccagaggggcttggatgcagatgatcatcatctgggcactgctggatactgagctctctgactgccacccctgcctgcctgcccggccctgcacaacatgcagccctccggcctcgagggtcccggcacgtttggtcggtggccnnnnnnnnnnnnnnnnnnnnnnnnnnnnnnnnnccagcctgtaacctgtgcctacaccacgccaggcccccccagagcccagttctggtcagcctatgtgccatgccagacccaggaccgggatgccctgcgcctcaccctggagcagattgacctcatacgccgcatgtgtgcctcctattctgagctggagcttgtgacctcggctaaagctctgaacgacactcagaaattggctgcctcatcggtgtagagggtggccactcgctggacaatagcctctccattttacgtaccttctacatgctgggagtgcgctacctgacgctcacccacaacctgcaacacaccctgggcagagagctccgctaagggcgtccactccttctacaacaacatcagcgggctgactgactttggtgagaaggtggtggccagaaatgaaccgctgggcatgaatggtagacttaatcccagtctcagatgctgtggcacggggggcctg

SEQ ID NO: 113946 - DNA, 611 bp, Homo Sapiens
  misc_feature (276)..(329): n is a, c, g, or t
tggtacaaaaagcaggctggtacggtcggaatcccgggatatcgtcgaccacgcgtcggatattgttcataacattaaaacaataaagggctcataataaataaatatatttttgacacaattaaatattacatagagtatgtttacaacaaatatcctgtcagccaaatggttacccatataaaatgtaatttaggttttgctacttgcatgctaacatttttaatgtattttatgatctatgtcatatattaaaaaagagcttgcttactacannnnnnnnnnnnnnnnnnnnnnnnnnnnnnnnnnnnnnnnnnnnnnnnnnnnnncttgatctcaactatcccccaaatgcatcctataagtccatcctaatgagaaatgatgttctatttaaggaaaggaaaatattccgggaaggcaaaaaatgcagtgctgtttggaagtgtaatgattttatcacatggtgaatgactactaagagtaatgattatatcacattgtgaatgactacttgccacagtaaaaatacatgaagaatgtgttaggtttaaacgtcgtttctttcttctaaaaaatatttggttagtaccttcactgagcaatagtgg

SEQ ID NO: 113947 - DNA, 1052 bp, Homo Sapiens
  misc_feature (83)..(117): n is a, c, g, or t
catcgatagatcactatagggcgctagctctgtagtagtcgaacgaccgagcgcagcgaagttgtgagcgaggaagcggacgnnnnnnnnnnnnnnnnnnnnnnnnnnnnnnnnnnncagtcgacggtaccggacatatgcccgggaattcggccattacggccgggggcccacactagacatggcgcttgccagcgtgttggagagaccgctaccggtgaaccagcgcgggtttttcggacttgggggtcgtgcagatctgctggatctaggtccaggagtctcagtgatggtctgagcctggccgcgccaggctggggtgtcccagaagagccaggaatcgaaatgcttcatggaacaaccaccctggccttcaagttccgccatggagtcatagttgcagctgactccagggctacagcgggtgcttacattgcctcccagacggtgaagaaggtgatagagatcaacccatacctgctaggcaccatggctgggggcgcagcggattgcagcttctgggaacggctgttggctcggcaatgtcgaatctatgagcttcgaaataaggaacgcatctctgtagcagctgcctccaaactgcttgccaacatggtgtatcagtacaaaggcatggggctgtccatgggcaccatgatctgtggctgggataagagaggccctggcctctactacgtggaccagtgaaagggaacccggatttcaggggcaaccttctctgtaggttctggctctgtgtatgcatatggggtcatggatcggggctattcctatgacctggaagtggagcaggcctatgatctggcccgtcgagccatctaccaagccacctacagagatgcctactcaggaggtgcagtcaacctctaccacgtgcgggaggatggctggatccgagtctccagtgacaatgtggctgatctacatgagaagtatagtggctctaccccctgaaagagggtggatgcagctgcttgtgtttcttgggggtgactgtctttggtaatacggacacagtgacccatcctccc

SEQ ID NO: 113948 - DNA, 928 bp, Homo Sapiens
aaaaaaaggaggagaggggctggggaactcaggccacagtcatgaaaggatgaatacaaatttctaggtttataggttcaccatatcgaagtctttgagaatcccaatatggaatatcaattattttgcaaaaggtagagaaagcagttctcaacttttgcaaatggaaatacagtggaaaaacactgttgtatatattccaaaataaatagtctcgatttcaatgctaacaaaacaacaggaagggtactcgtgagcatctcacggttaagtcagaaatgatcggttcacacacgtctgatttcagaagtacaacagcaaggtgcagcaccatagacacatcggtttcggctgttaaaagatggatcgttttaaaaactgtgttttccttccttaatttttggtcagtgaagctagcacttgtttgctgaactgtggaagaactgcaaggtcacacacattattcatgataaagcaaccgagctgacgagtctgtgcttaattcaagaataaccagtaggagagagagaaaacacaaggagttaaccaccatcgccggtgctctctcaaaggaagaggggttaacagatgaattcacaaaggtaggcagatctatacagaacactgaatgccatgtgtaaatcctcatgaaactccagaaacaggaacaccacacaatgtatatactttgatttacacattccgttacaaaggaaaaaaagacaccattacagctttgtaactgtgttaactgcaatataaaccaagtccagagtttggcaggtaactaaaagagggttatcacttaggttatatagcaaaagtgttgatgtatattatatatagtagtataaataataaaaaagtattatttaaatcccggccgtaatggccgaattcccgggcatatgtccggtaccgtcgactg

SEQ ID NO: 113949 - DNA, 1259 bp, Homo Sapiens
  misc_feature (712)..(712): n is a, c, g, or t
  misc_feature (1129)..(1163): n is a, c, g, or t
  misc_feature (1206)..(1206): n is a, c, g, or t
caaataaacctaaccaaggtaaatgtaaatacaggcgtggttctaattttctttcacacaatcccagacaaccccaaataactttataaatacgttatgaaaaaaagcaatttaaaaacctatcaaatctatttaaaatatataaatgcagacctctcaaatttccttcaatcaggccagaaattatcacaaaaattataatcacagttacaaacagaatgagtggaatgtttgtaagtttaggacaaccaaaaaagccccatgtaactttttaaaaatataatcattcactcaaatatactgtaaataggaatggcagtaacacaggaagcaaaaataaacttgcaagtgaaatttctagaagctcatgaaaacaataccatcccatattgcagatacaaaaggaaaaacagttctaatggggttaagagtactctggtcatcttcgttcgtttggtcgtgcaaggtgttaactattttcacttcccatatcacaaagttagtccacaggaggagctggtggatcttgtccattatgaggactggttggctttccaggtaggctggatcctcttagattaggaggtctcagtaagaacaagatcaatgcaataaccatccaggctaccaagatcattgtaacactgatgccattatcaccagagggtcccggtaattcctgaagacactctgtgtctgtgcagttacgganctggggactgccgtaacagattgatcagtcttctcattgcatgttcatgagagcaaacacattcacagggatcaaatccaccttctgccatgattacccagcttgatttctagcgttgacctgtttaaatccgcccagacaacaaccgatggggcggggaggatgggagccccgggaccgaaggcatcggccagaaagaccgcctggagcttccagaaggctgcggctgcatccccgcgacgacatgctgccactgccgtttctggccgccggcttcctccccctcctctgttttgattcgagtgaccacgtcactcttagccacaagacccggatctgccggctcccgcgggcggcggcgcaacccccggccgtaatggccgaattcccgggcatatgtccggtaccgtcgactgnnnnnnnnnnnnnnnnnnnnnnnnnnnnnnnnnnncggccgcttcctcgctcactaactcgctgcgctcgtcgttcgnctcatcaacgcgaggccctatatgagtgactcagttttgctgttgttgttgtt

SEQ ID NO: 113950 - DNA, 1140 bp, Homo Sapiens
tcttgagtgggtggcagagactcctgcgatgcccgtctcaggtagctgtggggcaccagcccacaagctgaggttggctctcctaggagtgagaactgcccaagggctgcagaaacaggccacccagctctatatgggggctccatcggtgggtagggggacagtgggggcagttctgggcccacccagccactgttcctgaccccaagtcctggtgactttctgaggtgcccactcccatccaacctgccttgctggccagccttgtggctttgcccagctgtgtgtgtgagggtggcatgcccacctccagtccagcccagggcggtagcagcaaagcgtggcatcgcctcggtttcttacaaaaattcataataatattaataataatatactcgacattgtcgggctggggcgtggcccgggagtccgtgtggggcaggcaaggtgcctacgaggggcagggggcgtgttgttggccccggcctgggcgcggtgctgcaggtccaggggctgtgggggcggggcgccgggtcgggccgagtgcagcaccaggttcttgacacagcctgtgatgcccgaggagaatctgcccccggtcagcgtggccacgtcaggggctccgccgatgtagacgctgcccttggcgttgactgccacgttgggacctggggaccggccgctgaccagctcctcaccgtcgacttggatggaacctctgcggccctcccgcagtgctgtccctgtcaagcatttacccagcccatcctgggccttgttgccctcaattaagcccagggctgctgagatgcctgggtccaggccctgccctgagcattctcactgcctggcaggggaggcaggctggggtgcttatgtacacagaatggtttcctttggcagtgccagggctgtgccaaaggtggggagcagccgtgagagctagaggagctgagcacacatgatggagggcttcctggaggtggcaagcctgcctcgggcctggagagtaggggagatgagggcattccaggtggggttatggagggaggccttcccacccgagtctgcctagctggcctcgtgccgaattcgccacccaggcctcgctaccttagagaccgttatagttactgccgt

SEQ ID NO: 113951 - DNA, 836 bp, Homo Sapiens
ttggcaagtatgtgccacccaccagcattttgaaagcaggatgagcaagtgctctcggttcctcaatgacacgtctctgcctcacagctgcttcaggatccagcattatgctggaaaggtgctgtaccaggtggaaggattcgttgacaaaaacaatgaccttctctatcgagacctgtcccaagccatgtggaaggccagccatgccctcatcaagtctttgttccccgaagggaatcccgccaagatcaacctgaaaaggcctcctacagcaggctcacagttcaaggcatccgtggccactctgatgaaaaacctacagaccaagaacccaaactatattaggtgtatcaaaccgaatgataaaaaagcagcacacatcttcaacgaggctctagtgtgtcatcagatcaggtacctggggcttttggagaacgtccgagtgcggagggcaggctacgccttcaggcaggcctatgaaccttgcctagaaagatacaaaatgctttgtaaacaaacatggcctcattggaaaggaccagccaggtctggtgtggaggtcctatttaatgaattagaaattcccgtggaagaatactcctttggtagatcaaagatattcatccgaaacccaagaacattattcaaattagaagacctgaggaagcaacgcctggaggacttggccactctcattcagaagatatatcgggggtggaaatgccgcacacacttcctgctaatgaaaaaaagccaaattgtgattgccgcctggtacaggagatatgcgcaacaaaagaggtaccagcagacaaagagttccgccttagtaattc

SEQ ID NO: 113952 - DNA, 1005 bp, Homo Sapiens
  misc_feature (63)..(97): n is a, c, g, or t
gggcgctagctcgtcgagccgaacgaccgagcgcagcgaagtattgagcgaggaagcggccgnnnnnnnnnnnnnnnnnnnnnnnnnnnnnnnnnnncagtcgacggtaccggacatatgcccgggaattcggccattacggccgggggagactgacgtgtgagctgcatcgcgggaggcgcatggcggggatggcgctggcgcgggcctggaagcagatgtcctggttctactaccagtacctgctggtcacggcgctctacatgctggagccctgggagcggacggtgttcaattccatgctggtttccattgtggggatggcactatacacaggatacgtcttcatgccccagcacatcatggcgatattgcactactttgaaatcgtacaatgaccaagatgcgaccaggatcagaggttccttggggaagacccaccctacgaagttggaatgagaccatcagatgtgataagaaactcttctagatgtcaacataaccaaccttataaagactaaaattcatgagtagaacaggaaaatcatcctgactcatgtgttgtgttctttatttttaattttcaaagaggctcttgtatagcagttttgtctattttaacattgtagtcattctgtactttgatatcagtattttcttaacctttgtgactgtttcaatattacccccgtgaaagcttttcttaatgtaactttgagtacattttaattgccttctatttttaaaactcaaaatcattagttgggctttactgttcttgctattgtatggcatatacatctgcctggatatatttctaactcttgaccaaagttttgtaaagaacaatataagatttcgggtaaggggtatggggagggaagatattttattgaaaaactacttaacaaaagatttatctgtaagcttgaactcaggagtacagttttagctatctagactctaacagcttttgctttaaaattattaaagtgtttcttaatg

SEQ ID NO: 113953 - DNA, 943 bp, Homo Sapiens
aactgtctattgctattgtgcttaagtttcggcattggatatatgaacgctgattcctttaatgatcaagtcctctccacaaagagactgcgcaatctgatcatctgcaaatgtaacaaaggcaaaggcctgaatggcttggggatgaagacatccatcacatccccgtactgagagaagaactcccgcagctcatcctcagtcatgtcctctgtacagcgccccacaaacacttttctgcttctcaaaggctcatcttggctttgcttagaattaggaagtttgcagtcacaccatcgtccatctatcatatgtcgctgtgacattactttcacttgtgtttcatattccgtaaaacgaacaaagccaaacccctttgaatgaccagtcttaagatctttcttgacctgcaccataagaacttctccaaaggtactaaaatactctttcaggtcctgttcggttgttttccatgggagacccaacactattaaatcggatgttttctggactgctcttttcactttcactgctgatgaagcatctgtctcatccatttttcttttgttatcttttggatagttgacaacatacaccagatttccccagccagcatctggggcatgcagaattccttctaccagccggacacctctcatacactgagacactggattcctgtagcgaagcccacacgcccctggaaactgggctgtaaccgtggagagcagcaccgtcccatcgtcttccgatggtatttcaatgggcgcatcgttctcatcttcggttacccgaatatattcagacatcttttacttttcccgctaggccgctgctgggaagcccgacagggacaccgaagcagcgacggacccaagcgcagcccagccacccccggccgtaatggccgaattcccgggcatatgtccggtaccgtcgactg

SEQ ID NO: 113954 - DNA, 1144 bp, Homo Sapiens
  misc_feature (677)..(732): n is a, c, g, or t
ttggaaaatctaaacatttttatcttcataatttaaaaaatatatatgtatatattgcatattcactttttcctttaggtagagatgatttcaatccaaatactcttactttaaaaaatttcctttccccaagaatctccttgggactttgacttatttttaaagctgtgttggagctcagcttgttccctgatgtgtctcgagcccattggtagggtcatacaaagcccacggttacaagcagtggtaggattgcagccgtgggcctgctggacacacacatacaccaaagatgtatttggatctgggcaccccctcccaggatccctgtactcacgtgccagtctcctgactagagcactttactctgtttcctcagccctgcagcccctgggagcacacactgggtgcagccctgggccaggcacgggaggccctgccctgtgctgcccaggggctgtgtgcaccacatgagcacatttccctctggcctggcggcctccaggctggctgtggaaacagttcctgaggaaattagagattctatgaattgtaggagtattaaagaccaggctgttggcaccagaacttaaagcgatgactggatgtctctgtactgtatgtatctggttatcaagatgcctctgtgcagaaagtatgcctcccgtgggtatacnnnnnnnnnnnnnnnnnnnnnnnnnnnnnnnnnnnnnnnnnnnnnnnnnnnnnnnnggaaacttactgcacgttttgtgccttgacaacctctccctatgtgacgtttgtaaaaagtgtcctgtgacttaacacagaaacgcaataaacacacacaaaatagtttcatgagtgattcttcagatgcccttcccaactggttagttgatcaagaattttgggggtgggggttgcggagaaatcaagtttaaaattcccttctgattaaaaaaatatagtggaatacaattgtctgccgtttccccttcttaatgtatatattgtgagtatttattagattcgtaggtcatattacttatcaactgagccaaatgtctgtgtgcaattgtgtttcctttaccttgtaaaattttgtacagcataaataagtaaaaaaatcactgtttttctcaactttttcaaaatcaaa

SEQ ID NO: 113955 - DNA, 740 bp, Homo Sapiens
ttgggtgcctggccccagagccaccagcacctctccaaggagtcgctggcggggaacaagccggccaacgccgtcctgcacaaggttctgaaccagctggaggagttgctgagcgacatgaaggcggacgtgacccgcctgccagccacgctgtcccgaataccccccatcgcagcccgccttcagatgtccgagcgcagcatcctcagccggctggccagcaagggcacggagcctcaccccacaccggcctacccgccgggtccctacgctacacctccggggtacggggcggccttcagcgccgcacccgtaggggccctggccgccgcaggcgccaattacagccagatgcctgcagggtccttcatcacagccgccaccaacggcccctccagtgcttgtgaagaaagagaaagaaagggtggggggcattggtgtcagaagggctggaatcggaaggaccccccacccggggaggggatctggatagacgactgactggatcccaggcctgcccttcacccaggccccgtccccgaggccgacccccagctcaagcgctggggcctgctgccagccctccaccttctccaccccttgggccatcactgggctaggaacccctttgcccctctctgcagctcctctcttcagaagggccctttgtctttctccactcccacacacctttcccacgaagctttgaagactgtgctggtgagaaaaagtctgggtgg

SEQ ID NO: 113956 - DNA, 862 bp, Homo Sapiens
gacagggggaattagaaccatctaaggagtcccctaaagaaaagatgtcaaaaaagagaagcacctcttagtttctcacagtgctttatttttcctaaaagaaatgctaattcatattcactaggaacaagatttaagagactgctaattagtttctttagaacttgatgtataaatttaatatcccctgtatagagggagttgtcgtcccatggaggatttcagtatatgtggcacaaattgtcaggctcctctccccacacactgttaatgatgttgctgcctttatgttttaattttcaatgctggaggccagtgtcacaatcacaatagtttttatggcttcctcttctcacatatagagttggattgtttccacaaagaaaaagcaaggcaaatagttgagggggacgggctagaaaaagctgatgccaaaccggaccagcctgagaggaagcgcctcggcccgggccttactctccaccgactgcgtcaggatgagctccaggttttctttgggccgatgcttcgtgtcctccaccagcttatagacgcgatgtcgccggtgcaggcgcgacttccggccctccccggccagcggtaccttccaccagcgctccacgatgaccgtgccccgattttgagaaaggctgaagttgcaggccaggtcaggggcgttcccttcatgtcgcggccgcagtagctcctggacgcctccccgaagcagccgtccagcgcccgcccgcagcagagctctgcccggggccgtgacaacgggcgccgccatgttcacaggcacagaatgagacctccccggccgtaatggccgaattcccgggcatatgtccggtaccgtcgactg

SEQ ID NO: 113957 - DNA, 1555 bp, Homo Sapiens
acataataaagactttgtacaaaaaagttggggcagtcgggggaaccgcgaagaagccgaggagcccggagccccgcgtgacgctcctctctcagtccaaaagcggcttttggttcggcgcagagagacccgggggtctagcttttcctcgaaaagcgccgccctgcccttggccccgagaacagacaaagagcaccgcagggccgatcacgctgggggcgctgaggccggccatggtcatggaagtgggcaccctggacgctggaggcctgcgggcgctgctgggggagcgagcggcgcaatgcctgctgctggactgccgctccttcttcgctttcaacgccggccacatcgccggctctgtcaacgtgcgcttcagcaccatcgtgcggcgccgggccaagggcgccatgggcctggagcacatcgtgcccaacgccgagctccgcggccgcctgctggccggcgcctaccacgccgtggtgttgctggacgagcgcagcgccgccctggacggcgccaagcgcgacggcaccctggccctggcggccggcgcgctctgccgcgaggcgcgcgccgcgcaagtcttcttcctcaaaggaggatacgaagcgttttcggcttcctgcccggagctgtgcagcaaacagtcgacccccatggggctcagccttcccctgagtactagcgtccctgacagcccggaatctgggtgcagttcctgcagtaccccactctacgatcagggtggcccggtggaaatcctgccctttctgtacctgggcagtgcgtatcacgcttcccgcaaggacatgctggatgccttgggcataactgccttgatcaacgtctcagccaattgtcccaaccattttgagggtcactaccagtacaagagcatccctgtggaggacaaccacaaggcagacatcagctcctggttcaacgaggccattgacttcatagactccatcaagaatgctggaggaagggtgtttgtccactgccaggcaggcatttcccggtcagccaccatctgccttgcttaccttatgaggactaatcgagtcaagctggacgaggcctttgagtttgtgaagcagaggcgaagcatcatctctcccaacttcagcttcatgggccagctgctgcaggttgagtcccaggtgctggctccgcactgttcggcagaggctgggagccccgccatggctgtgctcgaccgaagcaccttcaccaaccaccgtgttcaacttccccgtctccatccctgtccactccacgaaaagtgcgctgagctaccttcagagcccattacgacctctcccagctgctgaaaggccacgggaggggaagctcttcacatcccattgggactccatgctccttgagaggagaaatgccataactctgggaggggctcgagaagggctgggcccttatttatttaactccacccgaattccctctgggttcctaaccaatttaggttgaagaacttaccgttcaagaacttttgctgaacctcaccacaattccggaaccattataatag

SEQ ID NO: 113958 - DNA, 1274 bp, Homo Sapiens
  misc_feature (389)..(398): n is a, c, g, or t
ttctcccctcgcaggtctcatcaaaatcccaaagtccttaggagtaacacagattgtactggcattaagtgacaaaatgtgcagcctgtatttgactgaggaggaaagaaatggcacctaggcagcagcgctagggtcagcaaggagaccggctagggtctcagtaaagcagaactgtttcaaatgggactagaccggggcatgtgcttccggtgaatcctcttgaaacctaaagtaaatgggaaggccgccctaacagttgtactgacataaagggagacccttcttaatattctggcagctgacttccttcactgaacaactattatcaaaaggcgagaggcataaagtgcacactgtagaataagaagagactgaattatgatggnnnnnnnnnntcgtaacttccccaaagaggtgtggacagtgtacctagcctcacaaaggtccttaataccctcctgtgtgctgccaaggaacacctgtgaattccagatggggaggaaggctctgacttaagtggaaaaattcctccggcatggttgtcagcaggaaggtttcacgtaaggttatcccttatgtggagaacatgggttatcctgctgttcacgccagatacattttactgacaacagtcagatggtgattccactcatctggccttgggacagcagaaaacgaagtggaagaacaatagctggccagggacagaattaaattttcctagagatggtgttctagacagctatgccaaggccactgggaatttctcaggctctccaagttaatttctgtggggtgccttactctgccatgtgggatttaccccaacaactgaggactgcagtggatagtaaccatataattgctaccaaaaacagtggtccttaggttttagttaagcaagagagaaagccttgagactacaactccagcaacagttaggctttatgttgatctggaccccccggccctcacagcattctaggaactacagtaacgtcagtcggttgcagtggtacaacgagcctgcaccagtctagctacggaacactttggaatacttgtcagagcgcactggcatctgttaatacatggcctgacccatgtacccattaccataaactcaaccacagacgagacatccagaggttaaaaaaaaccctattacttcaacatagcaatagagagaaaggataaaagctgcctccagaaggtggctgccccggccgtaatggccgaattcccgggcatatgtccggtaccgtcgactg

SEQ ID NO: 113959 - DNA, 831 bp, Homo Sapiens
  misc_feature (631)..(757): n is a, c, g, or t
cagtcgacggtaccggacatatgcccgggaattcggccattacggccgggggagcagagatgagagcaaaattcagacttgctgcccctgtgtgtctcagttctcatgtctctctgagaaatgtgttggcccaattccctatctgccactctgagtctcttgagtaaatgtgtgtaaatgagaaaaattatctcaaagatttaacttattatttagatattttcttctttttaaactcaggaataaacctggtttgtagataatataatatggctactagagctataattgagtaggtgactagaagcattttttcaaatatatttcttgtaaagacatctactttgttttaactaggaaaagaaactcctcatattaaaataaacatttccataagcactttctagaagagtgtagcatccatctaccatccatcccagaatgtttgtatcttgctcatagtatttcaaaaatttttatgggtgaaaaaaatgcacttttttatttattggaaaagtgtagagttattgaattaaattctcaagtgggacaactttagtgtaacagggaaaccatgggtttcggagacaagagcacagggctgtggtccctgttccagcattgactttannnnnnnnnnnnnnnnnnnnnnnnnnnnnnnnnnnnnnnnnnnnnnnnnnnnnnnnnnnnnnnnnnnnnnnnnnnnnnnnnnnnnnnnnnnnnnnnnnnnnnnnnnnnnnnnnnnnnnnnnnnnnnnagataagcacgaatgctttcaactcttcggaagaaagtgctatataaattgaaattgtgttttttaatgatcca

SEQ ID NO: 113960 - DNA, 931 bp, Homo Sapiens
cccgatgatgggacacaggccccacacggaggacacctcctctttgaacacccagcgggagagggccacagctagttcatagttgcctgtctgggaatacctctgggagccgggcgccgctttctgcactgctgagttgaagaaggagtcgctgaagaagtcgagggagccgctgaagatgacgcgggcattgttcctggcctggagcccagcaatgaggagggtgttcttccccaccgcatgtggatactgggtgataggcttgtccgggaagaaggagtaagaggtggaagagcccgtcaggatgtccagcaccaaagggttatcaggatcggccaccatcccaacacctcgaaagaggatgggatttagagatgatttcccaacgatggttggggccttcagcaggttctcagtgtcagccacgatgagcgtatgctggccaaggtctgagatgtcatagttgtgatggtcaatgacagccgttttctcctcgtcaaactcaatcccgcactcactgcccagctctcgaagagggtcaccaatgtcggagctggcagctaccagcacactgcctccgccgtcaataaaggcactgatggtctccacgttgatgttgcctccaaaatcttctaccgaaggggagaaaatgatgagattgtcatagaggaattccccatactttatgagagacaggctggggtcatcagcggtcttgaatgtgagctcaaagccccggtccttcaggctccggaagaaaagcgaatgagtctcccgcacgttgaggttgtccagcagcactaaggtgcggggtccgctggcgcaaaccgcgccaagcaagggcagcagcaaccaaaagagggcccaagcccgggccgcggtgctgggctccatcttcccaacttttttgtacaaagttgttcattaggtt

SEQ ID NO: 113961 - DNA, 703 bp, Homo Sapiens
  misc_feature (46)..(80): n is a, c, g, or t
aaacaaccgacgagcgcagcgagtctttgagcgaggaagcggccgnnnnnnnnnnnnnnnnnnnnnnnnnnnnnnnnnnncagtcgacggtaccggacatatgcccgggaattcggccattacggccgggggctcgtgcaatccgcttcagacaggatggtaacgaagccgtcggaggattcttctctcagactgggcagctgtacatggtgcaccatctttgggcttacagggatcttcagaccagggaagacatacggaatgcagcatggcacaaacatggctgggaggaatcggtatattacacagttccacttattcaggaaatggaatccagaatcatgatcccactgaagacctcgcccctccagtaaagctgtagagtttctatgtgcctacatacatttctggtgacaagtatttgtcgtaaattaattttaatgtgtggtatcaagtgaaaaagaaacactgaggttttaagctgctgtatatagcttgtgagaaacctcttttctttaacaatttacataatcacaagaaaggaaagaattacagttggactgattgtggacagtgccttgtcgtcctctttgaaacaccccgtgttgtccagtataccttataacacttagccacttctccccaccctccagaaggggtccacgttgaattctgaatcatctttgaaaataagattccaacg

SEQ ID NO: 113962 - DNA, 1027 bp, Homo Sapiens
  misc_feature (490)..(500): n is a, c, g, or t
  misc_feature (919)..(953): n is a, c, g, or t
gaagcagatttaaaaccggccataaaatgtataagtgagagaaatctgtttaggtaagattctgaactcaccttcacccattggtctggtttgacatttttcaaaaccacattcatctctggcttgtccattagaatttttagtttggcctggttggggtcttcactagtagagattgtgatagggaccatccactggggacaatcttcaccaacatatgacccaccagcacagaacttcttttgggacaacctcaataatctgtcatcttctacctgttcagcttccacataaatgaggggaaatcccatttgtttggtccaggtattcatcacagctgctataggtttaccactagcattttcttctcctccttagtcctatgcctttggatctgcttctctaccactaccttccctaacataaggacaaatgtctggacaatactatatgaaaattcgtcctaagtttcacaaagaaaagtttaggnnnnnnnnnnnctttgaaactactaaactgaagcagaatttaaaaccggccataaaatgtataagtgagagaaatctgtttaggtaagattctgaactcaccttcacccattggtctggtttgacattggttcaaaaccacattcatctctggcttgtccattagaatttttagtttggcctggttggggtcttcactagtagagattgtgatagggaccatccactggggacaatcttcacctaagccagagaagaacaaacaaattttgcactgggacaaacagaaggtaaggtggagagaggagtggtggtgttctaaccaggagcctaagccaaactgttaagtcaatagttcattcttagtggtacatgaactccccggccgtaatggccgaattcccgggcatatgtccggtaccgtcgactgnnnnnnnnnnnnnnnnnnnnnnnnnnnnnnnnnnncgccgcttcctcgctcaatgactcgctgcgctcgtcgttcgaaattacgcgcacgcccaagtaggtaataggtt

SEQ ID NO: 113963 - DNA, 658 bp, Homo Sapiens
  misc_feature (82)..(116): n is a, c, g, or t
  misc_feature (570)..(602): n is a, c, g, or t
caagatgtatagactcactatagggcgctactcttgcagccgaacgacgagcgcagcgagtattgagcgaggaagcggccgnnnnnnnnnnnnnnnnnnnnnnnnnnnnnnnnnnncagtcgacggtaccggacatatgcccgggaattcggccattacggccggggtgggcgtggctgatgggccacaggatggccaggcagattcagcctctctctcagcctccctgcttgctgactggctcgaaggccatggcatgaaccctgccgatattgagtccctgcagcgtgagatccagatggactccccaatgctgctggctgacctgcctgacctcaaggacccctgaggcccccagcctgtgccttgctgccacagtagacctagttccaggatccatgggagcattctcaaaggctttagccctggacccagcaggtgaggctcggcttggattattctgcaggttcatctcagacccacctttcagccttaagcagccacctgagccaccaccgagccatggcaggatcgggagaccccaactccccctgaacaatccttttcagnnnnnnnnnnnnnnnnnnnnnnnnnnnnnnnnncactgtctttttgccatcaaaatgaggcctgtgaaatacaaggttcccttctgaaa

SEQ ID NO: 113964 - DNA, 998 bp, Homo Sapiens
  misc_feature (955)..(955): n is a, c, g, or t
ggaccggtccggaattcccgggatatcgtcgacccacgcgtccggtctggggagcgcagcagccatggcaagccgtctcctgctcaacaacggcgccaagatgcccatcctggggttgggtacctggaagtcccctccagggcaggtgactgaggccgcgaaggtggccattgacgtcgggtaccgccacatcgactgtgcccatgtgtaccagaatgagaatgaggtgggggtggccattcaggagaagctcagggagcaggtggtgaagcgtgaggagctcttcatcgtcagcaagctgtggtgcacgtaccatgagaagggcctggtgaaaggagcctgccagaagacactcagcgacctgaagctggactacctggacctctaccagaatgagaatgaggtgggggtggccattcaggagaagctcagggagcaggtggtgaagcgtgaggagctcttcatcgtcagcaagctgtggtgcacgtaccagaagagctggtggatgaagggctggtgaaagctattggcatctccaacttcaaccatctccaggtggagatgatcttaaacaaacctggcttgaagtataagcctgcagttaaccagattgagtgccacccatatctcactcaggagaagttaatccagtactgccagtccaaaggcatcgtggtgaccgcctacagccccctcggctctcctgacaggccctgggccaagcccgaggacccttctctcctggaggatcccaggatcaaggcgatcgcagccaagcacaataaaactacagcccaggtcctgatccggttccccatgcagaggaacttggtggtgatccccaagtctgtgacaccagaacgcattgctgagaactttaaggtctttgactttgaactgagcagccaggatatgaccaccttactcagctacaacaggaactggagggtctgtngcttgttgagctgtacctccacaaggataccccttccatgaag

SEQ ID NO: 113965 - DNA, 1012 bp, Homo Sapiens
  misc_feature (84)..(118): n is a, c, g, or t
  misc_feature (310)..(338): n is a, c, g, or t
gaactgtatcgactcactatgggcgctagctcgtagttatcgaacgaccgagcgcagcgagtagttgagcgaggaagcggccgnnnnnnnnnnnnnnnnnnnnnnnnnnnnnnnnnnncagtcgacggtaccggacatatgcccgggaattcggccattacggccgggcggaatccttggtcagatgatgaatccaagtcagaaagtgatttggaagaaacagaacctgtggttattccaagagattctttgcttaggagagcagcagccgaaagacctaaatacacatttgatttctcagaagaagagnnnnnnnnnnnnnnnnnnnnnnnnnnnnncaataatgatttagaggaattgaaagttaaagcatctcccataacaaatgatggggaagatgaatttgttccttcagatgggttagataaccgatgaatatacattttcaccaggcaaatcaaaagccactccagaaaaatctttgcatgacaaaaaaaagtcaggattttggaaatctcttctcatttccttcatattctcagaagtcagaagatggaaaaccgtcttcagatacagtccctaagcccagagagccccaaaacagaagaaagtagtagaggctgtaaactctgactccggattccgaatttgggcatttccaaagaagacttacaacaccaaaaggtcaaggccgaggggcaagaaacaggcaaggctctggctctgaaccatgaacgccgattatttaaccctgggcaggaaaaacattccaaaaacaacaagccagaaaacggaggaagaccatcttttcgatcaagggattcagcatggtgtgaccttctttccccttccaaaactttccgctaatggagacaccctttttctttggcaacgaaaaccgggtcgggcctaaggcaacgcacgtgtaacatatctttgcaccaagcctctgactgaagaaacaagaatgcaactgttgaatttggcacatggtttcattcacgtggcccaa

SEQ ID NO: 113966 - DNA, 1102 bp, Homo Sapiens
  misc_feature (44)..(78): n is a, c, g, or t
  misc_feature (797)..(825): n is a, c, g, or t
  misc_feature (852)..(852): n is a, c, g, or t
ccgaacgacgagcgcagcgagctattgagcgaggaagcggccgnnnnnnnnnnnnnnnnnnnnnnnnnnnnnnnnnnncagtcgacggtaccggacatatgcccgggaattcggccattacggccgggggaaaaagttgaagaactgattaaacagagagatgcaaaagggcgagaggtcaatgatcttaaaagaaaatctccttcagatctttggaaagaggatttagcggcatttgttgaagaactggataaagtggaatctcaagaacgagaagatgttctggctggaatgtctggaaaagcaattaaaggtaaagttggcaaacctaaggtgaagaaactccagttggaagagacaatgccctcaccttatggcagaagaataattcctgaaattacagctatgaaggcagatgccagcaaaaagttgctgaagaagaagaagggtgatcttgatactgcagcagtaaaagtggaatttgatgaagaattcagtggagcaccagtagaaggtgcaggagaagaggcattgactccatcagttcctataaataaaggtcccaaacctaagagggagaagaaggagcctggtaccagagtgagaaaaacacctacatcatctggtaaacctagtgcaaagaaagtgaagaaacggaatccttggtcagatgatgaatccaagtcagaaagtgatttggaagaaacagaacctgtgggttattccaagagattctttgcttaagagagcagcagccgaaagacctaaatacacatttgatttctcagaagaagagnnnnnnnnnnnnnnnnnnnnnnnnnnnnncaataatgatttagaggaattgaaagntaaagcatctccccatacaatgatgggggagatgaatttggtccttcagatggggtagataaagatgaatatctttttcccagggcaatcaaagccactccaaaaaatcttttcttggacaaaaaagccaggatttgggaaatctcttctcatttccctcatattcccgaaatccaagaatgattccgctaaattggacagttatggaaaaaaatccggcttccggtttttccccctcattgggtcctga

SEQ ID NO: 113967 - DNA, 1150 bp, Homo Sapiens
  misc_feature (43)..(43): n is a, c, g, or t
  misc_feature (56)..(94): n is a, c, g, or t
  misc_feature (97)..(131): n is a, c, g, or t
  misc_feature (1061)..(1069): n is a, c, g, or t
caattcttaacccttaaatttaagggcgggggggcccgggccnctagtcgtcgagnnnnnnnnnnnnnnnnnnnnnnnnnnnnnnnnnnnnnnncgnnnnnnnnnnnnnnnnnnnnnnnnnnnnnnnnnnncagtcgacggtaccggacatatgcccgggaattcggccattacggccggggagagtttggggatctacagcagccaaaggcttgtccctgactttatatggctgcgcctggcgagcgactgagtcgtccgtgaggaaaaagaggcgaggcttttccgagatcgtctcagcgatggcgcttcggtcgcagttttgggggttctcggtttgcaggaaccctgggtgcaggttcgcagccctgtcaaccagctccgagccggcagcgaaacctgaagtggaccctgtggaaaatgaagctgtcgccccagaattcaccaaccggaacccccggaacctggagcttttatctgtagccaggaaagagcggggctggcggacggtgtttccctcccgtgagttctggcacaggttgcgagttataaggactcagcatcatgtacaagcacttgtggagcatcagaatggcaaggttgtggtttcggcctccactcgtgagtgggctattaaaaagcccctttatagtaccaaaaatgtggtggcttgtgagagtatcggacgaatgctggccccgagatgcttagaggcgggaaatcaacttcatggggtctacccaaccaccccgcggggaggcagccttcacactctgatgaaaccgactaccaaggtggccattgaccaaaaggtgggggtggtttctaccgggaacccttccaaacaattctattgaataaacggggaagccttaaattggtttttggaaccatggaaaataataaaattcctggccaacccctttacaccccaattcaaaaacaagagccattctgggaaaacaaaccaccccacctcttgggaaaagtttttacccgccacaaatacggttgaccacggggcaaaaattaattctctcagattaaggggcgctttcctnnnnnnnnntttatccggtttttttataaaaccacagaaacttcctgttggggccccccctccctggggggctgttaaaaagcaccccta

SEQ ID NO: 113968 - DNA, 1021 bp, Homo Sapiens
  misc_feature (81)..(115): n is a, c, g, or t
  misc_feature (647)..(685): n is a, c, g, or t
agtcgatacatcactatagggcgctagctcgcctgagcgaacgaccgagcgcagcgaagtagggagcgaggaagcggccgnnnnnnnnnnnnnnnnnnnnnnnnnnnnnnnnnnncagtcgacggtaccggacatatgcccgggaattcggccattacggccgggggacatccagttccccagctgtagttatgtatctgccttcaagtctctgacaaatgtgctgtgttagtagagttgattgtatcatatgataatcttgcacttgactgagttgggacaaggcttcacataaaaaattatttcttcacttttaacacaagttagaaattatatcccatttagttaaatgcgtgatttatattcagaacaacctactatgtagcgtttattttactgaatgtggagatttaaacactgaggtttctgttcaaactgtgagttctgttctttgtgagaaattttacatatattggaagtgaaaatatgttctgagtaaacaaatattgctatgggagttatctttttagatttagaataactgttccaatgataattattacttttatatttcaaagtacactaagatcgttgaagagcaatagaacctttaagacagtattaacaggtgtgaaacaatggcattnnnnnnnnnnnnnnnnnnnnnnnnnnnnnnnnnnnnnnngcggtctcaatcttttaatactgccttataatgcaaatataaaggtcacctgaattgctacttggcttgaattagcacattccaattgaagttttaagtttttaaaaactaatttaaatgtttactaattgtatagaagtgtactaaaaataattctgttgttgcaaaactttgtacttggaaatccaagtacatgaggggattttttttctttcaactataatttatgtgatccctttcttagaattataacaataatggtgatggcaaatgaaagtttcacatgatacgggctctttagcttgcattaatattccctgatcatcttttaatgct

SEQ ID NO: 113969 - DNA, 798 bp, Homo Sapiens
  misc_feature (84)..(118): n is a, c, g, or t
aagattgatacatcactatagggcgctagctcgcccgcagcgaacgaccgagcgcagcgaagtagtgagcgaggaagcggccgnnnnnnnnnnnnnnnnnnnnnnnnnnnnnnnnnnncagtcgacggtaccggacatatgcccgggaattcggccattacggccggggactgagggttgactgactggagagctcaagtgcagcaaagagaagtgtcagagcatgagcgccaagtccagaaccatagggattattggagctcctttctcaaagggacagccacgaggaggggtggaagaaggccctacagtattgagaaaggctggtctgcttgagaaacttaaagaacaagagtgtgatgtgaaggattatggggacctgccctttgctgacatccctaatgacagtccctttcaaattgtgaagaatccaaggtctgtgggaaaagcaagcgagcagctggctggcaaggtggcagaagtcaagaagaacggaagaatcagcctggtgctgggcggagaccacagttttggcaattggaagcatctctggccatgccagggtccaccctgatcttggagtcatctgggtggatgctcacactgatatcaacactccactgacaaccacaagtggaaacttgcatggacaacctgtatctttcctcctgaaggaactaaaaggaaagattcccgatgtgccaggattctcctgggtgactccctgtatatctgccaaggatatcgtgtatattggcttgagagacgtggaccctggggaacactacattttgaaaa

SEQ ID NO: 113970 - DNA, 850 bp, Homo Sapiens
  misc_feature (351)..(361): n is a, c, g, or t
  misc_feature (747)..(756): n is a, c, g, or t
aaggtagcgaggcctgggtggcgatattcggcacgagggcgacagcatcttctgaacctgcacctgctagtgcagctaaacaagagaagcctgcagaaaagccagcagagacaccagtggctactagcccaacagcaactgacagtacatcgggtgattcttctcggtcaaacctttttgaagatgcaacgagtgaacttgtgacgggtcagtcttacgagaatatggtaactgagatcatgtcaatgggctatgaacgagagcaagtaattgcagccctgagagccagtttcaacaaccctgacagagcagtggagtatcttttaatgatcatagtgaaaactggaaacnnnnnnnnnnncagcctcttcttggaaagtgacagcagaaggtggcatggagcttgtgtccttggacaacaaatctggatatactaggattaattatcagaagacagctcaggccaagttttgatcgttccatacagtaccttgtttatctgcttcttaaagaatcagccgagacaccataaaagaaataggctttttgtgccttttgctgttaatgtttaatttacaaactgttttggtaaatctcttaatgtaagtagctatttgactttggaattttgcattcgaggtatactgtcatttcttgaaatctttttctcgtttagttgctctgtgggaaatgtgaggaagcctaagtttgtatttgtaaatttcttatgccatcctctagtcaaannnnnnnnnncattgtttaaaaatacggaagtgttccaatataattttttcctgtactggatggctaggattctagagaattgattataaaatattttcaatac

SEQ ID NO: 113971 - DNA, 944 bp, Homo Sapiens
gctggtaccggtccggaattcccgggatatcgtcgacccacgcgtccgggacggtctgcatactcgctgcccgccggctccctcccccgcgtccctgcgaccgccgcggcgaagatggcctcaggagtgcaagtagctgatgaagtatgtcgcattttttatgacatgaaagttcgtaaatgctccacaccagaagaaatcaagaaaagaaagaaggctgtcattttttgtctcagtgcagacaaaaagtgcatcattgtagaagaaggtatagagatcttggttggagatgttggtgtaaccataactgatcctttcaagcattttgtgggaatgcttcctgaaaaagattgtcgctatgctttgtatgatgcaagctttgaaacaaaagaatccagaaaagaagagttgatgttttttttgtgggcaccagaactagcacctctgaaaagtaaaatgatctatgcaagctccaaggatgcaattaaaaagaaatttcaaggcataaaacatgaatgtcaagcaaatggaccagaagatctcaatcgggcttgtattgctgaaaagttaggtggatccttaattgtagcctttgaaggatgccctgtgtagattattcagtgccacaaattgaaagcttccatgtttaatgttatcctcttgctatataaataaagcaaatatatttaggccagggtctcactgagggggagctgtcttgtcatcttttaaagtaaactattctataaacatatgcaaacagccctaaataaatctaaagcctaaagttttattgatgtgaaatttaaattcctattgggccaaatgcctggcttttggagaagttcgattttataaaagattttttggttaaagccgcagggactttttaaatttacgcgcgggttccccccaaaccggggcaaaaggggccaccggccgat

SEQ ID NO: 113972 - DNA, 994 bp, Homo Sapiens
  misc_feature (562)..(640): n is a, c, g, or t
  misc_feature (662)..(734): n is a, c, g, or t
gtctatccagggggcctttaatagctgagaagtgctgctctttcagatgggggtgccaagcaggccggtgaccccaacctccaccccctgcccctgagaagagactgggctgggccagagaccaatccacggggggaaagcccaccagcacccatcaggcttcccactggcaccctgaaaccttgcccaggctgggccgccagcgtcgttccacaggccttggccagccggggccactcagggaagcaaacccagctcgcatctggaaggccaggcagtcccctcgggtggcttgcttgttgatctctctgtgtcgttctttggttacgatttcctctaggacctcgccatctcccttaataagcctggtgcgccccgtctcagggtccaccaccttgcggatgatgctctgccgggcatcccactcctccttggtcatgggcttcatggcctggattcgggacttctgctcatccgtcaggactgggccatcctcttcctccccagctgatcggtgccactggtccagcgaggggcccggcagagcctccacctgctgtgnnnnnnnnnnnnnnnnnnnnnnnnnnnnnnnnnnnnnnnnnnnnnnnnnnnnnnnnnnnnnnnnnnnnnnnnnnnnnnnccgcttcttccggccatcactnnnnnnnnnnnnnnnnnnnnnnnnnnnnnnnnnnnnnnnnnnnnnnnnnnnnnnnnnnnnnnnnnnnnnnnnncttgttctcctccgggccttctgcttgcttctctcttgggatgtggaggccgagcagttcctcgaggtgtctttcctgctcttcttctttctcttttccgacccccgtccccgggaccggctgcgactcctcgagcgcttgcgggagccgacgtgagccatggcgccgcgggctcgaccgccctgcgggccggacagcccgccccgcgccttctcgagaggacctcgtgccgattccacacccaggcctcgctacctagc

SEQ ID NO: 113973 - DNA, 622 bp, Homo Sapiens
  misc_feature (105)..(143): n is a, c, g, or t
agataggaaagcaggactttcagcaggatagcctttcagaccaatttgaagcaacacagacacattataccctaccatcaacccaccagaaattctagctgaatnnnnnnnnnnnnnnnnnnnnnnnnnnnnnnnnnnnnnnnttcttccaaaatctcatgccccagtgaatgtcacggggaaaattcccgacactgaactttgtccgcctggcatttctgccctttagcagcatcacctctatttctctgttaggacatttgctccatctgtatctagtcacagcaaatccaatctcctggaatcagtttaatgagcagaggagattatactggagtcagctgaaggacatactttaaccaaacgctctaaattaacaaccaagaatgtagacctcaaattcttattctcaattcagcatctgatcaattatttggcactagctggataaaggtctaatcggaatttgtgagccgaggcagatgtagttaaatactaaccaatatttgcaatctatgagttagtttcaaacttaaaaggcaggtatagatagccatactcaaaagtatttccccggccgtaatggccgaattcccgggcatatgtccggtaccgtcgactg

SEQ ID NO: 113974 - DNA, 1018 bp, Homo Sapiens
  misc_feature (371)..(415): n is a, c, g, or t
  misc_feature (770)..(822): n is a, c, g, or t
aataaatgctctatctctagttccagaaactgaattccaagaagctacactgaggataattcagctctgatattgtgattactgtgatgttctttcattcatacagtaagtatctgcccaatacgtaactaccgagatctattgcttcctacataattagacaagctcctcacacatatgggcccatgccgtgcacatagcaggcactcaacaagtgtttgcttaactacagaagaataatataattgccttccttcttaactgttttacctttttctatacttgatatattggaaaaacaaccatgcttgcaaaactaaaatctaacatgcattactaactttatcaaaagatccctcagtatttttcgnnnnnnnnnnnnnnnnnnnnnnnnnnnnnnnnnnnnnnnnnnnnntagaactgctttacacttaaatagcaatttacatcatattaacatattcataatcttcattggttaaaacaggtcaaaggtttattactggcttctcataccagataagtctcacagttcccaataaggcaacagaatcctcatccaacatatattgacttgtggaacccaacggcctgttttggtttcatttcagcgcaagtagaaggcaaaataaagagtctcacagtaaaatgttcatagtagataatatgtccttgaaggttgtgccgttgtgctcttattccactgaagaaatgattcacatcccaattatagacatggtctcccaatcagaggagtcttttagaagacnnnnnnnnnnnnnnnnnnnnnnnnnnnnnnnnnnnnnnnnnnnnnnnnnnnnnacaggaaaataatagtgattgataagacatagtccctgtcctcaaagagctaacagtctagcaaggcaggaactttgagaaaagaccaatgtgttcaaaggaaaactcacaacctgggtctcccttctcagatggcacattcaagacccggccgtaatggccgaattcccgggcatatgtccggtaccgtcgactg

SEQ ID NO: 113975 - DNA, 1426 bp, Homo Sapiens
  misc_feature (185)..(185): n is a, c, g, or t
  misc_feature (191)..(191): n is a, c, g, or t
  misc_feature (220)..(221): n is a, c, g, or t
  misc_feature (241)..(241): n is a, c, g, or t
  misc_feature (253)..(769): n is a, c, g, or t
  misc_feature (794)..(794): n is a, c, g, or t
  misc_feature (1257)..(1310): n is a, c, g, or t
cccccacaactctttatctttcccgggtgtccaggggtagttggtcacccggtgaccagcgatataccgatagccagcgtcggtaagggggtctcccacaccagctgagccacggccaaaccgaatgagtctaagcgtagtatgagaagcccacgctcccgagggagaagcggacagttcccgtnagcgcnaggtcgaacaggagacgcacgaggagctnncaggggaacgcttgtatttnatgtcctgtccnnnnnnnnnnnnnnnnnnnnnnnnnnnnnnnnnnnnnnnnnnnnnnnnnnnnnnnnnnnnnnnnnnnnnnnnnnnnnnnnnnnnnnnnnnnnnnnnnnnnnnnnnnnnnnnnnnnnnnnnnnnnnnnnnnnnnnnnnnnnnnnnnnnnnnnnnnnnnnnnnnnnnnnnnnnnnnnnnnnnnnnnnnnnnnnnnnnnnnnnnnnnnnnnnnnnnnnnnnnnnnnnnnnnnnnnnnnnnnnnnnnnnnnnnnnnnnnnnnnnnnnnnnnnnnnnnnnnnnnnnnnnnnnnnnnnnnnnnnnnnnnnnnnnnnnnnnnnnnnnnnnnnnnnnnnnnnnnnnnnnnnnnnnnnnnnnnnnnnnnnnnnnnnnnnnnnnnnnnnnnnnnnnnnnnnnnnnnnnnnnnnnnnnnnnnnnnnnnnnnnnnnnnnnnnnnnnnnnnnnnnnnnnnnnnnnnnnnnnnnnnnnnnnnnnnnnnnnnnnnnnnnnnnnnnnnnnnnnnnnnnnnnnnnnnnnnnnnnaagaattcggcacgaggtttttctntacgtactacatcatcccaagcctgatctcttatcctctgtttaatgatatcttccagttgaagggtggtttcctctgtaatcacaggtgccatccggacagcatggaggaagtagccccagtgagtgttagtgatgcagctctcctggccccagaggagatcaaggagaaaaataaagctggagatataaaaacagctgctgaaaaaacagctacagacaagaaacgagagcgaaggaaaaagaaatatcaaaagcgtatgaaaataaaagagaaggagaagcggagaaaactgcttgaaaagagcagtgtagatcaagcagggaaatacagcaaaacagtagcttcggagaagttaaaacagctgaccaaaactggcaaagcttccttcataaaggataaaggtaaagacaaggccttaaagtcctctcaagcattcttttctaaattacaagatcaagtnnnnnnnnnnnnnnnnnnnnnnnnnnnnnnnnnnnnnnnnnnnnnnnnnnnnnnggatatttctgttcataaattaaagctgtaatatattttgaatataatgtaaatattaatgtgtaagcttatattgtgtcattgttctgttttataataaaattcttgagaacctt

SEQ ID NO: 113976 - DNA, 1143 bp, Homo Sapiens
taatggctaggtacgaggctgggtggtgaatcggcacgagggagagaggatgtgtgctgggcctggaggaagggggccgagaccgggccttacttctgtaacgatactgtgaggcatcggaaggccagcctgttgtgtccgttttgaagaatgaacggagaccagaattcagatgtttatgcccaagaaaagcaggatttcgttcagcacttctcccagatcgttagggtgctgactgaggatgagatggggcacccagagataggagatgctattgcccggctcaaggaggtcctggagtacaatgccattggaggcaagtataaccggggtttgacggtggtagtagcattccgggagctggtggagccaaggaaacaggatgctgatagtctccagcgggcctggactgtgggctggtgtgtggaactgctgcaagctttcttcctggtggcagatgacatcatggattcatcccttacccgccggggacagatctgctggtatcagaagccgggcgtgggtctgcatgccatcaatgatgctaacctcctggaaagcatgtatctaccgcctgctgaagctctattgccgggagcagccctattacctgaacctgatcgagctcttcctgcagagttcctatcagactgagattgggcagaccctggacctcctcacagccccccagggcaatgtggatcttgtcagattcactgaaaagaggtaccaaatctattgtcaagtacaagacagctttctactccttctaccttcctatagctgcagccatgtacatggcaggaaattgatggcgagaaggagcacgccaatgccaagaagatcctgctggagaagggggagttctttcagattcaggacaattacgggcagaaggaggctgagaaagtggcccgggtgaaggcgctatatgaggagctggatctgccagcagtgttcttgcaatatgaggaagacagttacagccacattatggctctcattgaacagtacgcagcacccctgcccccagccgtctttctggggcttgcgcgcaaaatctacaagcggagaaagtgacctagagattgcaagggcggggagaggaggctctcaataaataatcgtgtaaccttaaaaaaa

SEQ ID NO: 113977 - DNA, 856 bp, Homo Sapiens
gcgtatcggatctgttttaggagtaccgccaacaagcgggaccgagcagagattccgtatctgggaggagagccctttgctcctccctcagaatgaacggagaccagaattcagatgtttatgcccaagaaaagcaggatttcgttcagcacttctcccagatcgttagggtgctgactgaggatgagatggggcacccagagataggagatgctattgcccggctcaaggaggtcctggagtacaatgccattggaggcaagtataaccggggtttgacggtggtagtagcattccgggagctggtggagccaaggaaacaggatgctgatagtctccagcgggcctggactgtgggctggtgtgtggaactgctgcaagctttcttcctggtggcagatgacatcatggattcatcccttacccgccggggacagatctgctggtatcagaagccgggcgtgggtttggatgccatcaatgatgctaacctcctggaagcatgtatctaccgcctgctgaagctctattgccgggagcagccctattacctgaacctgatcgagctcttcctgcagagttcctatcagactgagattgggcagaccctggacctcctcacagcccccccagggcaatgtggatcttgtcagattcactgaaaagaggtacaaatctattgtcaagtacaagacagtttctactccttctaccttcctataagctgcagcatgtacatggcagggaattgatgggagaaaggagcacgccaatgccaagaaagatcctgtggaagatggggggagtccttccagattcaggatgatacctgacctctttggggaccccatgtgac

SEQ ID NO: 113978 - DNA, 952 bp, Homo Sapiens
ggcagtaactatacggtcctaaggtagcgaggcctgggtggcgaattcggcacgaggctcgacccacagagccgatcgcggagcggattctgcttttaggagtacccgccaacaagcgggaccgagcaggaatccgtatctgggaacagagccctttgctcctccctcagaatgaacggagaccagaattcagatgtttatgcccaagaaaagcaggatttcgttcagcacttctcccagatcgttagggtgctgactgaggatgagatggggcacccagagataggagatgctattgcccggctcaaggaggtcctggagtacaatgccattggaggcaagtataaccggggtttgacggtggtagtagcattccgggagctggtggacccaaggaaacaggatgctgatagtctccagcgggcctggactgtgggctggtgtgtggaactgctgcaagcttccttcctggtggcagatgacatcatggattcatcccttacccgccggggacagatctgctggtatcagaagccgggcgtagggttaggatgccatcaatgatgctaacctcctggaagcatgtatctaccgcctgctgaagctctattgccgggagcagccctattacctgaacctgatcgagctcttcctgcagagttcctatcagactgagacttgggcagacccctggacctcctcacagacccccagggcaatgtgggatcctgtcagattcactggaaagaagtacaaatccattgtcaagtacaaggacagctttctactccttcctaccttcctatagctggcagccatgtacatgggcaggaattggtgggcgagaaaagaacacgcccatgcccaaggaagatcctgccgggaaaatgggggggaagtccctttcgaaattccggattggattaccttggcccctcctgggggggacccc

SEQ ID NO: 113979 - DNA, 1126 bp, Homo Sapiens
  misc_feature (87)..(121): n is a, c, g, or t
  misc_feature (377)..(437): n is a, c, g, or t
gccaatatgatagactcactatagggcgcctccgcctcaatagccgaacgacgagcgcagcgagtcattgagcgaggaagcggccgnnnnnnnnnnnnnnnnnnnnnnnnnnnnnnnnnnncagtcgacggtaccggacatatgcccgggaattcggccattacggccgggggcaccgccccccgccccgaaagaaagatggcagtggcctgatccgggcccgttggcggcgtcactgacgcttcgctccggtcctcggatcccgagcgcggggaggcagaccgactgtgagctgcttgtccccatcctgcggccgtcctggggacacagagccctccgtggtgcccggggattggattggagccaggacctcactnnnnnnnnnnnnnnnnnnnnnnnnnnnnnnnnnnnnnnnnnnnnnnnnnnnnnnnnnnnnnatggtctggccctgggtggcgatggcgtccaggtggggtcccctcattggcctggctccgtgctgcctctggctcctgggggcagtccttctgatggacgcgtctgcacggcctgccaaccactcgtccactcgagagagagtagccaacagggaggagaatgagatcctgcccccagaccacctgaacggggtgaagctggagatggacgggcacctcaatcgcggcttccaccaggaggtcttcctaggcaaggacctgggtggcttttgatgaggacgcggagccgccggcggagccggaggaagctgatggccatcttttccaaggtggatgtgaacactgaccggaagatcagtgcccaagagatgcaccgctggatcatggagaagacggccgagcacttccaggaggccatggaggagagcaagacacccttccgcgcccggggaccctgacggggacgggcacgggtctttgggacgagtattaggtggaagtttttggcgaagtaaagggccttatcgaataaggaaggtgccccacccccttcagggctcaacgaggaaatccaagtgggacgaggaaaccccgggaagtcctgggagaaaccttgagaggaccgggtggtacccagccggacacgcccccccggcaaaccctgctgccggccgcgagcagggagttcc

SEQ ID NO: 113980 - DNA, 645 bp, Homo Sapiens
  misc_feature (199)..(199): n is a, c, g, or t
agggaacctggtccaatgaaccacattgtcctcaaactgaaatcttaccagccaaaaatgcggctacgcactgctccccagcaacttcatctatcccttttacactaaacgacgccccggcccaaaccgcaagaacccaccctgaaagaccacaagttgccggaccaatacaacctaaaatttctaaaagccctgaacntacatgacaacaccggctcccggtaaacacaattttatttctctgaaacctaaaatccctctcagcccagaagtgacacacaccaaacctgttcccaccacagacattgagcctgtaactgtgagaactgaggctacagtgacaacattagctccaaaaacatcgcaacgaacaagaacacgtcgtccacgtcccaaacataaaaccacgccacgcccagagacactgcagaccaaactagactttggacctattactcctgggacatcttcaacccggaaacagacaagcaacccaaactgaacccccccaaaagccaaaaaatgggagacaatttcacatggactttggaaaatatttttttcctttgcattcatctctcaaacttagtttttatctttgaccaaccgaacatgaccaaaaaccaaaagtgcattcaaccttac

SEQ ID NO: 113981 - DNA, 1263 bp, Homo Sapiens
  misc_feature (66)..(66): n is a, c, g, or t
  misc_feature (122)..(122): n is a, c, g, or t
aagaatgcactaggtatgacaactgacttcttgaatggtgccactgctttctgttctggcacagantataaacagtggttaaggtatccttatctaaatttctgccaatgaggaccaatcgntttggtctctcagtgcatccttccagctcactggagtctcctccagatcatagagctcatggacaccctggacaatcacttgttgtgatttgtctttgattgacaccaatccctgctcaaaggagaattgactgaacattgatcagcctcagttcaaacttcagccttatgacctccatgcagtgattgtccttgtttctcacattcttttcccacaggagattctgaataaacatattaagatgttcttcctttgcatttcctggtacttcaaatgtgattgtaacaatactctgatcaaggtgaggttgtgttcctggcacaagctgaagttttttctgcaaacgtattccagagagtactaatcaaaggcatgaagatctaatacagtagagagatcaactcgtgatctgttgggtttctaagatttgtccctagtccatgtatggatctagtagcttcatgataaggccatcaggtttctccttcttgttaaatggtgtgaagccatattggtcgaatccacgatagttatgataccatcaagatgaatatcactccctaattcagcatcaaccctgtacatagaagccactgcaccagggtctgctaatccagtggtctctaacagtatgtaatcaaatttccccttcttttgcatcaaattctcaatagctctaaggccactgtccttcactgaacagcagaggcaaccgtttctaagttccagccactcttcatagagctctccaccttggctgacagctaaggatttctccagcgcacttccttccccaaattcatgttaaaatgaccgctactcttttactatgttgctctgtcaaaatatagttcagaagtgttgtcttcccagcacctaaatacccggtgataattgtgactgggatcttggcgccgaggccagacttttcctcctcctcgctttgcgtcgtctcaatgggaaccaattcaggacaatcttcctccgcaggatcctcttcctcatccacagatccaacagccggtaacattccggcctacagcacgtccctacctcagctgaaccgctgggaccaacacgccgtaccgcccccggccgtaatggccgaattcccgggcatatgtccggtaccgtcgactg

SEQ ID NO: 113982 - DNA, 1031 bp, Homo Sapiens
  misc_feature (87)..(121): n is a, c, g, or t
  misc_feature (643)..(710): n is a, c, g, or t
aaaagaatgtatagatcacctatagggcgctaccgcgtcacagccgaacgacgagcgcagcgaagtagtgagcgaggaagcggccgnnnnnnnnnnnnnnnnnnnnnnnnnnnnnnnnnnncagtcgacggtaccggacatatgcccgggaattcggccattacggccgggggctttggttcttacagtagtcggcgtaggccttaggtgggttcgtgcgccttctacctcgctgtttcggttttcctggctcctcggcccttttctcccctgttgcagctgggagcggacgaagcgcgaagctgggattttttactgtctcctgaagaatttaacacaaacatggatatcagaccaaatcatacaatttatatcaacaatatgaatgacaaaattaaaaaggaagaattgaagagatccctatatgccctgttttctcagttggtcatgtggtggacattgtggctttaaagaccatgaagatgagggggcaggcctttgtcatatttaaggaactgggctcatccacaaatgccttgagacagctacaaggatttccattttatggtaaaccaatgcgaatacagtatgcaaaaacagattcggataataatatcaaaaatgcgtggaacttttgctgacnnnnnnnnnnnnnnnnnnnnnnnnnnnnnnnnnnnnnnnnnnnnnnnnnnnnnnnnnnnnnnnnnnnngcctggccagggaactccaaattcagctaatacccaaggaaattcaacaccaaatcctcaggtccctgattaccctccaaactaatattttattccttaataacttaccagaagagactaatgagatgatgttatccatgctgtttaatcagttccctggctttcaaggaagtacgtctggtaccaggggaggcattgacattgcttttgtgacaattgaacactgatgggcaggctggaagctgccagggattgctttacaggggatttaagatcaaaacggttccatgctaatgaagatcacctatgccaaaaaataac

SEQ ID NO: 113983 - DNA, 754 bp, Homo Sapiens
ggggcggaagtggaagaaagttctagtggcttgaggtatccgcaggagcggccgggtggcgggaggaaccgttacgggaactgaagttgcggattaagcctgatcaagatgacaacctcccaaaagcaccgagacttcgtggcagagcccatgggggagaagccagtggggagcctggctgggattggtgaagtcctgggcaagaagctggaggaaaggggttttgacaaggcctatgttgtccttggccagtttctggtgctaaagaaagatgaagacctcttccgggaatggctgaaagacacttgtggcgccaacgccaagcagtcccgggactgcttcggatgccttcgagagtggtgcgacgccttcttgtgatgctctctgggaagctctcaatccccagccctcatccagagtttgcagccgagtagggactcctcccctgtcctctacgaaggaaaagattgctattgtcgtactcacctccgacgtactccggggtcttttgggagttttctcccctaaccatttcaacctttttttggattctcgctcttgcatgcctcccccgtcctttttcccttgccagttccctggtgacagttaccagctttcctgaatggattcccggcccccatccctcacccccaccctcaactttcaatcccgtttgataccatttggctccttttttggcagaacagtcactgtccttgtaaagttttttagatcaataaagtcagtggctttc

SEQ ID NO: 113984 - DNA, 660 bp, Homo Sapiens
  misc_feature (59)..(82): n is a, c, g, or t
  misc_feature (567)..(567): n is a, c, g, or t
ccaaatgtgtgatctgccctgataaataacaagttatagtaccatctcccccgccaatnnnnnnnnnnnnnnnnnnnnnnnncccgtggcactatgtaaataaagtaagcatactttgttgttagtaaatagatgaggcatgcctgggaaatgctcccttggcataaatagcaatcaattataattagtaaacaggtgtaccaataaaaagaatttacatgataggttaacaaggaccaggaaagtgagtttcctgaaggagttctttgttcctgatcaaagaaattgatacctgttagcattcactgccaccatattttaaggagaaagaactctattggtgtcgtctgagcagccatttaaaaattggaatctaaaggatggttgctgatgtactgtgtggtctggtagaagtggggaaatatgagagatggaggaaaaacttgattatgtcttccatggcatatttactcttactttacttcgtgccaaatcaaatgaaacaagccgtcttacaagtcgttattgcctttaaaaatctgttccgtttttttcccaggtacttanaatacaagtgccagtaagtgggtcttatgtgttttggggggaaaattttatttcccttttcttctgatatttaaaaaattcatcgatctttca

SEQ ID NO: 113985 - DNA, 914 bp, Homo Sapiens
  misc_feature (486)..(509): n is a, c, g, or t
gattaagtactgtggaaaaacggacggattgtaaagcagtacgacttgtagacggctggttcattgatttgccacgaagtaaagtaagagtaaatagcccatggaagacattaatgcagttttgcccgcattctgtcatgatttcccccacttctagccaggaccaaccgagtacaatcagcaaccatcctttagattccaattgtttaaatggctgctcagacgacaccatagagttctttccccgtgaaatatggtgcagtgaatgctaacaggtatcaatttctttgatcaggaacaaagaactccttcaggaaactcactttcctggtccttgttaacctatcatgtaaattctttttattggtacacctgtttactaattataattgattgctatttatgccaagggagcatttcccaggcatgcctcatctatttactaacaacaaagtatgcttactttatttacatagtgccacgggnnnnnnnnnnnnnnnnnnnnnnnnattggcgggggagatggtactataacttgttatttatcagggcagatcacacatttggatcaaaaagaaaaaccagcaagtagatcctaaaacacatttcttaacctgagtcataactgaaaacatagactttaattacattttgttgaaaattcattcaactttggtgcttgtaaaagcacttatgtcaatttttgacaaaaatcataaccctcagtacacaggtattttcaaaggaaacaagtcatcttaaagtaatatttttctatatgctaattgatacatctttatagcaaattgaaaattctgagtaaactgaaagtatgcttaacgacaaaataaatacagcatatatcccggccgtaatggccgaattcccgggcatatgtccggtaccgtcgactg

SEQ ID NO: 113986 - DNA, 870 bp, Homo Sapiens
  misc_feature (81)..(115): n is a, c, g, or t
aatgtatagatcactatagggcgctagctcggttgtagccgaacgacgagcgcagcgagtagtgagcgaggaagcggccgnnnnnnnnnnnnnnnnnnnnnnnnnnnnnnnnnnncagtcgacggtaccggacatatgcccgggaattcggccattacggccgggatttagagaatttaaagtatggagaaaatactcacttttaaagcatagtggctaggaactcaaagttgggttgccgtaataccaattttacgatcttgggtaacataaggtctctaatccttagttttctcacctatgagataagaagcccttatcttataaggtgatgtgaggtttcaatgaaattatatatgtaaaatacactgcttaacaaatgttagctaatagtttatattaggctttatagcagtgtacttttatgttgaactccttatgtattcttttacttgtttaatccttttactttgagaaagtggtaacttgtagagaggaaaagatactgataaatgtaaataatccattgcaaatggctgagtgaaaatcctggaaaatgttttaattgaactttattgatgtaatataaaatattcaaatatctgtcaataaagggtaggatcgtatgaaggctcattttagaaactgtgagactaagtgactgatctattattttagaagttaataagtggtatagatatatgggtgtcaagctggaaacaacatgtactaactttccttgaacgttggtatggtctctgaggtttgggcagtggattgtgactagaaggtcatgtgtgacacctttgtgtttgcctttaaaaagcaatacatgagtaactggcccctacctgtgtctcttcttgtgtc

SEQ ID NO: 113987 - DNA, 1038 bp, Homo Sapiens
  misc_feature (553)..(553): n is a, c, g, or t
  misc_feature (763)..(818): n is a, c, g, or t
gggggagagagtatgaagtcgacggcgcgccgaattcggcacgaggagatagcctctgctttctttttcctttcttcggaatgagagactcaaccataatagaaagaatggagaactattaaccaccattcttcagtgggctgtgattttcagaggggaatactaagaaatggttttccatactggaacccaaaggtaaagacactcaaggacagacatttttggcagagctcagttttctgtgcttggaccctctgggcccatcctggccatggtgggtgaagacgctgatctgccctgtcacctgttcccgaccatgagtgcagagaccatggagctgaggtgggtgagttccagcctaaggcaggtggtgaacgtgtatgcagatggaaaggaagtggaagacaggcagagtgcaccgtatcgagggagaacttcgattctgcgggatggcatcactgcagggaaggctgctctccgaatacacaacgtcacagcctctgacagtggaaagtacctgtgttatttcccaagatggtgacttctacgaaanaagccctggtggagctgaaggttgcagcactgggttctgatcttcacattgaagtgaagggttacaaggatggagggatccatctggagtgcaggtccactggctggtacccacaccccaaatacagtggagcaacaacaagggagagaacatcccgactgtggaagcacctgtggttgcagacggagtgggcctgtatgcagtagcagnnnnnnnnnnnnnnnnnnnnnnnnnnnnnnnnnnnnnnnnnnnnnnnnnnnnnnnntacagggatatttttaatcccgttatggactctgtctccaggagaggggtctatccacccctgctcattggtggatgttaaaccaatattcctttcaactgctgcctgctagggaaaaactactcctcattatcatcattattattgctctccactgtatcccctctacctggcatgtgcttgtcaagttctagttgttcaataaatttgttaataatga

SEQ ID NO: 113988 - DNA, 843 bp, Homo Sapiens
caggtccctgccagggctgcgatccaggctggcgctcctgaagaaggggtctgcgatggaaatgctggctgtcttttcccaggccgaggagggaatttctgatgatgcaggatacaccctccccggagcccgcctctcatgatcacagatgctgctacttcatataggcccactccatcttgcaaccacaggtgcttccacagctgggatgttctctcccttggcgttgctccactgtatttgggcttgggggtaccagccggtggacctgcactccagatggatccctccatcctcataacccttcacttcgacgtgaagattagaacccagtgctgcaaccttcagctccaccagggctttttcatagaagtcaccatcttggaaataacacaagtactttccactgtcagaggctgtgacgttgtgtattcggagagcagccttccctgcagtgatgccatcccgcagaatcgaagttctccctcgatacggtgcactctgcctgtcttccacttcctgttccatctgcatacacgttcaccacctgccttaggctggaacttacccacttcagctccatggtctctgcactcatggtcgggaacaggtgacagggcagatcagcgtcttcacccaccatggccaggatgggcccagagggtccaagcacagaaaactgagctgagcaaggagtgagcagctctgccaaaaatgtctgtccttgagtgtctttacctttgggttccagtatggaaaaccatcccttggtattcccattggagaatcagagcccacagaataaagacggtcaatcaataattctccattctttctattatg

SEQ ID NO: 113989 - DNA, 1010 bp, Homo Sapiens
  misc_feature (29)..(29): n is a, c, g, or t
  misc_feature (37)..(37): n is a, c, g, or t
  misc_feature (100)..(134): n is a, c, g, or t
aaaagagaaaacccttgatgaattgaacncctcaacntatgggcgctagccgtcgagccgaacgacgagcgcagcgagtagtgagcgaggaagcggccgnnnnnnnnnnnnnnnnnnnnnnnnnnnnnnnnnnncagtcgacggtaccggacatatgcccgggaattcggccattacggccggggtttccgtttctggttttgctctagtgtttgggtttcttcgcggctgctcaagatgaaccgactcttcgggaaagcgaaacccaaggctccgccgcccagcctgactgactgcattggcacggtggacagtagagcagaatccattgacaagaagatttctcgattggatgctgagctagtgaagtataaggatcagatcaagaagatgagagagggtcctgcaaaagaataatggtcaagcagaaagccttgcggagttttaaagcaaaagaggatgtatgagcagcagcgggacaatcttgcccaacagtcattcaacatggaacaagccaattataccatccagtctttgaaggacaccaagaccacggttgatgctatgaaactgggagtaaaggaacatgaagaaggcatacaagcaagtgaagatcgaccagattgaggatttacaagaccagctagaggatatgatggaagatgcaaatgaaatccaagaagcactgagtcgcagtttatggcaccccagaactggatgaagatgatttagaagcagagttggatgcactaaggtgatgagcttctggctgatgaagacagtcttatttggatgaggcagcatctgcaccttgcaattccagaaggtgttcccactgatacaaaaaaacaaggatggagtcctggtggaatgaattctggattgcccagatcccggtttcataatcgcatcattcaagcatatctggtaaaacaaacacatatacggggactaggaaatattatctttccaaattgccattaacagattcaggttcttcctttctttga

SEQ ID NO: 113990 - DNA, 728 bp, Homo Sapiens
  misc_feature (43)..(77): n is a, c, g, or t
  misc_feature (196)..(475): n is a, c, g, or t
  misc_feature (493)..(612): n is a, c, g, or t
ccgaaccgagcgcagcgaagtcagtgagcgaggaagcggccgnnnnnnnnnnnnnnnnnnnnnnnnnnnnnnnnnnncagtcgacggtaccggacatatgcccgggaattcggccattacggccggggacatttgcttctgacacaactgtgttcactagcaacctcaaacagacaccatggtgcacctgactccnnnnnnnnnnnnnnnnnnnnnnnnnnnnnnnnnnnnnnnnnnnnnnnnnnnnnnnnnnnnnnnnnnnnnnnnnnnnnnnnnnnnnnnnnnnnnnnnnnnnnnnnnnnnnnnnnnnnnnnnnnnnnnnnnnnnnnnnnnnnnnnnnnnnnnnnnnnnnnnnnnnnnnnnnnnnnnnnnnnnnnnnnnnnnnnnnnnnnnnnnnnnnnnnnnnnnnnnnnnnnnnnnnnnnnnnnnnnnnnnnnnnnnnnnnnnnnnnnnnnnnnnnnnnnnnnnnnnnnnngatcctgagaacttcagnnnnnnnnnnnnnnnnnnnnnnnnnnnnnnnnnnnnnnnnnnnnnnnnnnnnnnnnnnnnnnnnnnnnnnnnnnnnnnnnnnnnnnnnnnnnnnnnnnnnnnnnnnnnnnnnnnnnnnnngtatcactaagctcgctttcttgctgtccaatttctattaaaggttcctttgttccctaagtccaactactaaactgggggatattatgaagggccttgagcatctggattctgcc

SEQ ID NO: 113991 - DNA, 690 bp, Homo Sapiens
  misc_feature (82)..(116): n is a, c, g, or t
  misc_feature (207)..(438): n is a, c, g, or t
  misc_feature (451)..(547): n is a, c, g, or t
  misc_feature (626)..(626): n is a, c, g, or t
aaaactgacagactatatagggcgctacgcggttataccgaacgacgagcgcagcgagtcagatgagcgaggaagcggccgnnnnnnnnnnnnnnnnnnnnnnnnnnnnnnnnnnncagtcgacggtaccggacatatgcccgggaattcggccattacggccggggacatttgcttctgacacaactgtgttcactagcaacctcnnnnnnnnnnnnnnnnnnnnnnnnnnnnnnnnnnnnnnnnnnnnnnnnnnnnnnnnnnnnnnnnnnnnnnnnnnnnnnnnnnnnnnnnnnnnnnnnnnnnnnnnnnnnnnnnnnnnnnnnnnnnnnnnnnnnnnnnnnnnnnnnnnnnnnnnnnnnnnnnnnnnnnnnnnnnnnnnnnnnnnnnnnnnnnnnnnnnnnnnnnnnnnnnnnnnnnnnnnnnnnnnnnnnnnnntggcctggtctgnnnnnnnnnnnnnnnnnnnnnnnnnnnnnnnnnnnnnnnnnnnnnnnnnnnnnnnnnnnnnnnnnnnnnnnnnnnnnnnnnnnnnnnnnnnnnnnnngtatcactaagctcgctttcttgctgtccaatttctattaaaggttccttttgttccctaagtccaactactgaactgngggatattatgaagggccttgagcatctggattctgcctaataaaaaacatttattttcattcc

SEQ ID NO: 113992 - DNA, 861 bp, Homo Sapiens
cagtcgacggtaccggacatatgcccgggaattcggccattacggccgggggactgaaagatgggggctggagagagggtgcaggccccacctagggcggaggccacagcagggagaggggcagacagagccaggaccctggaaggaagcaggatggcagccggaacagcagttggagcctgggtgctggtcctcaggtctgtggggggcagtagtaggtgctcaaaacatcacagcccggattggcgagccactggtgctgaagtgtaagggcgcccccaagaaaccaccccagcggctggaatggaaactgaacacaggccggacagaagcttggaaggtcctgtctccccagggaggaggcccctgggacagtgtggctcgtgtccttcccaacggctccctcttccttccggctgtcgggatccaggatgaggggattttccggtgccaggcaatgaacaggaatggaacaggagaccaagtccaactaccgagtccgtgtctaccagattcctgggaagccagaaattgtagattctgcctctgaactcacggctggtgttcccaataaggtggggacatgtgtgtcagagggaagctaccctgcagggactcttagctggcacttggatgggaagcccctggtgcctaatgagaagggagtatctgtgaaggaacagaccaggagacacctgaggacagggctctttcacactgcagtcggaggctaatggtgaacccagccggggaggagatcccgtaccaacttctcctgtagcttcagccaggccttccccgacacgggcttgcgcaaagccccatcagacccgtgtatggagctgtgctctggagaagtca

SEQ ID NO: 113993 - DNA, 1623 bp, Homo Sapiens
  misc_feature (60)..(60): n is a, c, g, or t
  misc_feature (542)..(554): n is a, c, g, or t
  misc_feature (1349)..(1410): n is a, c, g, or t
atgttaaataccatgggacaggattgtaaaggatgaaaaactcagtcaacaactgcctcnacaagggataagaaaaattctgccatgatattagcaaaggtaaaggaggaaaaatttacactgtaagaggcaccatttccccaaggaatacctcttggcatttcctgaatgagtgggattagcaatctaaataaatcatatttcaagaggtaacagcaacagataaaatttaaagggattattaaaataacatttacaagactctgaacaattcttgaactcttattaaaaccacaaagaaagaacaattctttatttatgaatttcataaaggactcaatgtgcaactgacatctgctagtgatgatctggtaatatacaacctgtccagtagccgaacagtttgtttttattgtgttttctaaccgtaagagatcattaaaggcaaagcctatatgacgctgtacacacaaaaaaatggtcaccgtgggccatactaccaatgaaatggtaggtaaacaaatctttttctggtcaagagnnnnnnnnnnnnngaaacagcactctgcatgcttcactctacaagatgaatttccctagaaagaatccaatgaaaatggctgcaattacaacaagaagtgaaggaagaggactggtgacattatctctgaaggatgcagttgaggttgatccaggtttatccgaatgtgctacctttctgagccttaaaccttcatctctcaggtgccgattttcttctgatagcttcatcatttctccctgaagtcttttacactcttccattagtttccttgtttcggtatcattaagtgaaacactgtgtggttttggcataggtccatcttgcttagatgcattcagtggaacagctttgctaggttccagatcattcaatttatcattttcattgggcatttcaaatacgcatctcaatttggaatccattaattcatcaggttttgcctctttccacacagcttccaatatctgaagtgtttggtggacaaaaaattgtctgtaccataaacttgtgtttactcttttcattcggatcatagtcaaagggctgtagcattactgaaacagtcacagttgacccctgggtcaataattccactgttgggcctcacacagtaccggcgaggtgctgtagtcttcactttgaaacacacttttctatccgatggatttcgcaatttaagatttgtagtgactacatctgtgaaggggcctttgaatttgaggtctgtgggcggatcgaggaccaggatctgctcgtgcttcgccatggcccctgaggcggacgccatcggagagacagcgcagannnnnnnnnnnnnnnnnnnnnnnnnnnnnnnnnnnnnnnnnnnnnnnnnnnnnnnnnnnnnntcggccgagctctaggacgaggccaggctcgcggctcccgagccctaacgcctgccgctgtgtcaccggttcggtgggccacccgctgggtcagcagctccgggtcccacaactgactcaaccccacaccagccgccacggccacgcgcacttgcgagcctcccccggccgtaatggccgaattcccgggcatatgtccggtaccgtcgactg

SEQ ID NO: 113994 - DNA, 976 bp, Homo Sapiens
  misc_feature (65)..(99): n is a, c, g, or t
  misc_feature (259)..(290): n is a, c, g, or t
tatagggcgctagctctgcgagcgaacgacgagcgcagcgagtcagatgagcgaggaagcggcgnnnnnnnnnnnnnnnnnnnnnnnnnnnnnnnnnnncagtcgacggtaccggacatatgcccgggaattcggccattacggccggggtaatcatgatgaacacggtgatgactcttgtgttcatcactgtgaagacaaagaggatgatggtgatagttgtgttgaatgttgggcaaattctgaagagaacgacacnnnnnnnnnnnnnnnnnnnnnnnnnnnnnnnngcaagatactgaaatgtgatgaacatatccagaagcttggaagctgtattacagatccaggtaatcgagagacctcaggaaataccatgcacacagtgtttcaccgtgacaagaccaaagatacacatcctgaaagctgttgcagctctgaaaagggtgggcagccattgccttggtttgagcataggacaaaatgtaccacagtttgcagaacctacagaaacgttgtttggtcccgattccggaaaaggtgccaagagcttagttgaactccttgatgagtctgaatgtacttcagatgaggaaatctttatctcacaagatgaaatacagtcatttatggctaataaccagtctttctacagccatagagaacaataccgacagcatctgaaaggagaaatttaataaatactgccggttaacatgatcacaagaggcccatttgtagtggctggttgacaaggccgagccaatttacataagataaaataagctcggtctttcaagtggacacacttcaagatgaattactggccttctcttttcgaaaaattcttattagggaacttatggcgaaactttatccttaatccgtgggcacctctcctgtttgggacaacgtggaaggcacccaaaaagttacaaccaagaatggttatcaagcacgacagcaaggctgcatt

SEQ ID NO: 113995 - DNA, 1044 bp, Homo Sapiens
  misc_feature (913)..(947): n is a, c, g, or t
  misc_feature (950)..(988): n is a, c, g, or t
gggtatcccaggcaagtatgatctgttggcctccgtgctccatgtgtgcaggcggttgtgtgactgtagttcatcgccactgtacaatggtacgtcagcccgtggaaagggtaacaggaaaagttcagatccttttctttttctcctatatgtaaaaagggctacgttgtagtcagagtaatacccgttactgttatatacacagcgttgatggccccctcggaagtttccggttcacttagggggcaactgcagaaggtccctgtgcccagagctgcaggggcctcagtacacggagctgcttccggatgccacaagcacagcaccatgctcaggatcatctcgaagatcatgatcacagcgaccacgatggcagcaatggccgatgaggtacagcttcccggagaagaggtcatcgatcttcctggtggcagtcctccttgaagaggttgcatgatgatgtgtgctgcccgagggacacaaattgttcttgagcactgaggtggtcaaagcagtcagtgtgctggagccacagcagtcaagcgtctcgtggaaggtcttcaccacagccttggcgttgttggcgtcatcatccaccacggcctgctgtagggcctggtcatagaactgcttcacatccttggcgatctggtccttgttgacaaagccccagatgccggcggccacctcacaggcaaacaggatgaccaggcaggtgaagaacgtccccagcaggcactgggattcctggatggccccgtagcagcccaggaagccaacgaacatcatgacagcgcccacagcgatgaggatgtagatgcctacatagaaggtgttgggcgcgggcttgtctcccagctcccccggccgtaatggccgaattcccgggcatatgtccggtaccgtcgactgnnnnnnnnnnnnnnnnnnnnnnnnnnnnnnnnnnncgnnnnnnnnnnnnnnnnnnnnnnnnnnnnnnnnnnnnnnnctaaaacgagtagcgccctatatgatctatcatctggcggcgtctgtgggggttga

SEQ ID NO: 113996 - DNA, 1143 bp, Homo Sapiens
  misc_feature (46)..(87): n is a, c, g, or t
  misc_feature (91)..(125): n is a, c, g, or t
ggggggaaagaacaatcatccatatatgggggcatcggctgtttgnnnnnnnnnnnnnnnnnnnnnnnnnnnnnnnnnnnnnnnnnnccgnnnnnnnnnnnnnnnnnnnnnnnnnnnnnnnnnnncagtcgacggtaccggacatatgcccgggaattcggccattacggccggggagacagcagcgactttaggctggataatagtcaaattcttacctcgctctttcactgctagtaagatcagattgcgtttctttcagttactcttcaatcgccagtttcttgatctgcttctaaaagaagaagtagagaagataaatcctgtcttcaatacctggaaggaaaaacaaaataacctcaactccgttttgaaaaaaacattccaagaactttcatcagagattttacttgaacagcagtctcagcggttagcagcacaagagatgatttacacaatgaagaaagtacatgcactttgggcttctgtatgcctgctgcttaatcttgcccctgcccctcttaatgctgattctgaggaagatgaagaacaacaattatcacagatacggagttgccaccactgacacttatgcattcattctgtgcattccaggcggatgatggcccatgtaaagcaatcatgaccaagatatatcttcaatatttaacactcgacagtgcgaagaattcatactatgggggatgtgacaggaaatccgaatcgaatagaaagtctggaaagagtgcacacaaatgtgtacacagagatactgcaaaccaggataataaagagcaaacattgcaaccacgacacgccagatttttggcttcatgcacgcaagatcctggaaatatgtccgaggttctctacccagcgtatctacacaccacgtacagaccacccaccggtgacgaaaggtatacacagtaatcggtgggacaggccatggggcaatactgaaccacaagtagacagaaccgcggaaacgcaacgtgacagaaccagctacggcaaaacagcgggcacgaagagtgaacacacggagcgcacaacatacagaaaacccagcacaagagccgataacacctacccgtagcacgcaacaacaccaagggagccaagccataaagcgattacacg

SEQ ID NO: 113997 - DNA, 721 bp, Homo Sapiens
agtttataatgttttactatgatttagggcttttttttcaaagaacaaaaattataagcataaaaactcaggtatcagaaagactcaaaaggctgtttttcactttgttcagattttgtttccaggcattaagtgtgtcatacagttgtttccaggcattaagtgtgtcatacagttgttgccactgctgttttccaaatgtccgatgtgtgctatgactgacaactacttttctctgggtctgatcaattttgcagtagaccattttagttcttacggcgtcaataacaaatgcttcaacatcatcagctccaatctgaagttcttgctgcattgtgtcaaaagaaatttccttattttctactgccattcccataaaagtaagtagtctcatttttgccatattctgttcatgtaacaggccaagtgaatcaatgaagtctttattattctgataaaacttgacatatgatgccaatttagcactcacaaaaatggttaaaagatcagacccagagaaaagtagttgtcagtcatagcacacatcggacatttggaaaacagcagtggcaacaactgtatgacacacttaatgcctggaaacaaaatctgaacaaagtgaaaaacagccttttgagtctttctgatacctgagtttttatgcttataatttttgttctttgaaaaaaaagccctaaatcatagtaaaacattataaact

SEQ ID NO: 113998 - DNA, 1302 bp, Homo Sapiens
ccatggcgaagctgctgagctgcgtcctaggcccccggctctacaaaatctaccgggagagggactctgaaaggggccccggccagcgtccctgagacgccaacggcagtcactgccccccattccagctcctgggttacttgagtttgtccaaagtggtgccgttttctcactatgctgggacattgctgctacttctggcaggtgtggcctgcctccgaggcatggccgctggaccaacccccagtaccggcagttcatcaccatcttggaagcaacacatcggaaccagtcttcagcaaaacaagaggcagcttgccaactacaactttgacttccggagctggccagtcgacttccactgggaagaacccagcagccggaaggagtctcgagggggcccttcccgccggggtgtggccctgcttcgcccagagcccctgcaccgggggacagcagacaccctcctcaaccgggttaagaagctgccttgtcagatcaccagctacctggtggcgcacaccctagggcgccggatgctgtatccaggctctgtgtacctgctgcagaagcccctcatgcctgtgctgctgcagggccaggcccgactggtggaagagtgtaatgggcgccgggcaaagctgctggcctgtgatggcaatgagattgacaccatgtttgtggaccggcgggggacagctgagccccagggacagaagctggtgatctgctgtgaggggaatgctgggttttatgaggtgggctgcgtctccacgcccctggaagctggatattcagtcctgggctggaatcatccaggctttgctggaagcacgggggtgccattcccgcagaatgaggctaatgccatggatgtggtggtccagtttgccatccaccgcctaggcttccagccccaggacatgagtgcagatggacggcggcagctggctttgtttctggctcggaagcatctgcacaactttgaggccactcactgcaccccactcccagcccagaacttccagatgccctggcacctctagggaccaactgggactcattatggaagaatggggtgagaggagacatgaggaaagaccctcttatttgtgattctctgtgttcatgttgctgtttatagtttgtggaaagtgggggaccatcccccttctcaccactgttcctcttgcacgtttcccctcattcatgtggctgtacttaaccttctccaacatacatcctgcattacatgaatggattattcctaataattaataaaaaggtattttttctactatc

SEQ ID NO: 113999 - DNA, 901 bp, Homo Sapiens
gcggcagcgatgcctgcccggctgttggggtggcggtgacgacaggcagcaaaagaccagataatgcctcacatctctgtccccccgggaccccctggagcccccatgatccctaagaagacagcttgaacctagatctcacccccaggatgttgcggaggctgctggagcggccttgcacgctggccctgcttgtgggctcccagctggctgtcatgatgtacctgtcactggggggcttccgaagtctcagtgccctatttggccgagatcagggaccgacatttgactattctcaccctcgtgatgtctacagtaacctcagtcacctgcctggggccccagggggtcctccagctcctcaaggtctgccctactgtccagaacgatctcctctcttagtgggtcctgtgtcggtgtcctttagcccagtgccatcactggcagagattgtggagcggaatccccgggtagaaccagggggccggtaccgccctgcaggttgtgagccccgctcccgaacagccatcattgtgcctcatcgtgcccgggagcaccacctgcgcctgctgctctaccacctgcaccccttcttgcagcgccagcagcttgcttatggcatctatgtcatccaccaggctggaaatggaaccatttaacagggcaaaactgttgaacgttggggtgcgagaggccctgccgtgatgaagcagtggggactgcctggtcttgcacgatgttggacctcttgccagaaaatgaccacaatctgtatgtgttgtgacccccggggaccccgccatgtggccgttgctatgaacaagttggataacagctcccgtaccccaaggacttcggaggagtctcagccttactcctgaaccagaactgaagattatgg

SEQ ID NO: 114000 - DNA, 462 bp, Homo Sapiens
  misc_feature (109)..(109): n is a, c, g, or t
  misc_feature (389)..(389): n is a, c, g, or t
  misc_feature (402)..(402): n is a, c, g, or t
gtgaactgggcagctgtgacacgcgcaccttgtcaccttgtcaccaatttcctgcccgggatcccagagctacccttcttggagcccacaggggaagcccttggctggntccctgcgagcccgtggagactgccagagatgtcctctttcggttacaggaccctgactgtggccctcttcaccctgatctgctgtccaggatcgaatcagaaggtattcgaggtacacgtgaggccaaagaagctggcggttgagcccaaagggtcccttcgaggtcaactgcagcaccacctgtaaccagcctggctgtgctggacttgaatgtctcgcggtggcaacatcttttcacaaacacctcagccccgaatgatgttggaagatctatgatnctgtgtcggacanccagatgggtcatcatagtcacggtggtgtcggtgttgctgtccctgttcgtgacatctg

SEQ ID NO: 114001 - DNA, 851 bp, Homo Sapiens
gtgtagagagtatgaagtcgacggcgcgccgaattcggcacgaggtggcagtgcaatacctgaacaccttctatggctgccccaaggagagctgcaacctgtttgtgctgaaggacacactaaagaagatgcagaagttctttggactgccccagacaggtgatcttgaccagaataccatcgagaccatgcggaagccacgctgcggcaacccagatgtggccaactacaacttcttccctcgcaagcccaagtgggacaagaaccagatcacatacaggatcattggctacacacctgatctggacccagagacagtggatgatgcctttgctcgtgccttccaagtctggagcgatgtgaccccactgcggttttctcgaatccatgatggagaggcagacatcatgatcaactttggccgctgggagcatggcgatgggatacccctttgacgggtaaggacggactcctggctcatgccttcgcccaaggcactggtgtggggggagactcccattttgatgacgatgagctatggaccttgggagaaggccaagtggtccgtgtgaagtatggcaacgccgatggggagtactgcaagttccccttcttgttcaatggcaaggagtacaacagctgcactgataccggccgcagcgatggcttcttctggtgctcaccacctacactttgagaggatggcagtacgctctgtcccatgaagcctgtcacatggcggcacgctgaagacgcctgcagtttcatccgctcaggccatctagaagcgccatgaggcgacgatgcccctgtgcgacctggactcaccgcagaaatgctcccgaacctgt

SEQ ID NO: 114002 - DNA, 971 bp, Homo Sapiens
  misc_feature (79)..(113): n is a, c, g, or t
acgccaacgtaagtccccatatggcgcatcgctgcttatcgaacgacgagcgcagcgagtaggagcgaggaagcggcgnnnnnnnnnnnnnnnnnnnnnnnnnnnnnnnnnnncagtcgacggtaccggacatatgcccgggaattcggccattacggccgggggcgcgtgacggctgcgtgcggcgggaatcatggctgctcgcagagctctgcacttcgtattcaaagtgggaaaccgcttccagacggcgcgtttctatcgggacgtcctggggatgaaggttctgcggcatgaggaatttgaagaaggctgcaaagctgcctgtaatgggtatgataccttgtttcttaaaatctcctttaggctctgactacacccggataacagaagacagtttctcaaagccttatgaatgggaaatggagtaaaacaatggtgggatttgggcctgaggatgatcattttgtcgcagaactgacttacaattatggcgtcggagactacaagcttggcaatgactttatgggaatcacgctcgcttctagccaggctgtcagcaacgccaggaagctggagtggccactgacggaagttgcagaaggtgtctttgaaaccgaggccccgggaggatatacagttctattttgcagcaatcgcagtctgccctcagtcacgatcctgtattaaaccagtaactctagtcagtgtctgaatcttcaaaagttcctttgaaactacctggtggaattctacttgggacatgacccacctcttcaccaccgattcaaggacaagcaccaggggcttttcgctgggctatgctggataaccagtgtatagccggagctaacaggggccgtcacggtggggaggaccctgcaccacgcttcgaaagactgcctttttgcccccaagagtgcccacttaacacttctgaaggaccaaaattgtcccgggaccgcacccgg

SEQ ID NO: 114003 - DNA, 787 bp, Homo Sapiens
gggattctagtgccttctagaaaaggttgtaagaagggtggagcttggagctggggtgtaactggaggggcgggcccttctccaagttagagttggggttctgagcgagtcgtgcgttttaggtttagtgtcttttccttgtccctgctcggggagcgtgaggcagatcggccggctttgctccaggcctcaggagtggtgcaggttcgcagccctgtcaaccagctccgagccggcagcgaaacctgaagtcgaccctgtggaaaatgaagctgtcgccccagaattcaccaaccggaacccccggaacctggagcttttatctgtagccaggaaagagcggggctggcggacggtgtttccctcccgtgagttctggcacaggttgcgagttataaggactcagcatcatgtagaagcacttgtggaagcatcagaatggcaaggttgtggcttccggcctccactcgtgagtgggcctattaaaaagcacctttatagtaccagaaatgtggtggcttgtgagagtataggacgagtgctggcacagagatggcttagaggcgcggaaatcacttcatggttctaccaacccaaccccgcggggaggcagccttcagactccgatgaaaaccgacttacaaagttgccatgaaagcaaggtgggtgtggttcctacaggcaaccctccacagaatcctattgcataaaatgggaaagcatttaattgtctttggacaccgttaaaatataaaatcctggccacccaccctacttgccattcaaa

SEQ ID NO: 114004 - DNA, 1003 bp, Homo Sapiens
  misc_feature (537)..(587): n is a, c, g, or t
cagtcgacggtaccggacatatgcccgggaattcggccattacggccgggggcagcaggagttccactgctgtggcagcaacaactcacaggactggcgagacagtgagtggatccgctcacaggaggccggtggccgtgtggtcccagacagctgctgcaagacggtggtggctctttgtggacagcgagaccatgcctccaacatctacaaggtggagggcggctgcatcaccaagttggagaccttcatccaggagcacctgagggtcattggggctgtggggatcggcattgcctgtgtgcaggtctttggcatgatcttcacgtgctgcctgtacaggagtctcaagctggagcactactgaccctgccttgggccttgctgctgctgcacccaactactgagctgagaccactgagtaccaggggctgggctccctgatgacacccaacctgtgccatcaccataacctctggggaccccaaactcagaggcagcttcaagtgccttttgctgcgcaccaatgcccagcannnnnnnnnnnnnnnnnnnnnnnnnnnnnnnnnnnnnnnnnnnnnnnnnnnctccccggacatactctctgcctggtggtcagatgcaggttggaaggggccttgctgagtggcgcaaggccgagcgttcccagcagggggagaaacccttcacaccccaggcccttcaggaactggggctttgccttgcagccacatggccccatcccagttggggaagccaggtgagctctgacccttgggcctgggcctctgcccctcccaacccagccgtcgtctccctcgacagcgcccctgctgtcttccccactgcagtcaccaccacccgaaatgccacgtggtcactgtgcactgccctgttcatgtgcctctgcggggcagggccttcctggttttgtacactgctgtacccagatgcctacaaccatccctgccacatacaggtgctcaataaacacttgtagagc

SEQ ID NO: 114005 - DNA, 821 bp, Homo Sapiens
  misc_feature (353)..(413): n is a, c, g, or t
gacggacagtaactataacggtcctaaggtagcgaggcctgggtggcgaattcggcacgagggggcagggcctgccagacgaggagcaggagaagctgctgcgcatctgttccatttatacccagagtggagaaaacagcctggtgcaggagggctctgaggcctcccccattgggaagtctccatatacactagacagcctgtattggagcgtcaagccagccagctccagcttcgggtctgaagcaaaggcccagcaacaggaggagcagggcagtgttaatgatgtcaaggaagaggagaaggaggagaaagaggtcttgccagaccaggtagaggaggaggaagaaaannnnnnnnnnnnnnnnnnnnnnnnnnnnnnnnnnnnnnnnnnnnnnnnnnnnnnnnnnnnntggaggtggggctttctctacagggcaagagtcccccactgccgagaatgctaggcttctggcccagaaaagaggagctttgcagggctctgcatggcaggttagctcagaagacgtgcgatgggacacatttcccctaggccgaatgccaggtcagaccgaggacccagcagagctcatgctggagaattatgacaccatgtatcttttggaccagcctgtgctagagcagcggctggaaccctcaacatgcaagactgacaccttgggcctgagctgtggtgtcggcagtggcaactgcagcaacagcagcagcagcaacttcgagggccttctctggagccaggggcagctgcatgggctcaaaactggcctgcagctcttctgatggccatcctggtgcaagtg

SEQ ID NO: 114006 - DNA, 1170 bp, Homo Sapiens
  misc_feature (606)..(633): n is a, c, g, or t
cggacggcgcctctcgaacgagtgtgggcgcgaggcaggatgacgacctcaggcgcgctctttccaagcctggtgccaggctctcgtgggcgcctccaacaagtacttggtggagtttcgggcgggaaagatgtccctgaaggggaccaccgtgactccggataagcggaaagggctggtgtacattcagcagacggacgactcgcttattcacttctgctggaaggacaggacgtccgggaacgtggaagacgacttgatcatcttccctgacgactgaacccaagacagaccaggatgaggagcattgccggaaagtcaacgagtatctgaacaaccccccgatgcctggggcactgggggccagcggaagcagcggccacgaactctctgcgctaggcggtgagggtggcctgcagagcctgctgggaaacatgagccacagccagctcatgcagctcatcggaccagccggcctcggaggactgggtgggctgggggccctgactggacctggcctggccagcttactggggagcagtgggcctccagggagcagctcctcctccagctcccggagccagtcggcagcggtcaccccgtcannnnnnnnnnnnnnnnnnnnnnnnnnnncagcccacttctgctccagcagctgcctcagcaactagccccgagccccgcgcccagttccgggaatggagccagcacagcagccagcccgacccagcccatccagctgagcgacctccagagcatcctggccacgatgaacgtaccagccgggccagcaggcggccagcaagtggacctggcaagtgtgctgacgccggagataatggctcccatcctcgccaacgcggatgtccaggagcgcctgcttccctacttgccatctggggagtcgctgccgcagaccgcggatgagatccagaataccctgacctcgccccagttccagcagatgtggaagcgtttgccaaagccatgcagaacaacgccaagcccgagcagaaagagggcgacacgaaggacaagaaggacgaagaggaggacatgagcctggactgagccacgcgccgtcctccgaggaactgggcgcttgcagtgcgttgcacaccctcacctcccacccactgattattaataaagtcttttcttttacctgcc

SEQ ID NO: 114007 - DNA, 1438 bp, Homo Sapiens
  misc_feature (137)..(137): n is a, c, g, or t
  misc_feature (204)..(204): n is a, c, g, or t
  misc_feature (1294)..(1323): n is a, c, g, or t
aacatgctggagtcccaccggtgaataatttgccaactgctgggtagaactcttttatgagacgggtcagagtttaccctcaaacctttctctaacccccatgcaaaatactgaatcagaaggggagccacactgtntacagcctttcaaaaggaagaaaggcctatgaagatgtagaaggttcaccacacaaaggtaatgatnttaattctgaaggggcaccttgagttccatttggcacgtttctgaatttaactgtcaggaatacacttaaggccattttatcggtatttaactttttggcaaaatagaagctttggtcatagccatagttctttaaaaatttttttaaagaggttatctctgattaaaacaatatttttagcaagtgatacataacaataacaacaatgtaaacatcttcaaatctaatgcaagagcaaaagctcttcaccagcatcttaaatacagcgagagtcagtagtgcttacaaaaagtagagggttctcttctagggaatcagaaaattatcaaaataaggcacagcctgttgttatcacagatttgtgttaggcagtagtgtttttttctggaaggcataagttggaaatctgattacccaaaggtttaaaatgtggttctgaaaataatgccaaatgacaagggtaactaactgggagtaatggcaattaattagtgacaacattacatctagattatagcactctggaacttaagaaggcctcttcatcagcccatacgtaaatctgtaaaggcactgtgcaaaatgtggacggggccggcttctaatttggagtgcatattaaaaaacaaaggcacgtttcctagaaattcaactttacattaacacaaaaaaaattttagagataacacgtaggtaagcttgataatatagcaggttctaagtcaaaagtcttgaagaaggtttcttgaacagcagttttgagttccgctggttcttcatgaagagacaacccacatcgatgatgatgatgatgaagataaccagaacagtaatcccgattgcccacatcttgcaattcttccaccaatatttcctcttcaacttggctgcgctcgtttcaaattgagaagcgcctgcctgcagtgcgtctgcacggtcgtctaactcagagagcttctggtctctttccagaaccttgtccacgttaactcgcattatgtccaccacctcatctacttgattttgtgtctgctgaagtcttcgattactgccagtggcagcagttggacctgtagacattttggcagnnnnnnnnnnnnnnnnnnnnnnnnnnnnnngtcagcagagaagcgaagttgggaccggaggccagggagatgggtgggacggcgcggcgcgggcccccggccgtaatggccgaattcccgggcatatgtccggtaccgtcgactg

SEQ ID NO: 114008 - DNA, 915 bp, Homo Sapiens
  misc_feature (591)..(674): n is a, c, g, or t
cgctgcctgcggccccgtcccagtcaagacatcactctttcgagtgaggaggaagcagaagtggcagctcccacaaaaggccctgccccagctccccagcagtgctcagagccagagaccaagtggtcctccataccagcttcgaagccacggagggggacagctcccacgaggaccgcagcacccccctggccaggcggtgtctctgttcgcacaggtccggagaagcgcagcagcaccaggccccctgctgagatggagccggggaagggtgagcaggcctcctcgtcggagagtgaccccgagggacccattgctgcacaaatgctgtccttcgtcatggatgaccccgactttgagagcgagggatcagacacacagcgcagggcggatgactttcccgtgcgagatgacccctccgatgtgactgacgaggatgagggccctgcctgagccgcccccaccccccaagctccctctccccgccttcagactgaagaatgactcggacctcttcgggctggggctggaggagtgccggacccaatggagagcagtgaggaaggtaatggagtggcaaaaccccctctnnnnnnnnnnnnnnnnnnnnnnnnnnnnnnnnnnnnnnnnnnnnnnnnnnnnnnnnnnnnnnnnnnnnnnnnnnnnnnnnnnnngacaagggagagggcaaggaggagcggcgacggcggcagcagcggcccccgcgccacagggagaggacggctgccgatgagctggaggctttcctggggggcggggccccgggcggccgccaccctggggggtggcgactaccaagagctctagggccgccgtgggcagtggccgcccctggggcgggggggcgtgccctgtcctggcctggggaggcctttggccctctggaccatccgc

SEQ ID NO: 114009 - DNA, 1409 bp, Homo Sapiens
  misc_feature (741)..(741): n is a, c, g, or t
  misc_feature (752)..(752): n is a, c, g, or t
  misc_feature (979)..(1029): n is a, c, g, or t
  misc_feature (1142)..(1198): n is a, c, g, or t
ctggccgggctggctgcggccgccctgggccgggccccaccggacggcttgctctgctctttacctggggttgctgtcgaggaccctgtgcaagactcggccggtttttctttctccctgatggacagacccaaacatagccgcgcagcatcgtgaagggctggggccttcactcctctgtggctctggaagagcccgatttcctcaggaggtaaaggaatgttcctgtcccccccggggaaagaaagtgaaaatgaaagcgccctggctgctcctggtgtggtcccatttaaaacgaggttgctgaaggccaggatgcgtgctacccggatgtgtgcccagaaaccctgcagccaagagcagccgcctggaccaccagcctccccttcatccacctggcccagcccagagcccaggcccacgtctggtggcatgtcgggccccaggcctgtggtgctgagcgggccttcgggagctgggaagagcaccctgctgaagaggctgctccaggagcacagcggcatctttggcttcagcgtgtcccataccacgaggaacccgaggcccggcgaggagaacggcaaagattactactttgtaaccagggaggtgatgcagcgtgacatagcagccggcgacttcatcgagcatgccgagttctcggggaacctgtatggcacgagcaagggtggcggtgcaggccgtgcaggccatgaaccgcatctgtgtgctggacgtggnacccgcagggntgtgcggaacatcaaaggccaccgaccctgcggcccctctaccatgtctgtgccgccggcttcgctgcgcgcgctcgacccccggctgcggcgccgcacgagtggaacccgagacacgctgttccacgccgtggcccctcgccgggcgcccccgggcgaccgccatggcgcccacgcctgatctgatgcgcgcctgcgtggcgcacgcggcgggccggcgccccggnnnnnnnnnnnnnnnnnnnnnnnnnnnnnnnnnnnnnnnnnnnnnnnnnnnagacgggccgggcggccgcccggcggccccctgacccgcctgcgccaggccgcgccgacgctccgcggccgtacgagccccgcccatgccgagccggcggggaaacgggggtnnnnnnnnnnnnnnnnnnnnnnnnnnnnnnnnnnnnnnnnnnnnnnnnnnnnnnnnntcgccgcgatggtgcgcgccggcgggcggagggttatcgggccggccccgcccggtagtacgggcggcgcggcgcccggggcgaccttacgcgcggcccggccagttacgccgccgcatgctgcccgccgcgtgcccgcggcggtcttggggtccgcgcgcgctgattgccgctaacgggagcgttggtcgcgtagcccgccggctggcgc

SEQ ID NO: 114010 - DNA, 1093 bp, Homo Sapiens
gccagtaactataacggtcctaaggtagcgaggcctgggtggcgaattcggcacgaggtgctgtccttcgagcgtcccggctgtaccaatggagcctgaagagttcggcgcagttcctggggtctccacagctgaggcagaacctgggccctttcctgggattgtggacatgttcggaactggaggtggcctgctggagtatcgggctagtctgctggctgggaagggttttgctgtgatggctctggcttattataactatgaagacctccccaagaccatggagacgctccatctggagtactttgaagaagccatgaactacttgctcagtcatcccgaggtaaaaggtccaggagttgggctgcttggaatttccaaagggggtgagctctgcctttccatggcccgctttcctgaagggcatcacggctgctgtcgtcatcaacggctctgtggccaatgttgggggaaccttacgctacaagggcgagaccctgccccctgtgggcgtcaacagaaatcgcatcaaggtgaccaaagatggctatgcagacattgtggatgtcctgaacagccctttggaaggacctgaccagaagagcttcattcctgtggaaagggcagagagcaccttcctgttcctggtaggtcaggatgaccacaacttggaagagtgagttctatgctaatgaggcctgtaaacgcttgcaggcccatgggaggagaaagccccagatcatctgttacccagagacagggcactatatttgagcctcccttacttcccccctgtgtcgggctttccctgcatgccttggtgggcagtcctattatctggggaggggacccagggctcatgccatggctcaggtggatgcttggaaacaactccagactttcttccacaaacacttgggtggccacgaggggcaatcccatcaaaagtgtaaattttatttgatcatgtggcctctctgttgctaatctctcctggaaacatctgccacatttagtgtgtgtatgtgtattcattcttttgtttttaataactaaagttttttcccctcattattaaaatgaatttaccagt

SEQ ID NO: 114011 - DNA, 1082 bp, Homo Sapiens
  misc_feature (77)..(77): n is a, c, g, or t
cgggtccatgggccagaccgggaggcgtaagttcataaataaaaataccccttgaaggggggattcggcgggagccntgccagcctttgtagagagccacctttgtgccccgggtttttttctccagggccatacgtccttttgttaattaagaaaaccctctttattggtatctgtgagccagggaaaggtggcctgtacagagtgcgagaagccggggcccttaggctctgggcaggtgggtgacgcggggggaagggtgctgggtaggattaccagcgtgcccatcccggtgacctcgggacgtcagcctggcgttgatgagatactgggcaaggctgatgttggccggggtcccccgtgatggtgatctgacgctctgaggacccttccgtggcgttggcgattttgatctgagctccagacatctgtcgaatttcattgattttggtcccttggcgtccaattatgcagcctattagatcattgggaatggtgagctcatgagtgctggccggtgggctggcgtccagacctgatgactggcccatcagattttgagcttcttcggaggagtgtaaaggcagcttttctccggggaaagcggggttggtctgtccgaggggaggaaagggggtttgctgcatggccaactggtggagcttggtcaactgctccagcatgaccacacagatctgcttgacgcactggatgatggcatctggggtccccgagatggtcaccgctcgctccgtggagttgggcagcatgtccccagccacctgcacctgggcacctgtggactccctgatctccttgatcttggagcctcctttgccgatcagggacccgcactggctggcaggcaccaccagcctcagcgtcactgggggcttgctggtggcagggctgttgctcatggagttgatgatatcctcctcaaacttgtatgcgatcatggcaaagcccttgaagatggcgtctgtggggcctgtgatggtcaccgacgcgtgggtcgacgatatcccgggattccggaccggaccagcctgctttttttaccactgtttatattcaccata

SEQ ID NO: 114012 - DNA, 1047 bp, Homo Sapiens
  misc_feature (880)..(938): n is a, c, g, or t
cagtcgacggtaccggacatatgcccgggaattcggccattacggccgggggcggcgcctcgtactccaaccgcatctgcagcgagcaactgagaagccaagactgagccggcggccgcggcgcagcgaacgagcagtgaccgtgctccttccccagctgtgcagctgcccaccgcaagggcagcagcagcaatgagccttcctctgactcgctcagctcacccacgctgctggccctgtgagggggcagggaaggggaggcagccggcacccacaagtgccactgcccgagctggtgcattacagagaggagaaacacatcttccctagagggttcctgtagacctagggaggaccttatctgtgcgtgaaacacaccaggctgtgggcctcaaggacttgaaagcatccatgtgtggactcaagtccttacctcttccggagatgtagcaaaacgcatggagtgtgtatcgttcccagtgacacttcagagagctggtagttagtagcatgttgagccaggcctgggtctgtgtctcttttctctttctccttagtcttctcatagcattaactaatctattgggttcattattggaattaacctggtgctggatattttcaaattgtatctagtgcagctgattttaacaataactactgtgttcctggcaatagtgtgttctgattagaaatgaccaatattatactaagaaaagatacgactttattttctggtagatagaaataaatagctatatccatgtactgtagtttttcttcaacatcaatgttcattgtaatgttactgatcatgcattgttgaggtggtctgaatgttctgacattaacagttttccatgaaaacgttttattgtgnnnnnnnnnnnnnnnnnnnnnnnnnnnnnnnnnnnnnnnnnnnnnnnnnnnnnnnnnnnctaccttgaggtcttttgacatgtggaaagtgaatttgaatgaaaaatttaagcattgtttgcttattgttccaagacattgtcaataaaagcatttaagttgaatgcg

SEQ ID NO: 114013 - DNA, 967 bp, Homo Sapiens
  misc_feature (80)..(114): n is a, c, g, or t
  misc_feature (757)..(819): n is a, c, g, or t
ctgatcgatcactatagggcgctagctcgctgtagcgaacgacgagcgcagcgaagtcagtgagcgaggaagcggcccgnnnnnnnnnnnnnnnnnnnnnnnnnnnnnnnnnnncagtcgacggtaccggacatatgcccgggaattcggccattacggccggggagtgcgcagacgcaggggtcggcgccgggtgagagcgtgcggccgggtaagggagccgtcttctcagattcaccacaacatggcaaatctttttataaggaaaatggtgaaccctctgctctatctcagtcgtcacacggtgaagcctcgagccctctccacacttctatttggatccattcgaggtgcagcccccgtggctgtggaacccggggcagcagagcgctcacttctctcacccggcctcctgccccatctgctgcctgcgctggggttcaaaaacaagactgtccttaagaagcgctgcaaggactgttacctggtgaagaggcggggtcggtggtacgtctactgtaaaacccatccgaggcacaagcagagacagatgtagaccctttccctccagagtcacgcacatactcgtcatcgcatcacttgggagaatggttgtatcttatggaaggaattatcacatcaaggagccacgggaaagtgactggaagcaaacgccctaaaagttacccatcacgtttcagtgtaaatgagtaactatagaagacattgcgttatcttatttccaaaacgttccaannnnnnnnnnnnnnnnnnnnnnnnnnnnnnnnnnnnnnnnnnnnnnnnnnnnnnnnnnnnnnnttttcctgtgcggtccgcctcgggcccctcgaagaacttttctaaaaccaattcggtttggcggcgcggggccccagaaaggaaaggggaactgggccatagcctggtttcctaaggaaaacctgggaaatggactagggccttggaa

SEQ ID NO: 114014 - DNA, 1446 bp, Homo Sapiens
  misc_feature (48)..(82): n is a, c, g, or t
  misc_feature (979)..(979): n is a, c, g, or t
tggcaaacgaccgagcgcaccgaggtgtatgatgcgaggaagcggcgnnnnnnnnnnnnnnnnnnnnnnnnnnnnnnnnnnncagtcgacggtaccggacatatgcccgggaattcggccattacggccgggggccctgaaaccttctgggaggagaagaggcctgaccttggcgctggggtccagtgggcactgctctggtccgaggctgctgctcttgacctctgctctgcggctgttttccattggagtagaggctcctcctgtcctgtcctgcctgtggagggaagcaaaccttcccctggaccagagagaggagaaagcggagacaggtagcaacgctgtggactggtgatgacaggctcttcagctccctgcaagtgaccgggcctggggaacagggcatggcacaggcacacaggaccccccagcccagggctgcccccagccagacccgatgtgttcaagctggttctcctggcaagtggctccgtgggtaagtccagcttggctcttcggtacgtgaagaacgacttcaagagtatcctgcctacggtgggctgtgcgttcttcacaaaggtggtggatgtgggtgccacctctctgaagcttgagatctgggacacagctggccaggagaagtaccacagcgtctgccacctctacttcaggggtgccaacgctgcgcttctggtgtacgacatcaccaggaaggattccttcctcaaggctcagcagtggctgaaggacctggaggaggagctgcacccaggagaagtcctggtgatgctggtgggcaacaagacggacctcagccaggagcgggaggtgaccttccaggaagggaaggagtttgccgacagccagaagttgctgttcatggaaacttcggccaaactgaaccaccaggtgtcggaggtgttcaatacagtggcccaagagctactgcagagaagcgacgaggagggccaggctctancggggggatgcagctgtggctctgaacaaggggcccgcgaggcaggccaaatgctgcgcccactaggtgcagccactcctgggggctgtggggaagacaccccctgcctgggccatggccagctctaggtggattctgattcactgtcaatgctgggttgctcccgagccctagatgttcctggaagttggccccctttatgaaaaccacttcccacagccagtgggaactgccagaggaagatctggcgtcacatggctcccaggatttccacatcttggtgaagttgcccctgggaagggcagctgggggcagtggcgccagttcccttccatggtctcccggctggcaatgtggtgaagctgagtttctgtccaatgagcaggaagattctgagacatttcgcctgagatataagttgtactgcgtatgcagtttttcctcccaaaaattaaattgcttttgac

SEQ ID NO: 114015 - DNA, 1094 bp, Homo Sapiens
cagtcgacggtaccggacatatgcccgggaattcggccattacggccgggggtctcttgtcagctgtctttcagaagacctggtaagtgggactgtctgggttggccccgcactttgggcttctcttggggagggtcagggaagtggagcagccttcctgagagaggagagagaaagctcagggaggtctggagcaaagatactcctggaggtggggagtgaggcagggataaggaaggagagtatcctccagcaccttccagtgggtaagggcacattgtctcctaggctggacttttcttgagcagagggtggggtggtaaggaaagtctacgggccccgtgtgtgtgcacatgtctctgtgtgaatggacccttccccttcccacacgtgtatccctatcatcccacccttcccaccagagccatagccatctgctggtttggttatttggagagtgcaggccaggacaaggccatcgcttggggcatgaatcctctgcgtactgccctggcagatgcaaattccctgcatgggattccccagaaggttctgtttttcaggtggggcaagtccgtgggcatcatgttgaccgagctggagaaagccttgaactctatcatcgacgtctaccacaagtactccctgataaaggggaatttcccatgccgtctacagggatgacctgaagaaattgctagagaccgagtgtcctcagtatatcaggaaaaagggtgcagacgtctggttcaaagagttggatatcaacactgatggtgcagttaacttccaggagtactccctgataaaggggaatttccatgccgtctacagggatgacctgaagaaattgctagagaccgagtgtcctcagtatatcaggaaaaagggtgcagacgtctggttcaaagagttggatatcaacactgatggtgcagttaacttccaggagttcctcattctggtgataaagatgggcgtggcagcccacaaaaaaagccatgaagaaagccacaaagagtagctgagttactgggcccagaggctgggcccctggacatgtacctgcagaataataaagtcatcaatacctc

SEQ ID NO: 114016 - DNA, 356 bp, Homo Sapiens
gcacgaggttgatatccaactctttgaaccagacgtctgcaccctttttcctgatatactgaggacactcggtctctagcaatttcttcaggtcatccctgtagacggcatggaaattcccctttatcagggagtacttgtggtagacgtcgatgatagagttcaaggctttctccagctcggtcaacatgatggtgcagttaacttccaggagttcctcattctggtgataaagatgggcgtggcagcccacaaaaaaagccatgaagaaagccacaaagagtagctgagttactgggcccagaggctgggcccctggacatgtacctgcagaataataaagtcatcaatacctc

SEQ ID NO: 114017 - DNA, 758 bp, Homo Sapiens
gacggcagtactctaacggtcctaaggtagcgaggcctgggtggcgaattcggcacgaggcaccatggcaaccgccaaggtgatacccttggtcattcggatgaagtcttctggggtagaggtcttggcaggtggctctgggtatcaccatggcaaccgccaaggccgttgctgctggcaattcctgtcgccaggaagatgtcattgccacagccaatctgagccgccgtgctattgcagatatgcttcgggcttgcaaggaagcagcttaccacccagaagtggcccctgatgtgcggcttcgagccctgcactatggccgggagtgtgccaatggctaccttggaactgctggaccatgtactgctgaccctgcagaagccaagcccagaactgaagcagcagttgacaggacattcaaagcgtgtggctggttccgtcactgagctcatccaggctgctgaagccatgaagggaacagaatgggtagacccagaggaccccacagtcattgctgagaatgagctcctgggagctgcagccgccattgaggctgcagccaaaaagctagagcagctgaagccccgggccaaacccaaggaggcagatgagtccttgaactttgaggagcagatactagaagctgccaagtccattgcagcagccaccagtgcactggtaaaaggctgcgtcggctgcccagagagaactagtggcacaagggaaggtgggtgccattccagccattttgctccggg

SEQ ID NO: 114018 - DNA, 238 bp, Homo Sapiens
cctgcagctagactatagaggtacctcgtaggaggtgttggacaaaatggtaattcagtttttaaatgtttgaggaacccacaccacagcctggcttggctttgctttcagcctctaaactgccacctgccaagacctctaccccagaagacttcatccgaatgaccaacgtgagcctcaccatgaaccagacacagcgactgtgccccgagatgccagatgcaaccactgtgtgtaa

SEQ ID NO: 114019 - DNA, 346 bp, Homo Sapiens
gcccacccagaagaagttctcaggctcctcaccttcgttgataacctgccttgctgtagcaggtgtcaaacatggtgttcaggatgtcttctgccaacttggcttcgtcagggtctgatgccgagtacatgaaacacacacgtctcttccggtgctccaacgagaagggctactttgcagtgactgagaaatgctccgacttttgccaagatgacctggcagatgatgacatcatgttgctagacaatggccaagaggtctacatgtgggtggggacccagactagccaggtggagatcaagctgagcctgaaggcctgccaggtatatatccagcacatgcggtc

SEQ ID NO: 114020 - DNA, 505 bp, Homo Sapiens
cagtcgacggtaccggacatatgcccgggaattcggccattacggccgggaatccactctacttgggtagaaaatattttatctctagtgattgcatattatttccatatcatagtatttcatagtattatatttgatatgagtgtctatatcaatgtcagtgtccagaatttcgttcctaccagttaagtagttttctgaacggccagaagaccattcgaaattcatgatactactataagttggtaaacaaccatacttttatcctcatttttattctcactaagaaaaaagtcaactcccctccccttgcccaagtatgaaatatagggacagtatgtatggtgtggtctcatttgtttagaaaaccaccgcgcccggcagttgagcttattttcatattttcctgcagaatagtcttgttctttctcttcaagagtgtgtcttagctatttttttgccctttggtctttcatattccagagaatatattaaatatcccaag

SEQ ID NO: 114021 - DNA, 575 bp, Homo Sapiens
  misc_feature (76)..(110): n is a, c, g, or t
  misc_feature (430)..(489): n is a, c, g, or t
ttcgatcactatagggcgctagctcgtttgtagacgaacgacgagcgcagcgagtagtgagcgaggaagcggccgnnnnnnnnnnnnnnnnnnnnnnnnnnnnnnnnnnncagtcgacggtaccggacatatgcccgggaattcggccattacggccggggtactggatatgtttaaaatagtgatgtaacagtttttattttaaaataccaatatttacacgacaccaggcaaatacatactttgtcaactatttaacttcccatgaaaaattttagataccaacttagataaaattttagatatcaacttagatgggtgagggtatacatgatttttcaaaatacttttgggggcacatgagcagaatactttgtggactactgctttaaaacacgatttctccaagtacagttgagggacaacttannnnnnnnnnnnnnnnnnnnnnnnnnnnnnnnnnnnnnnnnnnnnnnnnnnnnnnnnnnncaaatttgggttattaggtttggggtagaccccaaataagttttcaacatgtaccccaggtggctctcatgcaaacccctcttgcc

SEQ ID NO: 114022 - DNA, 934 bp, Homo Sapiens
  misc_feature (82)..(116): n is a, c, g, or t
aagcactggtataagatcctatgggcgctagttacgcaccgaacgacgagcgcagcgaagtagtgagcgaggaagcggccgnnnnnnnnnnnnnnnnnnnnnnnnnnnnnnnnnnncagtcgacggtaccggacatatgcccgggaattcggccattacggccgggggctcttccagaggcaagaccaaccaagatgagtgccctgggagctgtcattgccctcctgctctggggacagctttttgcagtggactcaggcaatgatgtcacggatatcgcagatgacggctgcccgaagccccccgagattgcacatggctatgtggagcactcggttcgctaccagtgtaagaactactacaaactgcgcacagaaggagatggagtgtacaccttaaacaatgggaagcagtggataaataaggctgttggagataaacttcctgaatgtgaagcagtatgtgggaagcccaagaatccggcaaacccagtgcagcggatcctgggtggacacctggatgccaaaggcagctttccctggcaggctaagatggtttcccaccataacctcaccacaggtgccacgctgatcaatgaacaatggctgctgaccacggctaaaaatctcttcctgaaccattcagaaaatgcaacagcccatactgaatgaacacaccttctgtgctggcatgtctaagtaccaagaagacacctgctatggcgatgcgggcagtgcctttgccgttcacgacctggaggaggacacctggtatgcgactgggatcttaagctttgataagagctgtgcttgtggctgagtatggtgtgtatgtgaaggtgacttccatccaggactgggttcagaagaccatagctgagaactatgcaaggttggcggaaagcccttgcctgaaagcaagatttcagctggag

SEQ ID NO: 114023 - DNA, 865 bp, Homo Sapiens
  misc_feature (758)..(792): n is a, c, g, or t
tgggtaaatattccgcaatataggtcttcttaaaaagtagatgcttagacatcattgcacaggtttctcctcattcttgctgactttaacagtctctcctcgggtgttctccttgtcaaactgttcatcccccagtttcctctgaaatagacagcatgtcaccagaaccagccttgtcaatggatccactgagcccggagagagcaactccgcaatgtttaccttctggtcttttcagctacccaggtgtttatgtgttttctggacttctctacggcgctgataaagtcaagctcctccatctctgcttggtagaatttttggcaggaatctctaaaagatgagaggaaatcacaagacttttccccaaagagcctgttggccaccctaagcaagtactgcgtgccagtcttgttcacttcggtgagaagaggactggaaaccctggtggatgtctccaccaccgccacttttattgaaagaaagtatctgggccatctgtgcagcggtgtcttccctgttgccccaccatgtagaccatggccagggcacaggacatgctcatgggtgacgaaaaacacattcttcgagttagtctttacccagcgttttcaaaaggtttaaggcaaaggtgccatttgcttctgcgagaacatccatgatggcagacccggccgcgtcgccgttctctgccgctgcgaggctcccccggccgtaatggccgaattcccgggcatatgtccggtaccgtcgactgnnnnnnnnnnnnnnnnnnnnnnnnnnnnnnnnnnncgccgcttcctcgctcactgactccgctgcgctcgtcgttcgctcgcgagtagcccctatatgatctatcatc

SEQ ID NO: 114024 - DNA, 1064 bp, Homo Sapiens
aggagaaggggatttgccccattaaaatggagggtttttggagaaaacccttttgcgttttaaaaaataaaaggattccagggagttttatagtttcaccaagttttttaagacccaatggggggattaaaactttcagggatacgtggaatttaaatgcaaattggcattcatggatatacctacatcttgaaaaactttgaaaaggaaaaactattcccaaagaaggtcctgatacttaagaccagcttgctgggttgatcaaagcagaaagcatatactttcaagtgagaaaacagcagtggcaggcctgagtcttccaagcaatcaaatctgtaaaggcagatggttactagtaagtctagttatgggagtatgagttctaactcatgctgtgcttgctggattggctggctcttttccgctctctgtgatgctggactggcttggcaggtgacatgatctcaaagttgtgactggactcgttgtgctgccgggtgtacctcttgcacttgcaggcagtgactactgtgattttgtaggtgcgtgtgctgccatcttggcactgcagctggattctctgggtacgggttttgtcattgacacaccgccactcctgggagctcatcctgctccagtactttgttacatagcctcctccaatccagttagggagcactggcagtgggcaagcactcgccagcacacaccagctccttcagagggcggatgctggtgcacatgtatatgtgagatgtatgtggtggaacgcatgtgggggggttgcgcttgacctggagtgttccgatagattggcaatgttgaagataatggctgcctacatttctggctatgttcctttgtgtagttgggttggggggtgtctggggtgggattgtgcagggtctggatgagagatctttctggcatcagcaacccatccccctcagctcctcaccagggctcagcaccaagcttgggggtgggggctgctgctgcaggactgcagggagagactgggagaggctgaggcgtggctggttgggatttggatcccgggaatt

SEQ ID NO: 114025 - DNA, 1074 bp, Homo Sapiens
  misc_feature (85)..(119): n is a, c, g, or t
  misc_feature (844)..(844): n is a, c, g, or t
  misc_feature (887)..(887): n is a, c, g, or t
  misc_feature (983)..(983): n is a, c, g, or t
aagactgtatagactcactatagggcgctagcgtcgttgtagacgaacgacgagcgcagcgagtcattgagcgaggaagcggcgnnnnnnnnnnnnnnnnnnnnnnnnnnnnnnnnnnncagtcgacggtaccggacatatgcccgggaattcggccattacggccggggctttaaaagtagaaacatttgtataacaaggaaggatgaaaataaaacaaattcaaatatgtgaatagtcctggctgaggccagaactaaatttggttatttgcaagttttactgtgattaactgtactttctaatgtatttggaagactggaagtcttaattccatgttgatgggtgaaacttgtttttctgaaaaatgaagtaactgaaaatgctgcttcagaatgtcttgtatctccttagataactaatttatattgccattctttatttactatactttaaaggaagttgtcatgcaagttctatattagaactgtcaaactgcctcttggtttttgcctattattatttctctgtgagttgttactccttggtttttatatgctcctaacaaagatactttcactgactatcctacattatttgctgcttgccattgaaatttcatttcagtgtggagaaatgaaatactagtttctaagttaaaaaagacacatggtcctttatttttaagaaatagaatatgtaaaaagttttctcttttaatttgaaaaagagatgcatggttggtatttaagtagtatgtcatcatatttgaaatgccttttgtgacatttttgagtatttccttctctgaccaaaacaacttgtccgcctctcatcccatggntttaacgtaagtttaaaagctgtttgtggggtggattgcatangctaaacatcacagaagcatggatatttaaatgggcctgctatttaaaataaaatatggtggacctttggtccctaaaagcctattaataactggngccgggggcaacaagttggcctccaacgcccctggtaaatcccccacgaaacttttttgggaaaaggggttcaaaaaaggtggcggtttga

SEQ ID NO: 114026 - DNA, 1033 bp, Homo Sapiens
  misc_feature (82)..(116): n is a, c, g, or t
  misc_feature (667)..(724): n is a, c, g, or t
gaagattatagatcactatgggcgctactcggtctgcagcgaacgacgagcgcagcgaagtagtgagcgaggaagcggccgnnnnnnnnnnnnnnnnnnnnnnnnnnnnnnnnnnncagtcgacggtaccggacatatgcccgggaattcggccattacggccgggcactgctgagtggcctggaacttgtttaaagtgtttattccccatttctttgagggatcaggaaggaatcctgggtatgccattgacttcccttctaagtagacagcaaaaatggcgggggtcgcaggaatctgcactcaactgcccacctggctggcagggatctttgaataggtatcttgagcttggttctgggctctttccttgtgtactgacgaccaggccagctgttctagagtgggaattagaggctagagcggctgaaatggttgtttggtgatgacactggggtccttccatctctggggcccactctcttctgtcttcccatgggaagtgccactgggatccctctgccctgtcctcctgaatacaagctgactgacattgactgtgtctgtggaaaatgggagctcttgttgtggagagcatagtaaattttcagagaacttgaagcgaaaaggatttaaaaccgctgctctaaagaaaagaaaactggannnnnnnnnnnnnnnnnnnnnnnnnnnnnnnnnnnnnnnnnnnnnnnnnnnnnnnnnntgagccaccgtgctagccaaggatgagatttttaaagtatgtttcagttctgtgtcatggttggaagacagagtaggaaggatatggaaaaggtcatggggaagcagaggtgattcatggctctgtgaatttgaggtgaatggttccttattgtctaggccacttgtgaagaatatgagtcagttattgccagccttggaatttacttctctagcttacaatggaccttttgaactggaaaacaccttgtctgcattcactttaaaatgtcaaaactaatttttataataaatgtttattttcacattg

SEQ ID NO: 114027 - DNA, 957 bp, Homo Sapiens
cggggtttaagacgcttcttaacatgtccggcacatctgggcttcaatcgagcccctcctcaacactgaccaatagcgccccatttacagcgaccatgaaccaagatgtggttggtgaggggtcccttcgggctcagcaaaatgggatatgagtaacccgctggagacgctgtcgcttcagaacctggtaaatgtgacccttttgggtctgtttcaacccagacctggtcacctgctgcagctgaagcaacatgccgcctgacaccacctggaagagccccttgttggtggtgtcacagagcccaggagcgtcgacctgcccctgaggaggagacgatggacagcagatttcccactgggacagcacctggaagtgaagtagtagtaccgggtacagtgcagacgaatgcggccggagtggttctggtacggttcttcctggttggtgatgaccggtgtcgaagatgaccacgttgccccccattggggggttccgccgaatggcggagaaggctggcctcggctggtccttgatgtttcctgggctgcccttggtgcctttaattcccgggatgccacgggctccgagggggccgctgggccctggctagcccaccttgccggggtttccagagggcccaggttccccctggtctccgtttaaggccttggatgcctgtccggatgccaggggcccccggctccccttgctcccccttgaggcctggccgcccccgtctgccaggtcttcctgcctcccctttcttcccgtctggtgctcggcacaagtcctcggtcaccatagaggccagcgatatggccagcacacagagcaccagccatccccggggaccctccatgatgcctctgcctcctgttgtcaactccaactggatgctcctgcccccccggccgtaatggccgaattcccgggcatatgtccggtaccgtcgactg

SEQ ID NO: 114028 - DNA, 867 bp, Homo Sapiens
agggtggtcaggtcactctggtcctgtcgcctccggttttcgttcctcatgtaaactttcttgaggctgcaggaaaagctggtgcttctcttgcctgtagagccaaaagcttcgtcgcgccaacttcagaatttgttccttggtgctcctgtaaggacattctctcggccatcgtccttgtggtcggtcgcttcgtctcctgttcttccttcatggtctgttccatcatctgatccacctctgtcttcctctggagaatcaggcagaatgaagaagaggcagggtagtgaaaacaattccaacgttacagattgaagaccagcaaaacccagtcatcccaacacgcctgtatgctctttgcctcgaggggacaagctccccatcgcggcaatagggaacggaaaggctttatcaggtgctctccaaggtccttcccatctcaagggttctggagcgtggaacaggacgcttaaatcccaccacaacggggctattccttccctcctctgcgctcggcagcgggcgcgctggttggccggtgggttgaggccagccattgaggtacaggagccattctgggccgtgcgtccccctgctatggccccaggctcaccctgccgcttgcgctcccgctccatcataatgtgccggtgcagcgccctggccatggcgttggaaagcttggggcgctcacaggagtgcgggcatggtgctgccgtgggcgctcgggccgtgggcgcccggctgtcatctgactgccagacctcagacggggcccgccttctctgcgctttctcagcggctccgacgcgccctccccggccgtaatggccgaattcccgggcatatgtccggtaccgtcgactg

SEQ ID NO: 114029 - DNA, 763 bp, Homo Sapiens
cctaaaatccggggataatgtctcccagcatgccccaatgacaggaactgactcgagctgaccaaacccttcagctctgcaacaaaggtgttgtctctgacgatgtccagggtcgtcacccgaagattttgttgggcttgtacactccatgcttcttgaaaacttctgctgtgatggggatggtggaattaaccggattggcaatgacgcagatcatggcttccgggcagtgctgggcacaggcagcggtcagggtgccacaatcgtggcattggtgttgaacaggtcgtcccgggtcatgcctggctttctggggactccagccggaataactaccacatcacaacctttcaggcagtcaggcagctgttcaggtccgaggtagcctttcacatgcggctttggtctcgatgtggctcagatctgcggccactccgggtgtgtgcgcgatatcatagagggtcaggcggctcaccaaggggctgttcttcaggagaagtgaaagtggctgcccgatgcctccagaggcccctagcacagctactttagcattgttctgggccgaggtgctgaagctgcggcggagagcagcgctggcaggccgggcgagggcggagagcatggctggagcgggaggggcaccgactggcaggcacaggagctggtgacgcggaagtgactccaacgacctccacactgcccagcgcctgctcgtctgcctcgtgccgaattaaacaccggtcccgctacctagccgtaagtt

SEQ ID NO: 114030 - DNA, 1115 bp, Homo Sapiens
  misc_feature (158)..(158): n is a, c, g, or t
  misc_feature (448)..(490): n is a, c, g, or t
aacgcgactattaacgtagagaaggattcggccgtttactgtcgcggtattcggttgcgtaacactccatctcgctagctaaccgtgtggcaaaaacgggaatggctgaagggagacgtaacgtagggagtgaataaccgctcaggctcgcgccgttnaaaagcggagtgcgacggtgcgacgtcacatatttgttgcacagcagctagtttgtacgcattggagcgacgggaggattacaaatgggctaagggcgaagcaggggtagggacgggaagcgaccaaacgatagtaaacggaggcgtcggtgcaggtaacgagcttcgagaggagtcgggaaagtttggagcgcaatgaatactcgccgcactgaaaacggcacgatacttgctcggacgcggattgcgggcgcacgaagggtagaggtacggtagcgaggaagtggtcnnnnnnnnnnnnnnnnnnnnnnnnnnnnnnnnnnnnnnnnnnntggccgccgtgtgcaacccgcccgcgcgaggagaataggtgtcgtaaggcggtggccggcggaagtcctcccaggaatgccgtgaggggccccgggggagggatcgacgaggtgggtgaggctcttaaaggtccgatgtcaaactgtgactcgtcgccggcgcgcccgattgtcttcggggctattgcgcagggtggctctggctggcttccatggggggctcatcactggaagggctggtgacccccggaatggtgggcagatcccttgggggtgttttggtcacaggtgagttccgacactccatcaggaatttccggtcatagatgatcctggtacctcccggggtggtgctgaagagcgtgccgtccgggggtcgtgctgtagtccccgggcgggagctgcacgccgtcgccgagcaccacccggcgagtggcggggatggcccggcttggggtctggctgcagctgctgcccccaggacatggtctcctgtgcgctgcacccgcgaacctctcgcgacccgtgggcgacggcgtgggtcgacgatatcccgggaattccggaccggtaccagcctgcttgtttaaacacggtctataggtactatcgtgggcttgtgcga

SEQ ID NO: 114031 - DNA, 923 bp, Homo Sapiens
cggcaagtaactataacggtcctaaggtagcgaggcctgggtggcgaattcggcacgaggagaaaatgatgcccaggttgggctccccggcccaccggccgaggagaggcctgcgctgcacacgcgcagaccgagcatccgcgtcaagaggcgaagagagcgcgcgctccccacgtcctgcgctcctggctgccgggcattcgtctcagccgtgactctcgccaggccggggctggcgcgcccacgtctgaagagcgatgccccgggagatcatcaccctgcagctgggccagtgcggcaaccagattgggttcgagttctggaaacagctgtgcgccgagcatggtatcagccccgagggcatcgtggaggaattcgccaccgagggcactgaccgcaaggacgtctttttctaccaggcagacgatgagcactacatcccccgggccgtgctgctggacttggaaccccgggtgatccactccatcctcaactccccctatgccaagctctacaacccagagaacatctacctgtcggaacatggaggaggagctggcaacaactgggccagcggattctcccagggtgagaaaattcatgaagacatctttgacatcatagaccgagaagcagatggaacgtgacacgtttggaggtaccccaagaagctagtgcacacttattcagtgtttccctaccaggacgagatgagcgacgtaatgggtcagccctaaaattcactcctgacactcaagaggcttgacgcagaacgcagattgtgtggtggtgctggacaacgacagccctgaaaccggattgccacagacccgcctgcacatccagaaacccgtccttctcccagattcaaccagttggtgtccaccatcattgtcgcgcagcaccaccaccctggctaaccg

SEQ ID NO: 114032 - DNA, 1285 bp, Homo Sapiens
  misc_feature (81)..(115): n is a, c, g, or t
  misc_feature (191)..(247): n is a, c, g, or t
  misc_feature (777)..(1214): n is a, c, g, or t
atgatcgactcatatagggggctagcggccgttaagcgaacgacgagcgcagcgagtcagttgagcgaggaagccggacgnnnnnnnnnnnnnnnnnnnnnnnnnnnnnnnnnnncagtcgacggtaccggacatatgcccgggaattcggccattacggccgggcaggttttcagaaaatatatgcagannnnnnnnnnnnnnnnnnnnnnnnnnnnnnnnnnnnnnnnnnnnnnnnnnnnnnnnnacccaacaaatgtgatgagacaataatgggaaggaagggaatgagaaatattaaattctggatggtggttatctttgagggaggggaatgatgtgatggggaaatggactttcaaaggtaatggtaacttccttaagctggatggtaggtccactagtgttgctgcatagttataccttttatcttaaatacatttgtatctatgtaacaaccactttaaagacaaccgtgctgtaaggcagtagctaaaaacagaaaatagtccatcgggaagggtaagatggctttctgctgagcacagggctagaagtgacagcccagtgggccttccaactatatgccaggtgttagatgagtagagaggagaccacccaggaagtctggacaaggggtctggcatgagctctggagaagatatatctgaggaacatggggtatgctagtttgttgtcctgaattgctgtagagaagataatttaaattgcatcttagaagacgaccctgagggtgaatttcaacttagggcaatnnnnnnnnnnnnnnnnnnnnnnnnnnnnnnnnnnnnnnnnnnnnnnnnnnnnnnnnnnnnnnnnnnnnnnnnnnnnnnnnnnnnnnnnnnnnnnnnnnnnnnnnnnnnnnnnnnnnnnnnnnnnnnnnnnnnnnnnnnnnnnnnnnnnnnnnnnnnnnnnnnnnnnnnnnnnnnnnnnnnnnnnnnnnnnnnnnnnnnnnnnnnnnnnnnnnnnnnnnnnnnnnnnnnnnnnnnnnnnnnnnnnnnnnnnnnnnnnnnnnnnnnnnnnnnnnnnnnnnnnnnnnnnnnnnnnnnnnnnnnnnnnnnnnnnnnnnnnnnnnnnnnnnnnnnnnnnnnnnnnnnnnnnnnnnnnnnnnnnnnnnnnnnnnnnnnnnnnnnnnnnnnnnnnnnnnnnnnnnnnnnnnnnnnnnnnnnnnnnnnnnnnnnnnnnnnnnnnnngcaaccagctaccattctaaaactgccatatgattttaggatttttaaaaagggccaaatttaggttaagc

SEQ ID NO: 114033 - DNA, 1115 bp, Homo Sapiens
  misc_feature (97)..(131): n is a, c, g, or t
cacagcgagccccccacaacatgactgactcagtataggcgctgagcgttatgacgaacgacgagcgcagcgagtagatgagcgaggaagcggacgnnnnnnnnnnnnnnnnnnnnnnnnnnnnnnnnnnncagtcgacggtaccggacatatgcccgggaattcggccattacggccggggaggcgggagaggcgagctcgcgatgagtggtctcggcaggctcttcgggaaggggaagaaggagaaagggccaacccctgaagaagcaatacagaaactgaaggagacagagaagatactgatcaagaaacaggaatctctggagcagaagattcaacaggagctacaaacagccaagaacgtatgggaccaagaataagagagctgccctacaggctttgcggaggaagaaaagattcgaacagcagctggcacaaactgacgggacattatccaccctggagtttcagcgtgaggccattgagaatgccactaccaatgcagaagtccttcgtaccatggagcttgctgcccaaagcatgaagaaggcctaccaggacatggacattgacaaggtagatgaactgatgactgacatcacggaacaacaggaggtggcccagcagatctcagatgccatttctcggactatgggcttcaggagatgatgtggatgaggatgaactggctggcaggagctaaacggagctggagcaggaggaattggccaggagttgttaaatgtgggcgacaaggaagaagaaccctcagtcaaattgcctagtgtaccttctactcatctgcggcagggcgagtcccaaagtggatgaagatgaagaagcactaaagcagttggtgagtggtatctgataatctggttgtcttcctaatgtaccttggtggtcctttttcttagtgcaagtgtgagtaaaggagataactttggggaagtcatgctgaggtggtagtgtgaccctgctgaaaaaggtctcttacctcccaggcctggttcattctgaagaaggaactgctacggaggggccttgggtccttttttgatagcaggtttatggcttgtgccattaaattgggcgtggtaaacatataggaaaa

SEQ ID NO: 114034 - DNA, 1231 bp, Homo Sapiens
  misc_feature (1207)..(1207): n is a, c, g, or t
aatctgggcagtaactataacggttctaaggtagcgaggcctgggtggcgaattcggcacgaggcgttgggcccggcgcgacccgcaggagcgtagagagcgcgggactagagtgcagagctccgggacgtggatcggagccggcgcgatgggcggagagcaggaggaggagcggttcgacggcatgttgctggccatggctcagcagcacgagggcggcgtgcaggagcttgtgaacaccttcttcagcttccttcgacgcaaaacagactttttcattggaggagaagaagggatggcagagaagcttatcacacagactttcagccaccacaatcagctggcacagaagacccggcgggagaagagagcccggcaggaggccgagcggcgggagaaggcggagcgggcggccagactggccaaggaagccaagtcagagacctcagggccccagatcaaggagctaactgatgaagaggcagagaggctgcagctagagattgaccagaaaacaggatgcagagaatcatgaggcccagctcaagaacggcagccttgacctccccagggaagcacgatactgaggaagatgagggaggaagatgagaaggacaaacggaaaaccggaagcccaacctaggcaacgggggcagacatgccaaattaccgctggacccagaacctgtcggaactgcacctgcccgccccctttctgggtgaacttcccggctgcaaaggcgaacggcatggtggctgcgcccctgcaggcaggaggacccctttctggcatgttccctctcctggcgctgcccccaaataaatccatttgaatggcgcggaccttctcacgcaacgcgcctcttccccagcgggatgaacgcccaccaaacacccagcccccgtcattccgagcaccacgatccttccgcatactctacactcccggccatcaaaggaagcgccgggagcggccacacaacccccgtgcgcccgctgcctccctccccaccgctcagcccctctctctgtcggcgcgtcggcgggcacaccgattgagccgattgcccggtcccacctcagcctcccacccagacccccacgcggcccgcctctgcagcagtcacttcgcggcgccccgcccccccaacccgcgccctctagccgtgccccggtgttccgcttctgccactccagtggggatcanatcactgtcactcatctcacactg

SEQ ID NO: 114035 - DNA, 887 bp, Homo Sapiens
cagtcgacggtaccggacatatgcccgggaattcggccattacggccggggacacagacgagatctcgatcgaaggcgagatggcggacgtgctagatcttcacgaggctgggggcgaagatttcgccatggatgaggatggggacgagagcattcacaaactgaaagaaaaagcgaagaaacggaagggtcgcggctttggctccggtgagtgtggggaaaatggggtagagtggcctagtagggcaggagctacgggttttggagtccccacccacctcataggaacaatgggagaaaggaggagttttcggtgatctcgtgtatgtcccttatagaagaggggtcccgagcgcggatgcgtgaggattatgacagcgtggagcaggatggcgatgaacccggaccacaacgctgtgagtaataatggaacctgtgaggtatccgtgtctgtggtagtagttagaaaccaataaaatagttaaacgcagtaggaatgggttcagagatagcttaaacaatctgagtccgcactcactctattcctgtgagcctgcttaaagtgtctctcatgtactcattacaagttccccccgtaccccaacagctgtgaaggctggattctctatgtaacctggagtccatgaggaagccaccgaaagaagacatacacgacaaattcgcagaatatggggaaattaaaacattcatctcagctcgacaggcgaacaggatatctgacaggggtatacctctaagttgaactatgacacttacaaggcaagccaaggctggctatggacggactcaatgggcagattggatggaccggccatcagcgttgactgctgttagtacgggtccaccaaagggaccgacgaaaagcg

SEQ ID NO: 114036 - DNA, 879 bp, Homo Sapiens
ctaggggcgagagagtatgaagtcgacggcgcgccgaattcggcacgaggggcgagatggcggacgtgctagatcttcacgaggctgggggcgaagatttcgccatggatgaggatggggacgagagcattcacaaactgaaagaaaaagcgaagaaacggaagggtcgcggctttggctccgaagaggggtcccgagcgcggatgcgtgaggattatgacagcgtggagcaggatggcgatgaacccggaccacaacgctctgttgaaggctggattctctttgtaactggagtccatgaggaagccaccgaagaagacatacacgacaaattcgcagaatatggggaaattaaaaacattcatctcaacctcgacaggcgaacaggatatctgaaggggtatactctagttgaatatgaaacatacaaggaagcccaggctgctatggagggactcaatggccaggatttgatgggacagcccatcagcgttgactggtgttttgttcggggtccaccaaaaggcaagaggagaggtggccgaagacgcagcagaagtccagaccggagacgtcgctgacaggtcctctgttgtccaggtgttctcttcaagattccatttgaccatgcagccttggacaaataggactggggtggaacttgctgtgtctatatttaatctcttaccgtaatgcgtagtattgagttgcgaataatgtccattttgtctctactttatgtactttccgtctaaatgaagtctaagcatacagctgttgatatgtgaatctctagacgactcagatcttttctttttaaagactcggtacagggatgccgattctagcctaattgcacactgcctgctaatgtagcgc

SEQ ID NO: 114037 - DNA, 1044 bp, Homo Sapiens
  misc_feature (43)..(83): n is a, c, g, or t
  misc_feature (87)..(121): n is a, c, g, or t
  misc_feature (677)..(740): n is a, c, g, or t
taaaccatgtaaatagactactatgggcgctagcgcgtcactnnnnnnnnnnnnnnnnnnnnnnnnnnnnnnnnnnnnnnnnnccgnnnnnnnnnnnnnnnnnnnnnnnnnnnnnnnnnnncagtcgacggtaccggacatatgcccgggaattcggccattacggccgggggtgtaatgatggcaaaaccccaggagcggttaatgcctgtcatttatcctgcagtgctttgctgcaagataacatcgctgatgctgtagcttgtgcaaagagggttgtccgtgatccacaaggcattagagcatgggtggcatggagaaatcgttgtcaaaacagagatgtccgtcagtatgttcaaggttgtggagtgtaactccagaattttccttcttcagctcattttgtctctctcacattaagggagtaggaattaagtgaaaggtcacactaccattatttccccttcaaacaaataatatttttacagaagcaggagcaaaatatggcctttcttctaagagatataatgttcactaatgtggttattttcattatttaggcctacaactttttccagttggcaattagaactaatacgggtgaaaatttacctaaaaccttggttatcaaatacatctccagtacattccgttcttttatattggagacagtctcnnnnnnnnnnnnnnnnnnnnnnnnnnnnnnnnnnnnnnnnnnnnnnnnnnnnnnnnnnnnnnnncgggttcacgccatttctcctggtgcctcaggcctccccgagtagctgggattacgggcgcccgccaccacgcccgggtaatatagggaatttcaagtagagacagggttcacggtgttagccaaggagggtcctcgaatctcctgaccttgttgatccaaccacctcgggctcccaaagtggcgggattacgggcggtgagccatgggggcccgggccacatttcaagggtcttatcacagaaattaaccaagacgtaatctggaatgaacgaattatgcccaatattaagtaagactttgga

SEQ ID NO: 114038 - DNA, 1139 bp, Homo Sapiens
  misc_feature (77)..(111): n is a, c, g, or t
  misc_feature (678)..(713): n is a, c, g, or t
  misc_feature (836)..(874): n is a, c, g, or t
aacatgtactagactcatataggggtagtggctgagcgaacgacgagcgcaggagttaggagcgaggaagcggccgnnnnnnnnnnnnnnnnnnnnnnnnnnnnnnnnnnncagtcgacggtaccggacatatgcccgggaattcggccattacggccgggcatggtaaaatgaacagctttcttgtaactcataaaattctcttaggacatttttataaagtcacctgtttatagttctatcttttcagattccatttctttttacataaaacagcatacatatcaaaaactgtagcctagaatacagtttaattttggctttgttttgtttaaaaaaatgcagtgaagaatgggatgttggtgtttatggctattgggcacctttagtagaaacagacaaaagtaaggaaacgataataggacaagcatacttgaaaatttctgaatacttaaacaaaagcgcaacatcttgaaaaccagtctagtcattgaaacctatgaaatgacactgaaagatcctgggctgcttcttaaataagtagatcagcaagacttgtttcagagtgacagtggagtcgttaccgctggaggactaaagggccctgtggcagctgtcactggaactttgcctcttgatcaggaaaaatgttcaccagtccgtaaagccaagtgtgtnnnnnnnnnnnnnnnnnnnnnnnnnnnnnnnnnnnnaaagaaggatgtcaatttgtgactatatattttaaaaaaatctaagcagggggacatgcaaaaacaatcatcatccactgtggatgtcattttatagattaacactgtgtgcttttgtatggnnnnnnnnnnnnnnnnnnnnnnnnnnnnnnnnnnnnnnntatattcatttgcacttacgtgaaacacaaactttgctctacaaaatttcgtgtttcttagtgattttaaaatgcatgtattgcatgtaaaggaaaaccattacaattaatgtttatcacacctttatcttggtctttgttgatttgggttttgttggggtttttgttactgtttttaaattacagtaggcttctatatatcctggatttctgaactggtcttgttgacaaggattcccaagaaatggatcttttcactggctga

SEQ ID NO: 114039 - DNA, 973 bp, Homo Sapiens
  misc_feature (41)..(80): n is a, c, g, or t
  misc_feature (84)..(118): n is a, c, g, or t
cctgtatagactcatatagggcgctagcgtcggttgtatgnnnnnnnnnnnnnnnnnnnnnnnnnnnnnnnnnnnnnnnnccgnnnnnnnnnnnnnnnnnnnnnnnnnnnnnnnnnnncagtcgacggtaccggacatatgcccgggaattcggccattacggccgggggcccactccactccttgtgcggcgctaggccccccgtcccggtcatggccatgctcagggtccagcccgaggcccaagccaaggtggatgtgtttcgtgaagacctctgtaccaagacagagaacctgctcgggagctatttccccaagaagatttctgagctggatgcatttttaaaggagccagctctcaatgaagccaacttgagcaatctgaaggccccattggacatcccagtgcctgatccagtcaaggagaaagagaaagaggagcggaagaaacagcaggagaaggaagacaaggatgaaaagaagaagggggaggcatgaagacaaaggtcctccctgtggcccagtgaactgcaatgaaaagatcgtggtccttctgcagcgcttgaagcctgagatcaaggatgtcattgagcagctcaacctggtcaccaccctggttgcagctgcagatacctcggattgaggatggtaacaattttggagtggctgcccaggagaaggtgttgagctgatgaccagcctccagaccaagctagaaggcttccacagtcaaatctctaagtatttctctgagcgtggtgatgcagtgactaaagcagccaagcaggccatgtgggtgattatcggcagctggtgcacgagactggatgaggcagagtaccgggacatccggctgatggtcctggcagatccgggagcttatgctcgtgtatatgaaatcatcctgaagaacttcgagaagctcagaaagccaggggagcaacaaggcaagatctattgaaagccttttcca

SEQ ID NO: 114040 - DNA, 1100 bp, Homo Sapiens
  misc_feature (288)..(288): n is a, c, g, or t
  misc_feature (328)..(328): n is a, c, g, or t
  misc_feature (332)..(332): n is a, c, g, or t
  misc_feature (341)..(341): n is a, c, g, or t
  misc_feature (344)..(344): n is a, c, g, or t
  misc_feature (346)..(346): n is a, c, g, or t
  misc_feature (348)..(348): n is a, c, g, or t
  misc_feature (359)..(359): n is a, c, g, or t
  misc_feature (366)..(366): n is a, c, g, or t
  misc_feature (370)..(370): n is a, c, g, or t
  misc_feature (376)..(377): n is a, c, g, or t
  misc_feature (385)..(387): n is a, c, g, or t
  misc_feature (400)..(401): n is a, c, g, or t
  misc_feature (405)..(405): n is a, c, g, or t
  misc_feature (423)..(423): n is a, c, g, or t
  misc_feature (433)..(433): n is a, c, g, or t
  misc_feature (435)..(435): n is a, c, g, or t
  misc_feature (903)..(903): n is a, c, g, or t
  misc_feature (1017)..(1017): n is a, c, g, or t
aaagttacgtcagtacgaggcctgggtgttgaaatcggcacgagggtcgcatgttgtcggtagcagcccgctcgggcccgttcgcgcccgtcctgtcggccacgtccgcggggtggcgggcgcgctgcggcccttggtgcaggccacggtgcccgccacccggagcagcctgtgttggacctgaagcggccttcctcagccgggagtcgcgtgagcgtgcaggcccgtagcgccgtgccgtttgggtccggcctacctgataggtgccctacaacatagtcgccgtgnctatactaggtattaggtataatctccccgaacgacgagnaacngatagacanggntngncgcgttgaacntctcctnctcnaaaatnnacctgccnnngccgttgaaaagnntttntacgcactaaaggtaacngaacacgctncntttttcaaaaggaagaaaaaagcaagccgaacggctacggaacacggtttctcctatttggtaactgggagtaactactggtgggtgtcgcatattgctgccaagaatgccgtcacccagttcgtttccagcatgagtgcttctgctgatgtgttggccctggcgaaaatcgaaatcaagttatccgatattccagaaggcaagaacatggctttcaaatggagaggcaaacccctgtttgtgcgtcatagaacccagaaggaaattgagcaggaagctgcagttgaattatcacagttgagggacccacagcatgatctagatcgagtaaagaaacctgaatgggttatcctgataggtgtttgcactcatcttggctgtgtacccattgcaaatgcaggagattttgggtggttattactgcccttgccatgggtcacactatgatgcatctgcaggagattttgngtggttattactgcccttgccatgggtcacactatgatgcatctggcaggatcagattgggtcctgctcctctcaaccttgaagtccccacgtatgagttcaccagtgacgatntggtgattgttggttaagagacttggactcaagtcataggctctttcagtctttatgtcacctcaggagactatttgagagga

SEQ ID NO: 114041 - DNA, 1095 bp, Homo Sapiens
  misc_feature (260)..(260): n is a, c, g, or t
  misc_feature (982)..(1016): n is a, c, g, or t
aaagggcaaaaaggtgttgggggaaaaatccacccttttttctccggggggaattttcccctttttcgccaaccctggttataattcgaagggtaggggcgcttttgaagagaaaaaggttaaatgggcctttttcttaaaggttctccttttctggacccctttaaaccaagaataaggctatttccctttcatccacttaaatttggacatttttctttcttggccaaggtcttagtaaatcgctggctggtgaaatnttatttgacaggagggcttgaagcggaaattttgaacatctagaggtcaggggtttcaattattcgactgacatagttacagataagacagaatcaggtggttttcgactccttctccatggtacgtcttaaagctgcctgagcagctgaggtcatagaatctgcttcatcccagaatcacaatcttaaaaggcggacacggcttcccatctgagcgacttcctgacacagttaattgagcaaaattttgtcactgtctctcgaactacttgtattccacgttcatcagatgcatttaactcaagaactcttaatcggaaaagttcaggcccaaagagttctctagctgctgccaaaatagtggatgtttttccagttccaggtggtccgtaaaacaagagattaggaagatctgctccttctaaagattttttcagcactgcaaccacttcttcctggaaagcaacttcatccacacattttgggcgatatttttccacccagggaacgggtttggctttcttgttctctccgctacttcccgcactggcagctactcctcgatccttggtcagcgggggtttagtactgatggatgtacctttaagaaatgcttgcatggtacttcaccgatcactgatgtccccacagtcgcctcagttcccgccacccccggccgtaatggccgaattcccgggcatatgtccggtaccgtcgactgnnnnnnnnnnnnnnnnnnnnnnnnnnnnnnnnnnncggccgcttcctcgctcctagctcgctgcgctcggtcgttcgataaagcaggatgcgccatatagtatataacaaacgt

SEQ ID NO: 114042 - DNA, 782 bp, Homo Sapiens
  misc_feature (78)..(112): n is a, c, g, or t
aaactgatagatcactatagggcgctactcttgagcgaacgacgagcgcagcgaagcagtgagcgaggaagcggccgnnnnnnnnnnnnnnnnnnnnnnnnnnnnnnnnnnncagtcgacggtaccggacatatgcccgggaattcggccattacggccggggaacttggaactgaggagggcgaggttgaagagatggacactttagaccctcagacaggtctgtttaccgatctgccctgactcagtcacagtcagctaaacagcagaaacttagccagcccccgctggaacagactcagctgcaagtgaaaactctgcgagtgcttccagactaatacagaagcagtaccatccacctgcaggcagacctagctccagcacaaagctcccgcaaatgccccagctttccatcaggcatcaaaaactcacccctctccagcaagaacaagcacagcccaagccagatgtacatgcacatcacagcatcccatggtggccaaagacaggcagcttcctaccttaatggcacagcccccgcaaactgtagtacaggtgcttgcatgtgaaaaccacgcagcagctccctaaactgcagtcaggctccgaaccaaccaaaaatctacgtgcaagcccaaagcccccagagccaaatgtcgcgtcccagcttcttcgagagaaacagacggcaagccaggctattcctcagtatgctattccttgtcactccagctccaatgtggtggtggagcccagtgggcttcttgagctaaacaagttca

SEQ ID NO: 114043 - DNA, 760 bp, Homo Sapiens
  misc_feature (94)..(156): n is a, c, g, or t
  misc_feature (581)..(606): n is a, c, g, or t
ttatggcaatacaacatatgatcctaggctggatcgtggagctgaaaaaaattaccaataaaacagcaaatgaaattgaaatatggactgtaannnnnnnnnnnnnnnnnnnnnnnnnnnnnnnnnnnnnnnnnnnnnnnnnnnnnnnnnnnnnnnttcttatgaagtgcatgtgtagtcgttaaagggtaaagagtatgatgtctacaatatactttctaatgggtcgaggattctaggatacacacccccagttaagggaactgggagttaaaaggtattcgaaggctgccataaggatgtaaagagttaagtctctacccttacacccactccagagaaaaacagtactattagcttcctgtgttttccacatggatacaaaacttttgcacacatatgtaattcttctatcattctgacagctatatattctaatggatgaatatataaaatgtacttaagtgttctattggcatttgtttctagtatcttttatattacatctgatatcttaacagattctttcatcacttttacatttattttgataaaagttaggtttggctttaattccttgnnnnnnnnnnnnnnnnnnnnnnnnnncaactctggctgtggcataaggccttaattcggtcatcttatttggttatagtgtctgtttgtatgtcttccttttacaaaatattttatgttcatgttttgttcccggccgtaatggccgaattcccgggcatatgtccggtaccgtcgactg

SEQ ID NO: 114044 - DNA, 996 bp, Homo Sapiens
  misc_feature (62)..(96): n is a, c, g, or t
taaactggacccagcagacggccacgctgaagattccacagatatgagcgaggaagcggcgnnnnnnnnnnnnnnnnnnnnnnnnnnnnnnnnnnncagtcgacggtaccggacatatgcccgggaattcggccattacggccggggagccaggctgggaaagcggtggtagctggttgggttgctggggctcggttgtagtagtcgcgatgttcttctccgaggccagagccaggtcgcggacgtgggaagccagtccctcggaacacaggaagtgggtggaagtatttaaagcatgtgatgaagatcacaaaggatatctcagcagagcaggactttaaaactgctgtcgtaatgctgtcagggtacaagccctccaagatagaagtggattctgtgatgtcttcaataaatccaaatacttctggtatattactcgaggggttcttaaatattgtcaggaaacaagaaggaagcctcaacgatatcggaacgaagtaagacacatcttcacagcctttgacacctactatcgtggactttttaacctttggaagatttcaaacaacagcatttaggcaggtggctcccaaattaccggaaaggactgtactcgaggtattcagaggcattttcagtgcatgatttaaccttccggctgtcatcaggaagctgacttaccaagttctttcttgactttgcctgccatcaacaccctgtggcatttctggcctgccatttttctctgccatggatatgtctacttctgccatgcctaggaaccttatccatctcattggaagtagatcgagattcagatggtcacgtcagctttagagactttgaatatgccctgaactatggacagaaggaagcctaactattgtgaactacttttggtaactctggggagatcaatagattgtaatgtcagcagactctactctactaatgatgtcatgctacagacttgtgattaaacatttaaaaattttt

SEQ ID NO: 114045 - DNA, 373 bp, Homo Sapiens
  misc_feature (119)..(153): n is a, c, g, or t
accaacaccaacaccgcccccccaccacgaccaccaaaagaattgaattcatataggtgctaggtcgagaatgcgaatgaacgagcgcagcgaagtcagtgagacgaggaagcggccgnnnnnnnnnnnnnnnnnnnnnnnnnnnnnnnnnnncagtcgacggtaccggacatatgcccgggaattcggccattacggccggggggcattctaatctggtctccaaacaccaaagacccatttcgagcctgctattagcctgctgctgactctatcacttggagcaataatgtggggttatggtggtggaatcttgtatatttttgtcaaaaataaaaccatgagttaaggggatagatatagatggaaaaat

SEQ ID NO: 114046 - DNA, 723 bp, Homo Sapiens
  misc_feature (48)..(90): n is a, c, g, or t
  misc_feature (93)..(127): n is a, c, g, or t
ctgaataggaatcaaccttattatgtggggcggcctaaggctcgttgnnnnnnnnnnnnnnnnnnnnnnnnnnnnnnnnnnnnnnnnnnncgnnnnnnnnnnnnnnnnnnnnnnnnnnnnnnnnnnncagtcgacggtaccggacatatgcccgggaattcggccattacggccgggggcgtccgcggcggggagttgttgctgccgcgatgctggtggcggcggccgcggagcggaacaaggatcccatcttgcacgtgctgcggcagtacctggatccggcccagcgtggcgtccgcgtcctcgaggtggcctcgggctccggccagcacgcagcgcacttcgcgcgggccttccccctggccgagtggcagccgtcggacgtggaccagcgctgcctggacagcatcgcggccaccacgcaagcccagggcctgaccaacgtgaaggccccgctacacctggacgtgacgtggggctgggagcactggggcgggatcctgccacagtcgctggacctgttgctctgcatcaacatggcccatgtcagccccctgcgctgcacggaggggctcttcagagcagcaggacacctgctcaaacccagggcccttgctcatcacctacgggatctccccccagagcaacgtggactttgacctgatgctcagatgcaggaacccagaatgggggcttcgggacacagccctcctggaggacctg

SEQ ID NO: 114047 - DNA, 826 bp, Homo Sapiens
  misc_feature (42)..(81): n is a, c, g, or t
  misc_feature (85)..(119): n is a, c, g, or t
  misc_feature (441)..(551): n is a, c, g, or t
aagactgtatagactcatatagggcgctagctctccgcatgnnnnnnnnnnnnnnnnnnnnnnnnnnnnnnnnnnnnnnnnccgnnnnnnnnnnnnnnnnnnnnnnnnnnnnnnnnnnncagtcgacggtaccggacatatgcccgggaattcggccattacggccgggggactgcgcatgcgcgtcactagacgacacggctgtcttctttcctggagaatttctcaaggactgctggctggaaacttaacggctaatgtggatctgaccgtagtttgccaaattaagaaaacgtttttaccctgttgaagatttgctttaacttcaaaagtgatgacaagaaagtatggacaccccttcaggaccaacctgataagtcactgggtttttgtaatctcgcaatattgaaatcaagagacatcacagaacacagcagcaannnnnnnnnnnnnnnnnnnnnnnnnnnnnnnnnnnnnnnnnnnnnnnnnnnnnnnnnnnnnnnnnnnnnnnnnnnnnnnnnnnnnnnnnnnnnnnnnnnnnnnnnnnnnnncggcagcaaagaggtctcacaaggtcaaggctccacaaggctcagtgctaaaggagaggaatcttaaaaatggtttttctttcgtttaaagatgacacactctgaaattaatttgattttgagatttgagaacttggacatacatacttcctatggaaggtaacatctttttggtagtgatcacgttttgtcatgtttatgtgcctagcagctaatagaatgcctggtgcataataaacattcccataactgaattaaacaagttgatacaattg

SEQ ID NO: 114048 - DNA, 689 bp, Homo Sapiens
cagtcgacggtaccggacatatgcccgggaattcggccattacggccggggggagagcgcggaggcagccatggtgcggttcaagcacaggtacctgctctgcgaactggtgtctgacgacccccgctgccgcctaagcctcgatgaccgagttctgagcagcctcgtacgggacacgatcgccagggtgcacggaactttcggcgcagccgcctgctccatcggcttcgcgggtacaataagaacatgtcagaagttcctaattcagtacaacaggagacagctgttgatcttgttgcagaactgcactgatgaaggagagcgggaagctatccagaagtctgtgacaagaagctgcttactagaggaggaggaggagtcaggtgaggaggctgcagaagcaatggagtgaacctctgctccccacacagctggctacactgctcaggcttcaggcccacttgttgaacagaacaatctgggtagcaacagcatcttccacagttttccaaactggatagctgccaaccagcagacattacccacttgaaatggagtactcagttaaactgaagttgcctttacctagcattccctggtgaagtgttgcaggttgtgaactctgtagacatctttattgcttggctaagagtagatttaataaatgtatctggtttccgtggcgaaaa

SEQ ID NO: 114049 - DNA, 1178 bp, Homo Sapiens
  misc_feature (404)..(466): n is a, c, g, or t
  misc_feature (763)..(826): n is a, c, g, or t
  misc_feature (1033)..(1067): n is a, c, g, or t
  misc_feature (1071)..(1122): n is a, c, g, or t
  misc_feature (1163)..(1163): n is a, c, g, or t
cagcaaaagagctaatttattctctccatattcacagaaacaaaataatgcatcatatagcataaatgtttaaaaaatcagaattacatttaatataaaaaattttgatattatagtttttaaaatacattagtcaacacttattcaactataattaaagttttttttcttcagtcaatcccaagtaagaatctgttgaataagtaaactggaaacatgtatttaaaggaatgaattaaagataacactgttttattcaacaagcacttctgaatacttggagtaaatacagcactgttttgggtattacagagaactgataaaggtagaaaacactgtccttgtccatgataagatgcatcatattatttacattgacaagtttttaaaatatgaacatttgnnnnnnnnnnnnnnnnnnnnnnnnnnnnnnnnnnnnnnnnnnnnnnnnnnnnnnnnnnnnnnnttgtcaaattatttgttactgtggaactctgggctatgcaccagatacaagaaaaaccagtaaatacatgacatatccttacaagctcttgggggtcaggagaaaatcaaagttattaattgcatatcctttctagtattaaccttttactacagaaatgaaagagttaacaatgcacagttatatttcagggaacatatattcaaaggtatatcaaaggtgaaaatctatccaagttttccaaatgaagtggcagtaaaccaatgaccacataaaagtaaaaattaattttatgcnnnnnnnnnnnnnnnnnnnnnnnnnnnnnnnnnnnnnnnnnnnnnnnnnnnnnnnnnnnnnnnntaatttgagccttttactcagctttacaaagtatgagtagggaaaattaatgcaaataatgtattcaatattaaaaacaattagaataagcccacccaaatcagagattaaatgattctatgaactaaacatgtaacgatgaaggagggctggagtcccggccgtaatggccgaattcccgggcatatgtccggtaccgtcgactgnnnnnnnnnnnnnnnnnnnnnnnnnnnnnnnnnnncggnnnnnnnnnnnnnnnnnnnnnnnnnnnnnnnnnnnnnnnnnnnnnnnnnnnntagcgccctaacgttgttttatttttatcggagggtggggngggggtgccgataaa

SEQ ID NO: 114050 - DNA, 951 bp, Homo Sapiens
  misc_feature (79)..(113): n is a, c, g, or t
  misc_feature (795)..(804): n is a, c, g, or t
agagttatgactactatgggcgctagcccgtctgtagcgaacgacgagcgcagcgagtagtgagcgaggaagcggccgnnnnnnnnnnnnnnnnnnnnnnnnnnnnnnnnnnncagtcgacggtaccggacatatgcccgggaattcggccattacggccggggaagaccggggggacgcggcggtagcggcggccgttgcgattgattgcgctggttgcctgcggcgtccacttccttggccgcccttgctacactggctgattgttgtgcagccggcgccatgtctgtgagcgagatcttcgtggagctgcagggctttttggctgccgagcaggacatccgagagttgagccagatcgggagaaaggatttcatctggatgtagaagattatctctcaggagttctaattcttgccagtgaactgtcgaggctgtctgtcaacagcgtgactgctggagactactcccgacccctccacatctccaccttcatcaatgagctggattccggttttcgccttctcaaccctgaaaatgactccctgaggaagcgctacgacggattgaaatatgacgtgaagaaaggtagaggaagtggtctatgatctctccatccgggggctttaataaggagacggcagccgcttgtgttgaaaaataggagggctctccttgctcctgggccttgctgacctcagcggttgcccagaaagggtgaacacagagggcctcttacgggagattaggatgttccgttgctaaacactgggcctttatttccttaaccagttnnnnnnnnnnagtatcccgaatttgaaacactttttttggggggggaaaaaatatagccctttacacgggacagaaattttttcttggtggcttcacaaggaataaggcctgtgaattccggcggaattttccgcttcccctcagcaaaaggtggaa

SEQ ID NO: 114051 - DNA, 1175 bp, Homo Sapiens
  misc_feature (51)..(91): n is a, c, g, or t
  misc_feature (95)..(129): n is a, c, g, or t
ccaaccaaaaacacaaacgatgatcactcatggtgcagtgcggtttttttnnnnnnnnnnnnnnnnnnnnnnnnnnnnnnnnnnnnnnnnnccgnnnnnnnnnnnnnnnnnnnnnnnnnnnnnnnnnnncagtcgacggtaccggacatatgcccgggaattcggccattacggccgggggccccaacgggggctggaacccggcgccgagagtagagaaaaggggcctcatggtgaccgcccctacctggcatccctcataacccaggaggagcgtggggaaaggggctgtgggcctctcggggagcgagctgcgggtagcggcgcactgggtacaggcgcgcgcttggctgtcgcctctgccgctgtgtttgggaggactcgaactggcgccaggaaatattaggaagctgtgattttcaaagctaattatgaaagacatttatcattggaatcagtggttcacagatgccctgacttatgttcacagacatgagccccaggttaaaacacgctttcaataaatgactgaatcgagaagtgcctccctcccgtgtgatctcctcgatgctgcaaaactagatctaaagaggagtaactcagtgccccttctcctggacttcacagtccggtcagaagagacaaataactggcctgttgtgataagctacagcagacctcccagctggcccccaggtggagagagatggggaaaaggaggcatcgcagaggaaatgtgatttcatgtgtgacaaacagtggcaaaacaacactggctaagaatttgcagaaacacctcccaaattgcagtgtcatatctcaggatgatttcttcaagccagagtctgagatagagacagataaacaatggatttttgcagtacgatgtgcttgaagcacttaacatggaaaaaagtggatgtcagccatttcctgctggatggaaagcgcaagacactctgtggtatcaacagaccaggaaagtgctgaggaaattcccattttaatcatcgaaggtttcttcttttaattataagccccttgacactatatggactagaagctatttcctgacgattccatatgaaggaatgtccccagggggaggaagtacaagggtcttatcagctccagaactctccgggaatactttgactgggccatttgtgggccag

SEQ ID NO: 114052 - DNA, 565 bp, Homo Sapiens
  misc_feature (79)..(88): n is a, c, g, or t
  misc_feature (113)..(127): n is a, c, g, or t
  misc_feature (137)..(218): n is a, c, g, or t
  misc_feature (420)..(454): n is a, c, g, or t
  misc_feature (458)..(498): n is a, c, g, or t
ggggggggacccaacccctttttttggcccgggttttcttggaaaacaattattcccctttttccttcccctttggggnnnnnnnnnnaaaaaaaggttttgaaaaatttttnnnnnnnnnnnnnnncccccaagannnnnnnnnnnnnnnnnnnnnnnnnnnnnnnnnnnnnnnnnnnnnnnnnnnnnnnnnnnnnnnnnnnnnnnnnnnnnnnnnnggtagcaaacttttatttaaatcttacataactcaagctttataaaaagccaacataattgaaaattgggttctccctctaaagccttaagtattcaaagctcgaggcagttgattggaaaataagcaaacagataaggcaaaaagaccctcccggccgtaatggccgaattcccgggcatatgtccggtaccgtcgactgnnnnnnnnnnnnnnnnnnnnnnnnnnnnnnnnnnncggnnnnnnnnnnnnnnnnnnnnnnnnnnnnnnnnnnnnnnnnngggaaggcgagctagcgccctgagcggtaagggtataagggcagggggaaagggaaggagggaaaga

SEQ ID NO: 114053 - DNA, 857 bp, Homo Sapiens
  misc_feature (77)..(111): n is a, c, g, or t
gagaatgaacatcactataggggtagcgcgtatagcgaacgacgagcgcagcgaagcagtgagcgaggaagcggcgnnnnnnnnnnnnnnnnnnnnnnnnnnnnnnnnnnncagtcgacggtaccggacatatgcccgggaattcggccattacggccgggatatctaagttagatgagattaatacatatttatatcctgaatgtaatatatatcctaaaggttgaactgtgattaaggtagccctaaataagggtgacatctgggatagtaccgagattcgtgttcttgatagctctacatttactatgagattgtcgtagtaaatcaatggtaatggacgtgatggcgactggtgagtatgttgttctatgttattggctgtccgcttactatagtattcgaggtaacgttaaaggacttacatgaggatcatcacacggtcttacgtacatgttatgaacttaatagtcgtaaatgagatcgtagctttgaacagtggtttagctatactgagcacttgtattggtatcacttgacttccatgaatgtaacatgtaagtctatgagagtaactcgatcgtatagtgatctgtaggtgcttgcagagaatccatagtgcatttagagtcagaatggagcgatttagtagtaacagtaccagctgctacgaaaccggtctaagacggcttttgtatgtgactcccctggatcgagtcactgagttgtggcaggtgagctgcatgacgatggaggagagactctgctggcttccgctatggggttctgaatcctgtgcgcaagtctgccattagtgaccagctcaagtccaaagactcaataccaagcaggaaggc

SEQ ID NO: 114054 - DNA, 639 bp, Homo Sapiens
  misc_feature (76)..(127): n is a, c, g, or t
  misc_feature (564)..(598): n is a, c, g, or t
tggtggttcatcgtcagagctgctatctgtgctggtgctactgctactggaagagctggaatctgagtctgaatcnnnnnnnnnnnnnnnnnnnnnnnnnnnnnnnnnnnnnnnnnnnnnnnnnnnnctttcatcagtgtcactgtcctctgaggaggaagaggtagatgtttcttcactctctgatgaagaatcactggcagaactgtcactgctactgctactggaactggttacactcttagacctttttttcttggcctttctttctacattggtttctccaatgctttgttgcaataataatctgttttcgtgttcttttaaagctttctttagttctgctgtccttgagggcctatgtaggtattgtcgttgttcctgtgcattcataagtccaatgtccaaattccaagcatttctgacatcttacatgttgcttatttgctgtcagcttgtctccgggctattagccgatgcatgggagtcgccatcttagcgcggtcaaagccccccggccgtaatggccgaattcccgggcatatgtccggtaccgtcgactgnnnnnnnnnnnnnnnnnnnnnnnnnnnnnnnnnnncgtccgcttcctcgctcacaaactcgggcgctcgtctgttc

SEQ ID NO: 114055 - DNA, 985 bp, Homo Sapiens
  misc_feature (78)..(112): n is a, c, g, or t
  misc_feature (169)..(227): n is a, c, g, or t
  misc_feature (297)..(360): n is a, c, g, or t
taaaaatgataatcactataggggctactcgttattgcgaacgacgagcgcaggagtcagtgagcgaggaagcggcgnnnnnnnnnnnnnnnnnnnnnnnnnnnnnnnnnnncagtcgacggtaccggacatatgcccgggaattcggccattacggccgggggacgcnnnnnnnnnnnnnnnnnnnnnnnnnnnnnnnnnnnnnnnnnnnnnnnnnnnnnnnnnnntgcccccggccttccagctgctgctgcgcgcgtgtgaccaggcgacacggagacggcgcggcggctgctnnnnnnnnnnnnnnnnnnnnnnnnnnnnnnnnnnnnnnnnnnnnnnnnnnnnnnnnnnnnnnnnggggccgaggtggctgggcccggggccgcagcggcgggggcagtcggggctccggtgcccgtggattgctcggacgaggcgggcaacaccgcactgcagttcgccgcggccgggggccacgaaccgctggtgcgcttcctgctgcgccgcggtgcctcggtcaacagccgcaaccactatggctggagcgcgctcatgcaggcggccagatttgggcatgtgagttgtggcacaccttcctgttggattcacggggctgatgtcaatgcccagaaccggctgggggccagtgtgctcactgttggcttctcggggcggccaccctgggtgtggtgaagctgctcctggaagccggtgcctttgtggaccatcagcagccttcaggcgagcaactgggggttgggcggcagcagggatgagcgcttggacatcacaggccttgatgggtgcatccaggcacgggcacgaggccgtggtgcagtctactgatggagtggggcgcggaccccaacaagcagccggaccgtgggctggagcccgctgatgctggcgactcactgggcggtttgcagtggccagcagttgtgaaaagggcgccaacctgacacctcacgtgtggaaaacg

SEQ ID NO: 114056 - DNA, 868 bp, Homo Sapiens
  misc_feature (540)..(551): n is a, c, g, or t
gaaggccatttttaaacaatagaatgagcaccactggttggtgccacaggattgcagagatttggatttacatggtaagattcatgggaggcagggacatgcttgctgtgtgttgagaggtaatcctaagcacttgagaagatctctttgctgtcttccacctaatggctcatgaaaaagggcccagtagatctgtttctcagagagtgtccagggcagagtagtttaattatatatagtctttaatttttaattaaagttttcttacaatccctaatatgtaatatttaagcaaaatgagtgtgaaaatagatacagaaacagcctgcagagtcacgcgacttgaccaaagtcacactagcatgagtgcacattttcccttctgtgtatcaccttctgctcagtttacccaaaccagtttataaagtttatgaccattttggaagactggctgataacattttactgacttgggctttgaggaaattattttcaagagaaattaaatacgactcatagtaacaaataccaaccaaagcnnnnnnnnnnnnagtttgtttcacagtatctaaaatggcagagatttcaggaaagtctaatcacacttgaccatgagtgttgagttgcttttccttcctctgaggccaagagttacttatatccaagaccgtgaagaactctttttgacctgttggatatgatcttgtgactgggtcgaggaaaatgaacttgttaaactgacactggtcaggagacaatctttgatttcatatattggataatagtactccgaataaggcaatgaggatagataatcccccggccgtaatggccgaattcccgggcatatgtccggtaccgtcgactg

SEQ ID NO: 114057 - DNA, 1100 bp, Homo Sapiens
  misc_feature (80)..(114): n is a, c, g, or t
  misc_feature (657)..(692): n is a, c, g, or t
cactgaaacactcactatagggcgccgctctagtcagcgaacgacgagcgcagcgagatagtgagcgaggaagcggccgnnnnnnnnnnnnnnnnnnnnnnnnnnnnnnnnnnncagtcgacggtaccggacatatgcccgggaattcggccattacggccgggcatcacaaaaattcttctcttggccaagtatctcatttccctatatagtatacaagcaccatttcttctcaatttgtaagaagagaaattagtccattaccacaggggttcttgtcactactaattatacaacaagtcttttcccaacaagacaagatgtcctccacaacctttgttttcaaagcagacgagcatctatgtgggccaagagtatactttgcggttgttcttgaggatactggtcttgggctgatgactatggtgggcagacatggatccatagggctccttctgctaaacagcacacatttgaagatggtttaaaagcgaagtcagatcaggtgatctgtaataattgtatttatctgtacatgtatgggcttgtaattcccaccaaggaaatgagagaaagttatctgtttgagtataaaaccaaatttcagctttttcaaaatatcttccaacttatgtattggttgtcactcaattgccnnnnnnnnnnnnnnnnnnnnnnnnnnnnnnnnnnnncgcgtgagcgcacgtgtgtgtatgcgtgcgcatgtgtgtgtatgtgtattatcagacataggtttctaactttagatagaagaggagcaaatctatgccaaatactgtgcattctaacaaagtggtgctaatctcagacctaaatgaatactccatttaatttcaacaaagagtttcaacataattactctatgtgcctgtatttccctttttgagtgctgcacacctgttcacatatacgtgtaaacgcgcatgaacacgccacgtgttctacagtctagggattgggctataatccctaatgagctccaaattaccaaattctccaggtacatggccaactcctttttgggctgtacacaccgacttatagccaatacaccccaggggaaagaatgttgaggggac

SEQ ID NO: 114058 - DNA, 925 bp, Homo Sapiens
  misc_feature (43)..(81): n is a, c, g, or t
  misc_feature (85)..(118): n is a, c, g, or t
  misc_feature (219)..(227): n is a, c, g, or t
acagctgtataacttatatagggcgctagcgccgtttagtcannnnnnnnnnnnnnnnnnnnnnnnnnnnnnnnnnnnnnnccgnnnnnnnnnnnnnnnnnnnnnnnnnnnnnnnnnnatcagtcgacggtaccggacatatgcccgggaattcggccattacggccgggggttgctggctttttcaggagctgctcgctcgcagccagagacgctgcnnnnnnnnnccgggttcggagccgttccggatgctttaggctgccggatgtctgatctccggataactgaggcgttctctgtacatggattatctgtgttttagagcactttgctgcaagggaccaccacctgcacgaccagaatatgacctggtttgcataggcctcacaggttctggcaaaaccagtctgttgtccaaactctgcagtgaaagccccgataacgtcgtgtcgaccacaggttttagtattaaagcagtgccattccagaatgccatcttgaatgtaaaagaacttggaggggctgataacatccggaaatactggagccgctactaccaaggatctcaaggggtaatattggtattacacagtgcctcttcagaggatgatttcacaagctgctacaaatgagctgccactcagctcttcagcatccacagctatgcactttaccctttttaatattggccaatcatcaagacaagccagcagctcgctcagtacaagacaaaattcgcgaccttcaacggaaacccccgaagtcagaaaaaaccctgtgcgggccgcctcggaccctcgaggaaattttctaccaccattcctttggagccgcggccccccccaggggacacggaacctggcacataggctgttttcctagggagaatcctggcacatggctaagcggcttggaattctcaccg

SEQ ID NO: 114059 - DNA, 944 bp, Homo Sapiens
  misc_feature (41)..(81): n is a, c, g, or t
  misc_feature (85)..(119): n is a, c, g, or t
cgcgaaaatgtatagatcatatagggcgctactcggcgtannnnnnnnnnnnnnnnnnnnnnnnnnnnnnnnnnnnnnnnnccgnnnnnnnnnnnnnnnnnnnnnnnnnnnnnnnnnnncagtcgacggtaccggacatatgcccgggaattcggccattacggccgggggtggctcctgtgtgtggcgttggcggtcttggcatggggcttcctctgggtttgggactcctcagaacgaatgaagagtcgggagcagggaggacggctgggagccgaaagccggaccctgctggtcatagcgcaccctgacgatgaagccatgttttttgctcccacagtgctaggcttggcccgcctaaggcactgggtgtacctgctttgcttctctgcaggaaattactacaatcaaggagagactcgtaagaaagaacttttgcagagctgtgatgttttggggattccactctccagtgtaatgattattgacaacagggatttcccagatgacccaggcatgcagtgggacacagagcacgtggccagagtcctccttcagcacatagaagtgaatggcatcaatctggtggtgactttcgatgcagggggagtaagtggccacagcaatcacattgctctgtatgcagctgtgagggccctgcactcagaagggaagttacctaaagggtgctctgtgctcacgcttcagtctgtgaatgtgctgcgcaagtacatctccccttctggatctgcccttgtctctgcttcatacgcaggatgtcctcttcgtgctcaaacagcaaagaagtggcaccaggccaagaaagcatggcctgccaccaccagtctctgtccccttatacttccgataatacctactccgactgaggttatcgaagataaggagcgggttccagacgccagctggactcgacaacgattttg

SEQ ID NO: 114060 - DNA, 880 bp, Homo Sapiens
  misc_feature (82)..(116): n is a, c, g, or t
aagtcgtatacgatcataatagggcgccgcgtgcatagccgaacgacgagcgcagcgagtctgtgagcgaggaagcggccgnnnnnnnnnnnnnnnnnnnnnnnnnnnnnnnnnnncagtcgacggtaccggacatatgcccgggaattcggccattacggccgggggaccattaagaaaacggattttgtaactagctttaaactaggtcaagcaactagttttcctgcaaatcaaatttttaaagcaacttgggttagactttgtttttgacctaacatcccttccttaaatgccttctgtagtttcagatcagtagggagaccatataataattttatggtacctgtttcaaaacatattttttctgtttttataagtaagttgatattaattaaactcttggcaatatttcttctttcttaaaggaaaatataccttaactttttttcttttacactgtgaaacatacacagtagaaattctgttactctctgttattaatacataaatgaaaatacatttttttccatattggcatgtagctacaaatattaaaggaggagaaaaggtaatataattttaggtttaccaaatatggtgtgtattcaaataatacttgaccagcttatctaaaatgtacataattttgaggtagcttatgaatttgattttaattattatgttcacaagcttggaatattagatattattttgcatctgtaactaaccgtgatcatcatttcttgtaatttcttgtacatgtatattacttgttcttaatagaatctttggaaaacaagactttattgagaatcaggttggttttcctgttaatttaacctggtttgatttataatgtgttaagttttgcagagaa

SEQ ID NO: 114061 - DNA, 1044 bp, Homo Sapiens
  misc_feature (930)..(964): n is a, c, g, or t
tgaccggtcttaacagagtataagatagttgagagatctcttcgtacttgggtaccccgtgggagttaagggtaaactttttagagagtaaacaatacccggaaggaactgtagaaagatgcacacggtgcggaaaaaaagggttgttcccggggatcttgtcacccggggggatatctttaggtctaataaatagaaggccatttttagaccaaggagaggacccaaaggggaattaaaaaatggttaacgtgtgcctgaagcatcccaagaacccgcaggtttatcacaacaatggttcttgcctaaaattaacgaattttaatagccagacgaccaaagtactaatttaaaaggctgaaatccctgccaccatgtcaggtatccatccagccaaccttcattactacaaagcacaatactactttgaggatagtttttggaacttattggactgtgttttccctataggaaaaacaaagaccaagcttaggaaggagaggactgggaatctagtctaaatgtctacatccaaaattataatcatctttgcgcattcagttgactcttttaaaatttaagaatacatatacaaaaagtacttatggaatacatattttaacagcataacatatttgaagaattagttacactttaaaaattaaaacacttgaaaactattttttaaaccacgtaccatggaataactttttgaaacccagattatctcgctacttagatgatagtcttcctgttttcaattagtttgaaagattctaatatagattctaacccaacagtttatatggatattttcctgctttaaaaagctgcaacaggctaggcgcagtggctcatgcctataatcccggcactttgcccggccgtaatggccgaattcccgggcatatgtccggtaccgtcgactgnnnnnnnnnnnnnnnnnnnnnnnnnnnnnnnnnnncgcccgcttcctcgctcactacttcgctgcgctcgtcgttcggctgcggagagctagcgccctatagtgagttatcgatt

SEQ ID NO: 114062 - DNA, 1048 bp, Homo Sapiens
  misc_feature (78)..(112): n is a, c, g, or t
tggataatcatatagggcgctactcggttgaagcgaacgacgagcgcagcgaaagtcagtgagcgaggaagcggccgnnnnnnnnnnnnnnnnnnnnnnnnnnnnnnnnnnncagtcgacggtaccggacatatgcccgggaattcggccattacggccggggacacagctgcagagatgaataaacaaagaggaacctactcagaagtgagtctggcccaggacccaaagaggcagcaaaggaaacctaaaggcaataaaagctccatttcaggaaccaaacaggaaatattccaagtagaattaaaccttcaaaatgcttctccgaatcatcaagggaatgacaaaacatatcactgcaaaggtttactgccacctccagagaagctcactgccgaggtcctaggaatcatttgcattgtcctgatggccactgtgttaaaaacaatagttcttattcctttcctggagcagaacaattcttccccgaatacaagaacgcagaaagatagtaattcatatgtttattagcacgtccttgtggccattgtcctgaggagtggattacatattccaacagttgttactacattggtaaggaaagaagaacttgggaagagagtttgcaggcctgtgcttcaaagaactcttctagtctgctttctatagataatgaagaagaaatgaaatttctggccagcattttaccttcctcatggattggtgtgtttcgtaacagcagtcatcatccatgggtgacaataaatgggttggctttccaacatgagataaaagactcagatcatgctgaacgtaactgtgcaatgctacatgtacgtggacttatatcagaccagtggtggatccttcagaatcattagacggggtttcatcatgttgaaccagctgggccttgaactctggagctcaggaaatcaacacatccttggcctccccaggggctggggattactggacacaggccacccccccctgagtgctcatggaaccatttaccttggggttttaaaaaacaactttttgcggc

SEQ ID NO: 114063 - DNA, 360 bp, Homo Sapiens
  misc_feature (101)..(135): n is a, c, g, or t
aaaaacttggtaagtcagaactcacctaaatagcgggcggctaaggcgtcgtttctgcagcgaacgacgagcgcagcgagtagtgagcgaggaagcggcgnnnnnnnnnnnnnnnnnnnnnnnnnnnnnnnnnnncagtcgacggtaccggacatatgcccgggaattcggccattacggccggggcggttgggtcggcgcgggcttctcaggcgccacgtgggattcggcccgggtgctcttgtgagctgctgctcctgcggttggtgagattacctgggtctagagtgcggagctgctccgtggccacgaggtacgtcaccatgcccaaagcaccaaagggaacaagtgcaggacggg

SEQ ID NO: 114064 - DNA, 672 bp, Homo Sapiens
  misc_feature (69)..(103): n is a, c, g, or t
  misc_feature (422)..(422): n is a, c, g, or t
aactgtttactataggcgccctcgtcaacgaacgacgagcgcagcgagtagtgagcgaggaagcggcgnnnnnnnnnnnnnnnnnnnnnnnnnnnnnnnnnnncagtcgacggtaccggacatatgcccgggaattcggccattacggccgggatgaagttgtttgatagtaatgttcaggccttccatatcatttgtgatttttacttgtttattaatttcttagcagtgttcaaatctcaaactaattttagatatgcctacttgttttttcatacctcatttattgtcttattcattttgaaaacctttgattaggtgcgtatacctataagattattatgtgttcttggggaaataactgtcttttcatgaggtttctctttatcctttgataatctttcctgttctgatgtctattntgtttcatattaataaatattttcaacctatttctttggttagtgttttatgctgtatctttctccacccttgtacttttaatcattgtatgcctttatagtttgtgtatgtatgtatttcacagtaagtaggtgggtggttgggttttaggtaggtaagtaggctaaatagataggtgggttggcttgtgttttattccatgtgacagtgttcatccttttactggtggtgtttagaccattacaattt

SEQ ID NO: 114065 - DNA, 984 bp, Homo Sapiens
  misc_feature (42)..(81): n is a, c, g, or t
  misc_feature (84)..(118): n is a, c, g, or t
  misc_feature (973)..(973): n is a, c, g, or t
aagtgtatagactcactatagggcgctagctcgtctgtagannnnnnnnnnnnnnnnnnnnnnnnnnnnnnnnnnnnnnnncgnnnnnnnnnnnnnnnnnnnnnnnnnnnnnnnnnnncagtcgacggtaccggacatatgcccgggaattcggccattacggccggggtaggcgcggggcggtcggctgcggtggcggcgtttggatgattgtctctcggcggcggagtcgctcaatgtacttctccagttcctacccttcctcaagtggggaactcaggagaccaagcaggggcaactgtacttcggatggtcaggccccaggatactgtggcgtatgaggacctgtctgaggactatactcagaagaaatggaaaggtctcgcactcagtcagagagccctgcactggaacatgatgctggaaaatgaccgtagcatggcttctttggcaggtaggaacatgatggagagttcagagctgactccgaagcaggaaatttttaaaggatcagagtcatctaatagcacatcagggggactctttggggtggttcctgggggaacagagactggagatgtttgtgaagataccttcaaagagttagaaggacaaccctcaaatgaagaagggagcagactagaaagtgatttcttggaaataatagatgaggataagaaaaaatccacaaaagacagatatgaggaatataaggaagttgaggaacatccacctctgtcttcctgtcctgttgaacatgaaagagttttaaagggacagaaatcctatcgatgtgatgaatgtgggcaagctttttactggaagtcgcacctcattggtcatcggtgaatccacactgggagagaaaccctatgaatgtaatgaagtgtgggaaaaacccttcaggccaaccctcccagcctcattggttctcttcaaaacccacccaggggaaaaagccctataaatgcantgggatgtgga

SEQ ID NO: 114066 - DNA, 370 bp, Homo Sapiens
caggtcctcgccagacaggatttaccagtgctttgattttggacttccagtttccagaaatcatagaccctgacattcagctccaataatggatgtcccagtatgccctgaatccaaacaaatgcctgactgcaataataaacaaattatgtaatctgaaataaataggtttctatcttctatttatatgtaaaaattaaagttgacacttggcttctctgaagcaagtggatataaaatcttttgtaaaaccactttactgatcttacctgccaaacatgacacccaatatttatactctgacaaaacaatagcaccttcccggccgtaatggccgaattcccgggcatatgtccggtaccgtcgactg

SEQ ID NO: 114067 - DNA, 589 bp, Homo Sapiens
  misc_feature (75)..(109): n is a, c, g, or t
aagaacgctatatagggcgctgcgcggtcgctagcgaacgacgagcgcaggagtcagtgagcgaggaagcggcgnnnnnnnnnnnnnnnnnnnnnnnnnnnnnnnnnnncagtcgacggtaccggacatatgcccgggaattcggccattacggccggggccccttcccgtgatcttcgtggcttcccgcccagacgtgtgaccaagatagcaaggagcagtctttaaggcgacacggcagagaggcagaaaaagatgggccttaccggttagttaagaaaaaaagaggacctgtgcctgtccctctagctttgaactacaaagtggaggggaagttgtctggattttcctgtagaactgagggcaggacaggaggctctgcctgcagtcagcaacttggaatattcagacttcagaccagcatcacagattataaccctccgtaaatcatctgcatcccagctcccatcaaaagccagcctgaaggacccatggacacgtgactccagtgttctcaacaacatcttaagatcaagtgggtttgcacaacatttgcatctacttgggacaaagcaagaacaataaggac

SEQ ID NO: 114068 - DNA, 451 bp, Homo Sapiens
  misc_feature (340)..(374): n is a, c, g, or t
ctgggtacacgccttggggaagtctagactccaccgcccacagctctgcctcttgctccagcagggagatgacattcggcttcggtaaccaatgtcccacagagaccagaagcctgaaggtgtccagcattacatcacggtacagggtcctctgggcaggcttcagctgcccccactcctcctggctgaagtccactaccacgtcctcaaacgtcacttgctccctcctgactgcgagacaaaggccgcggcaccggcagccgacactgcgccggcgcgagcctaactccccggccgtaatggccgaattcccgggcatatgtccggtaccgtcgactgnnnnnnnnnnnnnnnnnnnnnnnnnnnnnnnnnnncggccgcttcctcgctcactgacttcgctgcgctcgtcgttcgctatcacgagtagcccctatatgatctatcatct

SEQ ID NO: 114069 - DNA, 658 bp, Homo Sapiens
  misc_feature (43)..(77): n is a, c, g, or t
aaacgacgagcgccgcgagtgttgtgagcgaggaagcggccgnnnnnnnnnnnnnnnnnnnnnnnnnnnnnnnnnnncagtcgacggtaccggacatatgcccgggaattcggccattacggccgggcgaactgatagctccactgattacatgtaaccaacctaatgccagtttaacatgtacaaattcttggaaaagaaactcttttgatccaaattggtataggtatctcaacactagcaagagagaactgtgccatagtacaccttgcagcactttagacaagtagaatttttgtttaaaggtgtccatgggcaaggaagaaatcacatgactacataatggttaatccctttgttgcaggtttggcatgagagggagtgaaggatgtgcctacctcagcgatgatggtgcagcaacagctagatgttacaccgaaagaaaatggatttgcaggaaaagaatacactaagttaatgtctaagataatggggaaaatagaaaataacattattaagtgtaaaaccagcaaagtacttttttaattaaacaaagttcgagttttgtacctgtctggttaattctgcttacgtgtcaggctacacataaaagccacttcaaagattggcaaaaaatggttacaggtattctgctgag

SEQ ID NO: 114070 - DNA, 1096 bp, Homo Sapiens
  misc_feature (47)..(88): n is a, c, g, or t
  misc_feature (91)..(125): n is a, c, g, or t
ttggtataagagctcaactaaatagggggaccgcctagtgtgtcgtnnnnnnnnnnnnnnnnnnnnnnnnnnnnnnnnnnnnnnnnnncgnnnnnnnnnnnnnnnnnnnnnnnnnnnnnnnnnnncagtcgacggtaccggacatatgcccgggaattcggccattacggccggggctctctgttctgcaagagctgcaaactccagtatggggtaaggaggctccacatcccgagcttgcgtagtggttctgtgtggcgctgagcgaatttggaagacctcaaatggctataactattacaacgctctcacgccaagttcctgccctcagagtggtcacattgctaagcaagaaccagtaccacagatgctagatcgctcaagaggtcccgatcagaacgcctggtcgcagaaagccagaggcttgtggattgataattgaaaagaccacaagaataatctcaaagcgactgtgaacaagaagatctagaacagagactcgaggaagtccagttctggaagaaggagttagatgacaaacttgagcagcttgtgaatgtaactgatgatctactcatatataagatcagattggaaaaagccctggagacctggaaatgagccctctgtcgatcatcaactgagacatgcctgggcatacagggagaagcgctatgtggcatggacctggtgcacgacacagtggagcatgagctgataaaggaggctgagatcatccagggcattatggctctgtgacccgtaccttggaggaggcttccgagcagatacggatgaaccgctctgccaagtacaatcttgagaaggatttgaaggacaagttttgtggccctggacatagaatgatatctggttctcgctcaacaaaaaatcacaaacatcagatattctggagaccgccgggaggattggagccaaactccgggagtcgggaagactggttggattcctcaggaaccatggggacaaggcggacagcaggggaaaactccctgattgttgaaagccgggggatagaatctgtgccagacgacaggattgcgacagcaggagaggggggacaaggctccaatgg

SEQ ID NO: 114071 - DNA, 877 bp, Homo Sapiens
  misc_feature (802)..(836): n is a, c, g, or t
gaggttaagaacacttatgaccatgagaactgaaagagaggctcaatctgttgtccgcgaaggttttcatttcgtcttctagtttcttgagtaagaaagattttcccacttcccccactgtgcatataaccccacacaaatgggtggctgcatggtaggctcactgagaatatctgccagggcactgctaatataaatcatatccaagcatgtcaccgtctgtttcagtaggagacaagtgtctggctccaaatatttgagttaaaatactcttctgatggctacagtcaatattataaggagtctcgcctgctttgttgggcctataaagtaatcgcccatctttgggatttcttaaaagcagttctgccagtttccggctccttccacgaatagcaatatgcaagggagtatctcctttctgtaaaataatagtacgaaacttgaactttcttatctttatatatagtatgcagacagtaacaattttcatgtttctgtaaaataacaaaatctgaacttttcttatttttcatataaagcacatatataatatgaatttttatctctatcttccccataatatccttctgtagctcctcatccagctttgctcagatactgtttctcccacagccctctagaatgaaggtcattcttttccccttttcttaactcagtgaaagaggagaagcaacaggctttctccctgcagctcctcctaggccatgggtccacttcattagtatccccggccgtaatggccgaattcccgggcatatggtccggtaccgtcgactgnnnnnnnnnnnnnnnnnnnnnnnnnnnnnnnnnnncggccgcttcctcgctcaagactccgctgcgctctgtcgtt

SEQ ID NO: 114072 - DNA, 1056 bp, Homo Sapiens
  misc_feature (426)..(466): n is a, c, g, or t
  misc_feature (515)..(524): n is a, c, g, or t
  misc_feature (629)..(681): n is a, c, g, or t
  misc_feature (705)..(768): n is a, c, g, or t
agaacaatggagtggaggtatgctttagatgcaattatttatgggatattcaaaacagatatatatgaagcaaaaaacttgggcccaaaaaacaagtttgaaggtatatttgggagttaccagtaatataggtaactgttgaagctctaaatatagaagacaaactagaggagcttgtttcttgaagaattcttgtcacacttgacattttttacagagatttcttaaaacaggggcatatcttctttggctaacatatgcagactaaaatgaaagagtatagtatattataaaatcaataaaaggtaagataaatttaggcctaaaaataaagaataaatacactcagttgattctgaagctctaatttacagatgcaaaattgtaccagtacattaactcatatgtcaaaacaacatctagagnnnnnnnnnnnnnnnnnnnnnnnnnnnnnnnnnnnnnnnnngaggcaaggagaagagaatggacacaaaggagataggaaaaacaggaannnnnnnnnnaagggctaaaattttagtgaatcagatgtggaaaacagttggattaacattgagatcaaatgagaaaggagcaaataaggaaagaggtattacaaaccaagagtnnnnnnnnnnnnnnnnnnnnnnnnnnnnnnnnnnnnnnnnnnnnnnnnnnnnnaagacgtgataatgaagtaaattnnnnnnnnnnnnnnnnnnnnnnnnnnnnnnnnnnnnnnnnnnnnnnnnnnnnnnnnnnnnnnnnacttgacaataaagtgaaatgtgtaagacaaacgtatctgtgtcattatttaggagtagtgaaaagtactcttaaataataatttggtatctagcaggcctggatttgaatctactttaacttgctagctatgtgaccttgggcaagcaaagaaactcctcataaccattgtaataataccagcaaaatgccttacacttacggctcaaaaaatgaaggaaatgagagaaaaaagtgtcccggccgtaatggccgaattcccgggcatatgtccggtaccgtcgactg

SEQ ID NO: 114073 - DNA, 780 bp, Homo Sapiens
  misc_feature (43)..(81): n is a, c, g, or t
  misc_feature (85)..(119): n is a, c, g, or t
gaagcatttgatactaccctctatgggccccgcttagtgcctnnnnnnnnnnnnnnnnnnnnnnnnnnnnnnnnnnnnnnnccgnnnnnnnnnnnnnnnnnnnnnnnnnnnnnnnnnnncagtcgacggtaccggacatatgcccgggaattcggccattacggccggggaaaaagtcctcttctaaggatagccggccatctcaggctgccggggataaccaggagatgaggtcaaggagcagacattctctggaggcacctctcaagatacaaaagcatctgagagctcgaagccatggccagatgccacctacggcactggttctgcatcacgggcctcagcagtttctgagctgagtcctcgggagcgaagcccagctctcaaaagccccctccagtctgtggtggtgaggcggcggtcaccccgtcctagccccgtgccaaaacctagtcctccactttccagcacatcccagatgggctcaactctgccgagtggtgccgggtatcagtctgggacacaccaaggtcagttcgaccatggttctgggtccctgagtccatccaaaaagagccctgtgggtaagagtccaccatccactggctccacatatggctcatctcagaaggaggagagtgctgcttcaggaggagcagcctatacaaagagcataaactttctttagactactctgcaatgatgttttcacatttacaaatttgccttggattctaccaatgtaagccaaagaacagtagagattgtgggtcagctatc

SEQ ID NO: 114074 - DNA, 899 bp, Homo Sapiens
  misc_feature (39)..(39): n is a, c, g, or t
  misc_feature (83)..(117): n is a, c, g, or t
aagacgtatagatcactatagggcgctcgccgtcttagnagcgaacgacgagcgcagcgagtagtgagcgaggaagcggccgnnnnnnnnnnnnnnnnnnnnnnnnnnnnnnnnnnncagtcgacggtaccggacatatgcccgggaattcggccattacggccgggggaagtctacatgaaaaggatggtttcttggagcttccacaaacttaaaaccatgaaacatctattattgctactattgtgtgtttttctagttaagtcccaaggtgtcaacgacaatgaggagggtttcttcagtgcccgtggtcatcgaccccttgacaagaagagagaagaggctcccagcctgatgctggaggctgtcttcacgctgacccagacctgggggtgttgtgtcctacaggatgtcagttgcaagaggctttgctacaacaggaaaggccaatcagaaatagtgttgatgagttaaataacaatgtggaagctgtttcccagacctcctcttcttcctttcagtacatgtatttgctgaaagacctgtggcaaaagaggcagaagcaagtaaaagataatgaaaatgtagtcaatgagtactcctcagaactggaaaagcaccaattatatatagatgagactgtgaatagtaatatcccaactaaccttcgtgtgcttcgttcaatcctggaaaacctgagaagcaaaatacaaaagttagaatctgatgtctcagctcaaatggaatattgtcgcaccccatgcactggtcagtttgcaatattccctgtggttgtctgggcaaagaatgtgacggaaattatcaggaaaggaggtgaaaccatctgaaatgtatctcattcaacctgacagttctgtcaaaccgtatagagtatactg

SEQ ID NO: 114075 - DNA, 923 bp, Homo Sapiens
  misc_feature (43)..(77): n is a, c, g, or t
gaacgaccgagcgcagcgagtttgtgagcgaggaagcggccgnnnnnnnnnnnnnnnnnnnnnnnnnnnnnnnnnnncagtcgacggtaccggacatatgcccgggaattcggccattacggccgggggctcagtcttagacgactgcgtcgtgctatgaccggactttttcttgaaaggggatgacagcatgggaggcaatggctccacatgtaaacccgacactgaaagacaaggcactctctccacagcagccccaacaactagccctgcaccctgtctctctaaccaccacaacaaaaaacatttaatccttgccttttgtgctggggttctactgacactgctgctgatagcctttatcttcctcatcataaagagctacagaaaatatcgaagggagaggcttcccatttccccaggcccattgctgagatgggtccctcttctttctggcaccatggcagatcactccaagccccaggccccagatcctcactcagatcctccagccaagctttcatccatcccagggaatcacttacctatgccagcacaactttcaaactctcagaagaaaagagcaatcacttggctgagaaccattctgcagactttgaccccattgtctatgctcaaattaaagtaaacaaactaactcagcttttccaatgaggcttgaatccatttcctctcatctcagccctatcttcacacatcactttcacttttttacaaattttgggaccaccacctgtgtgaaactgcagtcggagttgttagatgtgatctggcaatgctatccagcatcttttggagaccaatggtcagtcttttcctgggcagaggaaaagatttgatggcctccacttgaactgacagctgtgaagccctgggggggcatagaatgcttccttggaacc

SEQ ID NO: 114076 - DNA, 1225 bp, Homo Sapiens
  misc_feature (82)..(116): n is a, c, g, or t
aagatgtatagatcactataggcgctactccgtccgcaccgaacgacgagcgcagcgaagtcagtgagcgaggaagcggcgnnnnnnnnnnnnnnnnnnnnnnnnnnnnnnnnnnncagtcgacggtaccggacatatgcccgggaattcggccattacggccggggagctcagccaggcggcgacttcggcggcgccacgagagcgggcagcggaggagattgacgtgagtgaattcagatataactcaagcttgttagagggctttttaaaaataaaaagttgattccgtgcaagagagcaagttactgctgcttaccgttcagagacttacaggtgcttgcctgcattgcaataaaggactcatttattgagcaagacttatatttatctcttcattttggagagcctaataaactgttattacagtttctctactgactttcaaaagttttgaagtttgaaagacctttgcaattaaaacagcatgagcacggccagaacagagaaccctgttataatgggtctgtccagtcaaaatggtcagctgagaggccctgtgaaacccactggtggccctggaggagggggcacacagacacagcaacagatgaaccagctgaaaaacaccaacacaatcaataatggcactcagcagcaagcacagagtatgaccaccactattaagaggagagcattcccattgctttatctggtagggatatcttagctagagcaaaaaatggaacaggcaagagcggtgcctacctcattcccttacttgaacggctagacctgaagaaggacaatatacaagcaatggtgattgttcccactagagaacttgctctacaggtcagtcaaatttgcatccaggtcagcaaacacatgggaggggccaaagtgatggcaaccacaggaggaaccaatttacgagatgacataatgaggcttgatgatacagtgcacgtggtgattgctacccctgggagaatcctggatcttattaagaaaggagtagaaaaggttgatcatgtccagatgatagtattggatgaagcagataagttgctgtcacaggattttgtgcagataatggaggatattattctcacgctacctaaaaacaggcagaatttactatattcccgctactttccctcttagggtacagaagttcctgaattccccatttgccgaaacccctatgagataaacctgatgg

SEQ ID NO: 114077 - DNA, 457 bp, Homo Sapiens
  misc_feature (41)..(82): n is a, c, g, or t
  misc_feature (86)..(120): n is a, c, g, or t
aaaagagtatagagtcactatagggcgctacgtcgttattnnnnnnnnnnnnnnnnnnnnnnnnnnnnnnnnnnnnnnnnnnccgnnnnnnnnnnnnnnnnnnnnnnnnnnnnnnnnnnncagtcgacggtaccggacatatgcccgggaattcggccattacggccgggagtcacaaggtgtgggctatcagcattttcccagcccgtaaacgcccttcacctggatggcgaggaaaggcgcattcatcttatgattcattcagtgtggatgtataacatttatcacaataaaaaatcatgtttcagcagtgataactacgtaccctcacttcctttaggagatataaatagagatattctgaagcctgttgagacttccaggatgaacctgtcagactgaccacatgcatttattatcccacttcttctgaagcccattaaaataacagtaaggg

SEQ ID NO: 114078 - DNA, 444 bp, Homo Sapiens
  misc_feature (86)..(120): n is a, c, g, or t
  misc_feature (215)..(246): n is a, c, g, or t
aagaatgtatcgaccactatagggcgctacctccgtcgcaaccgaacgacgagcgcagcgaagtcagtgagcgaggaagcggccgnnnnnnnnnnnnnnnnnnnnnnnnnnnnnnnnnnncagtcgacggtaccggacatatgcccgggaattcggccattacggccggggaactcctgccacaacagaataaagcagcctgaattgaaaagctnnnnnnnnnnnnnnnnnnnnnnnnnnnnnnnnttttgttgggccgcgccttgggccccttgaaaaagcttttttagaacccattcgcggtgtgggcggcgcgcggggcacccagttggggttatgttgaacacgtgtggcccaatagcggtgtgttcccagaggagaaatccgcgggctcgatgagagcattaagcgcgcgtggggtttttttcctccacccccaatatt

SEQ ID NO: 114079 - DNA, 649 bp, Homo Sapiens
  misc_feature (83)..(117): n is a, c, g, or t
cacatttttaagataaactatatggggctccgcgtaaagccgaacgacgagcgcagcgagttagtgagcgaggaagcggccgnnnnnnnnnnnnnnnnnnnnnnnnnnnnnnnnnnncagtcgacggtaccggacatatgcccgggaattcggccattacggccgggcatatacacacaactgaaaaagaaatgtttaaattacaaaacagtgtttatactttcttcatgtgatgccctttgttgttttctaaactactctatgctttattttcaaaaattgctggttacaactcactaatgatttcaagactcatgaatgaacctcaaatcacaatttggaaaactctggcttgaggtgtgtttgggacctggaatcagcctgcacttccaatccaggaaagaaaagtggaagaacatgagcacgtgagaggagtgagaggctggggtggaagaggttctctctggacagtcttgcccacccaccccaggccagcccatgacagcccaagcagttcttgccatttaactcttgtttgcagttaacgccaatgcttgtttggctgaaaaatgcacctgtccgctatgtggttgccatttcaaagtagaaaactccagccttggcaacaagagcaaaactccatctcaaa

SEQ ID NO: 114080 - DNA, 970 bp, Homo Sapiens
ccgcgtttcgtctctgcggattgatgccctctgccctgttgctctggtggctccctgtgcccctctgtgccgcatcgctcgcgctgtagtctgtttggctccccctctgtttcgggtggctgttttccttcccctctgtgttcccccacatgctattttcgttactggttgccctttgatctgttgtcccgtggttccccggtcccgcagaggctcatgcttgtaagattcaggcctccggggtgtcacgcgtctgtgtctctttgtctttgcattattgctggcggcctgttgttctctggccgttggcgtgctgcccggtacggtcttgcagagctcagcgttcatgcccgccagtccttcccttcttccctcaggctcgctcctctccgtcgtcccccagcttcgtcagcctgtccccccccggaccagctggagcctgccgcgtgcacctcatccgtccatgctgtccaccactcggaacacccggggcccgtcagccgcactcttgtccacccgaatccacgttgttggacatggccttgctgaagcccactttgccactgggcagtcgcataagctcgctctgggccaggccctctgggggaatgcttcgaaacacacgggcctcatggctgccctcccgggcaatctcctcgccctccgcagtaagctcccagtgcttgctggaccgaagttcagcctcgatgacctcgcccagcgcctgaaggctcttcacggcgcccaccaccgcctggtgctccatgcccagctcagccgccaactcggcgctgtccaggccgccatcagacgcctccagccgccggagcagcagttccgccacctgaccatccgccatgaccctcgtgccgaattcgccacccaggcctcgctaccttaaaaccgttatagtacttgccgtcgttttaaacctgggtttgtacaaaagcttggtaggcctaaagtttga

SEQ ID NO: 114081 - DNA, 953 bp, Homo Sapiens
  misc_feature (81)..(115): n is a, c, g, or t
aagattgcattaatcactataggggctagctcgtcgaggcgaacgacgagcgcagcgagtagtgagcgaggaagcggccgnnnnnnnnnnnnnnnnnnnnnnnnnnnnnnnnnnncagtcgacggtaccggacatatgcccgggaattcggccattacggccggggagactccttgcggagctcgccgcctgattctaggctggtcactactccgagcctgtgacgtttgcggcagccaggccgtcgaagatgcccagtgaaactctcgtgggaaatgtgcaaaagctggaagtggaaaacaaggggaattcaatggaagtgaaggtgatggagctgaaattgcagaaaaatttgttttcttcattggcagtaaaaatgggggaaagactactattattctaaggtgtcttgacagagatgaaccaccaaaaccaaccttagctttggaatatacatatggaagaagagcaaaagggcacaacacaccaaaagatatcgctcacttttgggaactcggtggaggaacctctttattggacttaatcagcatacccatcacaggtgacaccttacggacgttttctcttgttctcgttctggatctttcaaaacctaatgatctctggcccaccatggaaaatctcttgcaagccacaaaaagccatgtagacaaagtgataatgaaactgggaaagacaaatgctaaagcagtttctgaaatgagacagaagatctggaataatatgccgaaggatcatcctcaggatcatgaattaattgacccatttccggtacctctggtcataattggaagtaaatatgatggtttttcaggattttgagtctgagaagaggaaggtactatgccagacactccgattttgttgcccattattatggagcatcattaatgtttaaccagtaaatcagaaaggtcctattactaaaaatc

SEQ ID NO: 114082 - DNA, 705 bp, Homo Sapiens
  misc_feature (88)..(122): n is a, c, g, or t
  misc_feature (396)..(408): n is a, c, g, or t
  misc_feature (652)..(665): n is a, c, g, or t
aaaacgtatactgacctacaataatgcggacgcaatgcgctgcttttcgaacgacgagcgcagcgagtagtgagcgaggaagcggcgnnnnnnnnnnnnnnnnnnnnnnnnnnnnnnnnnnncagtcgacggtaccggacatatgcccgggaattcggccattacggccgggacagcaagcatctccctaaataccatgaatcttaccatgtaaatccaaacctctgcaatcctgtggcaccaaccagaggtgctcattctatgatctaaaaatggccttcggaaaaggaagcaatgcatgacacgagaaggagggctcagccttgctgagacactttcttttgtgtttacatcatgccagggcttcattcagggtgtctgtgctctgactgcaannnnnnnnnnnnngcaaatgccactcgactgccttcataagcgtccataggatatctgaggaacattcatcaaaaataagccatagacatgaacaactagcctcactaccccattgaagacgcatcacctagttaacctgctgcagtttttacatgatagactttgttccagattgacaagtcatctttcagttatttcctctgtcacttcaaaactccagcttggcccaataaggatttagaaccagagtgactgnnnnnnnnnnnnnntttaattcagagttacatacatacagctaccattttatat

SEQ ID NO: 114083 - DNA, 1007 bp, Homo Sapiens
  misc_feature (64)..(106): n is a, c, g, or t
  misc_feature (109)..(143): n is a, c, g, or t
aagacatttaatcctaaacgcctcaaataagtggagccagccaaatgcgggcctgccttttttnnnnnnnnnnnnnnnnnnnnnnnnnnnnnnnnnnnnnnnnnnncgnnnnnnnnnnnnnnnnnnnnnnnnnnnnnnnnnnncagtcgacggtaccggacatatgcccgggaattcggccattacggccggggacagtaagcaccaggagtccatgaagaagatggctcctgccatggaatcccctactctactgtgtgtagccttactgttcttcgctccagatggcgtgttagcagtccctcagaaacctaaggtctccttgaaccctccatggaatagaatatttaaaggagagaatgtgactcttacatgtaatgggaacaatttctttgaagtcagttccaccaaatggttccacaatggcagcctttcagaagagacaaattcaagtttgaatattgtgaatgccaaatttgaagacagtggagaatacaaatgtcagcaccaacaagttaatgagagtgaacctgtgtacctggaagtcttcagtgactggctgctccttcaggcctctgctgaggtggtgatggagggccagcccctcttcctcaggtgccatggttggaggaactgggatgtgtacaaggtgatctattataaggatggtgaagctctcaagtactggtatgagaaaccaaaacatctccattacaaattgccacagtttgaagacagtggaacctacttactgtacgggcaaagtgtggcagctggactatgagtctgaggccctcaacattactgtataaaagctccgcgtgacaagtactggctaccaatttttatcccattgttggtggtgattctgttggctgtggacaccagggattatttatctccaactcagcagcaggtcacatttctcctttgacgattagaagaacccggaaagggctcagactcctgaacccaattcctaagacaaacccaaaacgactgtttta

SEQ ID NO: 114084 - DNA, 926 bp, Homo Sapiens
  misc_feature (81)..(115): n is a, c, g, or t
  misc_feature (587)..(615): n is a, c, g, or t
  misc_feature (776)..(776): n is a, c, g, or t
aaactgtatagactcatatagggcgctactccgtcacagcgaacgacgagcgcacgagtcagtgagcgaggaagcggccgnnnnnnnnnnnnnnnnnnnnnnnnnnnnnnnnnnncagtcgacggtaccggacatatgcccgggaattcggccattacggccgggcagctgcttgtactgaccggggattaagggccaaactagacaatggatgtcagagatcctgtgtggacacgtgaccgggaaagctataagcccccctctcctccaccacacacactgccacagcaacacataaatcctcctaaacttagatctgatggggaactaagctaaatgagaatcttaaaaaaattgttgtattacagaagaatgaacaagtacaattccttgcacacctgaccttgtgctatgcaagatctttcagcgttcttgtgtaatgcattctatttaacaagttgtgttttggacaatattatttctgtttaatctaactcccttgctagcaaggaagcttaaaggtctgtgaaatcaaaatatttaatactgcatttctcgctcccaaaatgatttcaatgtgaacgacnnnnnnnnnnnnnnnnnnnnnnnnnnnnngggctgtgcttagctgatgactaagggcttcctaagggacaattttattcagccctagcatcttattagcagcagagaagtaattcaagaagggagaggtttgagggaatagagaagagagctagtagccttgtaatcagacatcccaaagctcaattctntaattttaccttgcaagaaattataaatttccatttagaagatgcccctttttacaccatcaggaagtctatacttttgtttcagatatctttctacttcttaaagccgaatagactggcatccttgttaccttaagttccaaagttcaa

SEQ ID NO: 114085 - DNA, 1203 bp, Homo Sapiens
  misc_feature (81)..(115): n is a, c, g, or t
  misc_feature (772)..(772): n is a, c, g, or t
  misc_feature (839)..(1024): n is a, c, g, or t
  misc_feature (1092)..(1092): n is a, c, g, or t
aaactgtatagatactataggggctagcggcgtcatagccgaacgacgagcgcagcgaagtagtgagcgaggaagcggcgnnnnnnnnnnnnnnnnnnnnnnnnnnnnnnnnnnncagtcgacggtaccggacatatgcccgggaattcggccattacggccgggggacaccttctgtgtacagagctctggacatgcattgtctgagctccacagaatgccccattatgcagatgaagaaactgaggccccaagaggtttgagagttgctcaagtcacagagcccaatttgacaggatctgatgcctgggcaggtgctccccttactcaatcctgccccgcagggtgaccctgtttgcagcacgatgtctgaagaagaggcggctcagatccccagatccagtgtgtgggagcaggaccagcagaacgtggtgcagcgtgtggtggctctgcccctggtcagggccacgtgcaccgcggtctgcgatgtttacagtgcagccaaggacaggcacccgctgctgggctccgcctgccgcctggctgagaactgcgtgtgcggcctgaccacccgtgccctggaccacgcccagccgctgctcgagcacctgcagccccagctggccactatgaacagcctcgcctgcaggggcctggacaagctggaagagaagcttccctttctccagcaaccttcggagacggtaccccggacgactagacatggggacctccagtgggggcaggccagattagaggcgggagggaaggnagggatggtgacaaccaggcttttagttaactcaagaaaaaacagccaggttaaaataactgcaacnnnnnnnnnnnnnnnnnnnnnnnnnnnnnnnnnnnnnnnnnnnnnnnnnnnnnnnnnnnnnnnnnnnnnnnnnnnnnnnnnnnnnnnnnnnnnnnnnnnnnnnnnnnnnnnnnnnnnnnnnnnnnnnnnnnnnnnnnnnnnnnnnnnnnnnnnnnnnnnnnnnnnnnnnnnnnnnnnnnnnnnnnntgctagtaagggcagttaactccctcaacaccctctgtgagggaaaggttttatcacccattttatangggaaactgaggcacggagccaggtaaaaatccaggggatcttttgagtcccacccccagggaaactaggggtggcagaaaattggagctgggattccccacggtgccctg

SEQ ID NO: 114086 - DNA, 1103 bp, Homo Sapiens
  misc_feature (36)..(36): n is a, c, g, or t
  misc_feature (40)..(40): n is a, c, g, or t
  misc_feature (78)..(112): n is a, c, g, or t
  misc_feature (116)..(150): n is a, c, g, or t
  misc_feature (433)..(452): n is a, c, g, or t
  misc_feature (456)..(468): n is a, c, g, or t
aaaaacttgattaatacgacctttcactattagggngcgncttaaggcgtccgtttcaattagaccccggaaaatcgnnnnnnnnnnnnnnnnnnnnnnnnnnnnnnnnnnnccgnnnnnnnnnnnnnnnnnnnnnnnnnnnnnnnnnnncagtcgacggtaccggacatatgcccgggaattcggccattacggccgggggaagaagagagtgtcacctacttcagatgtggtttcaaccctacttctgcatcttaaagacactgtatggtttcagcagtagtgcccctgttcattagtccccctgatgttttcattcctcatctcatctttttcttagcagcattcaatgaatccttcattctagaaacactctatatctttggttttcatgagaccattctcaccttgttttgtcctgtgacttttttgnnnnnnnnnnnnnnnnnnnncccnnnnnnnnnnnnnaaattctggtaaaaaacacaatgaaaatttgctatcttaaccatgttgaaatgtgcagttagtaaagtacattcacattgtggtgcaagccatcactaccatccatcactagaacccttttcatcttgcagatctgaaactctacccattaaacaacttcccatcttcccatccccacagctcctagcaaccaacattctactttctctatcagtttgactactctaggtacctcatatgagtagaatcatacagcatttatccttctctgcctggcttatttcacttgtataatgtcctcaagggttcattcatgttgtagcatgcatcagaacttcctccccttttaaaggctggataatatttcatggtatggttagatcacattctgtttatccattccatccatcagtgaacacttgtgctccttccaactttgggctgtgggtgtcctggcactgtttgctcctaggggtcaatcccgttaattccctcctaatccaggtgtccaccgtggggcacctgtgcaggattaatgccacttatcttgggatgctaattctgccatgtagatttgattaaacccagggccagaatgcctaagaatctaacttactcaggtgactgtgttaaac

SEQ ID NO: 114087 - DNA, 980 bp, Homo Sapiens
  misc_feature (84)..(118): n is a, c, g, or t
taaaggatgtatagactactatagggcgctactcgctgtagcgaacgacgagcgcagcgaagcagtgagcgaggaagcggccgnnnnnnnnnnnnnnnnnnnnnnnnnnnnnnnnnnncagtcgacggtaccggacatatgcccgggaattcggccattacggccggggagaacgtcgagatggagcccaactcactccagtgggtcggctcaccgtgtggcttgcacggaccttacattttctacaaggcttttcaattccaccttgaaggcaaaccaagaattttgtcccttggcgactttttctttgtaagatgtacgccaaaggatccgatttgcatagcggagctccagctgttgtgggaagagaggaccagccggcaacttttatccagctctaaactttatttcctcccagaagacactccccagggcagaaatagcgaccatggcgaggatgaagtcattgctgtttccgaaaaggtgattgtgaagcttgaagacctggtcaagtgggtacattctgatttctccaagtggagatgtggcttccacgctggaccagtgaaaactgaggccttgggaaggaatggacagaaggaagctctgctgaagtacaggcagtcaaccctaaacagtggactcaacttcaaagacgttctcaaggagaaggcagacctggcgccaaatcttaaaggcagaaccacgcaaaaagaaaccatgcccacaaagaagagatcattcagtggtgtcaaggattcaacaacaattccgatggcaaagccgttggcaacggtgcaactgtgaggcaggtcagcctggaccaggccgagataccatcactgtacacaggtctcaatgcacgaaaaaccaggttgcattggcaagatgctggcgatacaagcctttgggaccttatcaaatcaacacctagaaaaattttggcctcccgaaataccaacttggccgcaaatatcatg

SEQ ID NO: 114088 - DNA, 954 bp, Homo Sapiens
  misc_feature (87)..(121): n is a, c, g, or t
taaaaatgtatagatcatatagggcgctactcgcctctagccgaacgaccgagcgcagcgaagtcagtgtagcgaggaagcggccgnnnnnnnnnnnnnnnnnnnnnnnnnnnnnnnnnnncagtcgacggtaccggacatatgcccgggaattcggccattacggccgggggaactgtattcagcggcgacagcggcgactgcggcggccgcgggagggcatcccgttggggatccttccgcacactgaagagtacgtcttcgggtctacccctaatcacataatggctgtgtttaatcagaagtctgtctcggatatgattaaagagtttcgaaaaaatcggcgtgctctttgtaactctgagagaactactctatgtggtgcagactccatgctcttggcattgcagctttctatggcggagaacaacaaacagcacagtggagaatttacagtctctctcagtgatgttttattgacatggaaatacttgctccatgagaaattgaacttaccagttgaaaacatggacgtgactgaccattatgaggacgttaggaagatttatgatgatttcttgaagaacagtaatatgttagatctgattgatgtttatcaaaaatgtagggctttgacttctaattgtgaaaattataacacagtatctcctagtcaactactggattttctgtctggcaaacagtatgcagtaggtgatgaaactgatctttctataccaacatcaccaacaagtaaatacaaccgtgataatgaaaaggtgcagctgctagcaaggaaaattatcttttcatatttaaatctgctagtgaattcaaagaatgacctggctggtggcttatattcctcatattcctgatagaggactagggaagagaagcctttccctgatttgaaacatgctgcttcgagaagaaacaatggcaatctttttg

SEQ ID NO: 114089 - DNA, 607 bp, Homo Sapiens
  misc_feature (96)..(130): n is a, c, g, or t
  misc_feature (526)..(548): n is a, c, g, or t
ggggagagggccaaaaaaactgatgactactatgggcgctgcttgtctcagcgaacgacgagcgcagcgaagtcagtgagcgaggaagcggccggnnnnnnnnnnnnnnnnnnnnnnnnnnnnnnnnnnncagtcgacggtaccggacatatgcccgggaattcggccattacggccgggggatacgggagttcctccttgctctcgcccctactctttctggtgttagatcgagctaccctctaaaagcagtttagagtggtcccttttacatacccattgcctgtgtgtgccgattaatggacttaggtaaactttagcgtttggtaggcaacgcaatttttcaatgccttttctttctttttcttgtacatctttaaaggccttactccagtaagtgtgcattgcagtttattaatgcctatcccttaatgagtccttgtcatgcattttgttattaatcataattcacaattcttataattcagagacaccagagattcacataagaagaatggctttgagnnnnnnnnnnnnnnnnnnnnnnnctgtagattatcaaattcattcatttgtatcaagtcactaagtgtatactttgttttct

SEQ ID NO: 114090 - DNA, 1132 bp, Homo Sapiens
  misc_feature (80)..(114): n is a, c, g, or t
  misc_feature (477)..(672): n is a, c, g, or t
  misc_feature (862)..(862): n is a, c, g, or t
ctttagtactatgggcggctaggcgggttattatgccgaacgacgagcgcaggcgagtcagtgagcgaggaagcggccgnnnnnnnnnnnnnnnnnnnnnnnnnnnnnnnnnnncagtcgacggtaccggacatatgcccgggaattcggccattacggccgggggattgacagaagcgtcaattcctgggagtagttcgttggttttctttcccctcatccttttgcctgctcccggcgaggggtggctttgatttcggcgatgagctcccagaaaggcaacgtggctcgttccagacctcagaagcaccagaatacgtttagcttcaaaaatgacaagttcgataaaagtgtgcagaccaagaaaattaatgcaaaacttcatgatggagtatgtcagcgctgtaaagaagttcttgagtggcgtgtaaaatacagcaaatacaaaccattatcaaaacctaaaaagtgatggannnnnnnnnnnnnnnnnnnnnnnnnnnnnnnnnnnnnnnnnnnnnnnnnnnnnnnnnnnnnnnnnnnnnnnnnnnnnnnnnnnnnnnnnnnnnnnnnnnnnnnnnnnnnnnnnnnnnnnnnnnnnnnnnnnnnnnnnnnnnnnnnnnnnnnnnnnnnnnnnnnnnnnnnnnnnnnnnnnnnnnnnnnnnnnnnnnngaacctccctgagcctggtgatctggcctggcctcaaccctccggaaagtggctgggaaattagcaaggtggtggaaccccatccattgccttggagcctaaattttggtataattttttcgaattgacctcccatgaatggcttggacctggaagcaatccgtgttgccgttttcctgttttccggttntattgtattgcccttggactagttttggaggaaaggagaactctgtggcctcctcaatgaacccccagggttggaggaggtgtccataaggcgccgccccctttttccaacctcccagagggaaaacccctgctgggcccatcccctaggggtttgcagaggaggaaattttctccccgggcgcctccaaagacctgactcccgaaagctgacctgcgggccgtattatattgaggggggaaaatactcccaccgtaccccacgtgcccc

SEQ ID NO: 114091 - DNA, 1337 bp, Homo Sapiens
  misc_feature (1226)..(1260): n is a, c, g, or t
cgctgtaaatgtcggtgggttacaacggtgtggggacatttgttgttgagcacaggctcggttgtcgcgggggatttttcctgcgtggcgtatcccgggagtttgtcggtgtcggaatttgtagcgtgtgacactgtgtatgatgcaagaaccattctgtccgtagaagacggctcggtccagggcttggccgcgtaatctgtggtgcgttcaagtgggaagttctcttggcgccctttggttggcacacagtgctctggaaacggccaagtgcgggggacgaattgggtgttgaatgccgcggcggcgagggcagtcgtcaccttccgcggggtgcaagcggaagtgtcccgtggcttcaagagcgtttccgagtaagcctggggaagcgccaggcgcaacagtgcccaccagacatgccgggcgtaagtggggtcgaaggggtgaagtaagagaccaggggggtgcacccaatggttggcccagtgcgtggtcgtgcgggaaggcgccggacctgccaggggagaagcgcgtgcacggctgccgttgccccgggatggctgggaattacaggggcgtgaggcagccaacggcgccggccgtcgagcgcatgcgttctgttaaggggctgcaaataaggtgggagaggtgctggtggtccaggtacttgtcggtgagaagtgtgagttgtgtcgatgtgggaatctgtgttgctagagaagttacatggtgttctgttgccgttgctgtgctcagtggtgtcctgctgttctgtaacatgtgctatttggtgcatcttgtgtgaacaggttgcttcttgctaatgtctatttgaattttgcgtatcactaggggaggagctcttgcctgaaaatgtatgtcgtacgctgcttcactatgggtatggatgctcttggcctgctgattcctggcgctgctagtgcagctagtgtaatcacctgctatagatttcttcaactgtataaacagcatcattgttgtctggtgattttctcacgtggcttaggatgtgcttagtgacaaagtagtgatgaagctttgctaggaacttgggatactacacgggccagtccttcgggtcccaacagtcggctgcagtgggctgagtatgcctgctcttgcgcaccagggtgatgtatactagcaccagtgttcccggccgtaatggccgaattcccgggcatatgtccgctaccgtcgactgnnnnnnnnnnnnnnnnnnnnnnnnnnnnnnnnnnncgccgcttcctcgctcactacttcgctgcgctcgtcgttcgctcgacagctagcccctatatgatttacaagtcttt

SEQ ID NO: 114092 - DNA, 413 bp, Homo Sapiens
  misc_feature (46)..(88): n is a, c, g, or t
  misc_feature (91)..(125): n is a, c, g, or t
aaaaaaaggaatcgatagatcactatagggcgctagctcgtcattnnnnnnnnnnnnnnnnnnnnnnnnnnnnnnnnnnnnnnnnnnncgnnnnnnnnnnnnnnnnnnnnnnnnnnnnnnnnnnncagtcgacggtaccggacatatgcccgggaattcggccattacggccggggggaagagaaaacaactataattcacactatttagtacccagaatgaaaatgatttaaggtcatagatatttgttggtaatacaagattaagttgatgtttcttcataggaaaactatatttagtgggcaacaactatttttatgatgggatgggggagtatatacacgtatagaatctgtacgcgttgaacaacttggttcaagatggtgggggcatttttagagcggcaataattg

SEQ ID NO: 114093 - DNA, 533 bp, Homo Sapiens
  misc_feature (69)..(103): n is a, c, g, or t
  misc_feature (245)..(359): n is a, c, g, or t
taatagggcgtagcctcgtccgagccgaacgacgagcgcagcgaagtcagtgagcgaggaagcggccgnnnnnnnnnnnnnnnnnnnnnnnnnnnnnnnnnnncagtcgacggtaccggacatatgcccgggaattcggccattacggccggggatcacagctcactgcagccttgacctcctgggctcaagtgatcctcccaagtagctgggatgacagggacacgccaccacacccagctaannnnnnnnnnnnnnnnnnnnnnnnnnnnnnnnnnnnnnnnnnnnnnnnnnnnnnnnnnnnnnnnnnnnnnnnnnnnnnnnnnnnnnnnnnnnnnnnnnnnnnnnnnnnnnnnnnnattagctaccacgccaggcctatgttttctatctgtgaaaattagatgaaaacatacatgtaagcaaatacatgggagacttcccttctggtaaaaagaaagagagcaatcacctaggtagtttaagaggacagctgataaaatggtggtgtgtccgtttcaaggttgaagaga

SEQ ID NO: 114094 - DNA, 585 bp, Homo Sapiens
  misc_feature (81)..(115): n is a, c, g, or t
aattgtaatagactcacatagggcgctactcgtcgagccgaacgacgagcgcagcaagtcagtgagcgaggaagcggccgnnnnnnnnnnnnnnnnnnnnnnnnnnnnnnnnnnncagtcgacggtaccggacatatgcccgggaattcggccattacggccgggatgaaaaataaggccaaaacaagagttctgggccacagctcagcccagagggttcctggggatgggaggcctctctctccccaccccctgactctagagaactgggttttctcccagtactccagcaattcatttctgaaagcagttgagccactttattccaaagtacactgcagatgttcaaactctccatttctctttccccttccacctgccagttttgctgactctcaacttgtcatgagtgtaagcattaaggacattatgcttcttcgattctgaagacaggtccctgctcatggatgactctggcttccttaggaacaactatttttcttccaaaatcagtaggaaatctaaacttatccccttctttgcagatgtctagcagcttcagacatttggttaagaacccatggg

SEQ ID NO: 114095 - DNA, 951 bp, Homo Sapiens
  misc_feature (86)..(120): n is a, c, g, or t
aacttggatttagactcactatagggcgctccgtcgttattgtcgaacgaccgagcgcagcgaagtagtgagcgaggaagcggcgnnnnnnnnnnnnnnnnnnnnnnnnnnnnnnnnnnncagtcgacggtaccggacatatgcccgggaattcggccattacggccgggggagggcggagggcggtggcagcgctggcgctggggaccggcttggtggcttcgggaaacagtttggcgccggcggccgtccgtgttactccgcatcccgccccgtctcggcacggctagcagccccctggccaccagcgtccagcaatgtgtctcaccggccgggcgtagcagctgcgcgtgcgcggaaccgcggggccatgagcgaagccggcggccggggctgtgggtccccggttccccagcgagcgcgatggagactagtggcggcgacggccgcgttctgcctggtgtcggccacctccgtgtggacggcgggggccgagcccatgagtagggaggagaaacagaagcttgggtaagggtgctggcagcctggggtgggtttctcggtgaggctgacaacaggaggggtgcctgtcattgcgacccggtcgcgtagtggcctctcctgtcgcgattggaacggctcttcccgcgcgagaaccctagaggggtggacagggtccggggaggtgggaaccgccgcccggactgacctcgggggagctgacggggtgtcgccctggccgccggtgacatgtgcaggctccttgaagccaggcgcggtgtgtcaacgcggtggcatgtcaggtggccccaagaagggggctacagcccgcatcggtgcgcgctggaagtctggcgggtggctgcctgtcgatcgaagcatggttagctttctcgccgcaagtgaggcttcaactggggaaatgtggctgatctcacagtagtaaggaca

SEQ ID NO: 114096 - DNA, 585 bp, Homo Sapiens
  misc_feature (157)..(396): n is a, c, g, or t
taagcataaaagtattaacatctaattattataaactttctgtaattgaagttgaactgttaggacaatttttaaaggcagtatagtggttaagcattgcctttgaagccatcctttatgggtttaattccattctgctatttgcttgttgggtatnnnnnnnnnnnnnnnnnnnnnnnnnnnnnnnnnnnnnnnnnnnnnnnnnnnnnnnnnnnnnnnnnnnnnnnnnnnnnnnnnnnnnnnnnnnnnnnnnnnnnnnnnnnnnnnnnnnnnnnnnnnnnnnnnnnnnnnnnnnnnnnnnnnnnnnnnnnnnnnnnnnnnnnnnnnnnnnnnnnnnnnnnnnnnnnnnnnnnnnnnnnnnnnnnnnnnnnnnnnnnnnnnnnnnnnnnnnnnnnnctgcatcagcctctccccacaagttagcacagctcagtgccaagacagaatgcctcttcacatctttttcctctgggagaaaagaatagagcatgcctccaacattccagcttttcagagagctgcccagaaacaggtccccggccgtaatggccgaattcccgggcatatgtccgctaccgtcgactg

SEQ ID NO: 114097 - DNA, 993 bp, Homo Sapiens
  misc_feature (76)..(110): n is a, c, g, or t
  misc_feature (481)..(499): n is a, c, g, or t
  misc_feature (518)..(765): n is a, c, g, or t
gaataccactatgggcgcttagctcgtcgcagcgaacgacgagcgcagcgaagtcagtgagcgaggaagcggccgnnnnnnnnnnnnnnnnnnnnnnnnnnnnnnnnnnncagtcgacggtaccggacatatgcccgggaattcggccattacggccggggcactgttaacagagtgacgttaaccatcttgtattgtgacctgtggccgcttttctggtttaagtccttcactttttcaagaggaatggatgaaattaatgtgcatgcagagtctcacagtgatgccggaaggaaggatgtataggcagtgaatgaatgatctttccttgaaatgctataaaaagcaacctgcattccagtcttttcttcctggttgaagttggcagatttccatttgcagggtatgggctgcgagagtaatcagggtaacattgctgtcatttccaagagaaatcagtaggggaaagcaagggaggtcnnnnnnnnnnnnnnnnnnngagacggagtttccctctnnnnnnnnnnnnnnnnnnnnnnnnnnnnnnnnnnnnnnnnnnnnnnnnnnnnnnnnnnnnnnnnnnnnnnnnnnnnnnnnnnnnnnnnnnnnnnnnnnnnnnnnnnnnnnnnnnnnnnnnnnnnnnnnnnnnnnnnnnnnnnnnnnnnnnnnnnnnnnnnnnnnnnnnnnnnnnnnnnnnnnnnnnnnnnnnnnnnnnnnnnnnnnnnnnnnnnnnnnnnnnnnnnnnnnnnnnnnnnnnnnnnnnnntgagccactgcgcacgggcctggggaggttttatttcttgacaaaggtatttgatactcgtgcagtcccctggagggtctcactggagagacaacattttaggctgagatctgattaacaggaggcagctggcagtgcagaggtccaaaaggaagggtgtttccaggcagaaaaaaacagcctgtgccaaaggcccctggaggcaggaaacaaattctactttggagg

SEQ ID NO: 114098 - DNA, 1025 bp, Homo Sapiens
  misc_feature (82)..(116): n is a, c, g, or t
gatgataactcactatagggcgctagctcgcttgcagccgaacgaaccgagcgcagcgagtagtgagcgaggaagcggccgnnnnnnnnnnnnnnnnnnnnnnnnnnnnnnnnnnncagtcgacggtaccggacatatgcccgggaattcggccattacggccgggggagaagcaaaagagcagagctaccagtgtcctcttggagcagacagcgaccaaaaagcccagggggcattcaaccccatgtttctagaactctgttcctgctgctgctgttggcagcctcagcctggggggtcaccctgagccccaaagactgccaggtgttccgctcagaccatggcagctccatctcctgtcaaccacctgccgaaatccccggctacctgccagccgacaccgtgcacctggccgtggaattcttcaacctgacccacctgccagccaacctcctccagggcgcctctaagctccaagaattgcacctctccagcaatgggctggaaagcctctcgcccgaattcctgcggccagtgccgcagctgagggtgctggatctaacccgaaacgccctgaccgggctgaccccgggcctcttccaggcctcagccaccctggacaccctggtattgaaagaaaaccagctggaggtcctggaggtctcgtggctacacgggctgaaagctctggggcatctggacctgtctcgggaaccgcctccggaaactgccccccgggctgctggccaacttcaccctcctgcgcacccatgactcgggggagaacagtggagacttgcactgaactcctgagggccgctgcattagaacggctactctacgaaagcaccacagtggccgctctgggaaaaaaccctctgccgcgaggggacagggcacccctcggaggcacaagccgccaggtgcaccgggctccagcccggccggatggacccccacaacacggcggggccgcaggcggcaccaggaccacgggcgggggacccaccctggcgcacgccccg

SEQ ID NO: 114099 - DNA, 1442 bp, Homo Sapiens
  misc_feature (128)..(128): n is a, c, g, or t
  misc_feature (458)..(458): n is a, c, g, or t
  misc_feature (1010)..(1032): n is a, c, g, or t
  misc_feature (1124)..(1186): n is a, c, g, or t
  misc_feature (1365)..(1399): n is a, c, g, or t
cgtccgccaggtgttagccgcgcgtggcgcgcgcgtcgctattgacgctcaggacccccgccagccgcgcgaaccccgcgggcctctgttttgcatgaagtgttcgagtcatcaccagaataagattntaccgccccgcacacacacggcggttggactagttttttgtcccacacccgtcgcggcgagcacagggagcaagagcgccggcagcgccccactgtctatggcgcggtggcgtgaggtggcacccacccaagcgagtgatatagtcggcagatgaggtgtatgcgtatgtaaggcgcgccacgcggtgtagggacacatgtgcgggtcgccccctgcatgagcacgcaccgtaatactgactccgtcgtgggcgcggtggtcggccggctagatgcctacagcacggcggcaccgcctgccagcggcccggcggcgggatacccaacgcntcgagggacagtgccggcgccccattctgggctgggtgtggccccccccgtcggaggcattcgcgctatggagaacgcccctctcaacaaacgctattttccactattcgcgggtactcgcccaatcccccccgcccgcggccctcgtgattccggcggtggtacccgtgacccgggtgtggagagggtgcgccctcggtgcatgctcggtcctctcgcctccccggccgtcacacgcgccatttcatctggcaacgccccgatcactggtagtgaatgcgcgtcagcaaaggggcccgtcaaccactctctccaagcgtcaggccgtgagcacacgttcccctccaggggtccccgggatacctgcacaattacattccctccacgattaggtttgtaggccactccaggtcacaccggccaacgggtccccagcctccaggggagaaccaccagggccaaccgccgcgagcgcagaccacgcccaccgggctcttgggcgcggggtcctggggagccgcggcggccgcctccgtcggagcctgcgggagnnnnnnnnnnnnnnnnnnnnnnncctcgcccgcctcactcatgcctcctcctcctctgctctcgctcaggcgcctcggtggcggttggtcggcggttagcgcggctggtggtcgnnnnnnnnnnnnnnnnnnnnnnnnnnnnnnnnnnnnnnnnnnnnnnnnnnnnnnnnnnnnnnncgaggtggggtcgcgcgggggaggcggctcgagcttcgtgctgcgcgctcgctcttgggctcctcgctcgatcttactgccccaaaaatggccccgcacaagtttttctaggcggcgcaccggccccccccggccgtaatggccgaattcccgggcatatgtccggtaccgtcgactgnnnnnnnnnnnnnnnnnnnnnnnnnnnnnnnnnnncggccgcttcctcgctcaaaaactcgctgcgctcgtccgcttt

SEQ ID NO: 114100 - DNA, 1004 bp, Homo Sapiens
  misc_feature (43)..(86): n is a, c, g, or t
  misc_feature (90)..(124): n is a, c, g, or t
aaaagaacttgatagatcactatagggcgctagcggcttaatnnnnnnnnnnnnnnnnnnnnnnnnnnnnnnnnnnnnnnnnnnnnccgnnnnnnnnnnnnnnnnnnnnnnnnnnnnnnnnnnncagtcgacggtaccggacatatgcccgggaattcggccattacggccggggctgcagagacaggatgcagaggccagggctcgtcccccagagccttgcaagtgtctgtagggcgctcccctctgtcttgcctcctcccactctctggctcttctctatccagcctgccctcaggttgtgaccatccacctcccaaactgccctggaatctgcctacggcctgtccactgccctccgtacccctgcctgccatctctctggtttcgcccctgatgtcactcacatgaaccacagcggtcacccccacctgcctcctgctcctgccctctcctctgccctgcatcagccagaggggggtttaaaagcttacatttgttaataatctggctaaagcttaacatttattgtaatccatccctaaatcccagctggtggcattgctctaacagtgatgaccagcctcctcatcataatccccagcactgccaccctcagacccccagcgctgaccactggaggctgcttctaaaacttcagccctgctctgccagcaggcgcccctggggtgtcttcgtagccctgttgcccatcacgatcccttttctcatgcagtccaggatgcaagcccccgcgagggcttgggctgacttgtgtgtagtcagtgctgtgtctctgcacccagacagaagtggtgggacagtcccccggctgacgggctagaaccaatcatccagcggtgtgttggcacagaggcacatctcccccaccgacgcagacactgggtaaatacattcccaggaactatccaggtgccaaacccccaatttgagacacaagggtcctctggacaccttccagcaccctcatcaaggggtaccag

SEQ ID NO: 114101 - DNA, 1041 bp, Homo Sapiens
  misc_feature (43)..(85): n is a, c, g, or t
  misc_feature (89)..(123): n is a, c, g, or t
  misc_feature (368)..(368): n is a, c, g, or t
aaagaccctgctatagactcactatagggcgctagcgcgttannnnnnnnnnnnnnnnnnnnnnnnnnnnnnnnnnnnnnnnnnnccgnnnnnnnnnnnnnnnnnnnnnnnnnnnnnnnnnnncagtcgacggtaccggacatatgcccgggaattcggccattacggccggggagccgttcctgccacgagcttctagtgcatgttctattctgaaaaagatgagaattaaccagctacagtgcaagatgtcatgaaatgagctgtgttcagaatctaggcacgtgtgactttgacatatctatgaggtttaaaaaagaaatatcaggaatacaagtagaatatgtgccatatgaagaaatcatagncttaattaattggtaaccattatagtatcctcattagctgtttgactggttttagaattcagcatataatccttggctctttggaaataaaattgtataaatactaactatttattagatctgacatggtaggtacatgggtgttaaactagtctctgtgcttttcgtgtgtatctccttaacttaacactagtgacttctacattaacactaggtgacctttcatgactggcctaggaatgtggccattcatatcataccttttcatccatttcttaggttcccagtctaagtgggtgactttccaagatagaggcagatcatttctccgtcaagtatagcagagacacatctgctcctcctagagtgtccatacaggtctgacagacacatagcaaataacttagcacagcaggcctgcaacaaacattcacagtttcgacattctctccgggtcggcggcactcaacattctggctcggcaactccaattactgattcgcatgtgttgctcttggactcatgtcaagaggtcaataaccagggtgtccaggccagggcaacgcttcggggatccgggaaacactccatatttgctaactacctactcatgccataaactggcctgaaaccttcaatactgctaacctcacttcagtctgcatcaagtacg

SEQ ID NO: 114102 - DNA, 964 bp, Homo Sapiens
  misc_feature (45)..(79): n is a, c, g, or t
tacccgaccgagcgcagcgagtcagtgatgcgaggaagcggccgnnnnnnnnnnnnnnnnnnnnnnnnnnnnnnnnnnncagtcgacggtaccggacatatgcccgggaattcggccattacggccgggggacacaattacaactttgtgctggtgctggcaaagtttgtgattttaagaaattctgctgtgctctccagcactgcgagcttctgccttccctgtagtttcccagatgtgatccaggtagccgagttccgctgcccgtgcttcggtagcttaagtctttgcctcagcttttttccttgcagccgctgaggaggcgataaaattggcgtcacagtctcaagcagcgattgaaggcgtcttttcaactactcgattaaggttgggtatcgtcgtgggacttggaaatttgttgtttccatgaaatcctgcgcagggtcgctcactaccgccgctgttgccttcggtgatgaggcaaagaaaatggcggaaggaaaagcgagccgcgagagtgaagaggagtctgttagcctgacagtcgaggaaagggaggcgcttggtggcatggacaggtacgcacctccatcacccgcctggttggttagcgatactctccgggaaggcctggacgcagcttgcccacgttgatgacggggtcatcctcagcttggcactcaccaatctgtcgctgtcgctcttggactcgggaaggagcaagtcactggctttctcagaccattaacaagctctgtgtctctctctctacagccgtctcttcgggttcgtgaggcttcatgaagatggcgccagaacgaagaccctactaggcaaggtaaaagcaaccagacgcaaagtctttggtccgcactttgctctaccagggccccgcgttccttaccgcccagccagtattattttggtctgctcatggccaagggtggaaagggttcttgccttg

SEQ ID NO: 114103 - DNA, 571 bp, Homo Sapiens
  misc_feature (41)..(75): n is a, c, g, or t
  misc_feature (465)..(509): n is a, c, g, or t
aaccgagcgcagcgaaggtcattgagcgaggaagcggccgnnnnnnnnnnnnnnnnnnnnnnnnnnnnnnnnnnncagtcgacggtaccggacatatgcccgggaattcggccattacggccggggtttttgacagatagtattaaatgtttaccatgttccaggcactgtgtgaggctctgaaaatacaggggtgagcaaatccagatatcctccctagccatcatgaagatttggagtctatgagataggaccccctccctatggacgaagccaccaagtgcagtacagggtgacctggggccagagacaggacaaatgtcacctcctgcctccatgagatactctcactagtcatattgtgggcaagaatgtggcttacacccctagggttaacaggatgctacccaagctcatggaggaagttgaatcttaagttcccttgaaactttctaccttggtggnnnnnnnnnnnnnnnnnnnnnnnnnnnnnnnnnnnnnnnnnnnnngagactgacgttggcccttgttgcccaggctggagttgccggggcaccatcttggctcaccg

SEQ ID NO: 114104 - DNA, 1091 bp, Homo Sapiens
  misc_feature (65)..(102): n is a, c, g, or t
  misc_feature (105)..(139): n is a, c, g, or t
  misc_feature (273)..(284): n is a, c, g, or t
gggaaaaactatacacttatagggggggcggctaagcctcccggttttttatttgtccccggaannnnnnnnnnnnnnnnnnnnnnnnnnnnnnnnnnnnnncgnnnnnnnnnnnnnnnnnnnnnnnnnnnnnnnnnnncagtcgacggtaccggacatatgcccgggaattcggccattacggccgggagaactcctaggctcaagcgatcttcctgcctccacctctggagtagctaggactataggtgcatgccattgtgcctggataannnnnnnnnnnnacgtagaggaagagtcttgcgatgttgtcaaggcgggtcttgaactccgggcctcaagccatcctctggcctgggtctcacaaaaggctaggattataggtatgaaccacaggtgccgtggccaattcatagggtttaatgatcaagttacattaaatatcacctcgtatgggtatggatccttttagactagttcgtgtgtgaaacacttttggaactccgtgacaaagcacacataggggacgtacctctcttaaatttttatgccataagacattttcaacaaaagctccgggccataaccgttcttgtcttatacccattcacattgttctcccagacactaaaagaattcagtgagtgccaacgtggggaaatccgtggtttcaattatcaactcagtgtgggcacagtgactaagtgataaccagacggtctctaacaagtacgggcatgcagatttgcgccatctggtcatctactgcaggcaaagcggggtaaggccgtcacttttcaccacgaatacgggcagcaatggaggggctctcggaaaaacgagttaacggataccactccaatgtgcagcaatcgggccaaatggggcgccaaacaacaaagtaatataatacgacaagctccgacagagtacactactaccagcgggacgtccctgggaccaagtgagcggcacaaggacgccacataagagaagactatcatagactccaccaggccaacatggagggacaggggcaccacaggacggaaactggcaaccacgaagcgatacaggagaggcgcacagca

SEQ ID NO: 114105 - DNA, 839 bp, Homo Sapiens
  misc_feature (53)..(93): n is a, c, g, or t
  misc_feature (96)..(130): n is a, c, g, or t
  misc_feature (402)..(467): n is a, c, g, or t
  misc_feature (525)..(652): n is a, c, g, or t
aaaaaaaccccttgttttgtaatctatcactaatgggcgctactcgcgtatannnnnnnnnnnnnnnnnnnnnnnnnnnnnnnnnnnnnnnnncgnnnnnnnnnnnnnnnnnnnnnnnnnnnnnnnnnnncagtcgacggtaccggacatatgcccgggaattcggccattacggccgggcagatgttatcctttgaagctcagctagtctgtggccagaccaccctgatcactcccgatctcatctgaagctcacctcaactccttccttctccaggtcacctttgtcaccttttttaatctgcatcgggaatggcaaacaggtttcgttttatgtaaaccaagtccatgccattgacaatggttgcatagagaattctattttatttatttattccagannnnnnnnnnnnnnnnnnnnnnnnnnnnnnnnnnnnnnnnnnnnnnnnnnnnnnnnnnnnnnnnnnagggctcaaacagtcctcctgcctcaatttctgagtagctgggactacacgcgtgcannnnnnnnnnnnnnnnnnnnnnnnnnnnnnnnnnnnnnnnnnnnnnnnnnnnnnnnnnnnnnnnnnnnnnnnnnnnnnnnnnnnnnnnnnnnnnnnnnnnnnnnnnnnnnnnnnnnnnnnnnnnnnnngtgtgagccaccgtgcctcgccttgcatggagaattctgaaagcctgcccatgttcaaaggaaaaagagtcctgtgatcatagtggtttttgccataggcaaaagaaggaaaagtgacagaatgaatgtgacatatttttcatccagattataatgattattttagacctgtgattccagtaattcc

SEQ ID NO: 114106 - DNA, 934 bp, Homo Sapiens
  misc_feature (627)..(627): n is a, c, g, or t
cgcggacgtggaagaacctcgtctgcggaggaaaaggtagatgttaaatggtaactacgcgcgaggttctgaggagccctgggaacaggaaggagaaaagaataccaaaagtgacaacagtttgccaatcgcagtctttaatctgataaagcggttatctcgtcttgagtcccaggtgccgagtcaatccccatacacagccgccgccattgcctcgagtccttgtgtctgactgtctgttcctgctgctgtatgacacagcacctcgaggcaaggaaataagaaaactgcctctgatccaagcagagaaggtagatctgtccccaggtctgtggaactgtcagttgtgaacgttttgtacaatggtcacccaacttaaaactaggaaattacgaagcaagagaaaattgccctgtatctgttaaggtctgcctgtagatctgctgtagggcttgtcaccattggaagcaaggtcctacttcagtggcagatctggtggccttggagtggctgaagaccatcagcctccacagggctgggcccatgcacagccatccttccctaccttgaaactcctgtagcctgtaataccagctgtgggtactactctcagtgtcggagatcatncaaaatacaattggaccagaccctttggaaataattctgtgtctcaaatgccctgtggagcacacacttaactcagttgatggctatggaattttccaacatcagctaaagagaagggttctggagacagcctgtatttcttggatcttggcttccttccatcttcaaagccaacgatgaccagtgtagactttttatgctgcttcaatttgacatggagtccctgccttccacatttaaagtacccttgcaattacattggccaagataacccagaataattttaaattaaactcagttgaaaagc

SEQ ID NO: 114107 - DNA, 1060 bp, Homo Sapiens
cggcagtaactctaacggtcctaaggtagcgaggcctgggtggcgaattcggcacgaggcccaggctcagagtagctgctgtttctgagagaacgattcgtaggacagcccctgacgccattcccttttgcccttctttctgcgggcctttccggtacttgagcggtgtccagagcgtggccagttctcgtctatctggctgcctttagggagcggtgcctagcgttggccaatagttggctgtcgaaagtgccggcccccgcgccggcgcctgcagcagccgggtgggaaggctcaagatggcgtgcttgttggagaccccaatccgcatgagcgtcctttcggaccaggaatgaaagttactgggagataacttcgaaggattttgcaacaaattcgagctgtccgactctgagaatggaagtaacagctagcagtcgccactatgttgacaggctatttgaccctgatccccagaaagttctacaaggtgtcatagacatgaaaaatgctgtaattggaaacaacaagcagaaagccaatctcatcgttttaggagctgttccaagattgttgtacttgcttcagcaagaaacctcaagcacagagctgaaaactgaatgtgcagtggtgttgggaagtcttgctatgggtactgaaaacaatgtcaagtctctactggactgccatattatccctgccttattgcaaggactactgtccccagacctgaagtttattgaagcttgccctccgatgacgtgcgtaccatcttcaccagtcctgtcacatccacgaggagctactgtatacagatgccacagtgataccacacctcatggcactgcttagcaggtcccgctatacccaggagtacatctgtcagatcttctcacactgctgtaaagggccagatcatcaaacaattttatttaaccccggggcaggtcaaaatattggctcacctactaaacctcacctggccctacaaagattctcgaatggcgaggccacttggaaaggggtttccctccggtcttttaccgcttttttggaaaaa

SEQ ID NO: 114108 - DNA, 1226 bp, Homo Sapiens
gctggtaccggtccggaattcccgggatatcgtcgacccacgcgtccggcattcagcaggtgttacagacccaggacccgcctgccacaatggagctggccgtggctgtcctgagggacctcctccgatatgcagcccagctgcctgcactgttccgggacatctccatgaaccacctccctggccttctcacctccctgctgggcctcaggccagagtgtgagcagtcagcattggaaggaatgaaggcttgtatgacctatttccctcgggcttgtggttctctcaaaggcaagctggcctcattttttctgtctagggtggatgccttgagccctcagctccaacagttggcctgtgagtgttattcccggctgccctctttaggggctggcttttcccaaggcctgaagcacaccgagagctgggagcaggagctacacagtctgctggcctcactgcacaccctgctgggggccctgtacgagggagcagagactgctcctgtgcagaatgaaggccctggggtggagatgctgctgtcctcagaaaatggtgatgcccatgtccttctccagcttcggcacaggttttcgggactggcccgctgcctagggctcatgctcagctctgagtttggagctcccgtgtccgtcccctgtgcaggaaatcctggatttcgtctgccgggaccctcagcgtcagtagcaaaaaatattagcttgcatggagaaggtccccctgcgggctgctgctgcttgccctcctatccacctttgaggcccttggacctggcttgtctggcactcattcctcgccggtgtgggaagccgggcttctttgcccctttttggggatccctggatcggggccgccttgcctttcccccagggtccctccaatttccttggaagccatccggtacgaaaaatttcccttctcctccagggccagggaaaagaggccttaatcggcacgtgtatccggaaccaaaggggggtatgccgaatatattagaaccttgtgggggttgccaagtgttttggggcggccctctcggggcgggaaattgcttttcacgggaagagaagccctcttgtggaagagggccctctggttcacccacactttgttccgacgcaatatttcccccccggccagggttgagaggccccttaaacccgcgggctagccccccggtgggggggagactccttgatggagga

SEQ ID NO: 114109 - DNA, 870 bp, Homo Sapiens
  misc_feature (767)..(767): n is a, c, g, or t
  misc_feature (802)..(803): n is a, c, g, or t
  misc_feature (857)..(857): n is a, c, g, or t
ctggtaccggtccggaattcccgggatatcgtcgacccacgcgtccgcgactctggaggaagactggagcctttgcggcggcgctgcccctcccctggtccccgcgagctcggagggcccggctggtgctgcgggggccccgggaggttgaaaactaagcatggggaagagctgcaaggtggtcgtgtgtggccaggcgtctgtgggcaaaacttcaatcctggagcagcttctgtatgggaaccatgtagtgggttcggagatgatcgagacgcaggaggacatctacgtgggctccattgagacagaccggggggtgcgagagcagcacagatagcagagagtcttttcagcgtgtggagctgctcaagaaggagattgacaaatccaaggacaagaaggaggtcaccatcgtggtccttggcaacaagtgtgacttacaggagcagcggcgtgtagacccagatgtggctcagcactgggccaagtcagagaaggtgaagctgtgggaggtgtcagtggcggaccggcgctccctcctggagccctttgtctacttggccagcaagatgacgcaaccccagagcaagtctgccttccccctcagccggaagaacaagggcagccgctccttggatggctgaagagctgccgttcctctttcacgatcccagccccatttcagtgtctggggctctggtagatgtgttgagggcaaagtagaggacaagctgtctttcccagtcagccaggggagctccccgccnagggccacgccccagccacttttgctccctctcannctctggggaaagtgcaaaatactcctttgggttgacatcccccttttcctcagnccccttccccagc

SEQ ID NO: 114110 - DNA, 920 bp, Homo Sapiens
  misc_feature (833)..(833): n is a, c, g, or t
  misc_feature (840)..(840): n is a, c, g, or t
  misc_feature (864)..(864): n is a, c, g, or t
ttaggggggagagagtatgaagtcgacggcgcgccgaattcggcacgagggctgaggttcagaaggtccagctcactggagagccagtgcccatggcccgctgcgtctccacagggggtcgcccgccagcccaaatcacctggcactcagacctgggcgggatgcccaatacgagccaggtgccagggttcctgtctggcacagtcactgtcaccagcctctggatattggtgccctcaagccaggtggacggcaagaatgtgacctgcaaggtggagcacgagagctttgagaagcctcagctgctgactgtgaacctcaccgtgtactaccccccagaggtatccatctctggctatgataacaactggtaccttggccagaatgaggccaccctgacctgcgatgctcgcagcaacccagagcccacaggctataattggagcacgaccatgggtcccctgccaccctttgctgtggcccagggcgcccagctcctgatccgtcctgtggacaaaccaatcaacacaactttaatctgcaacgtcaccaatgccctaggagctcgccaggcagaactgaccgtccaggtcaaagagggacctcccagtgagcactcaggcatgtcccgtaacgccatcatcttcctggttctgggaatcctggtttttctgatcctgctggggatcgggatttatttctattggtccaaatgttcccgtgaagtccttggcctgtcatctgtgtcctcgagtacagacatgcagcgctcagctatggcatgtccctatcactgtagcaaagaactctccagatcacacaagcacaggaanctcgatnaggaaaacgactgcagactgctcnatgaccacatgataacctcagacacctctgcactagacggagatagtcaacccttg

SEQ ID NO: 114111 - DNA, 1002 bp, Homo Sapiens
  misc_feature (80)..(114): n is a, c, g, or t
aagcatctatagatcatatagggcgctccgcgttaatcgaacgacgagcgcagcgagtcagatgagcgaggaagcggcgnnnnnnnnnnnnnnnnnnnnnnnnnnnnnnnnnnncagtcgacggtaccggacatatgcccgggaattcggccattacggccggggagtagatcccgctgtatagacaggagaacgaaaagaactatcttcatctgagagaggctaaaatgttttcagctaggaacaaatcttcctggtcgaaagttagtaggatatgcctgctctttggcctgatgaccaattttaacttagagctttgtcttttaaatttggtctgccccaagtttggggaaatttttcatatttcaattccaagcttatttgggcagagataggacaggtcatttccatgtatgcataataatcctgcaaagtacaggtacttggtctaagaaacatgggcaagcaggttaaacggttcggtaaacttggaaatatatggtctaacggtttaagcagaatgggacaaagactaacgatcggttaacaaattaacaacttttccttctttatacctatcaggaccattggacagtgtgggggagttgggtcatagggtcactcggagctctactggatcacaaggttcgaaattaatggagggacaaccatttgtgacaggcacctacagctctaagagtgtacacactcacccttaaacaacgttaacctccataaaaaggggtgttacccgagtgtgaaccatcgtgtcacagcagcgcgctaaacaaacctgcgaacgcttctcgtgcgcaccccctggatagtgctcattcaacgggaagcaaacttgagggcacaccttgtggaacactgttccgcagttattcaccagggtataccctcttctacccttgggcaatcacacaacacacaaaggacatttgttaccacgtgggagaccacagaggtgggccaccttgtaattaacccagaacgtat

SEQ ID NO: 114112 - DNA, 833 bp, Homo Sapiens
agagtatgaagtcgacggcgcgccgaattcggcacgaggcctggtcattgctggtgtcttctggatccaccggcttatcaagttcatctataacatttgctgctactgggagatccactccttctacctgcacgctctgcgcatccctatgtctgcccttccgtattgcacgtggcaagaagtgcaggcccggatcgtgcagacgcagaaggagcaccagatctgcatccacaaacgtgagctgacagaactggacatctaccaccgcatcctccgtttccagaactacatggtggcactggttaacaaatccctcctgcctctgcgcttccgcctgcctggcctcggggaagctgtcttcttcacccgtggtctcaagtacaactttgagctgatcctcttctggggacctggctctctgtttctcaatgaatggagcctcaaggccgagtacaaacgtggggggcaacggctagagctggcccagcgcctcagcaaccgcatcctgtggattggcatcgctaacttcctgctgtgccccctcatcctcatatggcaaatcctctatgccttcttcagctatgctgaggtgctgaagcgggagccgggggccctgggagcacgctgctggtcactctatggccgctgctacctccgccacttcaacgagctggagcacgagctgcagtcccgcctcaaccgtggctacaagcccgcctccaagtacatgaatgcttctgtcactcttttgaactgctggcaagatggagcttctcgctgctcatcctgctgtgctatggcccacattatgacaaatggtggcgggaacggcc

SEQ ID NO: 114113 - DNA, 1180 bp, Homo Sapiens
  misc_feature (393)..(536): n is a, c, g, or t
cgactctgtaccctttccaggacgaggaggagcacggcgtcgagggcttggagagcgtcccggaggagggcgtccaggaggcatggggctgctgcggacgctggtgcggcgaggggtgagcgttgagaaggcgcaggagactgaccacaatggctggaccagccttaatgtcgcctgctaccacggctttgtggatataccgtggtggccttagctgagtaaccccacactgacgtcaactggcaggacagggaggggaacgcagccctaaatacagctgcacaggcaggagctgcctctggccccatgggcaccgttgccttggacactggctctcagccttgtgcttcctggtcagcatcacgtgggctggttcatttgagctttaacacnnnnnnnnnnnnnnnnnnnnnnnnnnnnnnnnnnnnnnnnnnnnnnnnnnnnnnnnnnnnnnnnnnnnnnnnnnnnnnnnnnnnnnnnnnnnnnnnnnnnnnnnnnnnnnnnnnnnnnnnnnnnnnnnnnnnnnnnnnnnnnnngagagctttgagcttttcatacctgatgatgtccaggaacccttctcagtaggcactgaagaccatcagcagaatcacagaccccaggagagatgtcgtcagacagacacagtaggcatcaccgaattaaagtgaaatgaagaaaggaactgagcatctgtttcatgacagttcgtggctgttttactaaagaggctatcctggcacagtcaggcacgctaatcatcaccaactactttgttgaactacgttcagggtcttgatcttgaaggagggacgcgttcgggttgaaatccggccatgcagggtcgaacggatcgcatcggagccctgagctaacaggggcgggtgtccacgcgagggcccccgccgtgggattcccagaggagtggccacttatacgtccgcctcatcagaggctcctggagcgcccatgccgggagctgttggggaaaaactaccagcttgactgccccgctccccgagagccgcaaaagcccgagggctccaagaactgcctgcagaggctcagggactgcgagctgtccgcgctgacgccgcgccgacgcgtggtcgacgatatcccgggattccgaccgtaccagcctgcttttttaaccactggtctatatgtcaacatagct

SEQ ID NO: 114114 - DNA, 928 bp, Homo Sapiens
  misc_feature (306)..(343): n is a, c, g, or t
accccgggggggccaaagggtttctggggaggggtgttcctgaaaaagttccctgcttggatcccgggaaagggtccctttagggccaaaatcccaattccaccttggggagccccggaagataattttatcattcccgggccccggtccccctttccccggggggattccattttcctagccactctcttccactgtcctttgcccacccccctgggggaaaaaatgtatttttcttttgtgaatatttcctgaaactgcggggcatagaaaccacaaactgctcagctgacaaaagggggaagnnnnnnnnnnnnnnnnnnnnnnnnnnnnnnnnnnnnnnccagatggggagacgatgtggggagagagcgtgctgggagcctcagtagccggcctcctcctggtagtaagggggatattcagggacctcccccgggtccgggcagtcgccggtgcccgagggagccccatcggccactgtgccttgcgggcagtacttggggtcatatatctgccggcccaggccgaagacctggccgctctggttggcgccctgcgtgtagcccatctgcagggacatggaggagttgtcacacttgtcggttcccagcttggtatcatagatgtgccgccgggtcccgggagccgtcatgcccacctggctggcgcacttgttcgtgcccatctggaggctgatggtcgagtggtccatggggggcaggatatggttcttggggtcatagagatgcctcctcgtgccgtacgcagtcatgcccgactggctggcgcatttgttggtgcccatctgcagcccgatgacgcactggccagccttcatggtggcatcgtcgaaattccgctcctgcttctccgagtacttgaccctcgtgccgaattcgccacccaggcctcgctacctaggacc

SEQ ID NO: 114115 - DNA, 717 bp, Homo Sapiens
cgtcctgtgcaggcccgtcccgccgcccgcccgccagccatgagctccacgcagttcaacaagggcccctcgtacgggctgtcggccgaggtcaagaaccggctcctgtccaaatatgacccccagaaggaggcagagctccgcacctggatcgagggactcaccggcctctccatcggccccgacttccagaagggcctgaaggatggaactatcttatgcacactcatgaacaagctacagccgggctccgtccccaagatcaaccgctccatgcagaactggcaccagcatagaaaacctgtccaacttcatcgaaggccatggtcatgctacggcgatgaaccctgtggacctgttcggaggccaacgaacctgttggagagtgggaacatgacgcaggtgcaggtgtctcttctcgccctggcggggaagatgggcaccaacaaatgcgccagccagtcgggcatgactgcctacggcacgagaaggcatctctatgaccccaagaaccatatcctgccccccatggaccactcgaccatcagcctccagatgggcacgaatcaagtgcgccagccaggtgggcatgacggctcccgggacccggcggcacatctatgataccaagctgggaaccgacaagtgtgacaactcctccatgtcccagcagatgggctacacgcagggcgccaaacagagcggacaggtctacgg

SEQ ID NO: 114116 - DNA, 872 bp, Homo Sapiens
  misc_feature (774)..(793): n is a, c, g, or t
cggctaggaggaggcatgggtgtttaattcggcacgaggcaggcgtcccgtgctcagcggtgttggaacttcgttgcttgcttgcctgtgcgcgcgtgcgcggacatggcctcaaacgattatacccaacaagcaacccaaagctatggggcctaccccacccagcccgggcagggctattcccagcagagcagtcagccctacggacagcagagttacagtggttatagccagtccacggacacttcaggctatggccagagcagctattcttcttatggccagagccagaacacaggctatggaactcagtcaactccccagggatatggctcgactggcggctatggcagtagccagagctcccaatcgtcttacgggcagcagtcctcctaccctggctatggccagcagccagctcccagcagcacctcgggaagttacggtagcagttctcagagcagcagctatgggcagccccagagtgggagctacagccagcagcctagctatggtggacagcagcaaagctatggacagcagcaaagctataatccccctcagggctatggacagcagaaccagtacaacagcagcagtggtggtggaggtggaggtggaggtggaggtaactatggccaagatcaatcctccatgagtagtggtggtggcagtggtggcggttatggcaatcaagaccagagtggtggaggtggcagcggtggctatggacagcaggaccgtggaggtcgccggcaggtgtggccagtggtnnnnnnnnnnnnnnnnnnnnggtggttacaaccgcagcagtggtggctatgaacccagaggtcgtggaagtggccgggaggccgcaggtggctgggcgg

SEQ ID NO: 114117 - DNA, 1026 bp, Homo Sapiens
  misc_feature (183)..(202): n is a, c, g, or t
  misc_feature (707)..(769): n is a, c, g, or t
aggctagtacgaggctggttgtgaatcggcacgaggggcgtggtgctcagcggtgttggaacttcgttgcttgcttgcctgtgcgcgcgtgcgcggacatggcctcaaacgattatacccaacaagcaacccaaagctatggacagcaggaccgtggaggccgcggcaggggtggcagtggtnnnnnnnnnnnnnnnnnnnntggtggttacaaccgcagcagtggtggctatgaacccagaggtcgtggaggtggccgtggaggcagaggtggcatgggcggaagtgaccgtggtggcttcaataaatttggtggccctcgggaccaaggatcacgtcatgactccgaacaggataattcagacaacaacaccatctttgtgcaaggcctgggtgagaatgttacaattgagtctgtggctgattacttcaagcagattggtattattaagacaaacaagaaaacgggacagcccatgattaatttgtacacagacagggaaactggcaagctgaagggagaggcaacggtctcttttgatgacccaccttcagctaaagcagctattgactggtttgatggtaaagaattctccggaaatcctatcaaggtctcatttgctactcgccgggcagactttaatcggggtggtggcaatggtcgtggaggccgagggcgaggaggacccatgggccgtggaggctannnnnnnnnnnnnnnnnnnnnnnnnnnnnnnnnnnnnnnnnnnnnnnnnnnnnnnnnnnnnnnggacagcagcgagctggtgactggaagtgtctaatccactgttaaaatatgaaactctcttggggaatgaatgcacagtgtagggcctaaccgatggccagggggaccgtggctcccctggggtaccaccgggtaacccggggaggacttatcagcggacgggccgggaccgaggtccgggcggtgggaaaagtttccccaaatctcggaacaccgggagaatgcccgaattccccttacacccggggtacacccca

SEQ ID NO: 114118 - DNA, 1182 bp, Homo Sapiens
  misc_feature (572)..(608): n is a, c, g, or t
  misc_feature (913)..(913): n is a, c, g, or t
  misc_feature (1041)..(1088): n is a, c, g, or t
ttggggaattcttaacttattagaccttatatcctacatattataggactttgtaaatttaggctgatatggaaatgtatatttatatcaaatttaaatttttagaatgatggtgctactatattctaattgttaatttgataattgtaattgtaatttgttaatttgttctaataatattttcatgacattattcatttgctgcttggcttgatggcataacaagtatgggttatttaccctgaaaaggaaacagtatcacccttccagaatctctatttacagctacagaagatgcaacacacctgtttctggaccacttccagatcagatgtgatgcatgctttagatcatttactttgatctaggaattactgtctggcatttcgtggtgtagggtaggtgtctccagcactgtataggtgtctggaattgagataagaatcaatttcaatacaaaatacattttttgcttaaagcacgcaaggattctatgaattcaggtaaattcacagggtggaaaacaggaactaatgttatatattcctgtagttatcttcataatgaagcannnnnnnnnnnnnnnnnnnnnnnnnnnnnnnnnnnnngaactgtattttctagaattgaaaaataattcttttagatgatagataagatgtttacatcaacctgcaaaaagtcaatgttgaagaggtctcattgtatctcacagaattttgatttgcctactcacccacaggagacatttctgggacagtagcaacataaagtccatcccaaaactttggctcattatcattaatatcctgcactttgatgatgaattctgattcaagctccaggggctttctgggtttctatgtccacagccctgagcacgaaaagtgtaaaaaggtttttcttctctatntaggctccttattgcatgaatgtcccctgtggtttcatcaatggtaaaaacggtgccagcgccatctcctgagagggtgtatttcgcagtgccctctcccttgtttaagtcggaatggagctttaggnnnnnnnnnnnnnnnnnnnnnnnnnnnnnnnnnnnnnnnnnnnnnnnncaccattaaaaggatgttgccaaattaaaaagtcataatttgcaatacaattcctttaatcaaaaatgttaaataaaaatcttatggttaatgt

SEQ ID NO: 114119 - DNA, 452 bp, Homo Sapiens
  misc_feature (305)..(352): n is a, c, g, or t
acccacaggagacatttctgggacagtagcaacataaggtccatcccaaaactttggctcattatcattaatatcctgcactttgatgatgaattctgattcaggctccaggggctttctggtttctatgtccacagcctgagcacgaagagtgtagaaaggtttttcttctctatctaggctccttattgcatgaatgtcccctgtggtttcatcaatggtaaaaacggtgccagcgccatctcctgagagggtgtatttcgcagtgccctctcccttgtctaagtcggaatggagctttaggnnnnnnnnnnnnnnnnnnnnnnnnnnnnnnnnnnnnnnnnnnnnnnnncaccattaaaaggatgttgccaaattaaaaagtcataatttgcaatacaattcctttaatcaaaaatgttaaataaaaatcttatggttctgttaaaaaa

SEQ ID NO: 114120 - DNA, 1932 bp, Homo Sapiens
ttggaagcgctccaaggagctcaacctggtgctggacgagatcaagagggccgtgtcagaaaggcaggcgctgcgagacggagacggcaatcgcacctggggccgcctaacagaggacccccgattgaagccgtggaacggctcacaccggcacgtgctgcacctgcccaccgtcttccatcacctgccacacctgctggccaaggagagcagtctgcagcccgcggtgcgcgtgggccagggccgcaccggagtgtcggtggtgatgggcatcccgagcgtgcggcgcgaggtgcactcgtacctgactgacactctgcactcgctcatctccgagctgagcccgcaggagaaggaggactcggtcatcgtggtgctgatcgccgagactgactcacagtacacttcggcagtgacagagaacatcaaggccttgttccccacggagatccattctgggctcctggaggtcatctcaccctccccccacttctaccctgacttctcccgcctccgagagtcctttggggaccccaaggagagagtcaggtggaggaccaaacagaacctcgattactgcttcctcatgatgtacgcgcagtccaaaggcatctactacgtgcagctggaggatgacatcgtggccaagccccaactacctgagcaccatgaagaactttgcactgcagcagccttcagagggactggatgatcctggagttctccccagctgcgcttcatttggtaagatgttcaagtcgctggacctgagcctgattgtagagttcattctcatgttctaccgggacaagcccatcgactggctcctggaccatattctgtgggtgaaatctgcaaccccgagaaagatgcgaagcactgtgaccggcagaaagccaacctgcggatccccttcaaaccgtccctcttccagcacgtgggcactcactcctcgctggctggcaagatccagaaactgaaggacaaagactttggaaagcaggcgctgcggaaggagcatgtgaacccgccagcagaggtgagcacgagcctgaagacataccagcacttcaccctggagaaagcctacctgcgcgaggacttcttctgggccttcacccctgccgcgggggacttcatccgcttccgcttcttccaacctctaagactggagcggttcttcttccgcagtgggaacatcgagcacccggaggacaagctcttcaacacgtctgtggaggtgctgcccttcgacgtaagttcggctccttctacaagggagtggcagagggagaggtggacccagccttcgcccctctggaagcactgcgcctctcgatccagacggactccccctgtgtgggtgattctgaacgaggtgaggctgggcagggccaggccaggcacggggagcagccagggagaccctggcggagctcagaggccctgctgaccctgggtccggctcttccagatcttcctgaaaaaggccgactaagctgcgggcttctgagggtaccctgtggccagccctgaagcccacatttctgggggtgtcgtcactgccgtccccggagggccagatacggccccgcccaaagggttctgcctggcgtcgggcttgggccggcctggggtccgccgctggcccggaggccctaggagctggtgctgcccccgcccgccgggccgcggaggaggcaggcggcccccacactgtgcctgaggcccggaaccgttcgcacccggcctgccccagtcaggccgttttagaagagcttttacttgggcgcccgccgtctctggcgcgaacactggaatgcatatactactttatgtgctgtgttttttattcttggatacatttgatttttcacgtaagtccacatatacttctataagagcgtgacttgtaataaagggttaatgaag

SEQ ID NO: 114121 - DNA, 1019 bp, Homo Sapiens
  misc_feature (130)..(242): n is a, c, g, or t
gtagcgaggcctgggtggcgctgatatctgcagtgagcctgatacctgcctctgcccttctgagcctgttcctcttccctgagtacagggcacaaagcttgcgccctgaggggcggccggcgcgctcccnnnnnnnnnnnnnnnnnnnnnnnnnnnnnnnnnnnnnnnnnnnnnnnnnnnnnnnnnnnnnnnnnnnnnnnnnnnnnnnnnnnnnnnnnnnnnnnnnnnnnnnnnnnnnnnnnggccatgcagcctcggccccgcgggcgcccgccgcgcacccgaggagatgaggctccgcaatggcaccttcctgacgctgctgctcttctgcctgtgcgccttcctctcgctgtcctggtactgcggcactcagcggccagaaaggcgacgttgtggacgtttaccagcgggagttcctggcgctgcgcgaatcggttgcacgcagctgagcaggagagcctcaagcgctccaaggagctcaacctggtgctggacgagatcaagagggccgtgtcagaaaggcaggcgctgcgagacggagaccgcaataccacctggggccgactaacagaggacccccgattgaagccgggcaacggctcacaccggcacgtgctgcacctgcccaccgtcttccatcacctgccacacctgctggccaaggagagcagtctgcagcccgcggtgcgcgtgggccaggccgcaccggaggagaaggaggactcggtcatcgtggtgctgatcgccgagactgactcacagtacacttcggcagtgacagagaacatcaaggccttgttccccacggagatccattctgggctcctggaggtcatctcaccctccccccacttctaccctgacttctcccgcctccgagagtcctttggggaccccaaggagagagtcaggtggaggaccaaacagaacctcgattactgcttcctcatgatgtacgcgcagtccaaaggcatctactacgtgcagctggaggatgacatcgtggcaagccaact

SEQ ID NO: 114122 - DNA, 1045 bp, Homo Sapiens
  misc_feature (130)..(242): n is a, c, g, or t
gagcgaggcctgggtggcgaattcggcacgaggtgagcctgatacctgcctctgcccttctgagcctgttcctcttccctgagtacagggcacaaagcttgcgccctgaggggcggccggcgcgctcccnnnnnnnnnnnnnnnnnnnnnnnnnnnnnnnnnnnnnnnnnnnnnnnnnnnnnnnnnnnnnnnnnnnnnnnnnnnnnnnnnnnnnnnnnnnnnnnnnnnnnnnnnnnnnnnnnggccatgcagcctcggccccgcgggcgcccgccgcgcacccgaggagatgaggctccgcaatggcaccttcctgacgctgctgctcttctgcctgtgcgccttcctctcgctgtcctggtacgcggcactcagcggccagaaaggcgacgttgtggacgtttaccagcgggagttcctggcgctgcgcgatcggttgcacgcagctgagcaggagagcctcaagcgctccaaggagctcaacctggtgctggacgagatcaagagggccgtgtcagaaaggcaggcgctgcgagacggagacggcaatcgcacctggggccgcctaacagaggacccccgattgaagccgggaaacggctcacaccggcacgtgctgcacctgcccaccgtcttccatcacctgccacacctgctggccaaggagagcagtctgcagcccgcggtgcgcgtgggccagggccgcaccggagactgactcacagtacacttcggcagtgacagagaacatcaaggccttgttccccacggagatccattctgggctcctggaggtcatctcaccctccccccacttctaccctgacttctcccgcctccgagagtcctttggggaccccaaggagagagtcaggtggaggaccaaacagaacctcgattactgcttcctcatgatgtacgcgcagtccaaaggcatctactacgtgcagctggaggatgacatcgtggccaagccccactacctgaacaccatgaaagaacttttgcactgcagcagcccttcgaaggactggaatggatcctt

SEQ ID NO: 114123 - DNA, 982 bp, Homo Sapiens
  misc_feature (737)..(775): n is a, c, g, or t
ttggatggagtcgggcaagatggcgcctcccaagaacgctccgagagatgccttggtgatggcacagatcctgaaggatatgggaatcacagagtatgaaccaagggttataaatcaaatgttggaatttgctttccgttatgtgactacaattctggatgatgcaaaaatttattcgagccatgctaagaaacctaatgttgatgcagatgatgtgagactggcaatccagtgtcgtgctgaccaatcttttacctctcctcccccaagagattttttactggatatcgcaaggcagaaaaatcaaacccctttgccactgattaagccatatgcaggacctagactgccacctgatagatactgcttaacagctccaaactataggctgaagtccttaattaaaaagggacctaaccaagggagactagttccacgattaagtgttggtgctgttagtagcaaacctactactcctactatagcaaccccacaaacggtgtctgtcccaaataaagttgcaactccaatgtcagtgacaagccaaagatttacggtgcagattccaccttctcagtccacacctgtcaaaccagttcctgcaacaactgcagttcaaaatgttctgattaatccatcaataatcgggcccaaaaacattcttattaccagtaatatgatgtcatcacaaaatactgccaatgaatcatcaaatgcattgaaaagaaaacgtgaannnnnnnnnnnnnnnnnnnnnnnnnnnnnnnnnnnnnnnaatctgtaatctagccttgctgaatgtaacatgtatacttggtcttgaattcattgtactgatattaaacatgcatgctggatgttttcaagttgtgttttagaaaactaataataatgagtaaacacagttaccatacttttcaattgaaatgaaggtttttcatcagccttaaaagtgtaagaaaaataaagttgtcattcattc

SEQ ID NO: 114124 - DNA, 1074 bp, Homo Sapiens
  misc_feature (906)..(944): n is a, c, g, or t
ggggtcgcggcggggaccatgttgcttccgaacatcctgctcaccggtacaccaggggttggaaaaaccacactaggcaaagaacttgcgtcaaaatcaggactgaaatacattaatgtgggtgatttagctcgagaagtctgatcatcggatatcatggagtctggcaagacggcttctcccaagagcatgccgaaagatgcacagatgatggcacaaatcctgaaggatatggggagtacagaatatgagccaagagttataaatcagatgttggagtttgccttccgatatgtgaccacaattctagatgatgcaaaaatttattcaagccatgctaagaaagctactgttgatgcagatgatgtgcgattggcaatccagtgccgcgctgatcagtcttttacctctcctcccccaagagattttttattagatattgcaaggcaaagaaatcaaacccctttgccattgatcaagccatattcaggtcctaggttgccacctgatagatactgcttaacagctccaaactataggctgaaatctttacagaaaaaaggcatcaacttctgcgggaagaataacagtcccgcggttaaagtgttggttcagttactagcagaccaagtactcccacactaggcacaccaaccccacagaccatgtctgtttcaactaaagtagggactcccatgtccctcacaggtcaaaggtttacagtacagatgcctacttctcagtctccagctgtaaaagcttcaattcctgcaacctcagcagttcagaatgttctgattaatccatcattaatcgggtccaaaaacattcttattaccactaatatgatgtcatcacaaaatactgccaatgaatcatcaaatgcattgaaaagaaaacgtgaannnnnnnnnnnnnnnnnnnnnnnnnnnnnnnnnnnnnnnaatctgtaatctagccttgctgaatgtaacatgtatacttggtcttgaattcattgtactgatattaaacatgcatgctggatgttttcaagttgtgttttagaaaactaataataatggagtaaacaca

SEQ ID NO: 114125 - DNA, 1241 bp, Homo Sapiens
  misc_feature (222)..(285): n is a, c, g, or t
  misc_feature (1168)..(1185): n is a, c, g, or t
  misc_feature (1217)..(1217): n is a, c, g, or t
actttgtacaaaaaagttgggagccccgaatagaccagttgtggagaggcctgggtggggtggctggcagggagggcaggccaagcccagtttctgcccacagtcacctcgaggtgactgtccagggctttgggcaccttcccgggagggggacggccgcccaccctgagtggtgttggaagctgggctctcctggatgccctgacccagctgcctggggannnnnnnnnnnnnnnnnnnnnnnnnnnnnnnnnnnnnnnnnnnnnnnnnnnnnnnnnnnnnnnncctcagcctgtctggcatagatccatgttccctagcccctggcacaggtgcctctgactggaggaggccccacctgtggcccgggagctgctctgggggttgataaagggcagcattattgggtcctgggaaggagcgggcgtgaggccagctgaggcatggtgacccctgggaaggagcgggcgtgaggccagctgaggcatggtgaccccctgggaaggagcgggcgtgagcccagctgaggcatggcgacccctgggaaggagcgggcgtgaggccagctgaggcatggtgacccctgggaaggagcgggcgtgaggccagctgaggcatggtgacccctgggtatgggggacttgggggccgcaccttggtttgcccagggcccctcctgcaccacgggccacatgcggaggacggcgtgggataggctccctgggtccacagcttctgcccgtgtatggggaaccctccttggtcagggctgcaggctctgggcagatggggcaggaaccctgaggctcccgcgccctcccatggcctctgatgtgggacactggagcgaggcacgattctgaaggactccatggatctgggaggatgaggcccacctccggttggtggccaaagccgtccttgcggggccggctgcttcacggacactctccgggtcgggctggtgggccccatcgtgggtgggaagtcgcctgagcctgggccgcccttgagcttctcccagtcttgactttccagagggtccgtggctgtggtcatggtcggggcaggtggaaaatgctgcatggaaacctgatcctgtcaccttggagtaaatgatgatgtcgccggcttctcgccacgtctaaaggataaatgcatttgaagnnnnnnnnnnnnnnnnnngaccgcgtatgcggccgcaagcttattccctnttagtgagggttaattttagccaa

SEQ ID NO: 114126 - DNA, 603 bp, Homo Sapiens
  misc_feature (61)..(102): n is a, c, g, or t
  misc_feature (400)..(422): n is a, c, g, or t
gtgccaagctaaaattaaccctcactacaagggaataagcttgcggccgcatacgcggtcnnnnnnnnnnnnnnnnnnnnnnnnnnnnnnnnnnnnnnnnnncaaacatactttcttggttttctaatggagtatatagtttagtcatttcacagactctggcctcctctcctgaaatccttttggatggggaaagggaaggtggggagggtccgaggggaaggggaccccagcttccctgtgcccgctcaccccactccaccagtccccggtcgccagccggagtctcctctctaccgccactgtcacaccgtagcccacatggatagcacagttgtcagacaagattccttcagattccgagttgcctaccggttgttttcgttgttgttgttgttgnnnnnnnnnnnnnnnnnnnnnnngaagacagcaataaccacagtacatattactgtagttctctatagttttacatacattcataccataactctgttctctcctcttttttgttttcaactttaaaaacaaaaataaacgatgataatctttactggtgaaaaggatggaaaaataaatcaacaaatgcaaccagtttgtgag

SEQ ID NO: 114127 - DNA, 994 bp, Homo Sapiens
  misc_feature (115)..(117): n is a, c, g, or t
  misc_feature (213)..(215): n is a, c, g, or t
  misc_feature (289)..(289): n is a, c, g, or t
  misc_feature (893)..(928): n is a, c, g, or t
  misc_feature (960)..(960): n is a, c, g, or t
gccgggcgctgtacaccaaggtcacatcccaccgggcaaaaatcaggatgcgattcccccctaggctttccccatgcgttgcgccaccggctgttcacccggggccttttcgggnnnttcagccccagggcccaggacatatggggctcaggggcaaggaaccagtggatggggctctgcccaggaacgctggcctcgggaatgggggaaccnnncctgccccaaccgggctcagagcccctcccaactgtacaaccagggctcgggtcaggactccccgaaatcaggncaccctcctgccccactgcggagatccccaacgggccagacctagcttggaaactttcttccacctggctggccaggaagccagcaaacagagatgatgactcggaatgatgggctattcggaaatggctagggaaacaactgtttccctactgtcctggcgggacccacccctgggctaacgggcttcccaaggaagtcctagtggctctggggtcctgaagtccccaaatgggaacctaggctgagagaagcaaggctgtgagggcatccaaagggctgcctcaggttttgttcctgagaacgaagcgtggccccggaggctcaggcgtgctcagtggggccagggccaccagcatgggagtgggcaggggctgccacctgtagggggccagcactgggctccggggacgccagcagaggggccgagaggccatcagcagagtttgtgtcgaggtccagcctcccgtaagcttcgcacagaggcaggtcattagcttcgcaaaggcttgagcttttccaccaccagaaaccccagggagagacaggagcaggcagagaggaaagccaggggaggggagagcaagacagaagcagagttaagnnnnnnnnnnnnnnnnnnnnnnnnnnnnnnnnnnnngaccgcgtatgcggccgcaagcttattccctnttagtgagggttaattttagcttggcactgcccg

SEQ ID NO: 114128 - DNA, 912 bp, Homo Sapiens
tccgggagatcatgagggtgtcttggggtttgggggaagaggaagactgacggtccccccaggagttcaggtgctgggcacggtgggcatgtgagagttttgtcacaagatttgggctcaactctcttgtccaccttggtgttgctgggcttgtgattcacgttgcagatgtaggtctgggtgccccaagctgctggagggcacggtcaccacgctgctgagggagtagagtcctgaggactgtaggacagccgggaaggtgtgcacgccgctggtcagggcgcctgagttccacgacaccgtcaccggttcggggaagtagtccttgaccaggcagcccagggccgctgtgcccccagaggtgctcttggaggagggtgccagggggaagaccgatgggcccttggtggaggctgaggagacggtgaccagggtccccaggccccagaagtccaaaccgtacccccagggtcctaccccaaaagacagtttcgcacagtaatatacggccgtgtcctcggctctcaggctattcatttgcagaaacaccgtgctcttggaattgtctctggagatggtgaaccggcccctcacggagtctgcgtagtatgtgctactagccactaccactaatagctgagacccactccagccccttccctggagcctggcggacccagctcaaggcatagccgctaaaagtgaacccagaggctgcacaggagagtctcagggaccccccaggctgtaccaagcctcccccagactccaacagctgcacctcacactggacaccttttaaaatagccacaagaaaaagccacctcagcccaaactccatggtgagttctctctgttcagtcctgatcaccaaatgaaaacacctgaaaatcccagggctgggctccccaa

SEQ ID NO: 114129 - DNA, 1495 bp, Homo Sapiens
tacaaaaaagttggagaagcccccagagcacaacccctcaccatggactggacctggaggatcctctttttggtgacagcagccacaggtgcccactcccaggtccagcttgtgcagtctggggctgaggtgaagaagcctggggcctcagtgaaggtttcctgcaaggcctctggagacaccctcacaagccatgatatgcattgggtgcgccaggcccccggacaaaggcttgagtggatgggatggatcaacgctggcaaaggtaacacaaaatattcacagaagttccagggcagagtcaacattaccagggacacatccgcgagcacagcctacatggaactgagcaggctgagatctgaagacacggctgtctattactgtgcgaggactacggtgactggccgaacgcgatccaatatctggggccaagggacactggtcaccgtctcctcagcctccaccaagggcccatcggtcttccccctggcaccctcctccaagagcacctctgggggcacagcggccctgggctgcctggtcaaggactacttccccgaaccggtgacggtgtcgtggaactcaggcgccctgaccagcggcgtgcacaccttcccggctgtcctacagtcctcaggactctactccctcagcagcgtggtgaccgtgccctccagcagcttgggcacccagacctacatctgcaacgtgaatcacaagcccagcaacaccaaggtggacaagagagttgagcccaaatcttgtgacaaaactcacacatgcccaccgtgcccagcacctgaactcctggggggaccgtcagtcttcctcttccccccaaaacccaaggacaccctcatgatctcccggacccctgaggtcacatgcgtggtggtggacgtgagccacgaagaccctgaggtcaagttcaactggtacgtggacggcgtggaggtgcataatgccaagacaaagccgcgggaggagcagtacaacagcacgtaccgtgtggtcagcgtcctcaccgtcctgcaccaggactggctgaatggcaaggagtacaagtgcaaggtctccaacaaagccctcccagcccccatcgagaaaaccatctccaaagccaaagggcagccccgagaaccacaggtgtacaccctgcccccatcccgggaggagatgaccaagaaccaggtcagcctgacctgcctggtcaaaggcttctatcccagcgacatcgccgtggagtgggagagcaatgggcagccggagaacaactacaagaccacgcctcccgtgctggactccgacggctccttcttcctctatagcaagctcaccgtggacaaagagcaggtggcagcaggggaacgtcttctcatgctccgtgatgcatgaggctctgcacaaccactacacgcagaaaaaccctctccctgtccccgggtaaatgagtgccattggccggccaagccccccgctcccccgggttctc

SEQ ID NO: 114130 - DNA, 827 bp, Homo Sapiens
gtcggggggtggcagcatgagggagatggggtaggtggagttgagggagatggggtagggtggagttgagggaactgggcagggcacagtcacatcctgggctgggattcgtgtagtgcttcacgtggcatgtcacggacttgccggctaggcactgtgtggccggcagggtcagctggctgctcgtggtgtacaggtccccggaggcatcctggctgggtgggaagtttctggcggtcacgccctgtccgctttcgctccaggtcacactgagtggctcctgggggaagaagccctggaccaggcaggcgatgaccacgttcccatctggctgggtgctgcagaggctcagcgggaagaccttggggctggtcggggatgctgaggagacggtgaccagggctccctggccccagaggtcaaagtggtatccgctagtgtagcaatcactaccacaagaagctctcgcacagaaatacacagccgcgtcctcagatctcagacttgtcaactccatttgggccacgctcgcggatgtgtcactggtaaaggtgactctgccctggaacttccgtgaatattttatgttatcattgccagggttgacccatcccatccactcaagcctttgtccgggggcctggcgcacccaatggagagcatatttagtgaaggtgtatccagaagccttgcaggaaaccttcactgaggccccaggcctcttcacctcagccccagactgcacaagttggacctgggagtggacacctgtggctgctgccaccaaaaagaggatcctccaggtccagtccatggtgaggcgccaa

SEQ ID NO: 114131 - DNA, 853 bp, Homo Sapiens
ttgggagggaaccatggaaaccccagcgcagcttctcttcctcctgctactctggctcccagataccaccggagaaattgtgttgacgcagtctccagacaccctgtctttgtctccaggggaaagagccaccctctcctgcagggccagtcagagtgttagcaacagctacttagcctggtaccagcagaaacctggccaggctcccaggctcctcatctatggtgcatccagcagggccactggcatcccagacaggttcagtggcagtgggtctgggacagacttcactctcaccatcagcagactggagcctgaagattttgcagtttattactgtcagcagtatagtaactggcctcccactttcggcggagggaccaaggtggagatcaaacgaactgtggctgcaccatctgtcttcatcttcccgccatctgatgagcagttgaaatctggaactgcctctgttgtgtgcctgctgaataacttctatcccagagaggccaaagtacagtggaaggtggataacgccctccaatcgggtaactcccaggagagtgtcacagagcaggacagcaaggacagcacctacagcctcagcagcaccctgacgctgagcaaagcagactacgagaaacacaaagtctacgcctgcgaagtcacccatcagggcctgagctcgcccgtcacaaagagcttcaacaggggagagtgttagagggagaagtgcccccacctgctcctcagttccagcctgacccctcccatcctttggcctctgaccctttttccactgggacctacccctattgcggtcctccagctcatctttcacctcaccccctcctcc

SEQ ID NO: 114132 - DNA, 910 bp, Homo Sapiens
ttgggtcaggacacagcatggacatgagggtccccgctcagctcctggggctcctgctgctctggctcccaggtgccaagtgtgacatccagatgacccagtctccctccaccctgtctgcatctgtaggagacagcgtcaccatcacttgccgggccagtcagagtgttaataattggttggcctggtatcagcagaaacctgggaaagcccctaaacttctaatctataaggcgtccagtttggaaggtggggccccatcaaggatcagcggcagtggatctgggacagaattcactctcaccatcaacagcctgcagcctgaagattttgcaacttattactgtcaacagaataacagttacccgtacacgttcggccaggggaccaaggtggagatcaaacgaactgtggctgcaccatctgtcttcatcttcccgccatctgatgagcagttgaaatctggaactgcctctgttgtgtgcctgctgaataacttctatcccagagaggccaaagtacagtggaaggtggataacgccctccaatcgggtaactcccaggagagtgtcacagagcaggacagcaaggacagcacctacagcctcagcagcaccctgacgctgagcaaagcagactacgagaaacacaaagtctacgcctgcgaagtcacccatcagggcctgagctcgcccgtcacaaagagcttcaacaggggagagtgttagagggagaagtgcccccacctgctcctcagttccagcctgaccccctcccatcctttggcctctgaccctttttccacaggggacctacccctattgcggtcctccagctcatctttcacctcacccccctcctcctccttggctttaatatgctaatgttggaggagattgaataaataaag

SEQ ID NO: 114133 - DNA, 1252 bp, Homo Sapiens
  misc_feature (460)..(527): n is a, c, g, or t
  misc_feature (988)..(988): n is a, c, g, or t
cccttcacacccccttcccccaaccctgcttgtgcacatatgcacattatggctcctcgctgagctggtcagttcctggcagggcccctacccaacagcaccgagtgggatgggagcaaggggactgggctggggagaccctgagaaggaaggaggccccagctacgggactgcaggagagaaagagtggggccccccaccttgtccatttcccagagtctctggtagtccccagatccccctgcaactggggatggcgggcgggggtaggaaggcgagtggctgtggcatgctttcccatagccaatcccagggtctggtgatgatcagggttccaaataggggctgtgtccctgtctctgaaaggctgggagcagggcttcattgcacaaaatactgtgggagggccacacgcagggggtggggcccagccagtctgtatacagagatattgcatttnnnnnnnnnnnnnnnnnnnnnnnnnnnnnnnnnnnnnnnnnnnnnnnnnnnnnnnnnnnnnnnnnnnnggcccacacaatatgaggcaggtggggcaggcaggaaagcaggcagaggatgcctcagactcaaggcattgtcaccatcttgtctgagtcgagatccccagcctgggctagctctggacccctggctggccgtggggtagtggtcctgggggctggtatgatggggggtagacctggcctcagtgtgggaggctggcacggccatgctgtccaccggcaactaccaagacagagacagacagaccaagtgaaggagtgatgagagctttgttagcacccagcagacaggccaatgggtgggttgacaggccaaatggctggggtctttgggcaggcagcacggggacaagctgggcaggtgaacatggctcaggcaggtaggtcagacgagtacagtcagggaacgagtatcacttggggttctcccctgtgacgtgggctgtggcatccctgccacgacnagcatgctatgctgaggtccatcgctctactggacttagcactacggtgtccaaccatcgcgcgaaacgctggccatgcctgagtcaaggcaatctacgagaagaccagaacggactggcctcccttttgtagcgtgaatctcctgtagcgcaaatatggaagtagtgtcaggaactttgtggatccgctaccccagatctgaggaagaatggatgtctgcatggcatcgctctgcggagatccgacagcgccccgcacactgc

SEQ ID NO: 114134 - DNA, 450 bp, Homo Sapiens
agccctgctcccagcctttcagagacagggacacagcccctatttggaaccctgatcatcaccagaccctgggattggctatgggaaagcatgccacagccactcgccttcctacccccgcccgccatccccagttgcagggggatctggggactaccagagactctgggaaatggacaaggtggggggccccactctttctctcctgcagtcccgtagctggggcctccttccttctcagggtctccccagcccagtccccttgctcccatcccactcggtgctgttgggtaggggccctgccaggaactgaccattcctccaccctaagccctggggccctgaaatggggtgggagggcaggggtgggagccctcctagtgggtttggggggttgggttcctgaatgcaccataatcgctgtatgaaatattaaaaagtctaaagtga

SEQ ID NO: 114135 - DNA, 810 bp, Homo Sapiens
  misc_feature (262)..(322): n is a, c, g, or t
  misc_feature (398)..(460): n is a, c, g, or t
  misc_feature (709)..(747): n is a, c, g, or t
aacataataaagaactttgtacaaaaaagttgggaaaatgatcaaaaccgtcaagactaccctcaagtttacatacagtgaaaaatacccagatgaagctcccctttatgaaatattctcccaggaaaatctagaagataatgatgtctcagacattttaaaattactagcattacaggctgaagaaaatcttggtatggtgatgatttttactctagtgacagctgtgcaagaaaaattaaatgaaatagtagatcagatnnnnnnnnnnnnnnnnnnnnnnnnnnnnnnnnnnnnnnnnnnnnnnnnnnnnnnnnnnnnncaattattccatggtactccagttacaattgagaatttcttaaattggaaagccaagtttgatgcagaactcttgnnnnnnnnnnnnnnnnnnnnnnnnnnnnnnnnnnnnnnnnnnnnnnnnnnnnnnnnnnnnnnncaactatttgaaacagatcataatcttgacacatctgatatccagttcttggaggatgctggaaacaacgtggaggtagatgagtctttgttccaagaaatggatgacttggagctggaggatgatgaagatgatccagactataatcctgctgacccagagagtgactcagctgactaatggactgtccccatctgcacagaggcttgactgccacaagcatctgtggctatgctcagagggttatgnnnnnnnnnnnnnnnnnnnnnnnnnnnnnnnnnnnnnnncaggaaaaatattcttctgatagctttcatcattgaacctaataaactgaccttaaaatttct

SEQ ID NO: 114136 - DNA, 1100 bp, Homo Sapiens
  misc_feature (112)..(112): n is a, c, g, or t
  misc_feature (159)..(800): n is a, c, g, or t
  misc_feature (1014)..(1042): n is a, c, g, or t
gacccaaaacctgtatctatctgaccatgctctccatggatactttcctccgggtgatcaagagaagttccggtagggcagcgtgggtgaacggggatatcaaacacccagntggaacgaagacatacacgaactggatacttacagctgaactatagnnnnnnnnnnnnnnnnnnnnnnnnnnnnnnnnnnnnnnnnnnnnnnnnnnnnnnnnnnnnnnnnnnnnnnnnnnnnnnnnnnnnnnnnnnnnnnnnnnnnnnnnnnnnnnnnnnnnnnnnnnnnnnnnnnnnnnnnnnnnnnnnnnnnnnnnnnnnnnnnnnnnnnnnnnnnnnnnnnnnnnnnnnnnnnnnnnnnnnnnnnnnnnnnnnnnnnnnnnnnnnnnnnnnnnnnnnnnnnnnnnnnnnnnnnnnnnnnnnnnnnnnnnnnnnnnnnnnnnnnnnnnnnnnnnnnnnnnnnnnnnnnnnnnnnnnnnnnnnnnnnnnnnnnnnnnnnnnnnnnnnnnnnnnnnnnnnnnnnnnnnnnnnnnnnnnnnnnnnnnnnnnnnnnnnnnnnnnnnnnnnnnnnnnnnnnnnnnnnnnnnnnnnnnnnnnnnnnnnnnnnnnnnnnnnnnnnnnnnnnnnnnnnnnnnnnnnnnnnnnnnnnnnnnnnnnnnnnnnnnnnnnnnnnnnnnnnnnnnnnnnnnnnnnnnnnnnnnnnnnnnnnnnnnnnnnnnnnnnnnnnnnnnnnnnnnnnnnnnnnnnnnnnnnnnnnnnnnnnnnnnnnnnnnnnnnnnnnnnnnnnnnnnnnnnnnnnnnnnnnnnaagaattcggcacgaggggaacaggtcagatctttataaataaacatccagtaaagagaaatgacaattctaaatcatccgcatacacagagcactcttagggggtggggcgccttgtgggttcctgttgctgagacttcctggatggagccgccctcacatccgggcccgtggccctgcgcggagctgtgtccaataaagttcttggatgtgnnnnnnnnnnnnnnnnnnnnnnnnnnnnngcctacagccgcggccgcaagcttattccctttagtgagggtaattttagcttggcac

SEQ ID NO: 114137 - DNA, 1084 bp, Homo Sapiens
  misc_feature (228)..(484): n is a, c, g, or t
  misc_feature (535)..(548): n is a, c, g, or t
  misc_feature (659)..(687): n is a, c, g, or t
  misc_feature (825)..(837): n is a, c, g, or t
ggttacccccttaattaacgcattttgtattatgtaaggggggaacctttgaaaaccccccaccccgccttttaagttcctgcatttattgcctgtaaaacaattttatcctgcgtttccccgagtgtttggaaccgtttacccctctgagtggttgatacgctctccgccaccgaacgaccgaaagaaaggtttatgagcggggaaaccgaagagcccccataaccnnnnnnnnnnnnnnnnnnnnnnnnnnnnnnnnnnnnnnnnnnnnnnnnnnnnnnnnnnnnnnnnnnnnnnnnnnnnnnnnnnnnnnnnnnnnnnnnnnnnnnnnnnnnnnnnnnnnnnnnnnnnnnnnnnnnnnnnnnnnnnnnnnnnnnnnnnnnnnnnnnnnnnnnnnnnnnnnnnnnnnnnnnnnnnnnnnnnnnnnnnnnnnnnnnnnnnnnnnnnnnnnnnnnnnnnnnnnnnnnnnnnnnnnnnnnnnnnnaagaatttggcacgaggcattttgattttggagcggccgcggctgtaggcnnnnnnnnnnnnnnggcacggggactgatcaggaagatatattcctgcataactcaatctgaaccaaggattgtagtttagttttcctccttgccttcccttctgtgtgaccgaccccttggccnnnnnnnnnnnnnnnnnnnnnnnnnnnnncctaccctgttctggtttttttcctccctttagttccacccccaacccccattccctggtgtccttcttagagatgaagaaataataaggaaacatctttcatagccacattaaataagagaaactgatatacattannnnnnnnnnnnnaaagatgacttataagaaccctgaaatttatataggtgagacaatagaaataaaaagatcttcagccaggcctttctgaaggagttattctgctaaaaatggtcttagttgtctgaaaagccagctcttgaacctcttcacaacagtatcaacactggcttctcccggttcattttatgcgtgcgagaagtcagtggtaactgctgcagggcttaatacattagtggtaactggtttaaaaacaaag

SEQ ID NO: 114138 - DNA, 807 bp, Homo Sapiens
  misc_feature (164)..(179): n is a, c, g, or t
  misc_feature (213)..(213): n is a, c, g, or t
  misc_feature (541)..(553): n is a, c, g, or t
  misc_feature (691)..(720): n is a, c, g, or t
ccacattgacattttattaacgccaactgtttttaattattttttaaaacaatagcacaaaaatgtttcaaggaagcagtctcacaatctgatgaccttctgaaataccgttaagccacaccaaatatgaatttctgttaataacacaaaatatttttttaagnnnnnnnnnnnnnnnnggtagggaaagaagaagggaatgagatttagatntaaaactcattggattaaataggtgaggcttattaggatatactgttgaagcaaacagtggcacacacaggcttacagtctttgttttttaaaccagttaccactaatgtattaagccctgcagcagttaccactgacttctcgcacgcataaaatgaaccgggagaagccagtgttgatactgttgtgaagaggttcaagagctggcttttcagacaactaagaccatttttagcagaataactccttcagaaaggcctggctgaagatctttttatttctattgtctcacctatataaatttcagggttcttataagtcatctttnnnnnnnnnnnnntaatgtatatcagtttctcttatttaatgtggctatgaaagatgtttccttattatttcttcatctctaagaaggacaccagggaatgggggttgggggtggaactaaagggaggaaaaaaaccagaacagggtaggnnnnnnnnnnnnnnnnnnnnnnnnnnnnnnggccaaggggtcggtcacacagaagggaaggcaaggaggaaaactaaactacaatccttggtccagattgagttagcaggaacggac

SEQ ID NO: 114139 - DNA, 398 bp, Homo Sapiens
  misc_feature (292)..(292): n is a, c, g, or t
  misc_feature (340)..(340): n is a, c, g, or t
  misc_feature (363)..(363): n is a, c, g, or t
  misc_feature (376)..(376): n is a, c, g, or t
gagagcagcccctctctggcaccatcaaaaacttctttgtttccccttcaacttggaactcttaaaacatcaggggttgtgagggtttggccattcttttatcttgggtccatgtgagtgacagaaatggtgcggcctgggaaagatctccctccttattctaaaactgtgcctccaaaagaggggcaggggctcttgtagagagatccctggcccaggacaggagatgccaaatctaatttatctcactgagggcctttgagaaaaacgctttctgggccagggttcagtngcttcatgcctattattaattcccagtactttgagaagctgaggcggncagattcacttgaaggccaggantttcgagaaccanttttcgtcaaacatggcgaaaa

SEQ ID NO: 114140 - DNA, 426 bp, Homo Sapiens
gggggcaatcacagtctttaatcattaattgtcatatttctgatttgttagcaagtgccagcttgtaggctggttgaagtacagaactcagaggaaaaaagaaattaaattttagctttctggagagcagcccctctctggcaccatcaaacacttctttgtttcccttcaacttggaactcttcaaacatcaggggttgtgagggtttggccattcttttatcttgggtccatgtgagtgacagaaatggtgcggcctgggaaagatctccctcctttacattttctcttctccctcctcctccttattctaaaactgtgcctccaacagaggggcaggggctcttgtagagagatccctggcccaggacaggagatgccaaatctaatttatctcactgagggcctttgagaaaaacgcttctg

SEQ ID NO: 114141 - DNA, 668 bp, Homo Sapiens
  misc_feature (122)..(171): n is a, c, g, or t
  misc_feature (348)..(361): n is a, c, g, or t
aatcattaccccaatagcctttcacctcgtggagagctggattcaatgcctgttaagatacaagtgaaaatgagtttggtggtctcatcctaaccctatcggacaagttattccttatacannnnnnnnnnnnnnnnnnnnnnnnnnnnnnnnnnnnnnnnnnnnnnnnnncactacacaatttggcacaaatggatggtctctacccaagcctgtgaattgctggtggagagaaagggggtgctgatcagatcaagggggcagcagtcaggatgggctcaaagaaatatcagcctaccctttgcctgacaagcatccccaaacctcacccccaaaccttccagggcnnnnnnnnnnnnnnagaataactgaccccaaatgaaaaccacgttaacaaacacattacctccttgggcttagccatagtagacaggcaagtttaaaccagcaggatgctggataacgaagtttgttttaaacagatgtcaagctgagaccttgggactggcctctctcttgcactacaccttacagaaataaacactgaggtatccataccactgaatccggtgttgccatgcgtcatgggaaaatgagactgttgcattgccaactggtgcagcttggtcaaatctggctgtggaatggcatactgcctcgtgccgaat

SEQ ID NO: 114142 - DNA, 847 bp, Homo Sapiens
  misc_feature (730)..(759): n is a, c, g, or t
cacaatccatcattgagtgtgtcaaacagatctgcgtggtcatgttggagtcccccccgaagggcgtgaccatcccgtaccggcccaagccgtccagctctccggtcatctttgcaggtggtcagttgaccaagctgcaccagttggcaatgcaacagtctcattttcccatgacgcatggcaacaccggattcagtggcattgaatccagctctccagaggtgaaaggctattgggcaggtttggatgcatctgctcagactacttctcatgaactcaccattccaaacgatttgattggctgcataatcgggcgtcaaggcgccaaaatcaatgagatccgtcagatgtctggggcgcagatcaaaattgcgaacccagtggaaggatctactgataggcaggttaccatcactggatctgctgccagcattagcctggctcaatatctaatcaatgtcaggctttcctcggagacgggtggcatggggagcagctagaacaatgcagattcatccataatccctttctgctgttcaccaccacccatgatccatctgtgtagtttctgaacagtcagcgattccaggttttaaatagtttgtaaattttcagtttctacacactttatcatccactcgtgattttttaattaaagcgttttaattcctttctctgttcagctgttgatgctgagatccacatttagttttataagcttctccctggnnnnnnnnnnnnnnnnnnnnnnnnnnnnnnggctcatgaatttttctgtttgtcatggaaatgtaagagtggaatattaatacatttcagtttagttctgtaatggcaggaatttttc

SEQ ID NO: 114143 - DNA, 707 bp, Homo Sapiens
  misc_feature (572)..(600): n is a, c, g, or t
ggagatttgaccaagctgcaccagttggcaatgcaacagtctcattttcccatgacgcatggcaacaccggattcagtgcaggtttggatgcatctgctcagactacttctcatgaactcaccattccaaacgatttgattggctgcataatcgggcgtcaaggcgccaaaatcaatgagatccgtcagatgtctggggcgcagatcaaaattgcgaacccagtggaaggatctactgataggcaggttaccatcactggatctgctgccagcattagcctggctcaatatctaatcaatgtcaggctttcctcggagacgggtggcatggggagcagctagaacaatgcagattcatccataatccctttctgctgttcaccaccacccatgatccatctgtgtagtttctgaacagtcagcgattccaggttttaaatagtttgtaaattttcagtttctacacactttatcatccactcgtgattttttaattaaagcgttttaattcctttctctgttcagctgttgatgctgagatccatatttagttttataagcttctccctggnnnnnnnnnnnnnnnnnnnnnnnnnnnnnggctcatgaatttttctgtttgtcatggaaatgtaagagtggaatattaatacatttcagtttagttctgtaatgtcaggaatttttcaaaaaattaaaagatggac

SEQ ID NO: 114144 - DNA, 765 bp, Homo Sapiens
  misc_feature (620)..(669): n is a, c, g, or t
ccctctagagcctactcgattcaaggacaacaccccatttctccgctcgatctggccaagctggaaccaggtggcaagaccacagtctcactttgccatgatgcacggcgggaccggattcgccggaattgactccagctctccagaggttgaaaggctattgggcaagtttggatgcatctactcaaaccacccatgaactcaccattccaaataacttaattggctgcataatcgggcgccaaggcgccaacattaatgagatccgccagatgtccggggcccagatcaaaattgccaacccagtggaaggctcctctggtaggcaggttactatcactggctctgctgccagtattagtctggcccagtatctaatcaatgccaggctttcctctgagaagggcatggggtgcagctagaacagtgtaggttccctcaataacccctttctgctgttctcccatgatccaactgtgtaatttctggtcagtgattccaggttttaaataatttgtaagtgttcagtttctacacaactttatcatccgctaagaatttaaaaatcacattctctgttcagctgttaatgctgggatccatatttagttttataagcnnnnnnnnnnnnnnnnnnnnnnnnnnnnnnnnnnnnnnnnnnnnnnnnnnttctgtttgtcgataagaaatgtaagagtggaatgttaataaatttcagtttagttctgtaatgtcaagaatttaagaattaaaaaacggattggt

SEQ ID NO: 114145 - DNA, 441 bp, Homo Sapiens
gattaaagaagttcaagtcatttagatcatcagaagcatcttttttcctagtgtcctcttcatcagcttccaaatccttgtcctaataccaactatctccctaattgaaaacaaaatactcaaatgggcctaaaaaattctccgatccgtccctaacaaactaggaggcgtccttgccctattactatccatcctcatcctagcaataatccccatcctccatatatccaaacaacaaagctataatatttcgcccactaagccaatcactttattgactcctagccgcagacctcctcattctaacctgaatcggaggacaaccagtaagctacccttttaccatcattggacaagtagcatccgtactatacttcacaacaatcctaatcctaataccaactatctccctaattgaaaacaaaatactcaaatggccct

SEQ ID NO: 114146 - DNA, 1342 bp, Homo Sapiens
  misc_feature (14)..(14): n is a, c, g, or t
  misc_feature (71)..(94): n is a, c, g, or t
  misc_feature (263)..(293): n is a, c, g, or t
  misc_feature (862)..(862): n is a, c, g, or t
  misc_feature (1092)..(1092): n is a, c, g, or t
agtttgatcaaaantcatttcgtccgcagccatgtttggggacgagatgatttttgatcctactatgagcnnnnnnnnnnnnnnnnnnnnnnnnccttttatgttagatgaggaaggggatacccaaacagaggaaacccagccttcagaaacaaaagaagtggagccagagccaactgaggacaaggatttggaagctgatgaagaggacactaggaaaaaagatgcttctgatgatctagatgacttgaacttctttaatnnnnnnnnnnnnnnnnnnnnnnnnnnnnnnntatttgatattgatgaagctgaagaacgtgtaaaggatcttaagattgaaagtgatgttcaagaaccaactgaaccagaggatgaccttgacattatgcttggccaaaaaaataagacaaaatacccaacaacacatgcccgtcgccctcggaacctctagaaccctttctataccatccgccttgggcgccccggtaccccccaggtcaatccgaacatgggtccttagcctgcctttcctacggacatccttgggttcttgacctaccgcctttgggattcctcaatcacagccacaaacgccccctccggctgtgacacatcgcaatgccgctcccgcgaagcgccatccctccaccggccacccctcttgtcaggccccccacccagttggcgattatatatcccaccaccccggtacctccacttcattcacgactgctctccgacgcaccgcgcttatatgcaccgtccctcgcggtgctctcctcatcacactgttctctcctgttgcgcgcccggtcttcctcgtgtggattctcaccacactgtcatttacctcccgccncccgcgcacattccctgtgtgactcacacacattcttcgggtataaatgccgtgagcgcgtctgaccgaccgacactgaatcgctccttgtaatgcgcacacccccgctgcgtcctatgatcttactcactgcggtatacaatctccaccacgcacttagttcgtctgtctcacccgcactccctcacatgcataatgatattatatatgggccccccgaccagcgctantaatcagatagtgtgcccgcctcacctctgaactaccttctgattgcgctcctatatttctccacgctgctctacctcgcgcgaaatccacatgatatccacgcgtcgaccctatatctgcactataatctgcctcgtcgtatgtcccatctgacatactcccccgtccctctcctcgattgttcgccccgcgcgctctcactatttactcgcgacacgtgacacccccactgttttttcactcccctcc

SEQ ID NO: 114147 - DNA, 679 bp, Homo Sapiens
  misc_feature (435)..(480): n is a, c, g, or t
gcagtgtgtagttttatttgtttttatttccataacacaagagaggaagcgaagggccagggcccgaggcatcccctgcacggttcgaaggctttcaaccgtcccgggtttgttttgaaggcaattttggggccgcgcccaaggaaaccctgcaggctgtcagtcccagcatgaacagcttaaaataaaaatctcccgtctggttgctgctcggagaggctccaagaaatgcaaaacaaacccgcctggaaaatgctgccctgagaaccagagcgagggcttgaaagatgccttcaacacagactcttctaggaatccagccagctttgggacggccgtttcacaaaaccaaaaaacaccaagtaacatttctaaccggagaattgccggttttagcaagaaaaaggggcttcacctaaaagggagggtcacaannnnnnnnnnnnnnnnnnnnnnnnnnnnnnnnnnnnnnnnnnnnnnagatccgtccgagactgtggagcggaatcgccaccctggcataagcccagtcagcagccggtctgggtgggcgctcactgtttgcccgcctgtctgccaggcttcttatctggatggcatcggtcctgtgattggtgatcccacctcgtcgccggccaccagacactcctcggcatgtgccgtttagaagtccaaaaaa

SEQ ID NO: 114148 - DNA, 1127 bp, Homo Sapiens
ccgttgttatgtcggtttgggaggtccggcgatgttgcatgggcgcgtcctgtttcgtgttgggtaggttttgttgtgttaggatgtgcggtaccggggtcggcgcgccgttggtgcaaacccttggttactccccagcggcggccgcttgtcaacccctgttctaggtggagaggagggtgaagtccgcgcggcgtttggtgcgtgcccattgccacgagacaaacccggcgtcccgtgaggggtccgttacaacacgaataggccgcgcgccgggggggcggcagcgccacacaccatggccgggaagaacgcgggagggcgtcgggcgcgtggcgggggcaggggcccgggaaggagcgcctgacgccacaggtctctttgtggggatttggaaatcaacttgggcatcgtggcgttggacaaccgcaatcacccaccaagtacctttctaacccggagaattgccggttttaccaagaaaaaggggcttcacctaaaagggagggtcacaaaacacgaagggggttccccctggcgcctgccctcttcctttctgagcagatccgtccgagactgtggagcggaatcgccaccctggcaggaggggccgcaccagccggtctgggtgggcgctcactgtttgcccgcctgtctgccaggcttcttctctggctggcctctgcctgtgcccgggatcccacctcggccccggccaccaaacacacctcggccagcgccgcccatgccgcggcctttctgctgcttctgctgctgcaggcctccgcggccgcggcccttggccaccacctcctccttgaccatgtcgatgatctcgtcggggatgcgcaggtacttgatggtgctgccgcggatgtagcactcgggcatccgccagaacttgtccccgtccctggacgtgcagatgacttctcgcaggttaatgttcatccagttgtcgcagctcaccaggtgtccattgtacgtctccccatttttcagctccaccaacatggggtgattctgagccgtcttcagcagtgacaagggaagcatggtgccggcggggaccgggccctcgtgccgaattcgccacccaggcctcgctacctaggaccgtatgcgga

SEQ ID NO: 114149 - DNA, 656 bp, Homo Sapiens
  misc_feature (498)..(551): n is a, c, g, or t
acgttgcccccctgacctgcagcccccagcctgaatatgtgaaccagccagatgttcggccccagcccccttcgccccgagagggccctctgcctgctgcccgacctgctggtccactctggaaagggccctccgaccacttccaggggaacctgccatgccaggaacctgtcctaaggaaccttccttcctgcttgagttcccagatggctggaaggggtccagcctcgttggaagaggaacagcactggggagtctttgtggattctgaggccctgcccaatgagactctagggtccagtggatgccacagcccagcttggccctttccttccaagatcctggggtactgaaagcctttagggaagcttggcctgagagggggaagcggccctaagggagtgtctaagaacaaaagcgacccattcagagactgtccctgaaacctagtactgccccccatgagaaaggaacagcaatggtgtcagtatccaggcnnnnnnnnnnnnnnnnnnnnnnnnnnnnnnnnnnnnnnnnnnnnnnnnnnnnnnaggatgaaataaagacccaggggagaaatgggtgttgtatggggaggcaagtgtgggggtccttctccacacccactttgtccatttgcaaatatattttggaaa

SEQ ID NO: 114150 - DNA, 604 bp, Homo Sapiens
  misc_feature (120)..(120): n is a, c, g, or t
  misc_feature (453)..(491): n is a, c, g, or t
gtccgcagaagccctgatgtgtcctcagggagcagggaaggcctgacttctgctggcatcaagaggtgggagggccctccgaccacttccaggggaacctgccatgccaggaacctgtcntaaggaaccttccttcctgcttgagtttccagatggctggaaggggtccagcctcgttggaagaggaacagcactggggagtctttgtggattctgaggccctgcccaatgagactctagggtccagtggatgccacagcccagcttggccctttccttccagatcctgggtactgaaagccttagggaagctggcctgagaggggaagcggccctaagggagtgtctaagaacaaaagcgacccattcagagactgtccctgaaacctagtactgccccccatgaggaaggaacagcaatggtgtcagtatccaggctttgtacagagtgcnnnnnnnnnnnnnnnnnnnnnnnnnnnnnnnnnnnnnnnaaagatgaaataaagacccagggggagaatgggtgttgtatggggaggcaagtgtggggggtccttctccacacccactttgtccatttgcaaatatattttggaaaacagct

SEQ ID NO: 114151 - DNA, 793 bp, Homo Sapiens
  misc_feature (43)..(43): n is a, c, g, or t
  misc_feature (421)..(445): n is a, c, g, or t
  misc_feature (521)..(573): n is a, c, g, or t
cagtcgcccctgtcggccctgcgacagctctccaggtccagcncaggcaccccaggcgcggccggagggtacagcgcttgtaccttctaggggaagccttgcgtggctgggcccacaggcccctggggcgggtggcggttctctgacgcccacctctttccagccccagacctcgggtcctgacgcctcgtgcccaccctacagttaaaccccaacacacacatctacaactggacataattttacattgcgacaccttcctgacgatcggccccaatccaagtaggatctccccgccctaggcagcctctgcgctcctgaatctcacctcttttgctactactgtctctctcttccaggccccagaaccatctggacgccgccctggtcttatcggctctctcctcatcctagttctttnnnnnnnnnnnnnnnnnnnnnnnnnctttttttaatcgttgtaataattgtataaaaaaaatcgctctgtatagttacaacttgtaagcatgtccgtgtannnnnnnnnnnnnnnnnnnnnnnnnnnnnnnnnnnnnnnnnnnnnnnnnnnnnagtcctcctcagccctccccaagtcgcttctgtggcaccccgcattcgctgtgaggtttgtttgtccggttgattttggggggtggagtttcagtgagaataaacgtgtctgcctttgtgtgtgtgtataatacagagaaatgtacatatgtgtgaaccaaattgtacgagaaagtatctatttttggctaaataaatgagctgctgccactttgactat

SEQ ID NO: 114152 - DNA, 287 bp, Homo Sapiens
acagaactaggatgaggagagagccgataagaccagaccgcgcgtcctgacgcctcgtgcccaccctacagttaaaccccaacacacacatctacaactggacataattttacattgcgacaccttcctgacgatcggccccaatccaagtaggatctccccgccctaggcagcctctgcgctcctgaatctcacctcttttgctactactgtctctctcgtccaggccccagaaccatctggacgccgccctggtcttatcggctctctcctcatcctagttcttt

SEQ ID NO: 114153 - DNA, 667 bp, Homo Sapiens
ggggaacgcggctgcagggtccggtcttcggtttgcacagctagaggccgcgcagcagcaaaggatgagcggaaccttggaaaaggtgctgtgcctgaggaacaataccatttttaagcaagccttttctctcttaaggtttagaacttcaggagagaagcccatctattctgtaggtggaattctactaagtatcagtcggccctacaagacaaagcccacccacggcattggaaagtacaagcacttaattaaagcagaagagatcagcggtttgagtgctacgtttgcagaaattttcttggaaataatccaaagcagtcttcctgaaggagtcagactgtcagtgaaggagcacactgaagaagacttcaagggacgattcaaagctcgaccagaactggaagaactgttggccaagttgaagtagctactgtagaccctttcatgccagcagtggtcatattgagtgccaaagagaagagcttactgggtagttagagttcatcaggagacccaacccttagatttcataagtaccccattcccatagccagtaatgtcctcactcctctgtggcttggctgtacttgccatttcttaccacttacctatgagggaatgcttgttatcttccatctaataaaaatctgctgcagatgtgtat

SEQ ID NO: 114154 - DNA, 1000 bp, Homo Sapiens
  misc_feature (72)..(72): n is a, c, g, or t
  misc_feature (98)..(98): n is a, c, g, or t
  misc_feature (101)..(101): n is a, c, g, or t
  misc_feature (116)..(116): n is a, c, g, or t
  misc_feature (118)..(118): n is a, c, g, or t
  misc_feature (127)..(127): n is a, c, g, or t
  misc_feature (162)..(170): n is a, c, g, or t
  misc_feature (224)..(224): n is a, c, g, or t
  misc_feature (236)..(236): n is a, c, g, or t
  misc_feature (253)..(253): n is a, c, g, or t
  misc_feature (268)..(268): n is a, c, g, or t
  misc_feature (273)..(274): n is a, c, g, or t
  misc_feature (302)..(302): n is a, c, g, or t
  misc_feature (323)..(323): n is a, c, g, or t
  misc_feature (328)..(328): n is a, c, g, or t
  misc_feature (422)..(422): n is a, c, g, or t
  misc_feature (432)..(432): n is a, c, g, or t
  misc_feature (467)..(467): n is a, c, g, or t
  misc_feature (531)..(531): n is a, c, g, or t
  misc_feature (547)..(547): n is a, c, g, or t
  misc_feature (557)..(557): n is a, c, g, or t
  misc_feature (667)..(667): n is a, c, g, or t
  misc_feature (669)..(669): n is a, c, g, or t
  misc_feature (689)..(734): n is a, c, g, or t
  misc_feature (743)..(743): n is a, c, g, or t
  misc_feature (824)..(824): n is a, c, g, or t
  misc_feature (839)..(839): n is a, c, g, or t
  misc_feature (849)..(849): n is a, c, g, or t
  misc_feature (865)..(865): n is a, c, g, or t
  misc_feature (875)..(875): n is a, c, g, or t
  misc_feature (879)..(879): n is a, c, g, or t
cccggccccgcccccagaagaaggaacagtgcggagatagaaaagataacaggagaagagcaaaacgtcagnaaggagagaaaaataggagggatganaanagggaaaaggagagnanaaggaaggnaataggggaggagggaaagtagcaggagaggagtnnnnnnnnntagagggagagaagaggaagaagtagggaatgaggagataaagcaggggaacanaggggaccatanatgcggaaataggtggnaatagatgatagaanagatnnaacaaaaataagttgaaaaaccgatttnaattataagagtgaaagaagngccanttctggaaaaagccgaaggcacgagtattaagaggatgaaaaaaaagtaatatacttcttgttaaattttttctctataattataccctgattntgagaataanagagaaaaaacagatgaataacataaatacaaacnacggtagaggacaacaagagtatgggaaaataatggagggagaaagaggaaaaccggttactangtgaactgcatttctnaaaatgctanatgattcaataatgaagatggaaaaaaagttttctagaatagaaagcgttcagtgagagtaaagtaattagtgtgaattaggtaatttattaatgaacccagacataaanantgtatgtttaagaatttaannnnnnnnnnnnnnnnnnnnnnnnnnnnnnnnnnnnnnnnnnnnnnagtatgacntgaataggaatttactatgaattaatctcgagagttttgccaccgtcatccagaattcggaagagggatgacattactggntatgggaatgggtanttatgaaatntaagggttgggtctcntgatgaactntaantacccattcccatagccagtaatgtcctcactcctctgtggcttggctgtacttgccatttcttaccacttacctatgaggtaatgcttgttatcttccatctaataaaaatctgctgcag

SEQ ID NO: 114155 - DNA, 1002 bp, Homo Sapiens
  misc_feature (650)..(650): n is a, c, g, or t
  misc_feature (661)..(661): n is a, c, g, or t
ggaacggcagtactactacggtttaaggtagcgaggcctgggtggcgaattcggcacgaggggcaaaacagaagagaaaagttcctgaagtgacagagaaaaagaacaaaaagctgaagaaggcgtcagcagaggggccactgctgggccctgaggctgcaccaagtggcgaaggagccggctccaagggcgaagctgtgctcaggcccgggctggacgcagagccagagctgtccccagaggagcagagggtcctggaaaggaagctgaaaaaggaacggaagaaagaggagaggcagcgtctgcgggaggcaggccttgtggcccagcacccgcctgccaggcgctcgggggccgaactggccctggactacctctgcagatgggcccaaaagcacaagaactggaggtttcagaagacgaggcagacgtggctcctgctgcacatgtatgacagtgacaaggttcccgatgagcacttctccaccctgctggcctacctggaggggctgcagggccgggcccgagagctgacggtgcagaaggcggaagccctgatgcgggagctggatgaggagggctctgatccccccctgccggggagggcccagcgcatccgacaggtgctgcagctgcatctccctagtggnggtcagcgcgnggggcggtgcccgctgcaccagtgcagaggctgcctcagaccacaacagggtgcagctactccggaggtagtgggccgggtcaccagcagggacagacggctgacaagggcttcaggtcctcgatggtgcgggccgggatcaccagcacagagcatcgcaaggggccgttccctctcgagaccgtcgtgggcgggttgacgggtggtgacagtgatggaggtacatgccttcagcgccaagcgttgcatactggaatcaacgggaccatggacttgaggggacctcgggcccaggaatctgttggcgggaatgtcaaaaacacgggcgattttgcactcgg

SEQ ID NO: 114156 - DNA, 1043 bp, Homo Sapiens
ggcagtactactacggtttaaggtagcgaggcctgggtggcgaattcggcacgaggggtttctgctggttgtaggtccttggctggtcgggcctccggtgttctgcttctccccgctgagctgctgcctggtgaagaggaagccatggcgctccgagtcaccaggaactcgaaaattaatgctgaaaataaggcgaagatcaacatggcaggcgcaaagcgcgttcctacggcccctgctgcaacctccaagcccggactgaggccaagaacagctcttggggacattggtaacaaagtcagtgaacaactgcaggccaaaatgcctatgaagaaggaagcaaaaccttcagctactggaaaagtcattgataaaaaactaccaaaacctcttgaaaaggtacctatgctggtgccagtgccagtgtctgagccagtgccagagccagaacctgagccagaacctgagcctgttaacagaaagaaaaactttcgcctgagcctattttggttgatactgcctctccaagcccaatggaaacatctggatgtgcccctgccagaagaagacctgtgtcaggccttctctgatgtaattcttgcagtaaatgatgtggatgcagaacgatggagctgatccaaacctttgtagtgaactatgtgaaacgatatttatgcttgatctggagacaacttgagggaagagcaagcaagtcagacccaaaataccctacgtgggctcgggaagtccactggaacacatgagaagccattcctaatagactggctacgtaccagtgtttcaacatgaaattccagttggttgcaggagaaccctgtacccatgacgtgtcctccaattactgatcgcgctccttgcccgaatcaactgtcggttgccccagaaagaatgcttgcagctggttggagtcacttggccgttaatgcacgccacctactacgacactgtccctcaaaaagtgcgcgaccaggcctttgggatgaacactattataaggccccagtcaacagcgtgcatgacac

SEQ ID NO: 114157 - DNA, 1105 bp, Homo Sapiens
  misc_feature (378)..(378): n is a, c, g, or t
ggcacgaggggcaaagggcctctgagggagtattatagccgcctcatccaccagaagcacttccagcacatccaggtctgcacccccatgcccctgctagcgtattactgttctgtgacttccctgtgacctctgcagaactcctcatcctgcgtttggtctccaggtgtcccctttctgccgtgttcctaacattttgattcctgtcttgaaaaaagcacctgctgcaccgtaagcccagggatgtggcagctgcagcgggcttggctttgtgaggaaccaagtgggtccaagttgggggaacatcatacttgatacacacgtttttatttgcacaaagaaaatgctattttggagccagaatttcattgtctgatntatggtgattttctaaagaaccagaactgcgggcagaaagggggaacccacatgcttagatagccgatgtcttattagagcgcagtttgtggttcctgatttggaatttaacattctccaaacattccagtccaatgaaagttttatccgctttcccatataaaaattcttcccacgagagtgacttaattctcacaatcccgttggagtcatgtgtgagtcctacagtgtgaggttcagctttgccatctccaagtgctctctgtagggaaacagtttctggtcatgatgagcttccgcttcccatctgatcccagtccagcatagctcggtggtgaacagctggcacatctctgggttgcagacggtaagggccatgtagaattgaggagcccgctggtgctcccggcaggcagccagcctccgcaggaccccgaccagcgacacgatggcttctgggcaatacagcacgtcagcaaatagctccggtggccctgggtggactccttggccatcagggtctccgccagcacctcgtacagctcatccaaaggctctgtgtggacagcctcgtgcttctgcaaaatatcccgcagcagctcagaatctgatgagtctcttaactttgcttctaagctctgccaggggaaggagcgcagggcgcgcgccgccaggaagcggcgcttgaaactctgcctcgtgccgaattcgccacccaggcctcgct

SEQ ID NO: 114158 - DNA, 887 bp, Homo Sapiens
  misc_feature (790)..(790): n is a, c, g, or t
gcattaatgccgaggagaacgcgcggaccgaactcttgctgcagagctttcgagacgccgcttcctggcggcacgcacactgcgctccttcccctggcagagcttagaagcaaagttaagagactcatcagattctgagctactgcgggatattttgcacaagactgtgaagcatcctgtgtgtgtgaagcacccgccgtccgtcaaatatgcccggtgctttctctcagaactcatcaaaaagccctcaggaggctcggtcacactctccgagagcacggccatcatctcctacggtaccacaggcctggtcacatgggacgccgccctctaccttgcagaatggcccatcgagaacccggcagtcttcactaacaggactgtcctagagcttggcagtggtgctggcctcacaggcctggccatctgcaagatgtgccgcccccgggcatacatcttcagcgactgtcacagccgggtccttgagcagctccgagggaatgtccttctcaatggcctctcattagaggcagacatcactgccaagttagacagccccagggtgacagtggcccagctggactgggacgtcgcgacggtccactcagctctctgccttccagccagatgttgtcattgcagcagatgtgctgtattgcccagaagccatcatgtcgctggtcggcgtcctgcggaggctggctgcctgccgggaggaccagccgggctcctgaggtctacgtggcctttaccgtccgcaacccagagacgtgccagctgttcaccaccnagcttagccgggccgggattcagatggggagtgggaacctcgtcatgagcagaaactgttttccctacgaagagcacttgggagatggcaatgcctc

SEQ ID NO: 114159 - DNA, 516 bp, Homo Sapiens
ccctggccccgcgtcggcagaccgtgggctcgctcctgggcctgcctcaaaccctccgcagtaacctgaagctttcactgtagacgtgctgtattgcccagaagccatcgtgtcgctggtcggggtcctgcggaggctggctgcctgccaggagcacaagcgggctcctgaggtctacgtggcctttaccgtctgcaacccagagacgtgccagctgttcaccaccgagctaggctgggccgggatcagatgggaagcagaagctcatcatgaccagaaactgtttccctacggagagcacttggagatggcaatgctgaacctcacactgtaggactcacacacgactctaacgggattgtacagaatcaagtcactctcatgggaagaatttttatatgggaaagcggctaaaactttcattggactggaatgtctggagatcgttaaattccaaatcaggaaccacaaactgccctctaataagatatcagctgtctaagcgtgtgggtgccg

SEQ ID NO: 114160 - DNA, 1323 bp, Homo Sapiens
  misc_feature (1305)..(1305): n is a, c, g, or t
tgaggccggaacagcgtgggggacatctgtgtcggaaatgtgctgcagcctggggccgggggaatcatggcccgaatcgcccagtttctgagtgacatcccggagactgtgcctttgtccactgtcaatagacagtgttcgtcggggctacaggcagtggccagcatagcaggtggcatcagaaatgggtcttatgacattggcatggcctgtgggataaccttggagaatgtggctgagcggtttggcatttcacgggagaagcaggatacctttgccctggcttcccagcagaaggcagcaagagcccagagcaagggctgtttccaagctgagattgtgcctgtgaccaccacggtccatgatgacaagggcaccaagaggagcatcactgtgacccaggatgagggtatccggcccagcaccaccatggggggcctggccaaactgaagcctgccttcaagaaagatggttctaccacagctggaaactctagccaggtgagtgatggggcagctgccatcctgctggcccgggaggtccaaggcagaagagttgggccttcccatccttggggtcctgaggtcttatgcagtggttggggtcccacctgacatcatgggcattggacctgcctatgccatcccagtagcttttgcaaaaagcagggctgacagtgagtgacgtggacatcttcgagaatcaatgaggcctttgcaagccaggctgcctactgtgtggaaaaagctacgactcccccctgagaaggtgaaccccctggggggtgcagtggccttagggcacccactgggctgcactggggcacgacaggtcatcacgctgctcaatgagctgaagcgccgtgggaagagggcatacggagtggtgtccatgtgcatcgggactggaatgggagccgctgccgtctttgaataccctgggaactgagtgaggtcccaggctggaggcgctacgcagacagtcctgctgctctagcagcaaggcagtaacccccacaaagccaaaccccctggggaaaactcaccactggtgggtgggggcactggacaaaatcaggcacttccactcatttggaaaatgtgaacactgatggactggtattaggaatgggtgggggtgttgaacccccccatcaaccctcctttagctgtgcaaaataaaagcaggcttgggtcccccaggcccacagggccaagggttaattctttaaggcaaagggcaatccccggggatgaagaaatggccatggggcattagaaaaaaggggcttggatttttaaacncccaacaacacaataaat

SEQ ID NO: 114161 - DNA, 893 bp, Homo Sapiens
tggtaccgggtccggaattcccgggatggctggtctgcagggttgacctgcgcaatgcagaggctgcaggtagtgctgggccacctgaggggtccggccgattccggctggatgccgcaggccgcgccttgcctgagcggtgccccgcaggcctcggccgcggacgtggtggtggtgcacgggcggcgcacggccatctgccgggcgggccgcggcggcttcaaggacaccacccccgacgagcttctctcggcagtcatgaccgcggttctcaaggacgtgaatctgaggccggaacagctgggggacatctgtgtcggaaatgtgctgcagcctggggccggggcaatcatggcccgaatcgcccagtttctgagtgacatcccggagactgtgcctttgtccactgtcaatagacagtgttcgtcggggctacaggcagtggccagcatagcagggtggagtccatgtccctggctgacagagggaaccctggaaatattacttcgcgcttgatggagaaggacaaggccagagattgcctgattcctatggggataacctctgagaatgtggctgagcggtttggcatttcacgggagaagcaggatacctttgccctggcttcccagcagaaggcagcaagagcccagagcaagggctgttccaagctgagatagtgcctgtgaccaccacggtccatgatgacacgggcaccaagaggagcatcactgtgacccaggatgcagggtatccgccccagcaccaccatggagggcctggccaaactgaagcctgccttcagaaagatggttctaccacagctggaaactcttaccaggtggaatgatgggggcaactgccaatcttgctgggccccgaggtccaaaggc

SEQ ID NO: 114162 - DNA, 1063 bp, Homo Sapiens
acaataggccagtacgaggcctggtgtcaattcggcacgagggcgtctggcactaactcaacaggccctgcacccatggcccctccaagagccccaggcccctgagccaagcagggctctggcagcagccagcccatggaggtgcaggaaggctatggctttgggtcaggagatgatccctactcaagtgcagagccccatgtgtcaggtgtgaaacggtcccgctcaggtgagggcgaggtgagcggccttatgcgcaaggtgccacgagtgagccttgaacgcctggacctggacctcacagctgacagccagccacccgtcttcaaggtcttcccaggcagtaccactgaggactacaaccttattgttattgaacgtggcgctgccgctgcagctaccggccagccaggactgcgcctgcaggaacccctggtgccccacccctggctggcatggccattgtcaaggaggaggagacggaggctgccattggagcccctcctactgccactgagggccctgagaccaaacctgtgcttatggctcttgcggagggtcctggtgctgagggtccccgcctggcctcacctagtggcagcaccagctcagggctggaggtggtggctcctgagggtacctcagccccaggtggtggcccgggaaccctggatgacagtgccaccatttgccgtgtctgccagaagccaggcgatctggttatgtgcaaccagtgtggagttttgtttccacctggactgtcacctgccggccctgcaggatgtaccaggggaggagtggagctgctcactctgccatgtgctccctgacctgaaggaggaggatggcagcctcagcctggatggtgcagacagcactggcgtggtggccaagctctcaccagccaaccagcggaaatgtgagcgtgtactgctggccctattctgtcacgaaccctgccgccccctgcatcagctgactcccactccctggtggccccatcccccagttcctcacgatatggtttttacttctgtggatttaataaaaacttcaccagtta

SEQ ID NO: 114163 - DNA, 1429 bp, Homo Sapiens
  misc_feature (189)..(189): n is a, c, g, or t
  misc_feature (492)..(501): n is a, c, g, or t
  misc_feature (658)..(751): n is a, c, g, or t
  misc_feature (1160)..(1160): n is a, c, g, or t
  misc_feature (1227)..(1227): n is a, c, g, or t
  misc_feature (1407)..(1407): n is a, c, g, or t
gtgtttgcagcgcccaaaatgccgtgtgggggggagtgttttgcacaccccagtgtgttgatattatatgcgcggtggcgcgagacaatggtggaaccgctatttgtttttcgcgccccccgggtttttctcccgcggggggcgggaagatatttttattaccgcgaagggggccggccacaaagggtnggggtatggcccccgggggggcaattcgcgcgggtttataggcgaagggcctttttgtggagggggggtgtcccgcgttttgggcgggaaaaaagtcttataaaggaattttcccgccctttttcttcgaataaaaatgtgcaacagggcggggggggctatatattttaaaatattgaaggtcctccgggggggaactccccccttttggaaggggtccccccgagaaaggcgcccctaagggaacccacttggggagattttttttagaagacgcgcttgggtgttcccccgcgggggcgnnnnnnnnnngtggggggaattccaaaccccttgttttgtgtgccaaaggttttttttggggaacaaaaggtttgggcccggggttcaggttcctcgaggggcgcccccggccccaaaaaaaggtttttaaaaagtttttgaaggggctgagggggccgaaaaagannnnnnnnnnnnnnnnnnnnnnnnnnnnnnnnnnnnnnnnnnnnnnnnnnnnnnnnnnnnnnnnnnnnnnnnnnnnnnnnnnnnnnnnnnnnnnctttcaacgggtgaagtttttattaaatccacagaagtaaaaaccatatcgtgaggaactgggggatggggccaccagggagtgggagtcaggccaccaggggagtggggatggggtgacaggacagagaacagagccaggctgggctggccatgggggctccagcctcaggggccatcaccagggccaccagacagctcctgggaactcaagccagcaccaggcaggctcatatttccgctggttggctgggtgagagcttggccaccacgccagtggctgtctgcaccatccaggcatgaggctgccatcctcctccttcaggtcaaggagcacatgtgcaaagagtgagcagctccactcctccccctggtacatcctgcagggccggccaggtgaccagtccaangtggaaacaaaactcacaacctggttgcacataaccccaaatcgcttgggctcttggcaacactganaaatggtggggactgtcattccaaaggtttccgggccacactgtggggttgtttaagtaccccttaagagcaaccaacttcagcctaaaatttggtctgccaattaggtgaaggccaagccggggaccctttacatccaggaaccttttcaagagcataaacaaagggggttggggtcancccctggggccggaaaatttgg

SEQ ID NO: 114164 - DNA, 860 bp, Homo Sapiens
gctggtccggtcggagtgtatggatgcgctctccagggtgtgctgggctcggtcggctgtgtggggctcggcagtcacccctggacattttgtcacccggaggctgcaacttggtcgctctggcctggcttggggggcccctcggtcttcaaagcttcacctttctccaaaggcagatgtgaagaacttgatgtcttatgtggtaaccaagacaaaagcgattaatgggaaataccatcgtttcttgggtcgtcatttcccccgcttctatatcctgtacacaatcttcatgaaagaaagccttgagccgggccatgcttctcacatcttacctgcctcctcccttgttgagacatcgtttgaagactcatacaactgtgattcaccaactggacaaggctttggcaaagctggggattggccagctgactgctcaggaagtaaaatcggcttgttatctccgtggcctgaattctacgcatattggtgaagataggtgtcgaacttggctgggagaatggctgcagatttcctgcagcctgaaagaagctgagctgtctctcttgctgcacaacgtggtcctgctctccaccaactaccttgggacaaggcgctgaatgaaccatggagcggatggcattgtcctgcagtcgtatagtatagcagtgcaggaacaaacagcacttgccagcaaagtctgtgtgtactgttaagtgtgtgggaggcagagagaggagcaggggccatgggcttcacagcatggcacacaatgtgggaactgcagacattcctctcacagctagaactgaaacaaaccctcttgctaggggtggtccgtgtgaggtgtcatcctgtacccc

SEQ ID NO: 114165 - DNA, 339 bp, Homo Sapiens
gatgtcttatgtggtaaccaagacaaaagcgattaatgggaaataccatcgtttcttgggtcgtcatttcccccgcttctatatcctgtacacaatcttcatgaaaggattgcagatgttatgggctgatgccaaaaaggctagaagaataaagacaaatatgtggaagcacaatataaagtttcatcaacttccataccgggagatggagcatttgagacagaaagccttgagccgggccatgcttctcacatcttacctgcctcctcccttgttgagacatcgtttgaagacttcatacaactgtgattcaccaactggacaaggctttggcaaagc

SEQ ID NO: 114166 - DNA, 1683 bp, Homo Sapiens
  misc_feature (1342)..(1342): n is a, c, g, or t
  misc_feature (1376)..(1376): n is a, c, g, or t
  misc_feature (1445)..(1445): n is a, c, g, or t
  misc_feature (1582)..(1582): n is a, c, g, or t
  misc_feature (1601)..(1601): n is a, c, g, or t
  misc_feature (1603)..(1603): n is a, c, g, or t
  misc_feature (1651)..(1651): n is a, c, g, or t
ggtaccggtccggaattcccgggatatcgtcgacccacgcgtccgagcgagggggctggttcctgagcttcgcaattcctgtgtcgccttctgggctcccagcctgccgggtcgcatgatccctccggccggagctggtttttttgccagccaccgcgaggccggctgagttaccggcatccccgcagccacctcctctcccgacctgtgatacaaaagatcttccgggggctgcacctgcctgcctttgcctaaggcggatttgaatctctttctctcccttcagaatcttatcttggctttggatcttagaagagaatcactaaccagagacgagactcagtgagtgagcaggtgttttggacaagtggactggttgagcccatccctattataaaaatgtctcagagcaagccgggagctggtggttgactttctctcctacaagctttcccagaaaggatacagctggagtcagtttagtgatgtggaagagaacaggactgaggacccagaagggactgaatcggagatggagaccccacaggtgccagtcaatggcaacccactccatggcaccgtggtcgagacagccccgcgcgtgaagtggagccacgtggccacagcaagcagtataggatgcccgggtaggtgatccccatggcagcagtaaagcaagcgctgagggaggcaggcgacgagtttgaactgcggtaccggcgggcattcagtgacctgacatcccagctccacatcaccccagggacagcatatcagagctttgaacaggtagtgaatgaactcttccgggatggggtaaactggggtcgcattggtggcctttttctccttcggcggggcactgtgcgtggaaagcgtagacaaggagatgcaggtattggtgagtcggatcgcagcttggatggccacttacctgaatgaccacctagagccttggatccaggagaacggcggctgggatacttttgtggaactctatgggaacaatgcagcagccgagagccgaaagggccaggaacgcttcaaccgctggttcctgacgggcatgactgtggccggcgtggttctgctgggctcactcttcagtcggaaatgaccagacactgaccatccactctaccctcccacccccttctctgctccaccacatcctccgtccagccgccattgccaccaggagaaccactacatgcagcccatgcccacctgcccatcacaggggttgggcccagatctggtcccttgcagctagttttctagaatttatcacacttctgtgagacccccacacctcagttccctttggctcagaattcacaanatttccacaaaatctgtccaaaggaggctggcangtatgggaaggttttgtggctggggggcaggagggccctaccctgattggtgcaacccttaccccttancctccctgaaaatgtttttctggcagggagcttgaaagttttcagaacctctttccccagaaagagactagattggctttggttttgatgtttgtggccctcaaaattgatcatttttccccccattcttcccaaantaaactgggttcccttttncntccatccttacccccctaaagaccatttagggggcactttttgactangggatcaggctgcctggggattaagatgccag

SEQ ID NO: 114167 - DNA, 1048 bp, Homo Sapiens
  misc_feature (122)..(122): n is a, c, g, or t
  misc_feature (259)..(259): n is a, c, g, or t
aaaggttaaagggaagggggaatttccctgggtcccctttggcattcctttatttcccccaaagccaagccctggaaatcctcttaagttcaaaaaagtgggcccccctaaaaatggccttnttaagggggttaggggatgggaaaggaaaaggggaaccccaggtttaagtgtgggggagagttggggggaaaaatgatcaatttctgaggccaccaaccatcaaaaacaaaaggcaatctagtctcctttctggganagaggttctgaaaactttcaagctccctggcagaaaaacattttcagggaggctaaggggtaagggttgcaccaatcaggtagggccctcctgcccccagccacaaacccttccatacctgccagcctcctttggacagattttgtggaaattttgtgaattctgaggccaagggaactgaggtgtgggggtctcacagaagtgtgataaattctagaaaactagctgcaagggaccagatctgggcccaaccctgtgatgggcaggtgggcatgggctgcatgtagtggttctcctggtggcaatggcggctggacggaggatgcggtggagcagagaagggggtgggagggtagagtggatggtcagtgtctggtcatttccgactgaagagtgagcccagcagaaccacgccggccacagtcatgcccgtcagggaaccagcgggtttgaagcgttcctggccctttcgggctctcggctgctgcattgtttcccattagagttccaccaaaaagtatcctgttcaaagctctgatatgctgtccctggggtgatgtggagctgggatgtcacctcactgaatgcccgccggtaccgcagttcaaactcgtcgcctgcctccctcagcgcttgctttactgctgccatggggatcacctcccgggcatccaaactgctgctgtggccagtggctccattcaccgcggggctgtctgccaggtcgccaggatgggttgccattgatgcactggggtctccatctccgatcagtccctttggatactc

SEQ ID NO: 114168 - DNA, 907 bp, Homo Sapiens
  misc_feature (700)..(738): n is a, c, g, or t
caaggtagcgaggcctgggtggcgaattccgcacgagggaggcaggagggcctactgggtcttcttatcttccggtgggtagtagggaggtggcggcggctggctcgtgggcatgtagacgttgtgaggattgcctgggttgtaataggcgctgggcggctgcttcctgcggccttgccttcggctgcaggactgggacggggacatcggggccgctgaccggaggttccatgggcccagggtagggcgctcgtgggggctgcacgtatcccatggccccgtccatcatggggggtcctggatagaactcttgagatgccacctggagcatccgctgtccgaactcaatggcgccacctgccgtgaaagtcaacttgtaggaagcagagccttcccagccacctcccgcttccgccttcactgttcccttgatgtagtttgcaccaaatacgggctgcttgatctcacagtctttcatgagataaaatggcatcatgaaggactgcatggcatccttgcccttggacagaaagatgacccggtaaggggtaaggtagacagtgcctttcttggtccctcttgaaggcttctggcacgttcttcatgtcattgaatgtgagttccacgtgatcataggacattaggatgctctcggtgttattgacgatcactccgccgccctccgagtgattcttgggcnnnnnnnnnnnnnnnnnnnnnnnnnnnnnnnnnnnnnnncatggtcatagctgtttcctgacccagctttcttgaacaaagtgggagatctggccggcctccctatagggagtcggtattaattttcaataagcccagtttaacctgcatttaatgaatcgggctgccgtaacccgggcaatttaaacccgccctaaatggggcgggc

SEQ ID NO: 114169 - DNA, 1221 bp, Homo Sapiens
  misc_feature (856)..(856): n is a, c, g, or t
  misc_feature (918)..(918): n is a, c, g, or t
  misc_feature (950)..(950): n is a, c, g, or t
  misc_feature (1171)..(1171): n is a, c, g, or t
tgagtctcgggaccctgttggagagactatggcgctcaacaagaatcactcggagggcggcggagtgatcgtcaataacaccgagagcatcctaatgtcctatgatcacgtggaactcacattcaatgacatgaagaacgtgccagaagccttcaaagggaccaagaaaggcactgtctaccttaccccttaccgggtcatctttctgtccaagggcaaggatgccatgcagtccttcatgatgccattttatctcatgaaagactgtgagatcaagcagcccgtatttggtgcaaactacatcaagggaacagtgaaggcggaagcgggaggtggctgggaaggctctgcttcctacaagttgactttcacggcagggggcgccattgagttcggacagcggatgctccaggtggcatctcaagcctccagaggtgaagtccccagtggagcctatggctactcttacatgcccagcggggcctatgtctatcccccgccagtcgccaatggaatgtaccgcctgcgcctcctggctacccctatccaccgcccccacctggtgagtgtgtcctttgctgcccccactcccctcatgagcccacctacccaggctccccccaggccagggagactttattccttgagctgcttcaggaccaacgaaggagctggagaggcccccctcacccgggagggggccgcagccgggtgctcaccatgtccttgttactctctcaccgagcagagttctatccaggaccccccatgatggacggggccatgggatacgtgcagcccccaccaccgccctaccctgggcccatggaacctccggtcagcggccccgatgtcncctccactcctgcaggtgagggcccttgggtgctgggagcccttcgggaccagccctctccntcccgatgtcgcacagagagcctcagaatggncacagactgctgagagccgcagatgatggatgacccctggactaccccaggggcccagcagggctgtggcctggtggagcggagctagattctggccccacccccatcccttagctatccatgtgccctggggcggggaaggtcacctgtgttgctctcgatcttctcatctacactcaggtgggcggtcacatgggacctggggcattggtcagggttanatgagggggacagcgatgggcctggaaaggcctgcaccgcgtgcatgtgc

SEQ ID NO: 114170 - DNA, 541 bp, Homo Sapiens
  misc_feature (261)..(261): n is a, c, g, or t
  misc_feature (359)..(359): n is a, c, g, or t
aagtgctcaacaaacatttactgcccaaatgaattataaactaggaaacatatttaagatgtgaagtgtcttgtcacttctggagcttatagccaagtagtggatgacaagggttcaggacggtaatgggtatttccccaaggaagatcggatgactgaactgatattgggtcgggccagccgggcaggaggatctgcggtgcaactgcagacagtctcaggccagtgtccaatggcttggtggcactgccaaccggcttncgaaggatgaatggcaatagctatgtgcttctgaggcagagcaaccaatggagtaccagcagggccctgctccttcgccgaggaactcagccgcatcnggtattcggccactactctggggcacgcagcacggacgcgagtttacatatattacggacccctggattccgtcgggcgaagtcgatcacctcccgctccacgaactccctaagcgacccgggacagtgagcagtatgaccctgactgggggcgacctacgccggggagtcgttgccacctc

SEQ ID NO: 114171 - DNA, 588 bp, Homo Sapiens
  misc_feature (231)..(231): n is a, c, g, or t
ggctgtgcgcgagcagagcatccactgcaagtcggtcgaggagattcgacgctggtgcagaagctggcgaccagtcgggcttggacgtgatccgcatccgcaagcccttccacacgacaaccctagcatccagggccagtggcacccttcaccaaccaagccgaccacgttccgcgggctacgcccccgagaggttcaaggatccctgcccccagcccaggtccaagcacnagtgaagagttcccccaccaactgccagccccaggctttgggactgttactccgtgcctgcttctgggggcagtgaccttgtgaaccactcatttttatgcaagtggcatccctaaaacctgagatgaggaagacttcaagggttttacagggcccttgttttttaaatccaaattgataataatgatctcgaaaacacagtgagaggtctgaaggctggcttctgaagaatccctgatgtcttattggaacaaccactgagctacggagagctctgctgtgatgggctaggcactttatatctgtgtgaatacagatttataaaacaggttaataaacttatccaaggtcacaaaa

SEQ ID NO: 114172 - DNA, 518 bp, Homo Sapiens
  misc_feature (345)..(353): n is a, c, g, or t
tgcggccgcccgcctacaacctggaggccggccagggcgactacgcgtgcggcccgcacggctacggcgccatccccgccgcgcccccgccgccgccctacccctacctcgtcacagggatacccacccaccatcccagggtctacaacatccacagccggaccgtcacccgctatcctgccaactctatcgtggtcgtaggaggctgtcctgtctgcagggttggggtgctggaggactgcttcaccttcctgggcatcttcctggccatcatcctcttcccctttgggttcatttgctgttttgccttgaggaagcgacgatgccccaactgtggagccaacnnnnnnnnnctaatgtaaatgttgtgtacaatagttttatttgattaagcttcaggactgttttgtaaagcgaggtgggaccgatgtggcacacgccagctgcggtttcccggagcgtggagaggcagtgctgctgctcccgcccgaggctcatgacaactcaataaagcactg

SEQ ID NO: 114173 - DNA, 562 bp, Homo Sapiens
tgcggccgcccgcctacaacctggaggccggccagggcgactacgcgtgcggcccgcacggctacggcgccatccccgccgcgcccccgccgccgccctacccctacctcgtcacagggatacccacccaccatcccagggtctacaacatccacagccggaccgtcacccgctatcctgccaactctatcgtggtcgtaggaggctgtcctgtctgcagggttggggtgctggaggactgcttcaccttcctgggcatcttcctggccatcatcctcttcccctttgggttcatttgctgttttgccttgaggaagcgacgatgccccaactgtggagccaccttcgcttaaagggaacaccaggcccggctttcctacacccagctctctttttctaatgtaaatgttgtgtacaatagttttatttgattaagcttcaggactgttttgtaaagcgaggtgggaccgatgtggcacacgccagctgcggtttcccggagcgtggagaggcagtgctgctgctcccgcccgaggctcatgacaactcaataaagcactgc

SEQ ID NO: 114174 - DNA, 1123 bp, Homo Sapiens
  misc_feature (122)..(169): n is a, c, g, or t
ttcaaaaacctgagatcagttctgtgttctggaacagctctccttttccacaggaggagtccctcatggattgcggtattggttggttgtggtgatttggggagcacgagggagagcaatgnnnnnnnnnnnnnnnnnnnnnnnnnnnnnnnnnnnnnnnnnnnnnnnngtcactgctcgtctgacacactttgctgcgaggccgtgtcgtccaggcccatgtcctcctggcttgctctcctgcagacaaccccgagagtgtccgccacagcctcagccagacatcggtcatgaagctgcccctgctcggtggcatcagggggctcacatggctcggagaggtgccgagtggcctggctggcagccctggctgaggggcccatcacgatgttgaccctgctggatgactgggtgtcactggtattgcccccctccgcagcaaagagtccggaaatgacgagcgcgctggaaaagctcctcttgccgaagaggaagctcagggtggagctggtggaggatcccaggctggacctgatgagcgcctcggcccgcttccggacactcaggtggccggtggtggtcaccgccgggggtttaaactccacggacctgttccaaggtgggtaaggaaagacttgcttgtcccaataaccttctggggccagctccgtggccctggaaggtcgccagccccgaaagggtactgtgcttctcctgcgccccttctgctcaatgcacgcccccgtagacgacaatctattacatttctgcgatccttccgtgttggatctttcagtcctgctctcctccccggcactccgtctacgtcctattgtctcgctacgcagccctccacactgtcccgaccacgctggcttcttttctatcgtgcccccaatcagatccgccgtctactcggccgctcctctcgcccgactccacatcgcaccaccatatcctacggcgcagcgacttctgttttaacattcgagctccacgttacttacggagcctctgaccgcgttttcccagtgcaatccgcaaccctacggcgggatgggccgacgttacaatctgtgtccacacgtttcctcttatcccttctaatttcctcgtgactttc

SEQ ID NO: 114175 - DNA, 653 bp, Homo Sapiens
  misc_feature (121)..(168): n is a, c, g, or t
  misc_feature (256)..(256): n is a, c, g, or t
  misc_feature (403)..(403): n is a, c, g, or t
  misc_feature (481)..(495): n is a, c, g, or t
  misc_feature (510)..(510): n is a, c, g, or t
  misc_feature (639)..(639): n is a, c, g, or t
tcaaaaacctgagatcagttctgtgttctggaacagctctccttttccacaggaggagtccctcatggattgcggtattggttggttgtggtgatttggggagcacgagggagagcaatgnnnnnnnnnnnnnnnnnnnnnnnnnnnnnnnnnnnnnnnnnnnnnnnngtcactgctcgtctgacacactttgctgcgaggccgtgtcgtccaggcccatgtcctcctggcttgctctcctgcagacaaccccgangagtgtccgccacagcctcagccagacatcggtcatgaagctgcccctgctcggtggcatcagggggctcacatggctcgaagaggtgctaaaagcagtgggccatctcagcagctttaaagtcaaatcgattggctgagaagcagntgaagctctaactccacatgaccagggtgtccttttcctttcctaggccaaacatgggaaaaagagtctgctgggatnnnnnnnnnnnnnnnattcttcgtctgccnccgtgtaggggcagatgcccacagttctgcagaccttgatttccggggactcctttttcaggcctgctgggatatatcggttcaggcctcggcccgcattccttgccccggaggccaatcctttatggngggccgttttaatt

SEQ ID NO: 114176 - DNA, 1231 bp, Homo Sapiens
  misc_feature (140)..(149): n is a, c, g, or t
  misc_feature (536)..(548): n is a, c, g, or t
  misc_feature (678)..(724): n is a, c, g, or t
  misc_feature (1188)..(1188): n is a, c, g, or t
cttcccccatcccggcccctggtcatctcacagcaaagaagcctcctccctcccgacctgccgccacactggagagggggcacaggggcgggggaggtttcctgttttgtgaaaggccgactccctgactccattcatgnnnnnnnnnnagcccctcagataccaccagcgtttaccatagccctgggcgcaacgtgctgggcaccgagagcagagatggccctggctgggcccagtggctgctgcccccagtggcctgacagcccagtctttgaggacagcaaggcaaagccagagcagcggccgtttttgcacagccggggcatgttggaccgctcccgcctggccctgtgcacgctcgtcttcctctgcctgtcctgcaaccccttggcctccttgctgggggcccgggggcttcccagcccctcccttcattcccattccccaacctaaagcctggcccggctcccagctgaatctggtcggaatccacgggctgcagattttccaaaacaatcgttgtatctttattgacnnnnnnnnnnnnnctgaatgcaatgactgttttttactcttaaggaaaataaacatcttttagaaacagctcgatacacacaatcttcagtgtgaagcaatatactaataagaacactagtcgtcttaacatttacagtcttnnnnnnnnnnnnnnnnnnnnnnnnnnnnnnnnnnnnnnnnnnnnnnnaacgaggccagatataatacacacgtttaccattttacagtcatatgtacaggaagttgctagggcggccctgggctgggggctgcgtcaggcctatcgaagcgtggacagagctgaggacacggacggacaggcggacggactggcagggactggcccgggccggtggtggctgcgtggacaagtggcgtcgcggtagccccttacccggcaaaggcccggttggggctctgttgcgggcgcacgacgcacggcggcgacacacgggagaagcgagcatgttcccaacatatatacattctatgtaacatatatatagaggggtacacaggttttgtacacgaaatctagcgctgtccctgctcccgtgcagagtaggcgcggcggtccctggtggtgcacaacggtcgcgcgtccgccggagccggaggtgcgttctggccgcttcttgggttttgcgctcncaggctgggctccaggggtggggtggaggactggaaaggggac

SEQ ID NO: 114177 - DNA, 1117 bp, Homo Sapiens
  misc_feature (336)..(346): n is a, c, g, or t
  misc_feature (462)..(480): n is a, c, g, or t
  misc_feature (611)..(657): n is a, c, g, or t
tccccctgctcccagggcacatggttgggctgtgtcaacccttagggcctccatggggtcagttgtcccttctcacctcccagctctgtccccatcaggtccctgggtggcacgggaggatggactgacttccaggacctgttgtgtgacaggagctacagcttgggtctccctgcaagaagtctggcacgtctcacctcccccatcccggcccctggtcatctcacagcaaagaagcctcctccctcccgacctgccgccacactggagagggggcacaggggcgggggaggtttcctgttctgtgaaaggccgactccctgactccattcatgnnnnnnnnnnnagcccctcccttcattcccattccccaacctaaagcctggcccggctcccagctgaatctggtcggaatccacgggctgcagattttccaaaacaatcgttgtatctttattgacnnnnnnnnnnnnnnnnnnnctgaatgcaatgactgttttttactcttaaggaaaataaacatcttttagaaacagctcgatacacacaatcttcagtgtgaagcaatatactaataagaacactagtcgtcttaacatttacagtcttcnnnnnnnnnnnnnnnnnnnnnnnnnnnnnnnnnnnnnnnnnnnnnnnacgaggccagatataatacacacgtttaccattttacagtcatatgtacaggaagttgctagggcggccctgggctgggggctgcgtcaggcctatcgaagcgtggacagagctgaggacacggacggacaggcggacggactggcagggactggcccgggccggtggtggctgcgtggacaagtggcgtcgcggtagccccttacccggcaaaggcccggttggggctctgttgcgggcgcacgacgcacggcggcgacacacgggagaagcgagcatgttcccaacatatatacattctatgtaacatatatatagaggggtacacaggttttgtacacgaaatctagcgctgtccctgctcccgtgcagagtaggcgcggcggtccctggtggtgcacaacggtcgcgcgtccgccggagccggaggtgcgttctggccgcttcttgggttttgcgc

SEQ ID NO: 114178 - DNA, 769 bp, Homo Sapiens
  misc_feature (133)..(155): n is a, c, g, or t
  misc_feature (224)..(245): n is a, c, g, or t
cagccaagacccaacagtaacaggaacagacctgatccacgtggcaggaaaaagaggaacctgaacccctctgcaagtattctctttcctgaccagctgggcttgccgcactttgtgagatttgcaaaaaaannnnnnnnnnnnnnnnnnnnnnnttccataggaaaacaacatcagatgtcttcccctagatgaacgatgaagagtcaaactgcaggttcttnnnnnnnnnnnnnnnnnnnnnncaccatgatactaacaacggtggaagggtgagggtgaggaattacagatggagagattccaaatcagaaggaaacgtgacatggagtcccaggctcatgccctccgccagaattccagccccgcctgtgctgggtagtttgtctaaggtgctccagggtccctcttggtctgcaagagaagtgtccctgccatttctgggtcgcttccttttccactctcctcagcccgcctgctccgtcacacttccagcaatcctggtgggcaggggttccctgggctgctggcccgctgaggtggactgttggttccttcagcattcatcttcttggtatatttgttcatccagctcctgggactctaggtgctccagacggtctgttcggccactcatgatttcatctggggttttcataaacctgaacaaaagcctttgtcctggctccttcctgataatgtttagtttgtagtagtggcgcagggctctggacattttctcataggtcatgtttgttctgttcttatg

SEQ ID NO: 114179 - DNA, 644 bp, Homo Sapiens
  misc_feature (130)..(153): n is a, c, g, or t
  misc_feature (222)..(243): n is a, c, g, or t
cagccaagacccaacagtaacaggaacagacctgatccacgtggcaggaaaaagaggaacctgaacccctctgcaagtattctctttcctgaccagctgggcttgccgcactttgtgagatttgcaaaannnnnnnnnnnnnnnnnnnnnnnnttccataggaaaacaacatcagatgtcttcccctagatgaacgatgaagagtcaaactgcaggttcttnnnnnnnnnnnnnnnnnnnnnncaccatgatactaacaacggtggaagggtgagggtgaggaattacagatggagagattccaaatcagaaggaaacgtgacatggagtcccaggctcgtgccctccgccagaattccagccccgcctgtgctgggtagtttgtctaaggtgctccagggtccctcttggtctgcaagagaagtgtccctgccatttctgggtcgcttccttttccactctcctcagcccgcctgctccgtcacacttccagcaatcctggtgggcaggggttccctgggctgctggcccgctgaagtggactgttggttccttcagcattcatcttcttggtatatttgttcatccaactcctgggactgtaggtgctccagacggtcttgtcgggcactcatgatttcatc

SEQ ID NO: 114180 - DNA, 582 bp, Homo Sapiens
gcaaggtaccatccaacagtagagtacgtgactgtacgcagaattaacctagaagcttgttccaatgagatggtaacattcttgcagggcgagctgcatgtctccaaactcttcaaccatcccaatatcgtgccatatcgagccactttaattgcagacaatgagctgtgggttgtcacatcattcatggcatacggttctgcaaaagatctcatctgtacacacttcatggatggcatgaatgagctggcgattgcttacatcctgcagggggtgctgaaggccctcgactacatccaccacatgggatatgtacacaggagtgtcaaagccagccacatcctgatctctgtggatgggaaggtctacctgtctggtttgcgcagcaacctcagcatgataagccatgggcagcggcagcgagtggtccacgattttcccaagtacagtgtcaaggttctgccgtggctcagccccgaggtcctccaagggccatcagtgtcttgcctagcttgagggcttaagtccttatgctgtgttagtttcgttgtcagaacaaattaaaattttcagagacgcaaa

SEQ ID NO: 114181 - DNA, 1549 bp, Homo Sapiens
  misc_feature (42)..(94): n is a, c, g, or t
attaggttccgcgggtgtccagaaggctggcatggttatttnnnnnnnnnnnnnnnnnnnnnnnnnnnnnnnnnnnnnnnnnnnnnnnnnnnnntgatggaaccgtccaggatccgctgattggttgaggatttcccgtgggggtgtgcaaagaccctgggaaggcattgtggaggttgttttcccgatgagtttgttttttgcagagcagtggagcatgtgaacgttggcggaaaggaaagtcctttgcggcccagtttgccccaagagggcgggaatttggccggccccttcaagaaaggggcctgtgggtgcgctgtgcttccctgggtggagaatgcgcacaatttgcagaggctcagaactcccaatcgtccacctccagctctttcaggttttgttatcagggcaaagatttcactgtggtcgtgagactggctgccctcaaaattggtgatgggggtgacaggacgaagcaattcgggcaaagcctctgaggcacgtcgcttgatctggcatccgggttgcgctgaaggcactggtccacaaagtggtggaagtggggggagaaggttcggtggtaggggtgggagggcgagtcaccgttggagggccggggggtgctggtggtcaggctgtcactcaggccagagttggccactgagcgcgaagggctcatggtcagctcctcagcggggatggtgctggtatccaacaggcagggcactgtgccgttcagtttctctagcagcatctgggtggcaggcatatccttaaaggggacatggccgttggcccagttcacaagctgtgattcccacactgtagatgtcagacttggcatcatgaaccctggagattctgtgtacatatcccatgtggtggatgtagtcgagggccttcagcaccccctgcaggatgtaagcaatcgccagctcattcatgccatccatgaagtgtgtacagatgagatcttttgcagaaccgtatgccaatgaatgatgtgacaacccacagctcattgtctgcaataaaagtggctcgatatggcacgatattgggatggttgaagagtttggagacatgcagctcgccctgcaagaatgttaccatctcattggaacaagcttctaggttaatcctccgtacagtcacgtactctcctgttggtttgtaccttgctagattcacagtcatcaggtcctcaaatcctttgcctatcacagtgagcagctcgtaacaccctccctctggcagaaagctactcatgacctcctgtttagagaaggatgctattgactctgagctcgcatcattggtctccaaatagttccaaatctcttaagccctcaacaatgacttttccgagacccaccgcctgattcgctctggtttacttacaagaaatgacatgagttcctactgtgtaggcctacttcagtttcaaaaacttaaacctgttcctggagttagcaagcagccccgaccgtcttggctccgcctcctcagttttactgccgcgccgccgccagaccggttgctgggaggg

SEQ ID NO: 114182 - DNA, 984 bp, Homo Sapiens
  misc_feature (704)..(712): n is a, c, g, or t
  misc_feature (790)..(790): n is a, c, g, or t
gggacggctcgtgagcggaatcctgactggttcatcctccccggaacttcctagacgccgtacgtgccagatggtgttacctggagcttaaaaagctgcacgcaagtgttaaacttctgtaggaggaatactgttggcgttcaaaagcattgctgtttcagttaagtagttccttaattacttacaatgtagtaaggctacattgaaggaagatataaatttcagtcaagactacgactgagcaaagacaatggccaagaacaaattaagagggccgaagtccaggaatgtatttcacatagccagccaaaaaaactttaaggctaaaaacaaagcaaaaccagttaccactaatcttaagaagattcctcagcagcgtcatgaaagcaaaccagttaatgttgatgaagctacaagattaatggctctgttgtaatatactggtgatgcatctaattctccacaaagaccaataaattggaatgttttatacgaggggtatacgacctgaaaccagacaagcgaagcctggtgcagaggagcttggaaaagtagcccttggcggccccgcctcgcccctcaaaaaaattttatagaaccattcaatttgggcgccgggcctcccccgaaggagactggaacatgggcataagactgttcacctaagaaaaccctgcaacctagaattagggcgtgtgtcgttnnnnnnnnnacagcaaaacctccccggtcgaacaacaccttagtctttttctatatctgatctcgctcgatggcaacgtcccggaangcgacgtttaacgggggagccgtgttcaacccgggttggccctcagcttgacacctgtggcctctcgaagatatcgatcttcacctggacctcggcccccgccactagaagagtagaacgggacaccatgcagccggatttacgcttggttagtctgagccgacactcttggggaataatgtgtcttaccgcac

SEQ ID NO: 114183 - DNA, 746 bp, Homo Sapiens
ggtgttacctggagcttaaaaagctgcacgcaagtgttaaagctgtctgagcaatggccaagaagcaaataaatgatgggccagaagtgccaggaatgtatgtcacatagccagccaaaaaaactttaaggctaaaaacaaagcaaaaccagttaccactaatcttaagaaggtgagtattagttaagcactctgactttattgtttacaagcaaagtgtcattgtaagctactgaacagctgtatactattactttttaaaaaggttcttcatttttcctagaaaggtaaggatggtttcaagcatttgtctaaaaaaatataagaacaaaaggaagaaaaataacctccctttcttgaaaacaaatgttgaaaagaaataaacattttaactacaaatgtgtgaagcttcaatttaatagttttactgaaccatagaactcatttaaaaaccatagtatgggaaacagttcttatctctaaactcaaatgtcagaatgtattaatagaggcaagacatgggatgtcagtgagcacccattctttttctcctcagtaattcttgtatctttgaagacatctgcaattcaaacaaaaacctgtaaaatgaagataaaaatatttattgaaatgcacaattgtgaaaggggtttctttacttggttgatatttcaaaatacctgagaaatttctaccagatttacgaaaaatgttaagaaaatgtgtcaagtttcagtagtagatgg

SEQ ID NO: 114184 - DNA, 579 bp, Homo Sapiens
ctcgcgaacgtgttatccgggagtaggcgcttccggccattcatactgcagtcggtcagtgttcggttgaaggattctgtgtgctgtcggacccagagggtgacggcgccgctaggatgaagctcgtgagatttttgatgaaattgagtcatgaaactgtaaccattgaattgaagaacggaacacaggtccatggaacaatcacaggtgtggatgtcagcatgaatacacatcttaaagctgtgaaaatgaccctgaagaacagagaacctgtacagctggaaacgctgagtattcgaggaaataacattcggtattttattctaccagacagtttacctctggatacactacttgtggatgttgaacctaaggtgaaatctaagaaaagggaagctgttgcaggaagaggcagaggaagaggaagaggaagaggacgtggccgtggcagaggaagagggggtcctaggcgataatgtctctcaagatttcaaagtcatatgagatttgggatattttttgtacaggttgtgtttgtttatgtcagtttttaataaacataaatgtggtaaaaaaccc

SEQ ID NO: 114185 - DNA, 855 bp, Homo Sapiens
  misc_feature (457)..(457): n is a, c, g, or t
  misc_feature (546)..(583): n is a, c, g, or t
  misc_feature (624)..(643): n is a, c, g, or t
  misc_feature (645)..(648): n is a, c, g, or t
gggggagtaggcgcttccggccattcatactgcagtcggtcagtgttcggttgaaggattctgtgtgctgtcggacccagagggtgacggcgccgctaggatgaagctcgtgagatttttgatgaaattgagtcatgaaactgtaaccattgaattgaagaacggaacacaggtccatggaacaatcacagacagtttacctctggatacactacttgtggatgttgaacctaaggtgaaatctaagaaaagggaagctgttgcaggaagaggcagaggaagaggaagaggaagaggacgtggccgtggcagaggaagagggggtcctaggcgataatgtctctcaagatttcaaagtcatatgagatttgggatattttttgtacaggttgtgtttgtttatgtcagtctttaataaacataaatgtgggacagagctgtctatttagtatatcanagttttagtagtttcctccacattcacgaaattaccacagtgagagctaagcatttctactgggcagtttcatttttagttgatcaggnnnnnnnnnnnnnnnnnnnnnnnnnnnnnnnnnnnnnnatgatgaataaggttaaaataaaagcccttagacaaacccnnnnnnnnnnnnnnnnnnnnannnnaaaaaatgtccggccgccttcggccctcgaaaaacctttctaaaaaccattcctttggggcccgccgggccccgtaagggaaaggggaccctgggccaatacctggtttcccaaggaaaaaccctgggccatgaactaagggcttgggaatttccccccccaataaaaaaacgcccccgggggggaaaaccggaagcggttttttgg

SEQ ID NO: 114186 - DNA, 605 bp, Homo Sapiens
  misc_feature (360)..(493): n is a, c, g, or t
tcctttttcagtctattttaatttataaaaactaatcttgacaatttgaagaatccacctaagtacaagtttgtaccacactggtgactagtgtttttccctagttaacaagtgaaagatcatgtatacccagcgggcctgggcccagccccaccatcccgagcgcacagcagcagtgttctgaagctggactgcctggatttgaatccaggtcaagcacttaactctgcagccttgagcaattacctttctgtggctgtttcctcttctgtaaaatgggaacagtaccacctagattgtagtgttggttgatctgataaacacacaaaaggcttactctggctgggcgtggtgggtgannnnnnnnnnnnnnnnnnnnnnnnnnnnnnnnnnnnnnnnnnnnnnnnnnnnnnnnnnnnnnnnnnnnnnnnnnnnnnnnnnnnnnnnnnnnnnnnnnnnnnnnnnnnnnnnnnnnnnnnnnnnnnnnnnnnnngtgtacctgtagtcttagctacccaggaggccaagttggaggggaggtaagaggttgcagtgaacccaaacgacaccactgtactccagtgagacctgatctcaggcaaaaa

SEQ ID NO: 114187 - DNA, 602 bp, Homo Sapiens
  misc_feature (110)..(243): n is a, c, g, or t
ttgcctgagatcaggtctcactggagtacagtggtgtcgtttgggttcactgcaacctcttacctcccctccaacttggcctcctgggtagctaagactacaggtacacnnnnnnnnnnnnnnnnnnnnnnnnnnnnnnnnnnnnnnnnnnnnnnnnnnnnnnnnnnnnnnnnnnnnnnnnnnnnnnnnnnnnnnnnnnnnnnnnnnnnnnnnnnnnnnnnnnnnnnnnnnnnnnnnnnnnnntcacccaccacgcccagccagagtaagccttttgtgtgtttatcagatcaaccaacactacaatctaggtggtactgttcccattttacagaagaggaaacagccacagaaaggtaattgctcaaggctgcagagttaagtgctagacctggattcaaatccaggcagtccagctacagaacactgctgctgtgcgctcgggatggtggggctgggcccaggcccgctgggtatacatgatctttcacttgttaactagggaaaaacactagtcaccagtgtggtacaaacttgtacttaggtggattcttcaaattgtcaagattagtttttataaattaaaatagacagaaaaatga

SEQ ID NO: 114188 - DNA, 602 bp, Homo Sapiens
  misc_feature (360)..(493): n is a, c, g, or t
tcatttttcagtttattttaatttataaaaactaatcttgacaatttgaagaatccacctaagtacaagtttgtaccacactggtgactagtgtttttccctagttaacaagtgaaagatcatgtatacccagcgggcctgggcccagccccaccatcccgagcgcacagcagcagtgttctgtagctggactgcctggatttgaatccaggtctagcacttaactctgcagccttgagcaattacctttctgtggctgtttcctcttctgtaaaatgggaacagtaccacctagattgtagtgttggttgatctgataaacacacaaaaggcttactctggctgggcgtggtgggtgannnnnnnnnnnnnnnnnnnnnnnnnnnnnnnnnnnnnnnnnnnnnnnnnnnnnnnnnnnnnnnnnnnnnnnnnnnnnnnnnnnnnnnnnnnnnnnnnnnnnnnnnnnnnnnnnnnnnnnnnnnnnnnnnnnnnngtgtacctgtagtcttagctacccaggaggccaagttggaggggaggtaagaggttgcagtgaacccaaacgacaccactgtactccagtgagacctgatcacagacaa

SEQ ID NO: 114189 - DNA, 836 bp, Homo Sapiens; identical to SEQ ID NO: 104462

SEQ ID NO: 114190 - DNA, 942 bp, Homo Sapiens; identical to SEQ ID NO: 104463

SEQ ID NO: 114191 - DNA, 512 bp, Homo Sapiens
cctttaaaaagccaactttgtacaaaaaagttggctcatctttgccccttaaatacaggagctcgtgccgtggcccacagcccacagcccacagccatgggctgggacctgacggtgaagatgctggcgggcaacgaattccaggtgtccctgagcagctccatgtcggtgtcagagctgaaggcgcagatcacccagaagatcggcgtgcacgccttccagcagcgtctggctgtccacccgagcggtgtggcgctgcaggacagggtcccccttgccagccagggcctgggccccggcagcacggtcctgctggtggtggacaaatgcgacgaacctctgaacatcctggtgaggaataacaagggccgcagcagcacctacgaggtgcggctgacgcagaccgtggcccacctgaatctttatgtgaacgggctggagggtgtgcaggactacctgtcccgcctcaccttctaggggaagcccctgaaggaccagctcccgctggggga

SEQ ID NO: 114192 - DNA, 1187 bp, Homo Sapiens
tttgtacaaaaaagttggcagctctggagccagtgcgctacctgatgcatgtcccagggaacgccggtgcagatgtgcttcttgtgggctcagaggccttcgtgctgctggacgggcaggagctgacgcctcgctggacacccaaggcagcccatgtcctgagaaaacccatcttcggccgctacaaaccagacaccttggctgtagccgttgaaaacggaactggcaccgacagacaggagaccggggaggcccggcacagcctgtacatgttccaccccaccctgccgcgcgtgctgctggagctggccaatgtctctacccacattgtcgcctttgacgccgtcctgtttgagccaagccgccacgccgcctacatccttctgacaggcccggcagactcagaggcacccggcctggtctctgtgatcaagcacaaggtgcgggaccttgtcccaagcagcagggtggtccgcctgggtgagggtgggccagacagtgaccaagccatcagggaccggttctcccggctgcggtaccagagtgaggcgtagaggcacgccagccagagcctgtggagagactccgcctgctgacactaaacgtcctgggaagtgggcccttccctgggtctctgcactgactcccccactcctgaccctggtgatggtcgccactgggcagcagcagccttaccagtcctccatgatcacacccagggacctgcatgggtgaggggacaccctgggcctctctcccgcccagcatcctccctgagtccccacacagggcctcactctgcaccccaccagggtcccgctcacaccaggcagccttcatagtggtctccctggccaccttgggcagagctgggtcatgcagcaccccatccttacccggtgccctctccttgccagcttctccccaggccagagcggccatcgcgtagaaagaaccagggtgtccccgggacaggccgtcccccaccccatcctgtaaaagtccattccccttttccctcctgtgctctgtcccccaaggattcatggaactcaaggtactgggcctcaacgggaacctcacacagctccagcttcgaagcccttcccggagctacagggggatcctctaacatggggggtgtgacttggttcctttgaccatgtcctgtgcagaaccctgaacca

SEQ ID NO: 114193 - DNA, 746 bp, Homo Sapiens; identical to SEQ ID NO: 104464

SEQ ID NO: 114194 - DNA, 947 bp, Homo Sapiens; identical to SEQ ID NO: 104465

SEQ ID NO: 114195 - DNA, 967 bp, Homo Sapiens; identical to SEQ ID NO: 104466

SEQ ID NO: 114196 - DNA, 1138 bp, Homo Sapiens; identical to SEQ ID NO: 104467

SEQ ID NO: 114197 - DNA, 1037 bp, Homo Sapiens; identical to SEQ ID NO: 104468

SEQ ID NO: 114198 - DNA, 681 bp, Homo Sapiens; identical to SEQ ID NO: 104469
  misc_feature (402)..(441): n is a, c, g, or t

SEQ ID NO: 114199 - DNA, 937 bp, Homo Sapiens; identical to SEQ ID NO: 104470

SEQ ID NO: 114200 - DNA, 903 bp, Homo Sapiens; identical to SEQ ID NO: 104471

SEQ ID NO: 114201 - DNA, 875 bp, Homo Sapiens; identical to SEQ ID NO: 104472

SEQ ID NO: 114202 - DNA, 752 bp, Homo Sapiens; identical to SEQ ID NO: 104473

SEQ ID NO: 114203 - DNA, 1278 bp, Homo Sapiens; identical to SEQ ID NO: 104474

SEQ ID NO: 114204 - DNA, 580 bp, Homo Sapiens; identical to SEQ ID NO: 104475

SEQ ID NO: 114205 - DNA, 1112 bp, Homo Sapiens
ttggcactatcagctccaaataccttggagacattctggacttcgcctacacttcccgcatcgtggtgcgcttggagagctttcccgaactcatgacggccgccaagttcctgctgatgaggtcggttatcgagatctgccaggaagtcatcaaacagtccaacgtacagatcctggtaccccctgcccgcgccgatataatgctctttcccccccctgggacctcggacttgggcttccctttggacatgaccaacggggcagccttggcagccaacagcaatggcatcgccggcagcatgcagccagaggaggaggcagctcgggcggctggtgcagccattgcaggccaagcctctttgcctgtgttacctggggtggaccgcttgcccatggtggctggacccctatccccccaactgctgacttccccattccccagtgtggcatccagtgcccctcccctgactggcaagcgaggccggggccgcccaaggaaggccaacctgctggactcaatgtttgggtccccagggggcctgagggaggcaggcatccttccatgcggtctatgtggtaaggtgttcactgatgccaaccggctccggcagcacgaggcccagcacggtgtcaccagcctccagctgggctacatcgaccttcctcctccgaggctgggtgagaatgggctacccatctctgaagaccccgacggcccccgaaagaggagccggaccaggaagcaggtggcttgtgagatctgcggcaagatcttccgtgatgtgtatcatcttaaccggcacaagctgtcccactctggggagaagccctactcctgccctgtgtgtgggttgcggttcaagagaaaagaccgcatgtcctaccatgtgcggtcccatgatgggtccgtgggcaagccttacatctgccagagctgtgggaaaggcttctccaggcctgatcacttgaacggacatatcaagcagtgcacacttctgagcggcctcacaagtgtcagacctgcaatgcttctttgccacccgagaccgtctgcgctcccacctggcctgtcatgaagacaagtgccctgccaggtgtgtgggaagtacttg

SEQ ID NO: 114206 - DNA, 616 bp, Homo Sapiens
taaaaggccaactttgtacaaaaaagttggcatcatggccctggatcaaggtgaaaaggagaaccccatgcgggaacttcgcatccgcaaactctgtctcaacatctgtgttggggagagtggagacagactgacgcgagcagccaaggtgttggagcagctcacagggcagacccctgtgttttccaaagctagatacactgtcagatcctttggcatccggagaaatgaaaagattgctgtccactgcacagttcgaggggccaaggcagaagaaatcttggagaagggtctaaaggtgcgggagtatgagttaagaaaaaaacaacttctcagatactggaaactttggttttgggatccaggaacacatcgatctgggtatcaaatatgacccaagcattggtatctacggcctggacttctatgtggtgctgggtaggccaggtttcagcatcgcagacaagaagcgcaggacaggctgcattggggccaaacacagaatcagcaaagaggaggccatgcgctggttccagcagaagtatgatgggatcatccttcctggcaaataaattcccgtttctatccaaagagcaataaaaagttttcagtgaaa

SEQ ID NO: 114207 - DNA, 1260 bp, Homo Sapiens
  misc_feature (754)..(788): n is a, c, g, or t
tgcttttttataatgccaactttgtacaaaaaagttgggctgatcgcagtccggaggtggtccattatggctgacatgcaaaatctggtagaaagattggagagggcagtgggccgcctggaggcagtatctcatacctctgacatgcaccgtgggtatgcagacagtccttcaaaagcaggagcagctccatatgtgcaggcatttgactcgctgcttgctggtcctgtggcagagtacttgaagatcagtaaagagattgggggagacgtgcagaaacatgcggagatggtccacacaggtttgaagttggagcgagctctgttggttacagcttctcagtgtcaacagccagcagaaaataagctttccgatttgttggcacccatctcagagcagatcaaagaagtgataacctttcgggagaagaaccgaggcagcaagttgtttaatcacctgtcagctgtcagcgaaagtatccaggccctgggctgggtggctatggctcccaagcctggcccttatgtgaaagaaatgaatgatgccgccatgttttatacaaaccgagtcctcaaagagtacaaagatgtggataagaagcatgtagactgggtcaaagcttatttaagtatatggacagagctgcaggcttacattaaggagttccataccaccggactggcctggagcaaaacggggcctgtggcaaaagaactgagcggactgccatctggaccctctgccggatcaggtnnnnnnnnnnnnnnnnnnnnnnnnnnnnnnnnnnnagtctctaccagttcaggctcagatgagtctgcttcccgctcagcactgttcgcgcagattaatcagggggagagcattacacatgccctgaaacatgtatctgatgacatgaagactcacaagaaccctgccctgaaggctcagagtggtccagtacgcagtggccccaaaccattctctgcacctaaaccccaaaccagcccatcccccaaacgagccacaaagaaggagccagctgtacttgaactggagggcaagaagtggagagtggaaaatcaggaaaatgtttccaacctggtgattgaggacacagagctgaaacaggtggcttacatatacaagtgtgtcaacacgacattgcaaatcaagggcaaaattaactccattacagtagataactgtaagaaacttggcctggtattcgatgacgtggtgggcattgtggagataatcaacagtaaagatgtcaaa

SEQ ID NO: 114208 - DNA, 952 bp, Homo Sapiens; identical to SEQ ID NO: 104476

SEQ ID NO: 114209 - DNA, 903 bp, Homo Sapiens; identical to SEQ ID NO: 104477

SEQ ID NO: 114210 - DNA, 1102 bp, Homo Sapiens
ccaactttgtacaaaaaagttggctctgcgcgtgtgcgttttccctcctccccgccctcagggtccacggccaccatggcgtattaggggcagcagtgcctgcggcagcattggcctttgcagcggcggcagcagcaccaggctctgcagcggcaacccccagcggcttaagccatggcgcttctcacggcattcagcagcagcgttgctgtaaccgacaaagacaccttcgaattaagcacattcctcgattccagcaaagcaccgcaacatgaccgaaatgagcttcctgagcagcgaggtgttggtgggggacttgatgtcccccttcgaccagtcgggtttgggggctgaagaaagcctaggtctcttagatgattacctggaggtggccaagcacttcaaacctcatgggttctccagcgacaaggctaaggcgggctcctccgaatggctggctgtggatgggttggtcagtccctccaacaacagcaaggaggatgccttctccgggacagattggatgttggagaaaatggatttgaaggagttcgacttggatgccctgttgggtatagatgacctggaaaccatgccagatgaccttctgaccacgttggatgacacttgtgatctctttgcccccctagtccaggagactaataagcagcccccccagacggtgaacccaattggccatctcccagaaagtttaacaaaacccgaccaggttgcccccttcaccttcttacaacctcttcccctttccccaggggtcctgtcctccactccagatcattcctttagtttagagctgggcagtgaagtggatatcactgaaggagataggaagccagactacactgcttacgttgccatgatccctcagtgcataaaggaggaagacaccccttcagataatgatagtggcatctgtatgagcccagagtcctatctggggtctcctcagcacagcccctctaccaggggctctccaaataggagcctcccatctccaggtgttctctgtgggtctgcccgtcccaaaccttacgatcctcctggagagaagatggtagcagcaaaagtaaagggtgagaaa

SEQ ID NO: 114211 - DNA, 954 bp, Homo Sapiens
caatgcttttttataatgccaactttgtacaaaaaagttggccttaaatacgtcccctcttggctcttgccgttccaggagccccagttaccgggagaggctgtgtcaaaggcgccatgagcaagatcagcgaggccgtgaagcgcgcccgcgccgccttcagctcgggcaggacccgtccgctgcagttccggatccagcagctggaggcgctgcagcgcctgatccaggagcaggagcaggagctggtgggcgcgctggccgcagacctgcacaagaatgaatggaacgcctactatgaggaggtggtgtacgtcctagaggagatcgagtacatgatccagaagctccctgagtgggccgcggatgagcccgtggagaagacgccccagactcagcaggacgagctctacatccactcggagccactgggcgtggtcctcgtcattggcacctggaactaccccttcaacctcaccatccagcccatggtgggcgccatcgctgcagggaactcagtggtcctcaagccctcggagctgagtgagaacatggcgagcctgctggctaccatcatcccccagtacctggacaaggatctgtacccagtaatcaatgggggtgtccctgagaccacggagctgctcaaggagaggttcgaccatatcctgtacacgggcagcacgggggtggggaagatcatcatgacggctgctgccaagcacctgacccctgtcacgctggagctgggagggaagagtccctgctacgtggacaagaactgtgacctggacgtggcctgccgacgcatcgcctgggggaaattcatgaacagtggccagacctgcgtggcccctgactacatcctctgtgacccctcgatccagaaccaaattgtggagaagctcaagaagtcactgaaagagttctacggggaggatgctaagaaatccc

SEQ ID NO: 114212 - DNA, 514 bp, Homo Sapiens
actttgtacaaaaaagttggcgccgcttgtgctgcagccatgtctctagtgatccctgaaaagttccagcatattttgcgagtactcaacaccaacatcgatgggcggcggaaaatagcctttgccatcactgccattaagggtgtgggccgaagatatgctcatgtggtgttgaggaaagcagacattgacctcaccaagagggcgggagaactcactgaggatgaggtggaacgtgtgatcaccattatgcagaatccacgccagtacaagatcccagactggttcttgaacagacagaaggatgtaaaggatggaaaatacagccaggtcctagccaatggtctggacaacaagctccgtgaagacctggagcgactgaagaagattcgggcccatagagggctgcgtcacttctggggccttcgtgtccgaggccagcacaccaagaccactggccgccgtggccgcaccgtgggtgtgtccaagaagaaataagtctgtaagccttgtc

SEQ ID NO: 114213 - DNA, 1497 bp, Homo Sapiens
ttgggaagcgctggtaggccttggagaggcgggttaggaagagtggagactgctgcacggactctggaaccatgaacatatttgatcgaaagatcaactttgatgcgcttttaaaattttctcatataaccccgtcaacgcagcagcacctgaagaaggtctatgcaagttttgccctttgtatgtttgtggcggctgcaggggcctatgtccatatggtcactcatttcattcaggctggcctgctgtctgccttgggctccctgatattgatgatttggctgatggcaacacctcatagccatgaaactgaacagaaaagactgggacttcttgctggatttgcattccttacaggagttggcctgggccctgccctggagttttgtattgctgtcaaccccagcatccttcccactgctttcatgggcacggcaatgatctttacctgcttcaccctcagtgcactctatgccaggcgccgtagctacctctttctgggaggtatcttgatgtcagccctgagcttgttgcttttgtcttccctggggaatgttttctttggatccatttggcttttccaggcaaacctgtatgtgggactggtggtcatgtgtggcttcgtcctttttgatactcaactcattattgaaaaggccgaacatggagatcaagattatatctggcactgcattgatctcttcttagatttcattactgtcttcagaaaactcatgatgatcctggccatgaatgaaaaggataagaagaaagagaagaaatgaagtgaccatccagcctttcccaattagacttcctctccttccacccctcatttcctttttgcacacattacaggtggtgtgttctgtgataatgaaaagcatcagaaaagcttttgtactttgtggtttcctctattttgaattttttgatcaaaaaactgattagcagaatatagtttggagtttggcttcatcttcctggggttcccctcactcccttttttgtcaaccccatctgtagcctcttcctctactcaggcagtcgacccgccacgatgagaagtgggaccagcagagggcgccaacttcaggagtccgctttcccaccaggcttcattcacccagtggacctgaactgtttggtagagccacccggcccttccttcctcattgttgtttggtatgcgcacagttcctgtgggactgggccgtgagttttccattggaaagaagttcagtggtcccattgttaactcagcctcaaatctcaactgtcaaccctacaaagaaaatggagagcctcttctggtggatgctttgctccctctgagctgcccatgctggtctggcaaacacacctttctgctttgccttcacaaagtaatgtgttccctttcccaccccttgcctgaccctcaaggagtcagcctgcttccatccatgggtggaagacttcagcacaaaggaaagactaattcttgtcagcattttt

SEQ ID NO: 114214 - DNA, 1454 bp, Homo Sapiens; identical to SEQ ID NO: 104478

SEQ ID NO: 114215 - DNA, 950 bp, Homo Sapiens; identical to SEQ ID NO: 104479

SEQ ID NO: 114216 - DNA, 1214 bp, Homo Sapiens; identical to SEQ ID NO: 104480

SEQ ID NO: 114217 - DNA, 824 bp, Homo Sapiens; identical to SEQ ID NO: 104481

SEQ ID NO: 114218 - DNA, 952 bp, Homo Sapiens; identical to SEQ ID NO: 104482

SEQ ID NO: 114219 - DNA, 1515 bp, Homo Sapiens; identical to SEQ ID NO: 104483

SEQ ID NO: 114220 - DNA, 862 bp, Homo Sapiens; identical to SEQ ID NO: 104484

SEQ ID NO: 114221 - DNA, 959 bp, Homo Sapiens; identical to SEQ ID NO: 104485

SEQ ID NO: 114222 - DNA, 780 bp, Homo Sapiens; identical to SEQ ID NO: 104486

SEQ ID NO: 114223 - DNA, 1825 bp, Homo Sapiens
  misc_feature (1175)..(1183): n is a, c, g, or t
ttggcaagactttatagtaaagtagtagcaaaattatttttaaaagactttcttccttttactacccatttcctctcttgggaaagctgatgagcaaattatccaagactcatttctttattaggcaaagtcagaatatttcccctctgaaaatctgaattatgccctcattctttttcaagaaatatctcaaagagcaaatagaattaaacatgacacttgattgtctgattatttggcatgtataaaattatcatgtggcttaatgtgccttaagtgaaaatttaaacttagacctgaaacctttacagttggatgtagcgttgagcttttgcatgttttctgtataataaaccacttttgttttgtttgttttgtcttttaacctacacctttatcattactctaacagatttagggcttctctttctctacagctaagtaagggaatatgtgcaattatgagacatacaaaaaaggaaagggaaaggactttctaagtagcaaatctgtgccatgaagtagatgtggcgtgaagatacagagcctgaggatagtaattttccctgagccacgcacacaggcttttatttcatgccttttctctttctgtgccgtcacctttgagaaaaacgattgcaccttctccaagtctgcctttttaacagctacagttaagttggcaagacttccccagctctgaatatagccatttgccgactccggcctctttgcgagactgactcaaatctgtgatcttctgttcagcatacacatcagcaaagtgagaagatgagcactaatataggctctattaactttacttttagatttactgccttcaaaagtgcctattctgagcaacataaacgttattccttacatatgtatgtacacacggtacccagagtcgtactgtgcagccttcaaaaacataccatcagaaagagtaggtgctgagataaggaaactttgccaaatgaaagaaagtcactcacttccaatatcccctctcaagcggctaccgtgaaacgggctgcaaacacattccctgagcatcccttgctgatacagcttctttatatttatatcctactggatggtagcatattgctaaggtttcctgtactctgcttcaagggaatgtaagctttatggcattgaaacatttaggnnnnnnnnngatgtttaagagaattaatagagccgtagtctgtattaggatgtgtgtcatatgtgtgttctataaactaagcatcggtgggtttagagtgttaaagtgtcagcacattccttctccttttgtctctcaggctaacatgagagaaaatagaaaagtcttggctgtggggattggaagctcagggggccaaatgtccttgccagatccttagagcattactttgactcctaaaaatagtagtgtatgttatttgatggcttttgtttccatagttccatcactgacaaaactgtcaatactgttgatggagcagcagcatagcctagagtgatgcattcttacccagaggtggcaataggagagggtccatgtaaataggacgaggtagacagtgcatgattgtaggagaagggttgaagggaggacatgattccaaaaaagatcgttctcaatgtgtcgtctgactcaaccagctggcagattacacttgccaagtcgttccctttccttctaagtcagttggctccatattcacttgaatatgcctctgtttgggcaaagcaagatacctccacttaacctttatccaagaagctcttggtgtcctcttggtcataaagttgtctcctacctaacccagtt

SEQ ID NO: 114224 - DNA, 487 bp, Homo Sapiens
gcttttttataatgccaactttgtacaaaaaagttggtcgcaggcgcttcgctggtgcaggtaagctccgcacactctcggccggtcccgagtccgactccctcaagggtgacgcgagctctgccctttaaccggaaacgtctccctgctcaccccacccccgcgcagacgcagtgctgagcacacagctaccggacaaagagtgacgcccggagctggagttatggcggctacggagccgatcttggcggccactgggagtcccgcggcggtgccaccggagaaactggaaggagccggttcgagctcagcccctgaacgtaactgtgtgggctcctcgctgccagaggcctcaccgcctgcccctgagccttccagtcccaacgccgcggtccctgaagccatccctacgccccgagctgccgcctccgcggccctggagctgcctctcgggcccgcacccgtgagcgtagagcctcatgccgaa

SEQ ID NO: 114225 - DNA, 966 bp, Homo Sapiens
ctttgtacaaaaaagttggagccggggggtcagggtcccagatgcacaggaggagaagcaggagctgtcgggaagatcagaagccagtcatggatgaccagcgcgaccttatctccaacaatgagcaactgcccatgctgggccggcgccctggggccccggagagcaagtgcagccgcggagccctgtacacaggcttttccatcctggtgactctgctcctcgctggccaggccaccaccgcctacttcctgtaccagcagcagggccggctggacaaactgacagtcacctcccagaacctgcagctggagaacctgcgcatgaagcttcccaagcctcccaagcctgtgagcaagatgcgcatggccaccccgctgctgatgcaggcgctgcccatgggagccctgccccaggggcccatgcagaatgccaccaagtatggcaacatgacagaggaccatgtgatgcacctgctccagaatgctgaccccctgaaggtgtacccgccactgaaggggagcttcccggagaacctgagacaccttaagaacaccatggagaccatagactggaaggtctttgagagctggatgcaccattggctcctgtttgaaatgagcaggcactccttggagcaaaagcccactgacgctccaccgaaagagtcactggaactggaggacccgtcttctgggctgggtgtgaccaagcaagatctgggcccagtccccatgtgagagcagcagaggcggtcttcaacatcctgccagccccacacagctacagctttcttgctcccttcagcccccagcccctcccccatctcccaccctgtacctcatcccatgagaccctggtgcctggctctttcgtcacccttgaggacaaaacaaacccagtccgaacagcaaaataacaatggcagcaagggcctgctgcccatctcccatctgtcaacagggg

SEQ ID NO: 114226 - DNA, 909 bp, Homo Sapiens
ttgggagcgtggctgtctcctctctccgccatggcgtgtgctcgcccactgatatcggtgtactccgaaaagggggagtcatctggcaaaaatgtcactttgcctgctgtattcaaggctcctattcgaccagatattgtgaactttgttcacaccaacttgcgcaaaaacaacagacagccctatgctgtcagtgaattagcaggtcatcagactagtgctgagtcttggggtactggcagagctgtggctcgaattcccagagttcgaggtggtgggactcaccgctctggccagggtgcttttggaaacatgtgtcgtggaggccgaatgtttgcaccaaccaaaacctggcgccgttggcatcgtagagtgaacacaacccaaaaacgatacgccatctgttctgccctggctgcctcagccctaccagcactggtcatgtctaaaggtcatcgtattgaggaagttcctgaacttcctttggtagttgaagataaagttgaaggctacaagaagaccaaggaagctgttttgctccttaagaaacttaaagcctggaatgatatcaaaaaggtctatgcctctcagcgaatgagagctggcaaaggcaaaatgagaaaccgtcgccgtatccagcgcaggggcccgtgcatcatctataatgaggataatggtatcatcaaggccttcagaaacatccctggaattactctgcttaatgtaagcaagctgaacattttgaagcttgctcctggtgggcatgtgggacgtttctgcatttggactgaaagtgctttccggaagttagatgaattgtacggcacttggcgtaaagccgcttccctcaagagtaactacatcttcccatgcacagatgattatacagatcttagcaaatcttgaaaa

SEQ ID NO: 114227 - DNA, 958 bp, Homo Sapiens
ttgggacggacgttgagagaacgaggaggaaggagagaaaatggcgtccacggattacagtacctatagccaagctgcagcgcagcagggctacagtgcttacaccgcccagcccactcaaggatatgcacagaccacccaggcatatgggcaacaaagctatggaacctatggacagcccactgatgtcagctatacccaggctcagaccactgcaacctatgggcagaccgcctatgcaacttcttatggacagcctcccactggttatactactccaactgccccccaggcatacagccagcctgtccaggggtatggcactggtgcttatgataccaccactgctacagtcaccaccacccaggcctcctatgcagctcagtctgcatatggcactcagcctgcttatccagcctatgggcagcagccagcagccactgcacctacaagaccgcaggatggaaacaagcccactgagactagtcaacctcaatctagcacagggggttacaaccagcccagcctaggatatggacagagtaactacagttatccccaggtacctgggagctaccccatgcagccagtcactgcacctccatcctaccctcctaccagctattcctctacacagccgactagttatgatcagagcagttactctcagcagaacacctatgggcaaccgagcagctatggacagcagagtagctatggtcaacaaagcagctatgggcagcagcctcccactagttacccaccccaaactggatcctacagccaagctccaagtcaatatagccaacagagcagcagctacgggcagcagagttcattccgacaggaccaccccagtagcatgggtgtttatgggcaggagtctggaggattttctggaccagagaaaccggagcatgagtggccctgataccgggcagggagaggggatttgatc

SEQ ID NO: 114228 - DNA, 892 bp, Homo Sapiens
ttggggacaaacggaagtgtaggttacggtctgagacatcaccgccaagctgggcatcggggagatggccgagactgaccccaagaccgtgcaggacctcacctcggtggtgcagacactcctgcagcagatgcaagataaatttcagaccatgtctgaccagatcattgggagaattgatgatatgagtagtcgcattgatgatctggaaaagaatatcgcggacctcatgacacaggctggggtggaagaactggaaagtgaaaacaagatacctgccacgcaaaagagttgaaggttgctaataatttatactggaatctggcatttttccaagccaagagaagatcgaatggctttttgcagctaactactatgtgtagacaggttttatattataaagtatgcattcttatcacctagtatatagttagtttgtagagtgatttccccccagtttcttgaacatggtatcttcacatcttggaccttggtcagttgtgctattcattattaaacactaaaactttggcggttcttgcataacattgtcagattttttagtgtatttctgtgaagtcattttttttcttgtcattccttttgtagtagttgctgtttggataaaagttgatgtgtgattttttattaaacaaatagtaaacccttcaattatagttagtcttggtgaagtaagatgtttgtagactttagagttctttaattcttggcacaacgtgactgttgagctaacaccaaatagtgtgttggcaatacttttcaaatggctgaaaacacctaaaaattgttcattcagaaatatctgtcactgctctgttgccaaactcagaatagaacttagacgtatgtctgagtccctgagatcacatgc

SEQ ID NO: 114229 - DNA, 365 bp, Homo Sapiens
ttgggagagaacccaccatggtgctgtctcctgccgacaagaccaacgtcaaggccgcctggggtaaggtcggcgcgcacgctggcgagtatggtgcggaggccctggagaggatgttcctgtccttccccaccaccaagacctacttcccgcacttcgacctgagccacggctctgcccaggttaagggccacggcaagaaggtggccgacgcgctgaccaacgccgtggcgcacgtggacgacatgcccaacgcgctgtccgccctgagcgacctgcacgcgcacaagcttcgggtggacccggtcaacttctagctcctaatccactgcctgctggtgacccttgccccccacctccccgcc

SEQ ID NO: 114230 - DNA, 1460 bp, Homo Sapiens
  misc_feature (602)..(640): n is a, c, g, or t
ttggcgcgcgctgcgggcagtgagtgtggaggcgcggacgcgcggcggagctggaactgctgcagctgctgccgccgccggaggaaccttgatccccgtgctccggacaccccgggcctcgccatggctgaccagctgactgaggagcagattgcagagttcaaggaggccttctccctctttgacaaggatggagatggcactatcaccaccaaggagttggggacagtgatgagatccctgggacagaaccccactgaagcagagctgcaggatatgatcaatgaggtggatgcagatgggaacgggaccattgacttcccggagttcctgaccatgatggccagaaagatgaaggacacagacagtgaggaggagatccgagaggcgttccgtgtctttgacaaggatgggaatggctacatcagcgccgcagagctgcgtcacgtaatgacgaacctgggggagaagctgaccgatgaggaggtggatgagatgatcagggaggctgacatcgatggagatggccaggtcaattatgaagagtttgtacagatgatgactgcaaagtgaaggccccccgggcagctggcgatgcccgnnnnnnnnnnnnnnnnnnnnnnnnnnnnnnnnnnnnnnntcaacactcccctgcgtaccccggttctagcaaacaccaattgattgactgagaatctgataaagcaacaaaagatttgtcccaagctgcatgattgctctttctccttcttccctgagtctctctccatgcccctcatctcttccttttgccctcgcctcttccatccacgtcttccaaggcctgatgcattcataagttgaagccctccccagatccccttggggagcctctgccctcctccagcccggatggctctccttcattttggtttgtttcctcttgtttgtcatcttattttgggtgctggggtggctgccagccctgtcccgggacctgctgggagggacaagaggccctcccccaggcagaagagcatgccctttgccgttgcatgcaaccagccctgtgattccacgtgcagatcccagcagcctgttggggcaggggtgccaagagaggcattccagaaggactgagggggcgttgaggaattgtggcgttgactggatgtggcccaggagggggtcgagggggccaactcacagaaggggactgacagtgggcaacactcacatcccactggctgctgttctgaaaccatctgattggctttctgaggtttggctgggtggggactgctcatttggccactctgcagattggacttgcccgcgttcctgaagcgctctcgagctgttctgtaaatacctggtgctaacatcccatgccgctccctcctcacgatgcacccaccgccctgaggcccgtcctaaggaatggatgtgggggatggtcgctttgtaatgtgctggttctc

SEQ ID NO: 114231 - DNA, 891 bp, Homo Sapiens
ccaactttgtacaaaaaagttggagcagttcacgttcaaggtcaacgaaatctcctggaacaatgacaataatatgttcttcctgacaaatggcaatggttgtatcaacatcctcagctacccagaactgaagcctgtgcagtccatcaacgcccatccttccaactgcatctgtatcaagtttgaccccatggggaagtactttgccacaggaagtgcagatgctttggtcagcctctgggatgtggatgagttagtgtgtgttcggtgcttttccaggctggattggcctgtaagaaccctcagtttcagccatgatgggaaaatgctggcgtcagcatcggaagatcattttattgacattgctgaagtggagacaggggacaaactatgggaggtacagtgtgagtctccgaccttcacagtggcgtggcaccccaaaaggcctctgctggcatttgcctgtgatgacaaagacggcaaatatgacagcagccgggaagccggaactgtgaagctgtttgggcttcctaatgattcttgagaggaggttgtagggagaggaggccccggcagaggtcttccttcatgtggttagtttggtctgttctctcggagttggtgggcaccctaaatatttgtaagttggtataaattgtaaacgtctctggtcaggctgcgcatttcgttcttttgctttgtctgtgtattactctttccattctttgcccccagcatgagttaactcgtgtggactctgcaatgcgagtagtgaccccaccataccttgtcctctggacctcctgtcttctctgcttctgggtgcatggtaaactttgtggcatttgatacaacttggacaatacctagtttggagggaggggaatggaa

SEQ ID NO: 114232 - DNA, 538 bp, Homo Sapiens
ctttgtacaaaaaagttggcgggtggtttgcttaaagcgcagacggggaagcggagccaacatgccagtggcccggagctgggtttgtcgcaaaacttatgtgaccccgcggagacccttcgagaaatctcgtctcgaccaagagctgaagctgatcggcgagtatgggctccggaacaaacgtgaggtctggagggtcaaatttaccctggccaagatccgcaaggccgcccgggaactgctgacgcttgatgagaaggacccacggcgtctgttcgaaggcaacgccctgctgcggcggctggtccgcattggggtgctggatgagggcaagatgaagctggattacatcctgggcctgaagatagaggatttcttagagagacgcctgcagacccaggtcttcaagctgggcttggccaagtccatccaccacgctcgcgtgctgatccgccagcgccatatcagggtccgcaagcaagtggtgaacatcccgtccttcattgaccacctggattcccagaaacacatcgacttc

SEQ ID NO: 114233 - DNA, 1075 bp, Homo Sapiens
ttggctccggcgcagtgttgggactgtctgggtatcggaaagcaagcctacgttgctcactattacgtataatccttttcttttcaagatgcctgaggaagtgcaccatggagaggaggaggtggagacttttgcctttcaggcagaaattgcccaactcatgtccctcatcatcaataccttctattccaacaaggagattttccttcgggagttgatctctaatgcttctgatgccttggacaagattcgctatgagagcctgacagacccttcgaagttggacagtggtaaagagctgaaaattgacatcatccccaaccctcaggaacgtaccctgactttggtagacacaggcattggcatgaccaaagctgatctcataaataatttgggaaccattgccaagtctggtactaaagcattcatggaggctcttcaggctggtgcagacatctccatgattgggcagtttggtgttggcttttattctgcctacttggtggcagagaaagtggttgtgatcacaaagcacaacgatgatgaacagtatgcttgggagtcttctgctggaggttccttcactgtgcgtgctgaccatggtgagcccattggcaggggtaccaaagtgatcctccatcttaaagaagatcagacagagtacctagaagagaggcgggtcaaagaagtagtgaagaagcattctcagttcataggctatcccatcaccctttatttggagaaggaacgagagaaggaaattagtgatgatgaggcagaagaagagaaatgtgagaaagaagaggaagataaagatgatgacgaatgtcccagaatcgataatgtgggttcagatgaggaggatgacagcggtaaggataagatgaactctctagtaagatcgaagatgactccattgatcacgaataactaaccaagaccaagcctatttggacatgaaaccctgatgacatctcctcccattagtacggagcattctacaagagccttcctaatgactggtaataccacttgagcagtcaagcacttttctgtactgggtcgattggaattc

SEQ ID NO: 114234 - DNA, 1441 bp, Homo Sapiens
  misc_feature (958)..(970): n is a, c, g, or t
  misc_feature (1148)..(1167): n is a, c, g, or t
ttggatcacatcaagtagtaactgatgacagtgacgtcagtcttatgatgacaggcagcagttcagaactttaagcaggatcttcagaaagctttcagtctccaaagtaggaacagctcagcagtaagtgtcttgtatacaggccagtggcagcagttcattgtcatggcccctttctgatttgtcttccttgggatcactttccagcatccgcacttccactaatagccaagtagacaagctgaccctgtcagggagtgacagcgtcatccttggtgatacaactaccagtggtgccagtgatgaagaagatggacagcctcggcgggctgtggacaacgagaaagagggagtgcagtatagctactccttattccacctcatgctctgcttggcttccttgtacatcatgatgaccctgaccagctggtacagccctgatgcaaagtttcagagcatgaccagcaagtggccagctgtgtgggtcaagatcagctccagctgggtctgcctcctgctttacgtctggacccttgtggctccacttgtcctcaccagtcgggacttcagctgaacctctgagtgccaaggacaccactggaactcacaaaggtctccttcaccgaaaacccatataccttttaagtttgtttcaactaaaatattaagtgaatgctttgcaagtttgactgtatgcaggtttatatcagaaggtgagattgaataatgcttgatgcagaatcgaaacttctcatttatctgtatattatgtttacttctaaggatatagcacaaagggaacattttttgtttaaagtgaactacagctgtgctgtgaagagagttctttataaagcctgtaggttcttttaactttggtttaaaatgtaagataggaaaatgttggatatttgaggccatgcttaatatatttatattgcagtatcctttaaaagcnnnnnnnnnnnnntgcatttatattacagttttcctctatgaaagtccttacttatatgatacaagcactgtgttttgtgcttaaactcttcagcggggtagcatcaaagttcttggggaaggatcgtatatgtgggtcccttccctagaagaatggttgctgatatggctactgcttctacatcttgagnnnnnnnnnnnnnnnnnnnnacactgtagcattgagactgcttgattcaagtctggtgctttgccagatgtattaatttccataaatgctttgtgagtttggttaaaatgaagattcacttgggaaaacactgcagctttagtctgtgttactatcttgttatgagtatgtaaaagtaaaatgcatgtgaatttatcatatttgcactatgaagtatttgggtaaatacaaagacttagattttaaggccctttcttccacagcttttatagttagcagccattctttattttc

SEQ ID NO: 114235 - DNA, 934 bp, Homo Sapiens
caagttttatgatttatttaacttgtggaacaaaaataaaccagattaaccacaaccatgccttactttatcaaatgtataagaagtaaatatgaatcttatatgacaaaatgtttcattcattataacaaatttccaataatcctgtcaattatatttctaaattttcccccaaattctaagcagagtatgtaaattggaagttaacttatgcacgcttaactatcttaacaagctttgagtgcaagagattgaagagttcaaatctgaccaagatgttgatgttggataagagaattctctgctccccacctctaagttgccagccctcctagagctacctgtggagcaacctgctcagatacatcaaacatggagacagcactcaaagtagaattataaagaagatcatgtccatgttaacattattataaccctacattttgtgcataaagtgtaagtgtataagcatatcaatattaaaaagcaagcaagcagaatttggaattcatccaatccaaatgcggcatcttcaaacctccatgatgctgcttacatgtctcgatcccacttaactatcttgggctgtgacaaagtcacatggttcacacggcaggcatactcatctttttcagtgggggtgaattcagtgtagtacaagagatagaaagaccagtccttgctgaaagacaagtctgaatgctccactttttcaattctctctccattcttcagtaagtcaacttcaatgtcggatggatgaaacccagacacatagcaattcaggaaatttgactttccattctctgctggatgacgtgagtaaacctgaatctttggagtacgctggatagcctccaggccagaaagagagagtagcgcgagcacagctaaggccacggagcgagacatctcggcccgaatgctgtcccaa

SEQ ID NO: 114236 - DNA, 1483 bp, Homo Sapiens
  misc_feature (1110)..(1118): n is a, c, g, or t
ttggcgcccgtcccgcgcgctcctccgacccgctccgctccgctccgctcggccccgcgccgcccgtcaacatgatccgctgcggcctggcctgcgagcgctgccgctggatcctgcccctgctcctactcagcgccatcgccttcgacatcatcgcgctggccggccgcggctggttgcagtctagcgaccacggccagacgtcctcgctgtggtggaaatgctcccaagagggcggcggcagcgggtcctacgaggagggctgtcagagcctcatggagtacgcgtggggtagagcagcggctgccatgctcttctgtggcttcatcatcctggtgatctgtttcatcctctccttcttcgccctctgtggaccccagatgcttgtcttcctgagagtgattggaggtctccttgccttggctgctgtgttccagatcatctccctggtaatttaccccgtgaagtacacccagaccttcacccttcatgccaaccctgctgtcacttacatctataactgggcctacggctttgggtgggcagccacgattatcctgatcggctgtgccttcttcttctgctgcctccccaactacgaagatgaccttctgggcaatgccaagcccaggtacttctacacatctgcctaacttgggaatgaatgtgggagaaaatcgctgctgctgagatggactccagaagaagaaactgtttctccaggcgactttgaacccattttttggcagtgttcatattattaaactagtcaaaaatgctaaaataatttgggagaaaatattttttaagtagtgttatagtttcatgtttatcttttattatgttttgtgaagttgtgtcttttcactaattacctatactatgccaatatttccttatatctatccataacatttatactacatttgtaagagaatatgcacgtgaaacttaacactttataaggtaaaaatgaggtttccaagatttaataatctgatcaagttcttgttatttccaaatagaatggactcggtctgttaagggctaaggagaagaggaagataaggttaaaagttgttaatgaccaaacattctaaaagaaatgcnnnnnnnnngtttattttcaagccttcgaactatttaaggaaagcaaaatcatttcctaaatgcatatcatttgtgagaatttctcattaatatcctgaatcattcatttcagctaaggcttcatgttgactcgatatgtcatctaggaaagtactatttcatggtccaaacctgttgccatagttggtaaagctttcctttaagtgtgaaatatttagatgaaattttctcttttaaagttctttatagggttagggtgtgggaaaatgctatattaataaatctgtagtgttttgtgtttatatgttcagaaccagagtagactggattgaaagatggactgggtctaatttatcatgactgatagatctgg

SEQ ID NO: 114237 - DNA, 1433 bp, Homo Sapiens
ggggttaatttcggcatcatctcgtcttctcctcctcgtcacatctaatctctcttctcttcttcacttcttcaaaattgtcatcatcttctatggcctccccagtgaagtacagcacagcccgcgggactatccgctcacggaaaaagtgtccaatttcaaaatcagaggctaatgtgaattcagaatcttcatccagtgattctccatccccggatgctttcaatggattgaagaagttgaaaaaggactcattgggtacttgtttcgtaattgttctaacagtgcctcgacccttatgcttctgctttttcttgatggttttgacagtaacattctttcctttcttccagtcaatagtacacccgtcacagtccacaatctcaggaccttcaaaggaaaagggatcagccttatctggttctgatttcatcttgtaggtttttgtcaggactgagttggtaaagtagtcgttgggttcaaagtggaactctaacacaaaagacataggctgtccagggtcagaaaatttcactttaatatcctgcaggtgtttcaagattggttcatcatattcctggactaattcactcagcatgtccacatttctgaagatggtaaaccagaactctggaattcctttgggatctggctcttcagccgttgccgctgctttttctgtgacgactactttacttttcatgtctccagccaatttctcttcctcttcattttcactgtgccattccgattccgcatctgttggttcaacatcgccggtgataaattctcttctcttgtcaaagagaggctggtatagcgctgcatactttctttccaagtcatgtacctcttcatagaacttggcttctatgtgagcacatctcacctgaagttgtttcaatgcattaattcttctttttactgctttaggtaaagtttcgatgtagctggaaggggtgtgagggacattgtcaagtcgctcctgtaaagctgccagaactcgaggattctgcatcacctgatctgtgagcttttctgtgttacttgcatttttagcagcttccacggaatctgaaggaaccccatctgaaaaactgtgatctgccatctgaatgtttttatccccttaaaaacgggaagcctgaacgctccggcgcgcccggccgtgtaaccgccacagcccccgcacgcggggcgggctgggctagcgggagatttgagcggccgccgcctctcgccgtcttcgcctcctccaaggggccgccgcccaggaggccgcccgcggcgcagaacaaagcgccttgaccttcagtgaggcgggcagccgggcgaggcgcgccgggagttgggaggggcctcccgccagcgccccaggcccgggctccaggccccaagccccaggccccgccgcggccgccgctgcctgccaa

SEQ ID NO: 114238 - DNA, 1458 bp, Homo Sapiens
ttgggccgagcgcacgccttgccgccgccccgcagaaatgcttcggttacccacagtctttcgccagatgagaccggtgtccagggtactggctcctcatctcactcgggcttatgccaaagatgtaaaatttggtgcagatgcccgagccttaatgcttcaaggtgtagaccttttagccgatgctgtggccgttacaatggggccaaagggaagaacagtgattattgagcagagttggggaagtcccaaagtaacaaaagatggtgtgactgttgcaaagtcaattgacttaaaagataaatacaaaaacattggagctaaacttgttcaagatgttgccaataacacaaatgaagaagctggggatggcactaccactgctactgtactggcacgctctatagccaaggaaggcttcgagaagattagcaaaggtgctaatccagtggaaatcaggagaggtgtgatgttagctgttgatgctgtaattgctgaacttaaaaagcagtctaaacctgtgaccacccctgaagaaattgcacaggttgctacgatttctgcaaacggagacaaagaaattggcaatatcatctctgatgcaatgaaaaaagttggaagaaagggtgtcatcacagtaaaggatggaaaaacactgaatgatgaattagaaattattgaaggcatgaagtttgatcgaggctatatttctccatactttattaatacatcaaaaggtcagaaatgtgaattccaggatgcctatgttctgttgagtgaaaagaaaatttctagtatccagtccattgtacctgctcttgaaattgccaatgctcaccgtaagcctttggtcataatcgctgaagatgttgatggagaagctctaagtacactcgtcttgaataggctaaaggttggtcttcaggttgtggcagtcaaggctccagggtttggtgacaatagaaagaaccagcttaaagatatggctattgctactggtggtgcagtgtttggagaagagggattgaccctgaatcttgaagacgttcagcctcatgacttaggaaaagttggagaggtcattgtgaccaaagacgatgccatgctcttaaaaggaaaaggtgacaaggctcaaattgaaaaacgtattcaagaaatcattgagcagttagatgtcacaactagtgaatatgaaaaggaaaaactgaatgaacggcttgcaaaactttcagatggagtggctgtgctgaaggttggtgggacaagtgatgttgaagtgaatgaaaagaaagacagagttacagatgcccttaatgctacaagagctgctgttgaagaaacattgttttgggagggggttgtgccctccttcgatgcattccagccttggactcattgactccagctaatgaagatcaaaaattggtatagaaattattaaaagaacactcaaattcc

SEQ ID NO: 114239 - DNA, 876 bp, Homo Sapiens
tacaaaaaagttggcacgtggggtttgctgccggagcggagtctccggccggcgtccagtttgagtctaggttggagttggaaccgtggagatgcggaaggaaaccccaccccccctagtgcccccggcggcccgggagtggaatcttcccccaaatgcgcccgcctgcatggaacggcagttggaggctgcgcggtaccggtccgatggggcgcttctcctcggggcctccagcctgagtgggcgctgctgggccggctccctctggctttttaaggacccctgtgccgcccccaacgaaggcttctgctccgccggagtccaaacggaggctggagtggctgacctcacttgggttggggagagaggtattctagtggcctccgattcaggtgctgttgaattgtgggaactagatgagaatgagacacttattgtcagcaagttctgcaagtatgagcatgatgacattgtgtctacagtcagtgtcttgagctctggcacacaagctgtcagtggtagcaaagacatctgcatcaaggtttgggaccttgctcagcaggtggtactgagttcataccgagctcatgctgctcaggtcacttgtgttgctgcctctcctcacaaggactctgtgtttctttcatgcagcgaggacaatagaattttactctgggatacccgctgtcccaagccagcatcacagattggctgcagtgcgcctggctaccttcctacctcgctggcttggcatcctcagcaaagtgaagtctttgtctttggtgatgagaatgggacagtctcccttgtggacacaagagtacaagctgtgtcctgagctcagctgtacactcccagtgtgtcactgggctggtg

SEQ ID NO: 114240 - DNA, 920 bp, Homo Sapiens
ttggggacagttgtggcaaaggagaaatggccacagggaatgggcggcggctccacctggggattcctgaggccgtgtttgtggaagatgtagattccttcatgaaacagcctgggaatgagactgcagatacagtattaaagaagctggatgaacagtaccagaagtataagtttatggaactcaaccttgctcaaaagaaaagaaggctaaaaggtcagattcctgaaattaaacagactttggaaattctaaaatacatgcagaagaaaaaagagtccaccaactcaatggagaccagattcttgctggcagataacctgtattgcaaagcttcagttcctcctaccgataaagtgtgtctgtggttgggggctaatgtaatgcttgaatatgatattgatgaagctcaggcattgttggaaaagaatttatcgactgccacaaagaatcttgattccctggaggaagaccttgactttcttcgagatcaatttactaccacagaagtcaatatggccagggtttataattgggatgtaaaaagaagaaacaaggatgactctaccaagaacaaagcataatgctggcaattaaaaatgtggtttagttttccaaacatgttatcttaaatacccctttatccttacaggttgacataactttgaatgttttaacagcaagaattttaagaaaagataaacaccattttatttatttataaaaacaaaattagtttcaaatatttttgacattgtgattttttttccacatttctcagcaaagctaatggtattttaatcattatttttgcctgtcataagaaaactcttagctgaaatggccgaaaactgtgagacatgctatgggaagctgaatgccggacgctagcacagtttactttttccctttctaattgg

SEQ ID NO: 114241 - DNA, 931 bp, Homo Sapiens; identical to SEQ ID NO: 104487

SEQ ID NO: 114242 - DNA, 1475 bp, Homo Sapiens; identical to SEQ ID NO: 104488

SEQ ID NO: 114243 - DNA, 899 bp, Homo Sapiens; identical to SEQ ID NO: 104489

SEQ ID NO: 114244 - DNA, 1096 bp, Homo Sapiens
ccaactttgtacaaaaaagttggaatttaggcattggaggagctgtggttgtaacactctacaagatgggttttccggaagccgccagttcttttagaactcatcaaattgaagctgttccaaccagctctgcaagtgatggatttaaggcaaatcttgtttttaaggagattgagaagaaacttgaagaggaaggggaacagtttgtgaagaaaatcggtggtatttttgccttcaaggtgaaagatggccctgggggtaaagaggccacctgggtggtggatgtgaagaatggcaaaggatcagtgcttcctaactcagataagaaggctgactgcacaatcacaatggctgactcagacttcctggctttaatgactggtaaaatgaatcctcagtcggccttctttcaaggcaaattgaaaatcactggcaacatgggtctcgctatgaagttacaaaatcttcagcttcagccaggcaacgctaagctctgaagaactccctttggctacttttgaaaatcaagatgagatatatagatatatatccatacattttattgtcagaatttagactgaaactacacattggcaaatagcgtgggatagatttgtttcttaatgggtgtgaccaatcctgtttttcctatgctctgggtgaatagagcctgatggtatactactgctttgcggaattgcatacaactgtgcattacaaagttaatatggtaattatggtctggggtaaaattgagtttcagaataaaattaggaacagtaaaatccaaagaactatgtaaacaaaaaagcttttgttttgcttacaaagtatatttaaggattattctgctgaagattcagtttaagagttttccttgggagaactaagtaagaaacacaatgcccaacagctggccagtaattagtgttgtgcacttcatgtcattaatcaatttctcaatagttcttaaaattagtgagattaaaaatctaaaaattttgcatttcatgctatcagaaacagtattttcttcccaaatcaaaataaagaaatatgatcagagcttgaacacaggcttatttttaaaataaaa

SEQ ID NO: 114245 - DNA, 867 bp, Homo Sapiens
  misc_feature (91)..(151): n is a, c, g, or t
ttggcggcgctcgttccccaccccggccggccgcccatagccagccctccgtcacctcttcaccgcaccctcggactgccccaaggccccnnnnnnnnnnnnnnnnnnnnnnnnnnnnnnnnnnnnnnnnnnnnnnnnnnnnnnnnnnnnnatgacgaccgcgtccacctcgcaggtgcgccagaactaccaccaggactcagaggccgccatcaaccgccagatcaacctggagctctacgcctcctacgtttacctgtccatgtcttactactttgaccgcgatgatgtggctttgaagaactttgccaaatactttcttcaccaatctcatgaggagagggaacatgctgagaaactgatgaagctgcagaaccaacgaggtggccgaatcttccttcaggatatcaagaaaccagactgtgatgactgggagagcgggctgaatgcaatggagtgtgcattacatttggaaaaaaatgtgaatcagtcactactggaactgcacaaactggccactgacaaaaatgacccccatttgtgtgacttcattgagacacattacctgaatgagcaggtgaaagccatcaaagaattgggtgaccacgtgaccaacttgcgcaagatgggagcgcccgaatctggcttggcggaatatctctttgacaagcacaccctgggagacagtgataatgaaagctaagcctcgggctaatttccccatagccgtggggtgacttccctggtcaccaaggcagtgcatgcatgttggggtttcctttaccttttctataagttgtaccaaaacatccacttaagttctttgatttgtaccattccttcaaataaagaaatttggtacccagg

SEQ ID NO: 114246 - DNA, 803 bp, Homo Sapiens
ctttgtacaaaaaagttggcgcgggtctgtctcttgcttcaacagtgtttggacggaacagatccggggactctcttccagcctccgaccgccctccgatttcctctccgcttgcaacctccgggaccatcttctcggccatctcctgcttctgggacctgccagcaccgtttttgtggttagctccttcttgccaaccaaccatgagctcccagattcgtcagaattattccaccgacgtggaggcagccgtcaacagcctggtcaatttgtacctgcaggcctcctacacctacctctctctgggcttctatttcgaccgcgatgatgtggctctggaaggcgtgagccacttcttccgcgaattggccgaggagaagcgcgagggctacgagcgtctcctgaagatgcaaaaccagcgtggcggccgcgctctcttccaggacatcaagaagccagctgaagatgagtggggtaaaaccccagacgccatgaaagctgccatggccctggagaaaaagctgaaccaggcccttttggatcttcatgccctgggttctgcccgcacggacccccatctctgtgacttcctggagactcacttcctagatgaggaagtgaagcttatcaagaagatgggtgaccacctgaccaacctccacaagctgggtggcccggaggctgggctgggcgagtatctcttcgaaaggctcactctcaagcacgactaagagcctctgagcccagcgacttctgaaaggcaccttgcaagtaataaggcttctgcctaagcctctccctcc

SEQ ID NO: 114247 - DNA, 877 bp, Homo Sapiens
caagtcagggagagggggcaggagcgactctgaggccaacagagagggtgggaaggggatctccctaggtcccctggtgatcaccccccacccaaactggtatctccacattctcaatgactatgaagacataccaggctctgtccttttggcccccaccccatccctggccagagcttcaaaggccagtcccaaaaggttctaccctcacttgctcaggcttctagccttcatcttctcctccttcttcacatttttctctgtgattagtagcaggttagggtactgtataagccgcagtgaggctgggggccaagggggtggggtagagatgggatgaagagaggagaagagctgtccaaggacccctctcttcatgggatcccaaactgtacaaccagctcctcttttgcgtccacacggatctgagaaagtgcactgtaggcataagcagctatcctggagacctgctgcaaatcagagaacgggatgggctcactggccagcacttggtggggctggctggtaagagacggcagcggtggcagcttcttccaatgggtcaggctgctgctcagcacagccaagcgggtgctgtactgcctggcacggtccatgtactcatgctgctccatgccctgtgagtctgcagcagacacatcaatgatgttgctggctgtcttggcaaggatggaagagagcagggcctgctcatcagtgcgagcggaaggcaggctgtggtagttgggctcggctccattgagagctttggtaggggggctgctagggtccagcagcagcttccgctcctctcggtcctggtccgagtcctcgttctcgctgctgtagcagcaccccccaacttttttgtacaaag

SEQ ID NO: 114248 - DNA, 950 bp, Homo Sapiens
ccagggccaggaaaaggctgggaaccagcaggagggggcggaggggcagagctgactgaactagagaagagagaacatgtccaagaattatccaggtagaagaaacagaggaatctaaagggggtgtatgtccaaccccaagggtgccccaaaggcacagtggcagtgaggcttgctctgccctagtcctccagcaaattccatcactgctgatggactgggcaccatttcagccgttctcagaggtagcccgcccaggccaggcatgctggaccacaggctcttgaccttgactgccctctgcttctggggctggcggtctcctcactcaggctccctcagcacagcaaccagctccctctgttctctgtgtagagcctgccaggcctgctgctgggcctggacctgtagctgcagctcctccacctgcctccgccctgccaggacggcatctgccagctgctggttctcggcctcctgtttctgcacatggcgccgcagggtgtcccgttgctgcaggaagtagggtgccataacactgtgcagatccttctctgggatcccgctggggcgccaggctggctctttgcggactttgccttcttccacaattttatccaaggcattcaagacagcttctaggttcccctcctctttgatgtcagagatttcctcccggatagatgtctgcaactgagctataaacttgtcatagatttgctgtgtcatcgcaggctgcaactggtagaagcacttatagcagtcagtgaatctctggtagctgccggcggcgaccagcttctgaagaaaagtgtccaccatggtgtcgaggagcttcaccctcgaaatggtagtgccgggtggcacagattccgaagacgacccctcatgccttttttcctcacagccgctgcctagattggcgctactccaacttttttgtacaaagt

SEQ ID NO: 114249 - DNA, 910 bp, Homo Sapiens; identical to SEQ ID NO: 104490

SEQ ID NO: 114250 - DNA, 926 bp, Homo Sapiens; identical to SEQ ID NO: 104491

SEQ ID NO: 114251 - DNA, 926 bp, Homo Sapiens; identical to SEQ ID NO: 104492

SEQ ID NO: 114252 - DNA, 1214 bp, Homo Sapiens
  misc_feature (197)..(213): n is a, c, g, or t
cgccacggttccctccccaccccgtgatcaagacacggaatcggctgccgatggttggatcgcaatgcgccccttttctagagccttccccggccatctacaggcaggatgcggctgggaaaaagacaactggaatttctcgaaggttgatggtccgcacggttgaggattctacgtggttctcttggttcccctgnnnnnnnnnnnnnnnnngaggaggccgcggcccttagatcaccttcttgagctcgtcgtacaggaccagcacgaaggcgccccccatgccccgcaggacgttggaccacgcacccttgaagaaggccttgcccccctcatctctgaagatcttcctccaacagtcgacggtgcccgtgtacatgatgtcagctcctttgcgcccggactgcatcatcatgcgccgccgcaccgtgtcgaaggggtaggacaccacgccggccacggccgtcacggtctgcgcgatcatccagctcaccacgatgtgcgtgttcttggggtcggggagcatgcccttggccgtatcgtacacgccgaagtaggccgcccggtagatgatgatgccctgcacggagacactgaagccctggtacaggccccggatgccgtcggacttggtgatcttcaccaggcagtctcccaggcctcggaactcgcgctctgtgcctgactttcccacgtccgctgccaggcgggttctggcgaaatccagcgggtacacgaagcagagggaggtcgcgccggccgcaccgccggaggccaggttgcccgcaaagtacctccagaactgcgtgtgcttgtccacgccccccaggaagatctgcttgtacttatccttgaaggcgaagttgagggcttgagtggggaagtagcgaatgacgttggcaaggttgcccctccagaaggacagcacgccctgctccttggggatgcggacaatgcagtccacgatgcccttgtactgcttgtcggcggcgatctgcttgctggcgtgctggacctgcagcagcagcttgacccgctcgatcggagccacggccgtcttggagatggcggcggcgatgcctccggccaagaagtctttggcgaaggagatggcctgttccgtcatggtggcagggcgggcagcggaacgggaggacagccggagaacgggcgcggagagtgaatggagggcgtcgctgggtcagccctgccaa

SEQ ID NO: 114253 - DNA, 1201 bp, Homo Sapiens
ttggcagcccccgggctagatgccgtggctccggatctcttcgtctttgcagcgtagcccgagtcggtcagcgccggaggacctcagcagccatgtcgaagccccatagtgaagccgggactgccttcattcagacccagcagctgcacgcagccatggctgacacattcctggagcacatgtgccgcctggacattgattcaccacccatcacagcccggaacactggcatcatctgtaccattggcccagcttcccgatcagtggagacgttgaaggagatgattaagtctggaatgaatgtggctcgtctgaacttctctcatggaactcatgagtaccatgcggagaccatcaagaatgtgcgcacagccacggaaagctttgcttctgaccccatcctctaccggcccgttgctgtggctctagacactaaaggacctgagatccgaactgggctcatcaagggcagcggcactgcagaggtggagctgaagaagggagccactctcaaaatcacgctggataacgcctacatggaaaagtgtgacgagaacatcctgtggctggactacaagaacatctgcaaggtggtggaagtgggcagcaagatctacgtggatgatgggcttatttctctccaggtgaagcagaaaggtgccgacttcctggtgacggaggtggaaaatggtggctccttgggcagcaagaagggtgtgaaccttcctggggctgctgtggacttgcctgctgtgtcggagaaggacatccaggatctgaagtttggggtcgagcaggatgttgatatggtgtttgcgtcattcatccgcaaggcatctgatgtccatgaagttaggaaggtcctgggagagaagggaaagaacatcaagattatcagcaaaatcgagaatcatgagggggttcggaggtttgatgaaatcctggaggccagtgatgggatcatggtggctcgtggtgatctaggcattgagattcctgcagagaagtcttccttgctcagaagatgatgattggacggtgcaaccgagctgggaagcctgtcatctgtgctactcagatgctggagagcatgatcaagaagccccgccccactcgggctgaagcagtgatgtggccaatgcagtcctggatggagccgactgcatcatgctgtctggagaaacagccaaaggggactatc

SEQ ID NO: 114254 - DNA, 934 bp, Homo Sapiens
caatgctttctttataaagtagccaactttgtacaaaaaagttggcgcgctctccctgtttagttatggcagagaacgatgtggacaatgagctcttggactatgaagatgatgaggtggagacagcagctgggggagatggggctgaggcccctgccaagaaggatgtcaagggctcctatgtctccatccacagctctggctttcgtgacttcctgctcaagccagagttgctccgggccattgtcgactgtggctttgagcatccgtcagaaggttgctgttttttttggtggtctgtctatcaagaaggatgaagaggtgctgaagaagaactgcccgcatatcgtcgtggggactccaggccgtatcctagccctggctcgaaataagagcctcaacctcaaacacattaaacactttattttggatgaatgtgataagatgcttgaacagctcgacatgcgtcgggatgtccaggaaatttttcgcatgaccccccacgagaagcaggtcatgatgttcagtgctaccttgagcaaagagatccgtccagtctgccgcaagttcatgcaagatccaatggagatcttcgtggatgatgagacgaagttgacgctgcatgggttgcagcagtactacgtgaaactgaaggacaacgagaagaaccggaagctctttgaccttctggatgtccttgagttcaaccaggtggtgatctttgtgaagtctgtgcagcggtgcattgccttggcccagctactagtggagcagaacttcccagccattgccatccaccgtgggatgccccaggaggagaggctttctcgggtatcagcagtttaaagattttcaacgacgaattcttgtggctaccaacctatttgggccgagcatggacatcgagcgggtgaacattgcttttaattatgac

SEQ ID NO: 114255 - DNA, 1003 bp, Homo Sapiens
ttggcaagaacatcagcttcactgtgtgggacgtgggtggccaggacaagatccggcccctgtggcgccactacttccagaacacacaaggcctgatcttcgtggtggacagcaatgacagagagcgtgtgaacgaggcccgtgaggagctcatgaggatgctggccgaggacgagctccgggatgctgtcctcctggtgttcgccaacaagcaggacctccccaacgccatgaatgcggccgagatcacagacaagctggggctgcactcactacgccacaggaactggtacattcaggccacctgcgccaccagcggcgacgggctctatgaaggactggactggctgtccaatcagctccggaaccagaagtgaacgcgacccccctccctctcactcctcttgccctctgctttactctcatgtggcaaacgtgcggctcgtggtgtgagtgccagaagctgcctccgtggtttggtcaccgtgtgcatcgcaccgtgctgtaaatgtggcagacgcagcctgcggccaggctttttatttaatgtaaatagtttttgtttccaatgaggcagtttctggtactcctatgcaatattactcagctttttttattgtaaaaagaaaaatcaactcactgttcagtgctgagaggggatgtaggcccatgggcacctggcctccaggagtcgctgtgttgggagagccggccacgcccttggctttagagctgtgttgaaatccattttggtggttggtttttaacccaaactcagtgcattttttaaaatagttaagaatccaagtcgagaacacttgaacacacagaagggagaccccgcctagcatagatttgcagttacagcctgatgccagtcgccagcccagctgttcccctcgggaacatgaggtggtggtggcgcagcagactgcgatcaattctgcatggtcacagtagagatccccgcaactcgcttgtccttgggtcaccctgcattcca

SEQ ID NO: 114256 - DNA, 859 bp, Homo Sapiens
ttgggatgccgaaaggaaagaagggcaagggaaagaaggtggctccggccccagctgtcgtgaagaagcaggaggctaagaaagtggtgaatcccctgtttgagaaaaggcctaagaattttggcattggacaggacatccagcccaaaagagacctcacccgctttgtgaaatggccccgctatatcaggttgcagcggcagagagccatcctctataagcggctgaaagtgcctcctgcgattaaccagttcacccaggccctggaccgccaaacagctactcagctgcttaagctggcccacaagtacagaccagagacaaagcaagagaagaagcagagactgttggcccgggccgagaagaaggctgctggcaaaggggacgtcccaacgaagagaccacctgtccttcgagcaggagttaacaccgtcaccaccttggtggagaacaagaaagctcagctggtggtgattgcacacgacgtggatcccatcgagctggttgtcttcttgcctgccctgtgtcgtaaaatgggggtcccttactgcattatcaagggaaaggcaagactgggacgtctagtccacaggaagacctgcaccactgtcgccttcacacaggtgaactcggaagacaaaggcgctttggctaagctggtggaagctatcaagacaattacaatgacagatacgatgagatccgccgtcactggggtggcaatgtcctgggtcctaagtctgtggctcgtatcgccaagctcgaaaaggcaaagctaaagaacttgccactaaactgggttaaatgtacactgttgagttttctggacataaaataattgaaataatacaaattttcc

SEQ ID NO: 114257 - DNA, 828 bp, Homo Sapiens
ttggggctggaaccatggagggtgtagaagagaagaagaaggaggttcctgctgtgccagaaacccttaagaaaaagcgaaggaatttcgcagagctgaagatcaagcgcctgagaaagaagtttgcccaaaagatgcttcgaaaggcaaggaggaagcttatctatgaaaaagcaaagcactatcacaaggaatataggcagatgtacagaactgaaattcgaatggcgaggatggcaagaaaagctggcaacttctatgtacctgcagaacccaaattggcgtttgtcatcagaatcagaggtatcaatggagtgagcccaaaggttcgaaaggtgttgcagcttcttcgccttcgtcaaatcttcaatggaacctttgtgaagctcaacaaggcttcgattaacatgctgaggattgtagagccatatattgcatgggggtaccccaatctgaagtcagtaaatgaactaatctacaagcgtggttatggcaaaatcaataagaagcgaattgctttgacagataacgctttgattgctcgatctcttggtaaatacggcatcatctgcatggaggatttgattcatgagatctatactgttggaaaacgcttcaaagaggcaaataacttcctgtggcccttcaaattgtcttctccacgaggtggaatgaagaaaaagaccacccattttgtagaaggtggagatgctggcaacagggaggaccagatcaacaggcttattaaaagaatgaactaaggtgtctaccatgtttttttttctaagctggttggttaataaacagtacctgctctcaaattgaata

SEQ ID NO: 114258 - DNA, 955 bp, Homo Sapiens
tacaaaaaagttggggcagccatcaggtaagccaagatgggtgcatacaagtacatccaggagctatggagaaagaagcagtctgatgtcatgcgctttcttctgagggtccgctgctggcagtaccgccagctctctgctctccacagggctccccgccccacccggcctgataaagcgcgccgactgggctacaaggccaagcaaggttacgttatatataggattcgtgttcgccgtggtggccgaaaacgcccagttcctaagggtgcaacttacggcaagcctgtccatcatggtgttaaccagctaaagtttgctcgaagccttcagtccgttgcagaggagcgagctggacgccactgtggggctctgagagtcctgaattcttactgggttggtgaagattccacatacaaattttttgaggttatcctcattgatccattccataaagctatcagaagaaatcctgacacccagtggatcaccaaaccagtccacaagcacagggagatgcgtgggctgacatctgcaggccgaaagagccgtggccttggaaagggccacaagttccaccacactattggtggctctcgccgggcagcttggagaaggcgcaatactctccagctccaccgttaccgctaatataagtaaagtttgtaaaattcatacttaataaacaatttaggacagtcatgtctgcttacaggtgttatttgtctgttaaaactagtctgcagatgtttcttgaatgctttgtcaaattaagaaagttaaagtgcaataatgtttgaagacaataagtggtggtgtatcttgtttctaataagataaacttttttgtctttgctttatcttattaggggagttgtatgtcagtgtataaaacatactgtgtggtataacaggcttaataaattctttaaaaggagagaactgaaactagccc

SEQ ID NO: 114259 - DNA, 477 bp, Homo Sapiens
ttggagctaaggcaccccagccggaggaagtgagctctcctggggcgtggttgttcgtgatccttgcatctgttacttagggtcaaggcttgggtcttgccccgcagacccttgggacgacccggccccagcgcagctatgaacctggagcgagtgtccaatgaggagaaattgaacctgtgccggaagtactacctgggggggtttgctttcctgccttttctctggttggtcaacatcttctggttcttccgagaggccttccttgtcccagcctacacagaacagagccaaatcaaaggctatgtctggcgctcagctgtgggcttcctcttctgggtgatagtgctcacctcctggatcaccatcttccagatctaccggccccgctggggtgcccttggggactacctctccttcaccatacccctgggcaccccctgacaacttctgcacatactggggccctgcttattc

SEQ ID NO: 114260 - DNA, 1165 bp, Homo Sapiens; identical to SEQ ID NO: 104493

SEQ ID NO: 114261 - DNA, 797 bp, Homo Sapiens; identical to SEQ ID NO: 104494

SEQ ID NO: 114262 - DNA, 398 bp, Homo Sapiens
ttggctctgcgccatgagagccaagtggaggaagaagcgaatgcgcaggctgaagcgcaaaagaagaaagatgaggcagaggtccaagtaaaccgctagcttgttgcaccgtggaggccacaggagcagaaacatggaatgccagacgctggggatgctggtacaagttgtgggactgcatgctactgtctagagcttgtctcaatggatctagaacttcatcgccctctgatcgccgatcacctctgagacccaccttgctcataaacaaaatgcccatgttggtcctctgccctggacctgtgacattctggactatttctgtgtttatttgtggccgagtgtaacaaccatataataaatcacctcttccgctgttttagctgaagaattaaatc

SEQ ID NO: 114263 - DNA, 879 bp, Homo Sapiens; identical to SEQ ID NO: 104495

SEQ ID NO: 114264 - DNA, 1190 bp, Homo Sapiens; identical to SEQ ID NO: 104496

SEQ ID NO: 114265 - DNA, 687 bp, Homo Sapiens
actttgtacaaaaaagttggcaggagccgaaccattcagcgcaggttgtccccgtttcccctcccccttcccttctccggttgccttcccgggccccttacactccacagtcccggtcccgccatgtcccagaaacaagaagaagagaaccctgcggaggagaccggcgaggagaagcaggacacgcaggagaaagaaggtattctgcctgagagagctgaagaggcaaagctaaaggccaaatacccaagcctaggacaaaagcctggaggctccgacttcctcatgaagagactccagaaagggcaaaagtactttgactcaggagactacaacatggccaaagccaagatgaagaataagcagctgccaagtgcaggaccagacaagaacctggtgactggtgatcacatccccaccccacaggatctgccccagagaaagtcctcgctcgtcaccagcaagcttgcgggtggccaagttgaatgatgctgcccggggctctgccagatcctgagacgcttcccctccctgccccacccgggtcctgtgctggctcctgccccttcctgcttttgcagccaggggtcaggaggtggctcgggtgtgggctggagaggcagaagccctttcctgttggtgtcccagcacatggagccccttgggctgagcaccaagaccttgaac

SEQ ID NO: 114266 - DNA, 550 bp, Homo Sapiens
caactttgtacaaaaaagttggccagagcaagtcagccagcatgaccgagcgccgcgtccccttctcgctcctgcggggccccagctgggaccccttccgcgactggtacccgcatagccgcctcttcgaccaggccttcgggctgccccggctgccggaggagtggtcgcagtggttaggcggcagcagctggccaggctacgtgcgccccctgccccccgccgccatcgagagccccgcagtggccgcgcccgcctacagccgcgcgctcagccggcaactcagcagcggggtctcggagatccggcacactgcggaccgctggcgcgtgtccctggatgtcaaccacttcgccccggacgagctgacggtcaagaccaaggatggcgtggtggagatcaccggcaagcacgaggagcggcaggacgagcatggctacatctcccggtgcttcacgcggaaatacacgctgccccccggtgtggaccccacccaagtttcctcctccctgtcccctgagggcacactgaccgtggaggcccccgtgcc

SEQ ID NO: 114267 - DNA, 857 bp, Homo Sapiens; identical to SEQ ID NO: 104497

SEQ ID NO: 114268 - DNA, 856 bp, Homo Sapiens; identical to SEQ ID NO: 104498

SEQ ID NO: 114269 - DNA, 1158 bp, Homo Sapiens; identical to SEQ ID NO: 104499

SEQ ID NO: 114270 - DNA, 897 bp, Homo Sapiens; identical to SEQ ID NO: 104500

SEQ ID NO: 114271 - DNA, 961 bp, Homo Sapiens
ctttaaagggccaactttgtacaaaaaagttgggaaatcctcctcacttcagtgctgggctttgccatctactggttcatctcccgggacaaagaggaaactttgccacttgaagatgggtggtgggggccaggcacgaggtccgcagccagggaggacgacagcatccgccctttcaaggtggaaacgtcagatgaggagatccacgacttacaccagaggatcgataagttccgtttcaccccacctttggaggacagctgcttccactatggcttcaactccaactacctgaagaaagtcatctcctactggcggaatgaatttgactggaagaagcaggtggagattctcaacagataccctcacttcaagactaagattgaagggctggacatccacttcatccacgtgaagcccccccagctgcccgcaggccataccccgaagcccttgctgatggtgcacggctggcccggctctttctacgagttttataagatcatcccactcctgactgaccccaagaaccatggcctgagcgatgagcacgtttttgaagtcatctgcccttccatccctggctatggcttctcagaggcatcctccaagaaggggttcaactcggtggccaccgccaggatcttttacaagctgatgctgcggctgggcttccaggaattctacattcaaggaggggactgggggtccctgatctgcactaatatggcccagctggtgcccagccacgtgaaaggcctgcacttgaacatggctttggttttaagcaacttctctaccctgacctcctcctgggacagcgtttcgggaggtttcttggcctcactgagagggatgtggagctgctgtaccccgtcaaggagaagtattctacagcctgatgagggagagcggctacatgcacattcagtgcaccagcctgacaccgtaggctctgctc

SEQ ID NO: 114272 - DNA, 1331 bp, Homo Sapiens
ttggtaattatttcaaatggccacgggacaacacaatacagtacattctcctatgtggatcctgtaataacaagtatttcgccgaaatacggtcctatggctggtggcactttacttactttaactggaaattacctaaacagtgggaattctagacacatttcaattggtggaaaaacatgtactttaaaaagtgtgtcaaacagtattcttgaatgttataccccagcccaaaccatttcaactgagtttgctgttaaattgaaaattgacttagccaaccgagagacaagcatcttcagttaccgtgaagatcccattgtctatgaaattcatccaaccaaatcttttattagtggtgggagcacaataacaggtgttgggaaaaacctgaattcagttagtgtcccgagaatggtcataaatgtgcatgaagcaggaaggaactttacagtggcatgtcaacatcgctctaattcagagataatctgttgtaccactccttccctgcaacagctgaatctgcaactccccctgaaaaccaaagcctttttcatgttagatgggatcctttccaaatactttgatctcatttatgtacataatcctgtgtttaagccttttgaaaagccagtgatgatctcaatgggcaatgaaaatgtactggaaattaagggaaatgatattgaccctgaagcagttaaaggtgaagtgttaaaagttggaaataagagctgtgagaatatacacttacattctgaagccgttttatgcacggtccccaatgacctgctgaaattgaacagcgagctaaatatagagtggaagcaagcaatttcttcaaccgtccttggaaaagtaatagttcaaccagatcagaatttcacaggattgattgctggtgttgtctcaatatcaacagcactgttattactacttgggtttttcctgtggctgaaaaagagaaagcaaattaaagatctgggcagtgaattagttcgctacgatgcaagagtacacactcctcatttggataggcttgtaagtgcccgaagtgtaagcccaactacagaaatggtttcaaatgaatctgtagactaccgagctacttttccagaagatcagtttcctaattcatctcagaacggttcatgccgacaagtgcagtatcctctgacagacatgtcccccatcctaactagtggggactctgatatatccagtccattactgcaaaatactgtccacattgacctcagtgctctaaatccagagctggtccaggcagtgcagcatgtagtgattgggcccagtagcctgattgtgcattt

SEQ ID NO: 114273 - DNA, 1734 bp, Homo Sapiens
tacaaaaaagttggggctgagtcacacctgctgcagtggctgctgctgctgctgcccacgctctgtggcccaggcactgctgcctggaccacctcatccttggcctgtgcccagggccctgagttctggtgccaaagcctggagcaagcattgcagtgcagagccctagggcattgcctacaggaagtctggggacatgtgggagccgatgacctatgccaagagtgtgaggacatcgtccacatccttaacaagatggccaaggaggccattttccaggacacgatgaggaagttcctggagcaggagtgcaacgtcctccccttgaagctgctcatgccccagtgcaaccaagtgcttgacgactacttccccctggtcatcgactacttccagaaccagactgactcaaacggcatctgtatgcacctgggcctgtgcaaatcccggcagccagagccagagcaggagccagggatgtcagaccccctgcccaaacctctgcgggaccctctgccagaccctctgctggacaagctcgtcctccctgtgctgcccggggccctccaggcgaggcctgggcctcacacacaggatctctccgagcagcaattccccattcctctcccctattgctggctctgcagggctctgatcaagcggatccaagccatgattcccaagggtgcgctagctgtggcagtggcccaggtgtgccgcgtggtacctctggtggcgggcggcatctgccagtgcctggctgagcgctactccgtcatcctgctcgacacgctgctgggccgcatgctgccccagctggtctgccgcctcgtcctccggtgctccatggatgacagcgctggcccaaggtcgccgacaggagaatggctgccgcgagactctgagtgccacctctgcatgtccgtgaccacccaggccgggaacagcagcgagcaggccataccacaggcaatgctccaggcctgtgttggctcctggctggacagggaaaagtgcaagcaatttgtggagcagcacacgccccagctgctgaccctggtgcccaggggctgggatgcccacaccacctgccaggccctcggggtgtgtgggaccatgtccagccctctccagtgtatccacagccccgacctttgatgagaactcagctgtccagctgcaaaggaaaagccaagtgagacgggctctgggaccatggtgaccaggctcttcccctgctccctggccctcgccagctgccaggctgaaaagaagcctcagctcccacaccgccctcctcaccgcccttcctcggcagtcacttccactggtggaccacgggcccccagccctgtgtcggccttgtctgtctcagctcaaccacagtctgacaccagagcccacttccatcctctctggtgtgaggcacagcgagggcagcatctggaggagctctgcagcctccacacctaccacgacctcccagggctgggctcaggaaaaaccagccactgctttacaggacagggggttgaagctgagccccgcctcacacccacccccatgcactcaaagattggattttacagctacttgcaattcaaattcagaagataaaaaatgggaacatacagaactctaaaagatagacatcacaaattgttaaattaagctttttcaaaaaatcagcaattccccaccgtatcaaggtggacactgcacgctctggcatga

SEQ ID NO: 114274 - DNA, 963 bp, Homo Sapiens
tacaaaaaagttgggcgtgatgtctcacagaaagttctccgctcccagacatgggtccctcggcttcctgcctcggaagcgcagcagcaggcatcgtgggaaggtgaagagcttccctaaggatgacccgtccaagccggtccacctcacagccttcctgggatacaaggctggcatgactcacatcgtgcgggaagtcgacaggccgggatccaaggtgaacaagaaggaggtggtggaggctgtgaccattgtagagacaccacccatggtggttgtgggcattgtgggctacgtggaaacccctcgaggcctccggaccttcaagactgtctttgctgagcacatcagtgatgaatgcaagaggcgtttctataagaattggcataaatctaagaagaaggcctttaccaagtactgcaagaaatggcaggatgaggatggcaagaagcagctggagaaggacttcagcagcatgaagaagtactgccaagtcatccgtgtcattgcccacacccagatgcgcctgcttcctctgcgccagaagaaggcccacctgatggagatccaggtgaacggaggcactgtggccgagaagctggactgggcccgcgagaggcttgagcagcaggtacctgtgaaccaagtgtttgggcaggatgagatgatcgacgtcatcggggtgaccaagggcaaaggctacaaaggggtcaccagtcgttggcacaccaagaagctgccccgcaagacccaccgaggcctgcgcaaggtggcctgtattggggcatggcatcctgctcgtgtagccttctctgtggcacgcgctgggcagaaaggctaccatcaccgcactgagatcaacaagaagatttataagattggccagggctaccttatcaagacggcaagctgatcagaaccatgcctccactgactatgacctatctgacagagcatcaaccc

SEQ ID NO: 114275 - DNA, 803 bp, Homo Sapiens
actttgtacaaaaaagttggtcgtctttaaaccctgcgtggcaatccctgacgcaccgccgtgatgcccagggaagacagggcgacctggaagtccaactacttccttaagatcatccaactattggatgattatccgaaatgtttcattgtgggagcagacaatgtgggctccaagcagatgcagcagatccgcatgtcccttcgcgggaaggctgtggtgctgatgggcaagaacaccatgatgcgcaaggccatccgagggcacctggaaaacaacccagctctggagaaactgctgcctcatatccgggggaatgtgggctttgtgttcaccaaggaggacctcactgagatcagggacatgttgctggccaataaggtgccagctgctgcccgtgctggtgccattgccccatgtgaagtcactgtgccagcccagaacactggtctcgggcccgagaagacctcctttttccaggctttaggtatcaccactaaaatctccaggggcaccattgaaatcctgagtgatgtgcagctgatcaagactggagacaaagtgggagccagcgaagccacgctgctgaacatgctcaacatctcccccttctcctttgggctggtcatccagcaagtgttcgacaatggcagcatctacaaccctgaagtgcttgatatcacagaggaaactctgcattctcgcttcctggaggtgtccgcaatgttgcccagtgtctgtctgcagattggctacccaactgttgcatcagtaccccattctatcatcaacggggtacaaac

SEQ ID NO: 114276 - DNA, 1400 bp, Homo Sapiens
  misc_feature (1236)..(1248): n is a, c, g, or t
ttggggagcagctggtgttgtacatgaaagcagcacagctgcttgcggcttctctgcatcttgccaaagcccagatcaagtccgggaaactgagcccatccacagctgtgaaacaagttgtcaagaatctgaacgaacgatataaattctgcatcaccatgtgcaagaaacttacagaaaagctgaatcgattcttctctgacaaacagaggtttattgatgaaatcaacagtgtgactgcagagaaactcatctataattgtgctgtagaaatggttcagtctgcagccctggatgagatgtttcagcagaccgaagatattgtttatcgctatcataaggcagcccttcttttggaaggcctaagtaggattctacaggaccctgcagatattgaaaatgtgcataaatataaatgtagtattgagagaagactgtcggcgctctgccatagcaccgcaaccgtgtgagcagcaggctcatcccgtggaccggtggtgggaacgtgaggtgatgcctttgggattacagcttgagttctgtcaccccatccccaggaaactgtagcttcttaactggtgactaccaaagaacaagcagtgatttgaaaaaggaaaaacaatccaaaaactacatatttgtaggaaatctgccttattggagaaaatcaccctttccctttttctttgtagaagcaggagcaagagtgtttggctcccagtttggacttggtgaataaatgtaccttagaactaggataatcggtacagttattcttaaagataattaaaaatgaaacaaagtgagtgctcgtcactgggttcatcagagcagtgtgtgaaattccatgtgtttgctgaggtgtaaaggtaaatgtattcacccctcatccaggcagtttgatatttggagtaagtttgtttaaatctgagcatgcatctttaaacagctcaggaagaaatagcttaagaagaagtgaaacatggatcttggaagaaattttgaaatcttcaatttgatcctaatatggatacatgttaatcttccaaaatctttcatattgcactaatttattaaaacaactgtgtattggattttgtaatttaactaaggcacaatggacttgtttaaaatattttacttgattgtatacatagaccctttccagaattcacatgtaatctccagtgaacttttaagtggttaaaacttgtattcatgtgaacctttgcacannnnnnnnnnnnnactttctttatctacacctacagattttctcagtaatgtttttgttagcttttggttcaattttttattgtgcatgcagaatgtacattgatgcctgtgaccttaaggtttattaaaggctaaggtttatttgggcagtattaaaaacaaaa

SEQ ID NO: 114277 - DNA, 915 bp, Homo Sapiens
ttggcgggtgccgagccaactttcctgcgtccatgcagccccgccggcaacggctgcctgctccctggtccgggcccaggggcccgcgccccaccgccccgctgctcgcgctgctgctgttgctcgccccggtggcggcgcccgcggggtccggggaccccgacgaccctgggcagcctcaggatgctggggtcccgcgcaggctcctgcagcaggcggcgcgcgcggcgcttcacttcttcaacttccggtccggctcgcccagcgcgctacgagtgctggccgaggtgcaggagggccgcgcgtggattaatccaaaagagggatgtaaagttcacgtggtcttcagcacagagcgctacaacccagagtctttacttcaggaaggtgagggacgtttggggaaatgttctgctcgagtgtttttcaagaatcagaaacccagaccaaccatcaatgtaacttgtacacggctcatcgagaaaaagaaaagacaacaagaggattacctgctttacaagcaaatgaagcaactgaaaaaccccttggaaatagtcagcatacctgataatcatggacatattgatccctctctgagactcatctgggatttggctttccttggaagctcttacgtgatgtgggaaatgacaacacaggtgtcacactactacttggcacagctcactagtgtgaggcagtggaaaactaatgatgatacaattgattttgattatactgttctacttcatgaattatcaacacaggaaataattccctgtcgcattcacttggtctggtaccctggcaaacctcttaaagtgaagtaccactgtcaagagctacagacaccagaagaagcctccggaactgaagaaggatcagctgtagtaccaacagagcttagtaatttct

SEQ ID NO: 114278 - DNA, 733 bp, Homo Sapiens
ttgggcgaggaaaaccctgtactattagccatggtcaaccccaccgtgttcttcgacattgccgtcgacggcgagcccttgggccgcgtctcctttgagctgtttgcagacaaggtcccaaagacagcagaaaattttcgtgctctgagcactggagagaaaggatttggttataagggttcctgctttcacagaattattccagggtttatgtgtcagggtggtgacttcacacgccataatggcactggtggcaagtccatctatggggagaaatttgaagatgagaacttcatcctaaagcatacgggtcctggcatcttgtccatggcaaatgctggacccaacacaaatggttcccagtttttcatctgcactgccaagactgagtggttggatggcaagcatgtggtgtttggcaaagtgaaagaaggcatgaatattgtggaggccatggagcgctttgggtccaggaatggcaagaccagcaagaagatcaccattgctgactgtggacaactcgaataagtttgacttgtgttttatcttaaccaccagatcattccttctgtagctcaggagagcacccctccaccccatttgctcgcagtatcctagaatctttgtgctctcgctgcagttccctttgggttccatgttttccttgttccctcccatgcctagctggattgcaaagttaagtttatgatttatggaataaaaactaaataac

SEQ ID NO: 114279 - DNA, 972 bp, Homo Sapiens; identical to SEQ ID NO: 104501

SEQ ID NO: 114280 - DNA, 982 bp, Homo Sapiens; identical to SEQ ID NO: 104502

SEQ ID NO: 114281 - DNA, 895 bp, Homo Sapiens
tacaaaaaagttggttgagggggaggaggctggagaggccaggagagggccagctctccacctgtccctgcttcctgcctgtcctctggcagtgcccagtgctgtgtcttcactgacagatgaccttctcaagtactatcaccaggtgactcgtgctgtgctaggggatgatccgcaactgatgaaggttgcactccaggacttgcagacgaactccaagattggggcactcctgccttactttgtttatgtggtcagtggggtgaaatctgtaagccatgacctggagcaactgcaccggctgctgcaggtggcacggagcctatttcgtaatccgcacctgtgcttggggccctatgtccgctgtctggtgggcagtgtcctctactgtgtcctggagccactggctgcctccatcaaccccctgaatgaccactggactctgcgggatggggctgccctcctgctcagccacatcttctggactcatggggaccttgtaagtggcctctatcagcatatcctgctatccctgcagaagatcctggcagatcctgtgcggccgctctgctgccactatggagccgtggtggggctgcatgctcttggctggaaggcagtagaacgagtcctgtacccacacctgtccacctactggacaaacttgcaggctgtgctggatgattattcagtatctaatgcccaggtcaaagcagatggaccaaagtctatggaccctttctggtggcggtagagcgactgctgaagatgaaagcccaggcagcagagcccaacacgggtggcccaggtggcaaggggtgcccggcgcctgaacaacctgccatgggacagccttctctttcaaagtcgtcctccgggggcggtggcaaaaccc

SEQ ID NO: 114282 - DNA, 970 bp, Homo Sapiens; identical to SEQ ID NO: 104503

SEQ ID NO: 114283 - DNA, 940 bp, Homo Sapiens; identical to SEQ ID NO: 104504

SEQ ID NO: 114284 - DNA, 443 bp, Homo Sapiens
ttgggtcgaagcgaccgacatggtgggtcctctggtgcgaaattccggatttccttgggtcttccggtaggagctgtaatcaattgtgctgacaacacaggagccaaaaacctgtatatcatctccgtgaaggggatcaagggacggctgaacagacttcccgctgctggtgtgggtgacatggtgatggccacagtcaagaaaggcaaaccagagctcagaaaaaaggtacatccagcagtggtcattcgacaacgaaagtcataccgtagaaaagatggcgtgtttctttattttgaagataatgcaggagtcatagtgaacaataaaggcgagatgaaaggttctgccattacaggaccagtagcaaaggagtgtgcagacttgtggccccggattgcatccaatgctggcagcattgcatgattctccagtatatttgt

SEQ ID NO: 114285 - DNA, 904 bp, Homo Sapiens
ccatacatcccctttaccattgtgacacgggatgaatcctggatagatttttcaacatggattcaataagatcagccacactaatccaatagcccagttggtatatccttttagcttgatgacttcataggcactttcaaccaccatcttatgcacttccttccaattttcactatcattgtcagttcccatttctggattcaattcctggagagaaacacctgccacattcacaccactccacacagccacacttgagtcgccatgttcccccaaaatccatccatggcagctgctgggatgaatgccaagtttttcagccataaggtagcgaaatctagcagaatccagattacatccacttccaatcacgcggtgtttgggtaatccacttagtttccaggtaacatacgtaagaatgtccactgggttggaaaccacaattatgatgcaatcaggactgtacttgacgatctgaggaataatgaatttgaagacattaacatttctctgcaccagattgagccgactctccccttcttgctgacggactcctgcagttaccactacaatcttagaattggcggtcacagaataatctttatctgccacaattttaggtgtctgaaaaaataagctcccatgctgcagatccatcatttctcctttaagcttatcttccaaaacatccacaagagcaagttcatcagccagagactttcccagaatgctgatagcacacgccataccaacttgtccaacacccactacagtgatcttattgtttggaactgttgcctcttcttccgcaactggtgcaatgagtttttccttaagagttgccattttgcacaggagagagaaggctctggagacctctgtaacagtcgtgcggagaagccaa

SEQ ID NO: 114286 - DNA, 873 bp, Homo Sapiens
gcaggaggcctccacagcgttgatgagcaggagcggaagccccccactctccagcacatgcaaaggcatggatggtggccccaccaggagagctgacgttgtccttgagctggcctgggtgctgttctgagtgcagcagcatcttggcagcccccaggagggcctgggccccgaggcggactgccaggcgccttggaagtcccatcttcacacccccatcagccagggcatccagggctgtgaatgcgtaggcggggccgctgccactgagccccgtgacggcatcaatcaggtcctcttccacctccgtgcagaagcccacgctgctcagcagctgctccatgagcctcccgtcctccacctgggcgtgcgtgcctgtggcatacacggtggccccctcccgcaccacgactggagtgttggtcatgcagcggatgaccctgggggctggccgaaacgctgacagcttcttctcaatggagctgatggtgacgccggccgcgcaggacaccacaatgtgtctgtcctcaatgtcggcgcctatttcatccaggatgaaggggatgatgtgtggcttcacagccaggaagagcacatcactgtgctgcaccgtctccttgttgtggggtgtcaacttcacccccatcttcctgagagcagaaactgtggccaggtccatgtctggggagctagccattatcttgtgggcagccaagacgcctgctgctgtgaagcccttggccagggcaaaagccagctggccagcgccgatgaagcccacgctcatgctgtccggagacccctggcccaaagcccccacagatggcaccggctccttcagggctgcggccgccccaacttttttgtacaaag

SEQ ID NO: 114287 - DNA, 1363 bp, Homo Sapiens
  misc_feature (570)..(664): n is a, c, g, or t
ttggctggatagatgttattcaactccttcaggttatcttgaactgactgactcatgccagccctacagaagtgccttttacatattggagcaacagcgtgttggctgggctcttgacatggatgaaattgaaaagtaccaagaagtggaagaagaccaagacccatcatgccccaggctcagcagggagctgctggatgagaaagagcctgaagtcttgcaggactcactggatagatgttattcgactccttcaggttatcttgaactgcctgacttaggccagccctacagaagtgctgttcactcattggaggaacagtaccttggcttggctcttgacgtggacagaattaaaaaggaccaggaagaggaagaagaccaaggcccaccatgctccaggctcagcagggagctgctggaggcagtagagcctgaagtcttgctggactcactggatagatgttattcaactccttccagttgtcttgaacagcctgactcctgcctgccctatggaagttccttttatgcattggaggaaaaacatgttggcttttctcttgacgnnnnnnnnnnnnnnnnnnnnnnnnnnnnnnnnnnnnnnnnnnnnnnnnnnnnnnnnnnnnnnnnnnnnnnnnnnnnnnnnnnnnnnnnnnnnnnnatcaaaacccaccatgccccaggctcaacagcgtgctgatggaagtggaagagcctgaagtcttacaggactcactggatagatgttattcgactccatcaatgtactgtgaactacgtgactcattccagcactacagaagtgtgttttactcatttgaggaacagcacatcagctttgcccttgacatggacaataggttctttactttgacggtgacaagtctctatctggtcttccagatgggagtcatattcccacaataagcagcccttactaagccgagaggtgtcattcctgcaggcaggacctataggcgcctgaagatttgaatgaaactatagttccatttggaagcccagacataggatgggtcagtgggcatggctctattcctattctcagagcatgccagtggcaacctgtgctcagtctgaagacaatggacccacgttaggtgtgacacgttcacataactgtgcagcacatgccgggagtgatcagtcggacattttaatttgaaccacgtatctctgggtagctacaaaattcctcacggatttcattttgcaggcatgtctctgagcttctatacctgctcaagtcattgtcatctttgtgtttagctcatccaaagtgttaccctggtttcaatgaacctaacctcattctttgtgtcttcagtgttggcttgtttta

SEQ ID NO: 114288 - DNA, 452 bp, Homo Sapiens
  misc_feature (356)..(364): n is a, c, g, or t
caactttgtacaaaaaagttggccaggatctcgggctcggaacgagactgcacggattgttttaagaaaatggcagacaaaccagacatgggggaaatcgccagcttcgataaggccaagctgaagaaaacggagacgcaggagaagaacaccctgccgaccaaagagaccattgagcaggagaagcggagtgaaatttcctaagatcctggaggatttcctacccccgtcctcttcgagaccccagtcgtgatgtggaggaagagccacctgcaagatggacacgagccacaagctgcactgtgaacctgggcactccgcgccgatgccaccggcctgtgggtctctgaagggannnnnnnnnaatcggaccgccaaattctccggtttgccccgggatattatagaaaattatttgtatgaataatgaaaataaaacacacctcgtggca

SEQ ID NO: 114289 - DNA, 1161 bp, Homo Sapiens
tttgtacaaaaaagttggctggtgacgagtccctcagttctctccttgaatccactcgccagcccgccgccctctgccgccgcaccctgcacacccgcccctctcctgtgccaggaacttgctactaccagcaccatgccctaccaatatccagcactgaccccggagcagaagaaggagctgtctgacatcgctcaccgcatcgtggcacctggcaagggcatcctggctgcagatgagtccactgggagcattgccaagcggctgcagtccattggcaccgagaacaccgaggagaaccggcgcttctaccgccagctgctgctgacagctgacgaccgcgtgaacccctgcattgggggtgtcatcctcttccatgagacactctaccagaaggcggatgatgggcgtcccttcccccaagttatcaaatccaagggcggtgttgtgggcatcaaggtagacaagggcgtggtccccctggcagggacaaatggcgagactaccacccaagggttggatgggctgtctgagcgctgtgcccagtacaagaaggacggagctgacttcgccaagtggcgttgtgtgctgaagattggggaacacaccccctcagccctcgccatcatggaaaatgccaatgttctggcccgttatgccagtatctgccagcagaatggcattgtgcccatcgtggagcctgagatcctccctgatggggaccatgacttgaagcgctgccagtatgtgaccgagaaagtgctggctgctgtctacaagctctgagtgaccaccacatctacctggaagcaccttgctgaagcccaacatggtcaccccaggccatgcttgcactcagaagttttctcatgaggagattgccatggcgaccgtcacagcgctgcgccgcacagtgccccccgctgtcactgggatcaccttcctgtctggaggccagagtgaggaggaggcgtccatcaacctcaatgccattaacaagtgccccctgctgaagccctgggccctgaccttctcctacggcctagccctgcaggcctctgccctgaaggcctggggcgggaagaaggattattttgtttttttgcgcaggatgagtaagtcaagcgagctctgccccactccctcttgcctgtcaaggaa

SEQ ID NO: 114290 - DNA, 696 bp, Homo Sapiens
gtacaaaaagttggctcccgggtgtggcggtcacaccagctctctgctctcccagcgcagcgccgccgcccggcccctccagcttcccggaccatggccaacctggagcgcaccttcatcgccatcaagccggacggcgtgcagcgcggcctggtgggcgagatcatcaagcgcttcgagcagaagggattccgcctcgtggccatgaagttcctccgggcctctgaagaacacctgaagcagcactacattgacctgaaagaccgaccattcttccctgggctggtgaagtacatgaactcagggccggttgtggccatggtctgggaggggctgaacgtggtgaagacaggccgagtgatgcttggggagaccaatccagcagattcaaagccaggcaccattcgtggggacttctgcattcaggttggcaggaacatcattcatggcagtgattcagtaaaaagtgctgaaaaagaaatcagcctatggtttaagcctgaagaactggttgactacaagtcttgtgctcatgactgggtctatgaataagaggtggacacaacagcagtctccttcagcacggcgtggtgtgtccctggacacagctcttcattccattgacttataggcaacaggattgatcattcttttatagagcatatttgccaataaagcttttggaagccggagaaa

SEQ ID NO: 114291 - DNA, 946 bp, Homo Sapiens
ttggcgaagatggccggttggcagagctacgtggataacctgatgtgcgatggctgctgccaggaggccgccattgtcggctactgcgacgccaaatacgtctgggcagccacggccgggggcgtctttcagagcattacgccaatagaaatagatatgattgtaggaaaagaccgggaaggtttctttaccaacggtttgactcttggcgcgaagaaatgctcagtgatcagagatagtctatacgtcgatggtgactgcacaatggacatccggacaaagagtcaaggtggggagccaacatacaatgtggctgtcggcagagctggtagagcattggttatagtcatgggaaaggaaggtgtccacggaggcacacttaacaagaaagcatatgaactcgctttatacctgaggaggtctgatgtgtaagcagcctctccccatctacctagcaactgtcttcatcaacaaccctaattatggtcacaatgctaccaaactgtagatggtagctaatttttctttacctattttctaatgtcatgattcctgtttgcccaatggatcatttgtatgttaaccactgtatgtaaccaacccttatctggcaacataattgcagcacaataatgatttgcatgataccttgaaattggggggagggggcatgccaagttgggcatcactttgtcttagcaattaatgggatattgattactaaaataagttaatattaagcaaggtgccggttgtacaatctctgatcagtgtcttttcagcactttgagcatttacttggctcatttagtcttccttttgtagcgcatggttgggaggaaaaagtgcatgcatcattccttcactcttctctttttcccgcccccccctcccttcgcacataggcatttgggtttgcttccatctttttttatgcagtgcctgg

SEQ ID NO: 114292 - DNA, 864 bp, Homo Sapiens
ttggggcggcggcgatggcggcggggatagtggcttctcgcagactccgcgacctactgacccggcgactgacaggctccaactacccgggactcagtattagccttcgcctcactggctcctctgcacaagaggaggcttccggagtagccctcggtgaagccccagaccacagctatgagtcccttcgtgtgacgtctgcgcagaaacatgttctgcatgtccagctcaaccggcccaacaagaggaatgccatgaacaaggtcttctggagagagatggtagagtgcttcaacaagatttcgagagacgctgactgtcgggcggtggtgatctctggtgcaggaaaaatgttcactgcaggtattgacctgatggacatggcttcggacatcctgcagcccaaaggagatgatgtggcccggatcagctggtacctccgtgacatcatcactcgataccaggagaccttcaacgtcatcgagaggtgccccaagcccgtgattgctgccgtccatgggggctgcattggcggaggtgtggaccttgtcaccgcctgtgacatccggtactgtgcccaggatgctttcttccaggtgaaggaggtggacgtgggtttggctgccgatgtaggaacactgcagcgcctgcccaaggtcatcgggaaccagagcctggtcaacgagctggccttcaccgcccgcaagatgatggctgacgaggccctgggcagtgggctggtcagcccgggtgttcccagacaaagaggtcatgctggatgctgccttagcgctggcggccgagatttccagcaagagccccgtggcggtgcagagcaccaaggtcaacctgctgtattcccgc

SEQ ID NO: 114293 - DNA, 971 bp, Homo Sapiens
gtttctcctcaatccggtgacgatcgtctgtatctggcaggtactggaattccatgggctcactgagctcccggtcggaaggccgccgcagctgcatggagacacgcacaggagcctgcaggctggggtctgcgtagggaggggtccggaacacaatggccacttgtcggtgcacatcagcttgcgaaaaggagcctcgggcctcccagcctggtcccgtgaaatacacctcaatgtcctctttctgcaccttgtcacacagtaggaagatctcatccccaccgaggcagctgccagagtttcggttcactcggcagatcttgagctcggcagtgttgggggcacgattgtcaaagatgggatgagaaaggacaggcggcaggcggaggggcctgcctgatgggtcccgcactgtcacctggaagcagagccgcacagcattcaggtcgtagtccccacgctgctcttctataggaacttggaaggggttgttgttggtctggatgcgctgactgatagcctgctccaggtcccgcttcttcacacactggattcccaggttctggaaactgtggatgcagcggtccgggcagagctcagcctcatagaagccatcccggcagtcctttcctacaagctcgtgggggtgaggccggtgaggagggtccttggtgaccagggagatgcgcactgtccctggtcctgtgtagccattgatcttgatggtggggtgggtcttggtggtatctgtgctcctctcgcctgggatgctgcccgcggagcgcccctcgcacttgtagcggaagcgcatgccccgctgcttgggctgctcaatgatctccacataggggccagaggcctgggctggctctgccgggaagatgagggggaacagttcgtccatggccggggtcccgggggcggggccggggtcgcagctgggcccgcggcgtgcactacagacgagccaa

SEQ ID NO: 114294 - DNA, 1018 bp, Homo Sapiens
ttggcagcgatgtctccaccaccgctgctgcaacccctgctgctgctgctgcctctgctgaatgtggagccttccggggccacactgatccgcatccctcttcatcgagtccaacctggacgcaggatcctgaacctactgaggggatggagagaaccagcagagctccccaagttgggggccccatcccctggggacaagcccatcttcgtacctctctcgaactacagggatgtgcagtattttggggaaattgggctgggaacgcctccacaaaacttcactgttgcctttgacactggctcctccaatctctgggtcccgtccaggagatgccacttcttcagtgtgccctgctggttacaccaccgatttgatcccaaagcctctagctccttccaggccaatgggaccaagtttgccattcaatatggaactgggcgggtagatggaatcctgagcgaggacaagctgactattggtggaatcaagggtgcatcagtgattttcggggaggctctctgggagcccagcctggtcttcgcttttgcccattttgatgggatattgggcctcggttttcccattctgtctgtggaaggagttcggcccccgatggatgtactggtggagcaggggctattggataagcctgtcttctccttttacctcaacagggaccctgaagagcctgatggaggagagctggtcctggggggctcggacccggcacactacatcccacccctcaccttcgtgccagtcacggtccctgcctactggcagatccacatggagcgtgtgaaggtgggcccagggctgactctctgtgccaagggctgtgctgccatcctggatacgggcacgtccctcatcacaggacccactgaggagatccgggccctgcatgcagccattgggggaatccccttgctggctggggagtacatcatccctgtgctcggaaatcccaaagctccccgcagtctccttccttcttgggggggtctggtttaac

SEQ ID NO: 114295 - DNA, 741 bp, Homo Sapiens; identical to SEQ ID NO: 104505
  misc_feature (358)..(400): n is a, c, g, or t

SEQ ID NO: 114296 - DNA, 905 bp, Homo Sapiens; identical to SEQ ID NO: 104506
  misc_feature (610)..(652): n is a, c, g, or t

SEQ ID NO: 114297 - DNA, 908 bp, Homo Sapiens; identical to SEQ ID NO: 104508

SEQ ID NO: 114298 - DNA, 826 bp, Homo Sapiens; identical to SEQ ID NO: 104509

SEQ ID NO: 114299 - DNA, 804 bp, Homo Sapiens; identical to SEQ ID NO: 104510

SEQ ID NO: 114300 - DNA, 973 bp, Homo Sapiens; identical to SEQ ID NO: 104511

SEQ ID NO: 114301 - DNA, 790 bp, Homo Sapiens; identical to SEQ ID NO: 104512

SEQ ID NO: 114302 - DNA, 1006 bp, Homo Sapiens
gccaactttgtacaaaaaagttggaacggggaacgcacgctggatggttttaagaaattcctggagagcggtggccaggatggggcaggggatgatgacgatctcgaggacctggaagaagcagaggagccagacatggaggaagacgatgatcagaaagctgtgaaagatgaactgtaatacgcaaagccagacccgggcgctgccgagacccctcgggggctgcacacccagcagcagcgcacgcctccgaagcctgcggcctcgcttgaaggagggcgtcgccggaaacccagggaacctctctgaagtgacacctcacccctacacaccgtccgttcacccccgtctcttccttctgcttttcggtttttggaaagggatccatctccaggcagcccaccctggtggggcttgtttcctgaaaccatgatgtactttttcatacatgagtctgtccagagtgcttgctaccgtgttcggagtctcgctgcctccctcccgcgggaggtttctcctctttttgaaaattccgtctgtgggatttttagacatttttcgacatcagggtatttgttccaccttggccaggcctcctcggagaagcttgtcccccgtgtgggagggacggagccggactggacatggtcactcagtaccgcctgcagtgtcgccatgactgatcatggctcttgcatttttgggtaaatggagacttccggatcctgtcagggtgtcccccatgcctggaagaggagctggtggctgccagcccctggggcccggcacaggcctgggccttccccttccctcaagccagggctcctcctcctgtcgtgggctcattgtgaccactggcctctctacagcacggcctgtggcctgttcaaggcagaaccacgacccttgactcccggggtggggaggtggccagggatgctggagctgaatcaacgctgacagttcttcaggcatatctatttcacatcgaatgaacacactggcc

SEQ ID NO: 114303 - DNA, 928 bp, Homo Sapiens
caaccttcagcagactgtgtggtgaccactgtggtgctctcctcaatctgctgagaccagtacttgtctagctcctctcggttcttccgagccagctcgtcatattgggcccggatgtctgccatgatcttggcgaggtctgagatttgggggcatctacctccacggtcaacccagagctggcaatctgggcttgtaggccttttacttcctcttcgtggttcttcttcatgaagagcagctcctccttgagagcctcgatctctgtctccagctgcagtcgtgtgatattggtgtcatcaatgaccttgcggagcccatggatgtcgttctccacagactggcgcatggccagctctgtctcatacttgactctaaagtcatcagcagcaagacgggcattgtcaatctgcagaacgatgcgggcattgtccacagtatttgcgaagatctgagccctcaggtcctcgatgatcttgaagtaatggctccagtctctgacctggggtcccttcttctccaagtgctcccggattttgctctccagcctccggttctcggtctccaggctcctcactctgtccaggtaagaggccaggcggtcgttcaggctttgcatggtctccttctcgttctggatgcctcccattcctgccagacccccggctatcccggtggccaggcccccggaccccatgccgcccctgaagctggtggagcgggacacggagatccgggaaccagagcccccagcgcctgcatagacgctggccgcgctgctgaccggccgggcgccgtagctgggcgcctggacagagcccagggaccggtagttggtggagaaggtggagcgagtggtgaagctcatgctgtccggggagagagaaaggacaggactcaggctttgcgccaacttttttgtacaaag

SEQ ID NO: 114304 - DNA, 1582 bp, Homo Sapiens
ttggaaactgtctgggactgggaacttatgaatgatatcaaaccaatatggcagagaccatcaaaagaagtagaagaagatgaatacaaagctttctacaaatcattttcaaaggaaagtgatgaccccatggcttatattcactttactgctgaaggggaagttaccttcaaatcaattttatttgtacccacatctgctccacgtggtctgtttgacgaatatggatctaaaaagagcgattacattaagctctatgtgcgccgtgtattcatcacagacgacttccatgatatgatgcctaaatacctcaattttgtcaagggtgtggtggactcagatgatctccccttgaatgtttcccgcgagactcttcagcaacataaactgcttaaggtgattaggaagaagcttgttcgtaaaacgctggacatgatcaagaagattgctgatgataaatacaatgatactttttggaaagaatttggtaccaacatcaagcttggtgtgattgaagaccactcgaatcgaacacgtcttgctaaacttcttaggttccagtcttctcatcatccaactgacattactagcctagaccagtatgtggaaagaatgaaggaaaaacaagacaaaatctacttcatggctgggtccagcagaaaagaggctgaatcttctccatttgttgagcgacttctgaaaaagggctatgaagttatttacctcacagaacctgtggatgaatactgtattcaggcccttcccgaatttgatgggaagaggttccagaatgttgccaaggaaggagtgaagttcgatgaaagtgagaaaactaaggagagtcgtgaagcagttgagaaagaatttgagcctctgctgaattggatgaaagataaagcccttaaggacaagattgaaaaggctgtggtgtctcagcgcctgacagaatctccgtgtgctttggtggccagccagtacggatggtctggcaacatggagagaatcatgaaagcacaagcgtaccaaacgggcaaggacatctctacaaattactatgcgagtcagaagaaaacatttgaaattaatcccagacacccgctgatcagagacatgcttcgacgaattaaggaagatgaagatgataaaacagttttggatcttgctgtggttttgtttgaaacagcaacgcttcggtcagggtatcttttaccagacactaaagcatatggagatagaatagaaagaatgcttcgcctcagtttgaacattgaccctgatgcaaaggtggaagaagagcccgaagaagaacctgaagagacagcagaacacacaacagaagacacagagcaagacgaagatgaagaaatggatgtgggaacagatgaagaagaagaaacagcaaaggaatctacagctgaaaagatgaattgtaaattatactctcaccatttggatcctgtgtggagagggaatgtgaaatttacatcatttctttttgggagagacttgttttggatgccccctaatccccttctcccctgcactgtaaaatgtgggattatgggtcacaggaaaaagtggg

SEQ ID NO: 114305 - DNA, 961 bp, Homo Sapiens
acttttgtacaaaaaagttggttcggggactgcggccacaggcaggaaggcgctcctctcctgccccgccgacgcccggccagcccgcttcgccctgacctgtttcctcatgactgcccccggccctgctgccgacggacgtcgccccggcgtccggatttaacacggaaacccggatcggaggccgcgcggggaggaggagggcgacccggtcggtcctgcgaccctctcggcccggctcggcgcctcggcgggagccatgacctcgctgacccagcgcagctccggcctggtgcagcggcgcaccgaggcctcccgcaacgccgccgacaaggagcgggcggcgggcggcggcgccggcagcagcgaggacgacgcgcagagccgccgcgacgagcaggacgacgacgacaagggcgactccaaggaaacgcggctgaccctgatggaggaagtgctcctgctgggcctcaaggaccgcgagggttacacatcattttggaatgactgtatatcatctggattacgtggctgtatgttaattgaattagcattgagaggaaggttacaactagaggcttgtggaatgagacgtaaaagtctattaacaagaaaggtaatctgtaagtcagatgctccaacaggggatgttcttcttgatgaagctctgaagcatgttaaggaaactcagcctccagaaacggtccagaactggattgaattacttagtggtgagacatggaatccattaaaattgcattatcagttaagaaatgtacgggaacgattagctaaaaacctggtggaaaagggtgtattgacaacagagaaacagaacttcctactttttgacatgacaacacatcccctcaccaataacaacattaagcagcgcctcatcaagaaagtacaggaagccgttcttgacaaatgggtgaatgaccctcaccgcatggacagg

SEQ ID NO: 114306 - DNA, 680 bp, Homo Sapiens
  misc_feature (444)..(505): n is a, c, g, or t
tttgtacaaaaaagttggagcgccgagcgatgatcgggcatctctcgggacaactggcacaagcgccgcaaaaccgggggcaagagaaagccctaccacaagaagcggaagtatgagttggggcgcccagctgccaacaccaagattggcccccgccgcatccacacagtccgtgtgcggggaggtaacaagaaataccgtgccctgaggttggacgtggggaatttctcctggggctcagagtgttgtactcgtaaaacaaggatcatcgatgttgtctacaatgcatctaataacgagctggttcgtaccaagaccctggtgaagaattgcatcgtgctcatcgacagcacaccgtaccgacagtggtacgagtcccactatgcgctgcccctgggccgcaagaagggagccaagctgactcctgaggaagaagagattttnnnnnnnnnnnnnnnnnnnnnnnnnnnnnnnnnnnnnnnnnnnnnnnnnnnnnnnnnnnnnntcagcagtctcctggaggagcagttccagcagggcaagcttcttgcgtgcatcgcttcaaggccgggacagtgtggccgagcagatggctatgtgctagagggcaaagagttagagttctatcttaagaaaatcaaggcccgacaaagggccaataaatccttgtttttgtcttc

SEQ ID NO: 114307 - DNA, 530 bp, Homo Sapiens
tacaaaaaagttggggcgcgtggccctacgccgagtgacagagacgctcaggctgtgttctcaggatgaccgagtgggagacagcagcaccagcggtggcagagaccccagacatcaagctctttgggaagtggagcaccgatgatgtgcagatcaatgacatttccctgcaggattacattgcagtgaaggagaagtatgccaagtacctgcctcacagtgcaggacggtatgccgccaaacgcttccgcaaagctcagtgtcccattgtggagcgcctcactaactccatgatgatgcacggccgcaacaacggcaagaatctcatgactgtgcgcatcgtcaagcatgccttcgagatcatacacctgctcacaggcgagaaccctctgcaggacctggtgaacgccatcatcaacagtggtccccgggaggactccacacgcattgggcgcgccgggactgtgagacgacaggctgtggatgtgtcccccctgcgccgtgtgaaccaggccatctggctgctgtgc

SEQ ID NO: 114308 - DNA, 1378 bp, Homo Sapiens
aaaatggggactgcctggcccatacaattaagaaaaagaactcaattttatagatgcttataaggtgacacttagtaaaaaatataagctacatacaatataaacctagagtgagttttgtgccctagaagaccctttatcccaagataacctcaacttacccgcatgacaactcacctagagccaaaagaagcttcccagctctcactgcttccaaggaccaaaacagcttcccaagaaaacatccgaaaattccttctgatgaaggggtaatgtctccaagctccagctctccactaagggcagggggtccttacactttggaccccaacccagccctgagacacctagttaccaaaatctttctaaaaattaaggacaactgatttcacgctttagcacatcccctctaactgtcccatcgacttttcttgcgtttaggcggctctgggacagcaaagccgtcagctgtcttatctgtcttgctgtccaccttgtccatcttgctgctgtccactttgggttccatcttgggctccatcttgctctcacgattaaaagcttctttcctgctttccccattccgaccatcatttgcaccccggttctccccatgccggcctgcgcttcctccatgtctgttctccccgtgccgatggccatcagtatgacggctgctgctttctggatggcggtatccatctccatggcgaccaccatctccgtgacgtggactatcgctatgccgattgccagtctctccgtgactgtgacggctgctgccccggttctcagtatatctctctcttttcccgttgctgcccccagtcccttctcggctgttattccctgaagctgtgttgttgactccttgggctccggcagacgggtaggtcacaggggcaccactgatgttgccagtattgccaaagcctgggatgcccttggcggcactggtgacggggctgtcaggactgttatggccctgttgtgctgagttagttggaacagaattcaagctccctgcactagtccacccacttgccccagcagcagaacttccagccttctgattacttaaactggctgcaacaaagtgactcttgtactgtgactggaaagctgctttcattgccgttagtcgatctcccatagctcctgtggaaggcttgtaggcctcataattgctcattacattgttatttcctcgatccatgttctcagagcccaggccaggccgctccctgtagcctaggcctcctccaccaatgttcagcttttttcctttccctcctttgaatcgagatttccgaaaccaggcattctgcattgccagatctaggagttccttagaaacgccaacttttttgtacaaagt

SEQ ID NO: 114309 - DNA, 1684 bp, Homo Sapiens
  misc_feature (1526)..(1541): n is a, c, g, or t
ccaactttgtacaaaaaagttgggaggtgatgctttaaaaaacatgcatacattcaaagcactgttttcaaagttaatgcaagtaaatacagcaattcctctttcaacgtttaggcagatcattaattatgagctagccaaatgtgggcatactattacagggaaagtttaaaggtctgataacttgaaataggtttttaggagaattcatctacttagactttttaaatgcctgccataaatgaaattgaaatggtagaatggctgaccacagcaatgaccagccctcattagggccctggatgatttttggtctaataacgcatgctagtgttgatgttttttggtcaagagggtatgaacaggaagaattaaatgcagcaggctttattttaaatgccgattcacattactctgttcaagctgcgttgagatgttaaactggcttactatagacttcgtaaaaatggctccagaagagtaacaaactgaaatctttgagatcacacaggttggaaatatgtacataactgcacaaggtgtcaattctgctctacagtgcagttttagtcagttttagttgcataggtttccattgtatttatagtctgtttatgctaaatctggccaaagatgagcattgtccaccactaaaatgcctctgccactttgaattctgtgctaattttgtggccagaatgcggtgatcaaaacgctccatctttttacagtggcataggaagacggcaaaaatttcctaaagtgcaatagattttcaagtgtattgtgccttgttctaaaacttttattaagtaatgcacttgacagtattgaggtcatttgttatggtgctatttcattagtctaggtttagcccttggacattttgcccataactttttacaaagtacttcttttattgcacattcagagaattttatatatatgtcttgtgtgcgtgtccttaaacttccaatcttactttgtctcttggagattgttgaacgcagcttgtctaggaaggggatgggactagattctaaaatttatttgggaccatgggaatgatagttgggaagaaaactatttgcacacgacagatttctagatactttttgctgctagttttatgtaatatttattgaacattttgacaaatatttatttttgtaagcctaaaagtgattctttgaaagtttaaagaaacttgaccaaaagacagtacaaaaacactggcacttgaatgttgaatgtcaccgtatgcgtgaaattatatatttcggggtagtgtgagcttttaatgtttaagtcatattaaactcttaagtcaaattaagcagacccggcgttggcagtgtagccataactttctgatgttagtaaaaacaaaattggcgacttgaaattaaatcatgccaaggttttgatacacttgtcttaagatattaatgaaacacttcaaaacactgatgtgaagtgtccagattctcagatgtttgttgtgtggattttgtttagttgtgtgnnnnnnnnnnnnnnnncagtgaatgtctggcacattgcaatcctcaaacatgtggttatctttgttgtattggcataatcagtgacttgtacattcagcatagcatttgagcaagttttatcagcaagcaatattttcattaataaggttccaaaaatc

SEQ ID NO: 114310 - DNA, 1674 bp, Homo Sapiens
ttggcgccaaagtggcctccaagaatgtcatccctgccctggaactggtggagcccattaagaagcacgaggtcccagcaaagtctgatgtttactgtgaggtgtgtgaattcctggtgaaggaggtgaccaagctgattgacaacaacaagactgagaaagaaatactcgacgcttttgacaaaatgtgctcgaagctgccgaagtccctgtcggaagagtgccaggaggtggtggacacgtacggcagctccatcctgtccatcctgctggaggaggtcagccctgagctggtgtgcagcatgctgcacctctgctctggcacgcggctgcctgcactgaccgttcacgtgactcagccaaaggacggtggcttctgcgaagtgtgcaagaagctggtgggttatttggatcgcaacctggagaaaaacagcaccaagcaggagatcctggctgctcttgagaaaggctgcagcttcctgccagacccttaccagaagcagtgtgatcagtttgtggcagagtacgagcccgtgctgatcgagatcctggtggaggtgatggatccttccttcgtgtgcttgaaaattggagcctgcccctcggcccataagcccttgttgggaactgagaagtgtatatggggcccaagctactggtgccagaacacagagacagcagcccagtgcaatgctgtcgagcattgcaaacgccatgtgtggaactaggaggaggaatattccatcttggcagaaaccacagcattggtttttttctacttgtgtgtctgggggaatgaacgcacagatctgtttgactttgttataaaaatagggctcccccacctcccccatttctgtgtcctttattgtagcattgctgtctgcaagggagcccctagcccctggcagacatagctgcttcagtgccccttttctctctgctagatggatgttgatgcactggaggtcttttagcctgcccttgcatggcgcctgctggaggaggagagagctctgctggcatgagccacagtttcttgactggaggccatcaaccctcttggttgaggccttgttctgagccctgacatgtgcttgggcactggtgggcctgggcttctgaggtggcctcctgccctgatcagggaccctccccgctttcctgggcctctcagttgaacaaagcagcaaaacaaaggcagttttatatgaaagattagaagcctggaataatcaggctttttaaatgatgtaattcccactgtaatagcatagggattttggaagcagctgctggtggcttgggacatcagtggggccaagggttctctgtccctggttcaactgtgatttggctttcccgtgtctttcctggtgatgccttgtttggggttctgtgggtttgggtgggaagagggccatctgcctgaatgtaacctgctagctctccgaaggccctgcgggcctggcttgtgtgagcgtgtggacagtggtggccgcgctgtgcctgctcgtgttgcctacatgtccctggctgttgaggcgctgcttcagcctgcacccctcccttgtctcatagatgctccttttgaccttttcaaataaatatggatggcgagctcctaaaccctctggcttcctggtaagggcggcatgccaaagggtctgctgg

SEQ ID NO: 114311 - DNA, 415 bp, Homo Sapiens
tggacactgtccaccttcttacttctctcctgtcaacagtggccagccccccaactatgagatgctcaaggaggagcacgaggtggctgtgctgggggcgccccacaaccctgctcccccgacgtccaccgtgatccacatccgcagcgagacctccgtgcccgaccatgtcgtctggtccctgttcaacaccctcttcatgaacccctgctgcctgggcttcatagcattcgcctactccgtgaagtctagggacaggaagatggttggcgacgtgaccggggcccaggcctatgcctccaccgccaagtgccttattatctgggccctgattctgggcatcctcatgaccattctgctcatcgtcatcccagtgctgatcttccaggcctatggatagatcacgaggcatcac

SEQ ID NO: 114312 - DNA, 1099 bp, Homo Sapiens
ctttgtacaaaaaagttgggcgagctgagtggctaaagtagtggtcgcgtctcggaaaccggtagcgcttgcagcatggctgaccaactgactgaagagcagattgcagaattcaaagaagctttttcactatttgacaaagatggtgatggaactataacaacaaaggaattgggaactgtaatgagatctcttgggcagaatcccacagaagcagagttacaggacatgattaatgaagtagatgctgatggtaatggcacaattgacttccctgaatttctgacaatgatggcaagaaaaatgaaagacacagacagtgaagaagaaattagagaagcattccgtgtgtttgataaggatggcaatggctatattagtgctgcagaacttcgccatgtgatgacaaaccttggagagaagttaacagatgaagaagttgatgaaatgatcagggaagcagatattgatggtgatggtcaagtaaactatgaagagtttgtacaaatgatgacagcaaagtgaagaccttgtacagaatgtgttaaatttcttgtacaaaattgtttatttgccttttctttgtttgtaacttatctgtaaaaggtttctccctactgtcaaaaaaatatgcatgtatagtaattaggacttcattcctccatgttttcttcccttatcttactgtcattgtcctaaaaccttattttagaaaattgatcaagtaacatgttgcatgtggcttactctggatatatctaagcccttctgcacatctaaacttaaatggagttggtcaaatgagggaacatctgggttatgccttttttaaagtagttttctttagaactgtcagcatgttgttgttgaagtgtggagttgtaactctgcgtggactatggacagtcaacaatatgtacttaaaaagttgcactattgcaaaacgggtgtattatccaggtactcgtacactatttttttgtactgctggtcctgtaccagaaacattttcttttattgttacttgctttttaaactttgtttagccacttaaaatctgcttatggcacaatttgcctcaaatccattccaagttgta

SEQ ID NO: 114313 - DNA, 1208 bp, Homo Sapiens
  misc_feature (375)..(682): n is a, c, g, or t
actttgtacaaaaaagttggctgagacccatgatcaggggatgtggcggggggtggctagagggagaaaaaggaaatgtcttgtgttgttttgttcccctgccctcctttctcagcagctttttgttattgttgttgttgttcttagacaagtgcctcctggtgcctgcggcatccttctgcctgtttctgtaagcaaatgccacaggccacctatagctacatactcctggcattgcactttttaaccttgctgacatccaaatagaagataggactatctaagccctaggtttctttttaaattaagaaataataacaattaaagggcaaaaaacactgtatcagcatagcctttctgtatttaagaaacttnnnnnnnnnnnnnnnnnnnnnnnnnnnnnnnnnnnnnnnnnnnnnnnnnnnnnnnnnnnnnnnnnnnnnnnnnnnnnnnnnnnnnnnnnnnnnnnnnnnnnnnnnnnnnnnnnnnnnnnnnnnnnnnnnnnnnnnnnnnnnnnnnnnnnnnnnnnnnnnnnnnnnnnnnnnnnnnnnnnnnnnnnnnnnnnnnnnnnnnnnnnnnnnnnnnnnnnnnnnnnnnnnnnnnnnnnnnnnnnnnnnnnnnnnnnnnnnnnnnnnnnnnnnnnnnnnnnnnnnnnnnnnnnnnnnnnnnnnnnnnnnnnnnngaaacttcagttaacagcctccttggtgctttaagcattcagcttccttcaggctggtaatttatataatccctgaaacgggcttcaggtcaaacccttaagacatctgaagctgcaacctggcctttggtgttgaaataggaaggtttaaggagaatctaagcattttagacttttttttataaatagacttattttcctttgtaatgtattggccttttagtgagtaaggctgggcagagggtgcttacaaccttgactccctttctccctggacttgatctgctgtttcagaggctaggttgtttctgtgggtgccttatcagggctgggatacttctgattctggcttccttcctgccccaccctcccgaccccagtccccctgatcctgctagaggcatgtctccttgcgtgtctaaaggtccctcgtcctgtttgttttaggaatcctggtctcaagacctcatggaagaagagggggagagagtaacaggttgggacatgatgcacactatggggcccc

SEQ ID NO: 114314 - DNA, 1001 bp, Homo Sapiens
ttgggttcgacagtcagccgcatcttcttttgcgtcgccagccgagccacatcgctcagacaccatggggaaggtgaaggtcggagtcaacggatttggtcgtattgggcgcctggtcaccagggctgcttttaactctggtaaagtggatattgttgccatcaatgaccccttcattgacctcaactacatggtttacatgttccaatatgattccacccatggcaaattccatggcaccgtcaaggctgagaacgggaagcttgtcatcaatggaaatcccatcaccatcttccaggagcgagatccctccaaaatcaagtggggcgatgctggcgctgagtacgtcgtggagtccactggcgtcttcaccaccatggagaaggctggggctcatttgcaggggggagccaaaagggtcatcatctctgccccctctgctgacgcccccatgttcgtcatgggtgtgaaccatgagaagtatgacaacagcctcaagatcatcagcaatgcctcctgcaccaccaactgcttagcacccctggccaaggtcatccatgacaactttggtatcgtggaaggactcatgaccacagtccatgccatcactgccacccagaagactgtggatggcccctccgggaaactgtggcgtgatggccgcggggctctccagaacatcatccctgcctctactggcgctgccaaggctgtgggcaaggtcatccctgagctgaacgggaagctcactggcatggccttccgtgtccccactgccaacgtgtcagtggtggacctgacctgccgtctagaaaaacctgcccaatatgatgacatcaagaaggtggtgaaagcaggcgtcggaggccccctcaagggcatcctgggctacactgaacaccaggtggtctcctctgacttcacagcgacaccactcctccaccttcgacgctggggctggcattgccctcacctaccactttgtcaagctcatttcctgg

SEQ ID NO: 114315 - DNA, 937 bp, Homo Sapiens
ttggggcgcggcaggaggacgaggcagggcgggcgggcgctctaagggttctgctctgactccaggttgggacagcgtcttcgctgctgctggatagtcgtgttttcggggatcgaggatactcaccagaaaccgaaaatgccgaaaccaatcaatgtccgagttaccaccatggatgcagagctggagtttgcaatccagccaaatacaactggaaaacagctttttgatcaggtggtaaagactatcggcctccgggaagtgtggtactttggcctccactatgtggataataaaggatttcctacctggctgaagctggataagaaggtgtctgcccaggaggtcaggaaggagaatcccctccagttcaagttccgggccaagttctaccctgaagatgtggctgaggagctcatccaggacatcacccagaaacttttcttcctccaagtgaaggaaggaatccttagcgatgagatctactgcccccctgagactgccgtgctcttggggtcctacgctgtgcaggccaagtttggggactacaacaaagaagtgcacaagtctgggtacctcagctctgagcggctgatccctcaaagagtgatggaccagcacaaacttaccagggaccagtgggaggaccggatccaggtgtggcatgcggaacaccgtgggatgctcaaagataatgctatgttggaatacctgaagattgctcacgacctggaaatgtatggaatcaactatttcgagataaaaaacaagaaaggaacagacctttggcttggagttgatgcccttggactgaatatttatgagaaagatgataagttaaccccaaagattggctttccttggagtgaaatcagaacatctctttcaatgacaaaaagtttgtcattaaacccatcgacaagaagcacctgacttt

SEQ ID NO: 114316 - DNA, 667 bp, Homo Sapiens
ttgggcgagaatgaagactattctcagcaatcagactgtcgacattccagaaaatgtcgacattactctgaagggacgcacagttatcgtgaagggccccagaggaaccctgcggagggacttcaatcacatcaatgtagaactcagccttcttggaaagaaaaaaaagaggctccgggttgacaaatggtggggtaacagaaaggaactggctaccgttcggactatttgtagtcatgtacagaacatgatcaagggtgttacactgggcttccgttacaagatgaggtctgtgtatgctcacttccccatcaacgttgttatccaggagaatgggtctcttgttgaaatccgaaatttcttgggtgaaaaatacatccgcagggttcggatgagaccaggtgttgcttgttcagtatctcaagcccagaaagatgaattaatccttgaaggaaatgacattgagcttgtttcaaattcagcggctttgattcaccaagccacaacagttaaaaacaaggatatcaggaaatttttggatggtatctatgtctctgaaaaaggaactgttcagcaggctgatgaataaaatctaagagttacctggcttcagaaaagaagatgccagatgacacttaagacctacttgtgatatttaaaatgatgc

SEQ ID NO: 114317 - DNA, 870 bp, Homo Sapiens
actttgtacaaaaaagttggagaactctccctcaaaggaccagacacagtgagcaccatgggacagtgtcggtcagccaacgcagaggatgctcaggaattcagtgatgtggagagggccattgagaccctcatcaagaactttcaccagtactccgtggagggtgggaaggagacgctgaccccttctgagctacgggacctggtcacccagcagctgccccatctcatgccgagcaactgtggcctggaagagaaaattgccaacctgggcagctgcaatgactctaaactggagttcaggagtttctgggagctgattggagaagcggccaagagtgtgaagctggagaggcctgtccgggggcactgagaactccctctggaattcttggggggtgttggggagagactgtgggcctggagataaaacttgtctcctctaccaccaccctgtaccctagcctgcacctgtcctcatctctgcaaagttcagcttccttccccaggtctctgtgcactctgtcttggatgctctggggagctcatgggtggaggagtctccaccagagggaggctcaggggactggttgggccagggatgaatatttgagggataaaaattgtgtaagagccaaagaattggtagtagggggagaacagagaggagctgggctatgggaaatgatttgaataatggagctgggaatatggctggatatctggtactaaaaaagggtctttaagaacctacttcctaatctcttccccaatccaaaccatagctgtctgtccagtgctctcttcctgcctccagctctgccccaggctcctcctagactctgtccctgggctagggcagggaagaagg

SEQ ID NO: 114318 - DNA, 617 bp, Homo Sapiens
  misc_feature (540)..(550): n is a, c, g, or t
ttggccactgcgcagaccataacttcgctcgtactcgtgcgcctcgcttcgcttttcctccgcaaccatgtctgacaaacccgatatggctgagatcgagaaattcgataagtcgaaactgaagaagacagagacgcaagagaaaaatccactgccttccaaagaaacgattgaacaggagaagcaagcaggcgaatcgtaatgaggcgtgcgccgccaatatgcactgtacattccacaagcattgccttcttattttacttcttttagctgtttaactttgtaagatgcaaagaggttggatcaagtttaaatgactgtgctgcccctttcacatcaaagaactactgacaacgaaggccgcgcctgcctttcccatctgtctatctatctggctggcagggaaggaaagaacttgcatgttggtgaaggaagaagtggggtggaagaagtggggtgggacgacagtgaaatctagagtaaaaccaagctggcccaaggtgtcctgcaggctgtaatgcagtttaatcagagtgccannnnnnnnnnngttcaaatgattttaattattggaatgcacaatttttttaatatgcaaataaaaagtttaaaaactt

SEQ ID NO: 114319 - DNA, 963 bp, Homo Sapiens
ttggcgtcgccgccatcctcggcgcgactcgcttctttcggttctacctgggagaatccaccgccatccgccaccatggtgaacttcacggtagaccagatccgcgccatcatggacaagaaggccaacatccgcaacatgtctgtcatcgcccacgtggaccatggcaagtccacgctgacagactccctggtgtgcaaggcgggcatcatcgcctcggcccgggccggggagacacgcttcactgatacccggaaggacgagcaggagcgttgcatcaccatcaagtcaactgccatctccctcttctacgagctctcggagaatgacttgaacttcatcaagcagagcaaggacggtgccggcttcctcatcaacctcattgactcccccgggcatgtcgacttctcctcggaggtgactgctgccctccgagtcaccgatggcgcattggtggtggtggactgcgtgtcaggcgtgtgcgtgcagacggagacagtgctgcggcaggccattgccgagcgcatcaagcctgtgctgatgatgaacaagatggaccgcgccctgctggagctgcagctggagcccgaggagctctaccagactttccagcgcatcgtggagaacgtgaacgtcatcatctccacctacggcgagggcgagagcggccccatgggcaacatcatgatcgatcctgtcctcggtaccgtgggctttgggtctggcctccacgggtgggccttcaccctgaagcagtttgccgagatgtatgtggccaagttcgccgccaagggggagggccagttggggcctgccgagcgggccaagaaagtagaggacatgatgaaaaagctgtggggtgacaggtactttgacccagccaacggcaagttcagcaagtcagccaccagccccgaagggaagaagctgccacgcaccttctgccagctgatcctggacccc

SEQ ID NO: 114320 - DNA, 1002 bp, Homo Sapiens
ttggcgcagcctccttccccgcagggtacatgtacccctccatggatcagctggctgaaatgcttcctggagtccttcaacagtttgggctgaaaagcattattggcatgggaacaggagcaggcgcctacatcctaactcgatttgctctaaacaaccctgagatggtggagggccttgtccttatcaacgtgaacccttgtgcggaaggctggatggactgggccgcctccaagatctcaggatggacccaagctctgccggacatggtggtgtcccacctttttgggaaggaagaaatgcagagtaacgtggaagtggtccacacctaccgccagcacattgtgaatgacatgaaccccggcaacctgcacctgttcatcaatgcctacaacagccggcgcgacctggagattgagcgaccaatgccgggaacccacacagtcaccctgcagtgccctgctctgttggtggttggggacagctcgcctgcagtggatgccgtggtggagtgcaactcaaaattggacccaacaaagaccactctcctcaagatggcggactgtggcggcctcccgcagatctcccagccggccaagctcgctgaggccttcaagtacttcgtgcagggcatgggatacatgccctcggctagcatgacccgcctgatgcggtcccgcacagcctctggttccagcgtcacttctctggatggcacccgcagccgctcccacaccagcgagggcacccgaagccgctcccacaccagcgagggcacccgcagccgctcgcacaccagcgagggggcccacctggacatcacccccaactcgggtgctgctgggaacagcgccgggcccaagtccatggaggtctcctgctagcggcctgcccagctgccgcccccggactctgatctctgtagtggcccctcctccccggccccttttcgcccctgcctgccatactgcgcctaactcggtattaatccaaagcttattt

SEQ ID NO: 114321 - DNA, 898 bp, Homo Sapiens
ttgggtggagctcacaatgccttactctgtgattcgtggagaggccttcacactcaaggccacggtcctaaactaccttcccaaatgcatccgggtcagtgtgcagctggaagcctctcccgccttcctagctgtcccagtggagaaggaacaagcgcctcactgcatctgtgcaaacgggcggcaaactgtgtcctgggcagtaaccccaaagtcattaggaaatgtgaatttcactgtgagcgcagaggcactagagtctcaagagctgtgtgggactgaggtgccttcagttcctgaacacggaaggaaagacacagtcatcaagcctctgttggttgaacctgaaggactagagaaggaaacaacattcaactccctactttgtccatcaggtggtgaggtttctgaagaattatccctgaaactgccaccaaatgtggtagaagaatctgcccgagcttctgtctcagttttgggagacatattaggctctgccatgcaaaacacacaaaatcttctccagatgccctatggctgtggagagcagaatatggtcctctttgctcctaacatctatgtactggattatctaaatgaaacacagcagcttactccagagatcaagtccaaggccattggctatctcaacactggttaccagagacagttgaactacaaacactatgatggctcctacagcacctttggggagcgatatggcagaaccagggcaacacctggctcacagcctttgttctgaagacttttgcccaagctcgagcctacatcttcatcgatgaagcacacattacccaagccctcatatggctctcccagagcagaaagacaatggctgtttcaagagctctgggtcactgctcaacaatgccataaa

SEQ ID NO: 114322 - DNA, 1524 bp, Homo Sapiens
ttggcaaagtacctaagaagattagctttaaatccttggtggcctcactggcagaacctgactttgtggtgacggacttcgccaagttttctcgccctgcccagctgcacattggcttccaggccctgcaccagttctgtgctcagcatggccggccacctcggccccgcaatgaggaggatgcagcagaactggtagccttagcacaggctgtgaatgctcgagccctgccagcagtgcagcaaaataacctggacgaggacctcatccggaagctggcatatgtggctgctggggatctggcacccataaacgccttcattgggggcctggctgcccaggaagtcatgaaggcctgctccgggaagttcatgcccatcatgcagtggctatactttgatgcccttgagtgtctccctgaggacaaagaggtcctcacagaggacaagtgcctccagcgccagaaccgttatgacgggcaagtggctgtgtttggctcagacctgcaagagaagctgggcaagcagaagtatttcctggtgggtgcgggggccattggctgtgagctgctcaagaactttgccatgattgggctgggctgcggggagggtggagaaatcatcgttacagacatggacaccattgagaagtcaaatctgaatcgacagtttcttttccggccctgggatgtcacgaagttaaagtctgacacggctgctgcagctgtgcgccaaatgaatccacatatccgggtgacaagccaccagaaccgtgtgggtcctgacacggagcgcatctatgatgacgattttttccaaaacctagatggcgtggccaatgccctggacaacgtggatgcccgcatgtacatggaccgccgctgtgtctactaccggaagccactgctggagtcaggcacactgggcaccaaaggcaatgtgcaggtggtgatccccttcctgacagagtcgtacagttccagccaggacccacctgagaagtccatccccatctgtaccctgaagaacttccctaatgccatcgagcacaccctgcagtgggctcgggatgagtttgaaggcctcttcaagcagccagcagaaaatgtcaaccagtacctcacagaccccaagtttgtggagcgaacactgcggctggcaggcactcagcccttggaggtgctggaggctgtgcagcgcagcctggtgctgcagcgaccacagacctgggctgactgcgtgacctgggcctgccaccactggcacacccagtactcgaacaacatccggcagctgctgcacaacttccctcctgaccagctcacaagctcaggagcgccgttctggtctgggcccaaacgctgtccacacccgctcacctttgatgtcaacaatcccctgcatctggactatgtgatggctgctgccaacctgtttgcccagacctacgggctgacggctctcaggaccgagctgctgtggccacattcctgcagtctgtgcaagtccccgaattcacccccaa

SEQ ID NO: 114323 - DNA, 648 bp, Homo Sapiens
gggccggtacgggatggtcacgcctttgggggggactccaacatgaccacgcagatctgtttgacacactcaatgatggattgtggaatgccagcaatagtgatggcccgctcagttgagttgggtagcatatcccctgccacctggacctgagcccctgtactctctcgtatttccttgatcttgcatccaccttttccaatgagagagccacactgactagcagggaccaccagcctcagggtgaccgggggtctactggcagctgtgctattggtcatagagctgcttatgtcctcttccagtttgtcaatgatcatagcaaaggctttgaagatggcattagtgggtccagccaaagtgataattctctcaggacaattcccttctgagatgttgatacgtgcaccactctcctcgcgcatcttcttaactgattctcctttctttccgatgatactgccaacttcctttccatgcataagtagccggatggtgagagtgacatttaatccaccttcaatcacaccggtgtccatgtcgagcagtgttctggggagctggactttgagtggtcaagtctttggtcactggttgggggtgaaagccaaaaactgcaggcgcgaggcgactgaggggaaaagggga

SEQ ID NO: 114324 - DNA, 423 bp, Homo Sapiens
aggccacaagtcctcctcttccgggtccgtgggcgagtcttcatctaagggaccaagatactaacaaaaccagagtaatcaagacaattattgaagaggtggcgcccgacggtagagttctttcatctatggttgaatcagaaaccaagaaacactactattaaactgcatcaagaggaaagagtctcccttcacacagaccattatttacagatgcatggaaaacaaagtctccaagaaaacacttctgtcttgatggtctatggaaatagaccttgaaaataaggtgtctacaaggtgttttgtggtttctgtatttcttcttttcactttaccagaaagtgttctttaatggaaagaaaaacaactttctgttctcatttactaatgaatttcaataaactttcttactgatgcaaacta

SEQ ID NO: 114325 - DNA, 539 bp, Homo Sapiens
tttgtacaaaaaagttggctcagacgaatgtaaacaaccagtattatcagcagtcaacaagcaccttcctctccacagaagcagctggaagagaactcgaggggctgtgctgcaggcctcccctcgaaagacactgggaggtcagcatgttccacaggtgttcagagggagtctgctacaaactatcagggcataaaactgggatcccatcgagaagaaccatgggtggacccgaactccccggtgctcttggaggacccagtcctttgtgccttggcaaaaaagcacaagcgaaccccagccctgattgccctgcgctaccagctgcagcgtggggttgtggtcctggccaagagctacaatgagcagcgcatcagacagaacgtgcaggtgtttgaattccagttgacttcagaggagatgaaagccatagatggcctaaacagaaatgtgcgatatttgacccttgatatttttgctggcccccctaattatccattttctgatgaatattaacatggagggcattgcatgaggtc

SEQ ID NO: 114326 - DNA, 854 bp, Homo Sapiens
  misc_feature (196)..(218): n is a, c, g, or t
tacaaaaaagttggggcctttccgcggtgggatgttgagctgaggccggaggagaagtagcagtcgctggcagagcacacaggctgctctgggggatgagctggtgcgtttaaggaacaggccagcactggcattcgcaagcagtggggaaggggagagatgccgaggtggtcagtatcctgactttcagaggccnnnnnnnnnnnnnnnnnnnnnnngctagattgatattaaaaactcatgtggaggaactcaaggaatgtttagaagaccaaaagtccccaatgacaggaacaaaagcaaccaatttttaactttctcttctcattcctgttttcattgatttcccacatgtagtccttttgctcaggaagtctttggggaaattaaggatctttgaagctctgaaataggtgatcaggttagtggtgtctgtcagctgtctaagaggttggaaaatgaactactcaagatagtcacgaaaatactgaaagtttgatttttctttccatatttgaattaattttttctgtttgactggaaggggtttttgtataactaaaacctcagcgcataaaggagatttaaaaggagcacatgatttagtgggtgggccatgaaactagagatgggatttgggggtgaatttgtcaatatctggattttaatccaaacatctctgctaacaagcctttggtaagtcacttcagatacttttcctcctttttacaaagagagggctggcttaattatttgccaaagccccttccaggcctgaattccacaagtacgatttactgtagtgtcttatcactctttcatgtcacaatagcgttgtagcattagagaaagcc

SEQ ID NO: 114327 - DNA, 852 bp, Homo Sapiens
tccgtcaggcatgtgcgccacagcagcgggtcctcaagacggctcaggtcccacaccaacacctcaccactgtacagccctcttgcgacgtgggagggctgcgtggggtggaaggcccagacacaggacagcgctggggacctccaccacggccgacggttgctggggacgcaggtctcgccggtccaggttccaggcacacacgaaggacttaagcgtgctccagtccccatggtccagccggccgtaggcacaggccaccacagagccagtggagttccaggagatgctggtcacatgcagaccctgcgcttgggctggcgggtagcccagggtatacagacaagacaccatctgctgctgctcggtccagttcacctcgaagccatcaaacgcgtggctctgccaattcttgttcagctctcggatgaccatggcctccactctccgaagaaaggctgcgagcctgggtatgtcgtactgggacgggggctgcacgctgacaggcacgggggcctccgtctgcacctgggcgtccacatgattcctggcctgggcggatgcactggcagtggcaatgctggccgtctggcaacttttcgtctccccgcggatgccctggacggccctccactgcgagggcacggacgccacacccagggtctcgtcctgcagcggccctggccgccccggccccgggccgctcgcaaccccgactgtcgccagcgccgcaacaccagcgcttcccgcctggctgagtggccccggctgcgcgcgggttgccatggagacggttccgccctctcgtgcggacgcactcaggcgcgacctccgcccggtacgccgccccaa

SEQ ID NO: 114328 - DNA, 1439 bp, Homo Sapiens
actttgtacaaaaaagttgggtgcgggtttcggttggaggactcgttggggaggtggcctgcgcttgtagagactgcatccccgagacgatggcggagggagataatcgcagcaccaacctgctggctgcagagactgcaagtctggaagaacagctgcaaggatggggagaagtgatgctgatggctgataaagtcctccgatgggaaagagcctggtttccacctgccatcatgggtgtggtttctttggtgtttctgattatctactatctagatccatctgttctgtccggcgtttcctgttttgttatgtttttgtgcttggctgactaccttgttcccattctagcgcctagaatttttggctccaataaatggaccactgaacaacagcaaagattccatgaaatttgcagcaatctagtaaaaactcgacgcagagctgtgggttggtggaaacgcctcttcacactaaaggaagaaaaacctaagatgtacttcatgaccatgatcgtttcccttgctgcggttgcttgggtgggacaacaagtccacaacctgcttctcacctacctgatagtgacttccttactattgcttcctggactaaaccaacatggaatcattttgaagtacattggaatggccaagagggagataaacaaacttctcaaacaaaaagaaaagaaaaacgaatgattcatctgctttaatcagtgtgattaatgcagcacccattgccccgggaaccgtttctgctgtactatctggatactaaaatgttacggaagtagctctttgttctccctcactctgcccttagttaatagaaattcagactcgccaagtaaggcttcgtgcatagtgtcttcatgtcgcgtatagttgagcgcgttcttagcagttggcttcatggacaactcattagtgttttgacttttcttacccagcgttaattgaattcttgcttttagacaacttcctttttgtagtggtgaaccttgccctttagtacagttcaagtgaatctggataattgttcatctttgctttagcttagataccatgtagtggtctgtggctacaggaagctggttctgtctgcttccacagtctgcttaaaaaactgtctgacttcgtgaatatagagaccaagtttaccacttctgatgaagagaccaattaagattcattcctcattctgtttctttccagtgggagaagagtccccatgaaataagatgaaactgattccatgcactagtacatgtaggcttctcccttgtgcaaagcttagcaatttgtagaaactttgatctttttgtccaagaaaaggaatgtctgacaggctttaggctttcgtcccttgcacttagactcgaagttagtaaatccttaagggctttttaatagcagacttccaaagattgcatttag

SEQ ID NO: 114329 - DNA, 1196 bp, Homo Sapiens; identical to SEQ ID NO: 104513
  misc_feature (641)..(691): n is a, c, g, or t
  misc_feature (1065)..(1073): n is a, c, g, or t

SEQ ID NO: 114330 - DNA, 366 bp, Homo Sapiens; identical to SEQ ID NO: 104514

SEQ ID NO: 114331 - DNA, 1118 bp, Homo Sapiens
ttggcattctagtaagaggaccctgaggtgggagttgtgggggacggggagaaggggacagcttggcaccggtcccgtgggcgttgcagtgtgggggatgggggtatgcagcttggcactggtactgggagggatgagggtgaagaaggggagagggttggttagagatacagtgtgggtggtgggggtggtaggaaatgcaggttgaagggaattctctggggctttggggaatttagtgcgtgggtgagccaagaaaatactaattaataatagtaagttgttagtgttggttaagttgttgcttggaagtgagaagttgcttagaaactttccaaagtgcttagaactttaagtgcaaacagacaaactaacaaacaaaaattgttttgctttgctacaaggtggggaagactgaagaagtgttaactgaaaacaggtgacacagagtcaccagttttccgagaaccaaagggaggggtgtgtgatgccatctcacaggcaggggaaatgtctttaccagcttcctcctggtggccaagacagcctgtttcagagggttgttttgtttggggtgtgggtgttatcaagtgaattagtcacttgaaagatgggcgtcagacttgcatacgcagcagatcagcatccttcgctgccccttagcaacttaggtggttgatttgaaactgtgaaggtgtgattttttcaggagctggaagtcttagaaaagccttgtaaatgcctatattgtgggcttttaacgtatttaagggaccacttaagacgagattagatgggctcttctggatttgttcctcatttgtcacaggtgtcttgtgattgaaaatcatgagcgaagtgaaattgcattgaatttcaagggaatttagtatgtaaatcgtgccttaaaaacacatctgttgtcttttctgtgtttggtcgatattaataatggcaaaatttttgcctatctagtatcttcaaattgtagtctttgtaacaaccaaataaccttttgtggtcactgtaaaataatatttggtagacagaatccatgtacctttgctaagttagaatgaatatttattgtatttttatttgaatgtttgtgcttttaa

SEQ ID NO: 114332 - DNA, 425 bp, Homo Sapiens
gactcatacgcagaatgggataggggattcagcatggggtggccggctcttcaagggcatggctgtggaccacattacttgtgcttggtcttctgctgggctggtgctggagtgattattgaagggcagggctcaggcaccttggggtggcatggctctggaaccttgggctggcagggctcgggcactttggggtggcagggctcaggcaccttggggtggcagggctccttggttttggggatgcatggttcctgaggtggaggctggcaaggctgtttcacctgctgctgctgaagctgagggggtggggtgcaaggctgcttctgctgctgggaactcatgctgcaacagtgactggtcctggtgtgaagagaggaatactctgccaacttttttgtacaaagttggctttataaaaaagc

SEQ ID NO: 114333 - DNA, 973 bp, Homo Sapiens
gtacaaaaaagttggggctccgtccacaagtcatgctgagttttgcagcctctgtgacttggagatgtcccttcacccctcccctttcaccaccatcctcttttcctcatggaaatgtctgctttatgaaactatgcacatattgaaagtgagttgaaacaaatgagggttgggtaggagcttccaggcctgggatttacaccacgcctagcccagcagaggccttagtcccatttggggcttgggagtgacatttgcttgaggcttatacactggtgtggttgcctggcttgcaggaaatgaccaagctcacacatgctggctgaagcgtaagcagacaactgaggtactcttttgaaggatgaaggtggtggattctcagccctgggggtcttcctcacctgaggacccttcagagccaccctttctagtttgcatttcctggtgcacacatttaaggcataacagcacattcatccctttggtttgggatctcaggaatacagtcccatgcaaagattctctggttttatggcttttttccctttctttacaccatcctctcccataagcacccatgtctttgaatatgaatgtatttgtaaaataccacgtttcatgtgtgaatatgtgcttttactgtacatagtgctattgtgcaataggtcttatgctgttttcactcaatgtgtgctaagatctagccccattgactcttctagaaatgcaatattgctttgacctgccatgtggcactccacaatgtcaattgcagtttacacacattgcctaaagtgggggacacctgggtgcccctgaacccttggcaccggatacaggccacgataaaacatcctttcttgtgtttcctttctgtgcttgtgtggcatgtgtacccaggatgggcctataggtcacagaggtcagtttccctttggttttccagaatttctttaaaacggtggactgaccc

SEQ ID NO: 114334 - DNA, 817 bp, Homo Sapiens
tacaaaaaagttggattggtcccaggcagcagttagcccgccgcccgcctgtgtgtccccagagccatggagagagccagtctgatccagaaggccaagctggcagagcaggccgaacgctatgaggacatggcagccttcatgaaaggcgccgtggagaagggcgaggagctctcctgcgaagagcgaaacctgctctcagtagcctataagaacgtggtgggcggccagagggctgcctggagggtgctgtccagtattgagcagaaaagcaacgaggagggctcggaggagaaggggcccgaggtgcgtgagtaccgggagaaggtggagactgagctccagggcgtgtgcgacaccgtgctgggcctgctggacagccacctcatcaaggaggccggggacgccgagagccgggtcttctacctgaagatgaagggtgactactaccgctacctggccgaggtggccaccggtgacgacaagaagcgcatcattgactcagcccggtcagcctaccaggaggccatggacatcagcaagaaggagatgccgcccaccaaccccatccgcctgggcctggccctgaacttttccgtcttccactacgagatcgccaacagccccgaggaggccatctctctggccaagaccactttcgacgaggccatggctgatctgcacaccctcagcgaggactcctacaaagacagcaccctcatcatgcagctgctgcgagacaccctgacactgtggacggccgacaacgccggggaagaggggggcgaggctccccaggagccccagagctgagtgt

SEQ ID NO: 114335 - DNA, 464 bp, Homo Sapiens
cccactttgtacaaaaaagttggggctgaggatttttggtccgcacgctcctgctcctgactcaccgctgttcgctctcgccgaggaacaagtcggtcaggaagcccgcgcgcaacagccatggcttttaaggataccggaaaaacacccgtggagccggaggtggcaattcaccgaattcgaatcaccctaacaagccgcaacgtaaaatccttggaaaaggtgtgtgctgacttgataagaggcgcaaaagaaaagaatctcaaagtgaaaggaccagttcgaatgcctaccaagactttgagaatcactacaagaaaaactccttgtggtgaaggttctaagacgtgggatcgtttccagatgagaattcaccccccgactcattgacttgcacagtccttctgagattgttaagcagattacttccatcagtattgagccaggagtggaggtggaagtca

SEQ ID NO: 114336 - DNA, 1453 bp, Homo Sapiens
ccaactttgtacaaaaaagttggccagcaataagcctgccattgtggaggctggtgggatgcaggccctgggcaagcacctgaccagcaacagcccccgcctggtgcagaactgcctgtggaccctgcgcaacctctcagatgtggccaccaagcaggagggcctggagagtgtgctgaagattctggtgaatcagctgagtgtggatgacgtcaacgtcctcacctgtgccacgggcacactctccaacctgacatgcaacaacagcaagaacaagacgctggtgacacagaacagcggtgtggaggctctcatccatgccatcctgcgtgctggtgacaaggacgacatcacggagcctgccgtctgcgctctgcgccacctcactagccgccaccctgaggccgagatggcccagaactctgtgcgtctcaactatggcatcccagccatcgtgaagctgctcaaccagcccaaccagtggccactggtcaaggcaaccatcggcttgatcaggaatctggccctgtgcccagccaaccatgccccgctgcaggaggcagcggtcatcccccgcctcgtccaactgctggtgaaggcccaccaggatgcccagcgccacgtagctgcaggcacacagcagccctacacggatggtgtgaggatggaggagattgtggagggctgcaccggagcactgcacatcctcgcccgggaccccatgaaccgcatggagatcttccggctcaacaccattcccctgtttgtgcagctcctgtactcgtcggtggagaacatccagcgcgtggctgccggggtgctgtgtgagctggcccaggacaaggaggcggccgacgccattgatgcagagggggcctcggccccactcatggagttgctgcactcccgcaacgagggcactgccacctacgctgctgccgtcctgttccgcatctccgaggacaagaacccagactaccggaagcgcgtgtccgtggagctcaccaactccctcttcaagcatgacccggctgcctgggaggctgcccagagcatgattcccatcaatgagccctatggagatgacttggatgccacctaccgccccatgtactccagcgatgtgccccttgacccgctggagatgcacatggacatggatggagactaccccatcgacacctacagcgacggcctcaggcccccgtaccccactgcagaccacatgctggcctaggcggcctggccccagtgcggttcctcatctgagaggctctccgtgctgcgatggggcaagacagaaaagtgcctgagctggggaagccggggtgtaacttcctgctgcaccctgcgcctccagaggtcctccgtagggtctttcttgggatagtgttctgctcctgcttttctgtcctgggcatgggtccagggcctgacaccccctccccgcccc

SEQ ID NO: 114337 - DNA, 1245 bp, Homo Sapiens
ttggcctttcggctgccactgccacctgcgggtggttcagtgctccgacctgggtctgaagtctgtgcccaaagagatctcccctgacaccacgctgctggacctgcagaacaacgacatctccgagctccgcaaggatgacttcaagggtctccagcacctctacgccctcgtcctggtgaacaacaagatctccaagatccatgagaaggccttcagcccactgcggaagctgcagaagctctacatctccaagaaccacctggtggagatcccgcccaacctacccagctccctggtggagctccgcatccacgacaaccgcatccgcaaggtgcccaagggagtgttcagtgggctccggaacatgaactgcatcgagatgggcgggaacccactggagaacagtggctttgaacctggagccttcgatggcctgaagctcaactacctgcgcatctcagaggccaagctgactggcatccccaaagacctccctgagaccctgaatgaactccacctagaccacaacaaaatccaggccatcgaactggaggacctgcttcgctactccaagctgtacaggctgggcctaggccacaaccagatcaggatgatcgagaacgggagcctgagcttcctgcccaccctccgggagctccacttggacaacaacaagttggccagggtgccctcagggctcccagacctcaagctcctccaggtggtctatctgcactccaacaacatcaccaaagtgggtgtcaacgacttctgtcccatgggcttcggggtgaagcgggcctactacaacggcatcagcctcttcaacaaccccgtgccctactgggaggtgcagccggccactttccgctgcgtcactgaccgcctggccatccagtttggcaactacaaaaagtagaggcagctgcagccaccgcggggcctcagtgggggtctctggggaacacagccagacatcctgatggggaggcagagccaggaagctaagccagggcccagctgcgtccaacccagccccccacctcaggtccctgaccccagctcgatgccccatcaccgcctctccctggctcccaaagggtgcatgtgggcgcaaggcccggcccccatcacatgttcccttggcctcagagctgcccctgctctcccaccacagccacccagaggcaccccatgaagcttttttctcgttcactcccaaacccaagtgtccaagctcca

SEQ ID NO: 114338 - DNA, 826 bp, Homo Sapiens
ttggcaaaatggcggatggcgaggagccaatggcggttgatggtgggtgtggggacactggagactgggaaggtcgctggaaccatgtaaagaagttcctcgagcgatctggacccttcgcaccccctgatttccaaccgagcactgaatctctccagttcttgttagatacatgtaaagttctagtcattggagctggcggcttacgatgtgatctccagaataatctggacttgtctggttttatacacattcctgttatagatatggacactatacatgtttccaatctaagtacgcattttttatttacgcataaagatattggaagacctacggctgaacttgctgcacaatttctaaatgacagagttcctaattgcaatgtagttccacgtttcaacaagattcgagattttaacgacactttctatcgacaatttcatattattgtatgtggactggactctatcatcgccagaagatggataaatggcatgctgatatctcttctaaattacgaagatggtgtcttacatccaagctccattgtccctttgatagatggggggacagaaggtgttaaaggaaatgcccgggtgattctgcctggaatgactgcttgtatcaaatgcacgctggaactttatccaccacatgttaattttcccatgtgcaccattgcatctatgcccaggctaccataacactgtattgagtatgtaacgatgttgcagtggcctaagagcaaccctttggagaaaggggttccattagatggagatgatcctgaacatatacaatggattttccaaaaatccctaga

SEQ ID NO: 114339 - DNA, 961 bp, Homo Sapiens
ttggggcccggcagacccatggcatcctggagtactactgccgcctgctgcaggaggacagctcaccactcctgcgctgcgccctctgcattgggggcatgtccgtgaaagagcagatggagaccatccgacacggtgtacacatgatggtggccaccccggggcgcctcatggatttgctgcagaagaagatggtcagcctagacatctgtcgctacctggccctggacgaggctgaccgcatgatcgacatgggcttcgagggtgacatccgtaccatcttctcctacttcaagggccagcgacagaccctgctcttcagtgccaccatgccgaagaagattcagaactttgctaagagtgcccttgtaaagcctgtgaccatcaatgtggggcgtgctggggctgccagcctggatgtcatccaggaggtagaatatgtgaaggaggaggccaagatggtgtacctgctcgagtgcctgcagaagacacccccgcctgtactcatctttgcagagaagaaggcagacgtggacgccatccacgagtacctgctgctcaagggggttgaggccgtagccatccatgggggcaaagaccaggaggaacggactaaggccatcgaggcattccgggagggcaagaaggacgtcctagtagccacagacgttgcctccaagggcctggacttccctgccatccagcacgtcatcaattatgacatgccagaggagattgagaactatgtacaccggattggccgcaccgggcgctcgggaaacacaggcatcgcccactaccttcctcaacaaagcgtgtgatgagtcagtgctgatggacctcaaaacgctgctgcaaaaagccaagctgaaggtgccgcccgtgctgcaggtgctgcattgcggggatgagtccatgctggacattggaagaaagcgcggctgtgccttctgcaggggcc

SEQ ID NO: 114340 - DNA, 869 bp, Homo Sapiens
caagccaggccactgtgtgcaaacttgtgcccctagcacccgggatccctgtgagtgctagggagtggttgagagctcgggggtgggaggagaggcccactgcagtgcccaccacagtgcccgctgcaggggtggctgcaccccgagaatggtgggggcatcttcaggagcggcatgctggtggagggtagatgggagctctgacatggccctggagtgtggggggcagtggcagcagcaacagggcactctgaagcctgggcagggaaaggtgctgccggggtggtgggcagcaggtgtgggtggggtggggagccaaaggagctggggtgagacgggattagagatgctggctgcgggtggtggccggtggggctgttagggggagcagtgaggtctgagtgctggtggtgctccgagacggggaaagcctcaccggggatggtaggaggactcccaagagagctgcctggcatggccccactggaatgtggggaattccagaggcccgagagcttatgtgccgacaggaacgagctaggatcccagtctcccgagttcccagggcaggaagaggaggacgaggatgaggatgatgaggaggaagacgaggacgaatgagagtcatctccacaagactgtgatttgcaggatgtgtgtgacaaggagatatgcaatgtgtggagactggggagagagactctggtaggggcagagactgcctgtgaactgcgggcctttggggagtagagagcggccaatgacaggaagggccttttgaccaggagtcctgaagctaaactgttcctgggtaaaagggaagatcgccactgcatgttctcgacctgtctgcctttcatcttccccaa

SEQ ID NO: 114341 - DNA, 979 bp, Homo Sapiens
ttggcgaggtgcggcggtcgcgaagggcaaccgagggggccgtgaccaccgcctccccgcgacgccccagtccagtggcctcgcgtccgcccattcagcggagacctgcggagaggcggcggccgcggcctccgcaagccgtctttctctagagttgtatatatagaacatcctggagtccaccatgaacggacagttggatctaagtgggaagctaatcatcaaagctcaacttggggaggatattcggcgaattcctattcataatgaagatattacttatgatgaattagtgctaatgatgcaacgagttttcagaggaaaacttctgagtaatgatgaagtaacaataaagtataaagatgaagatggagatcttataacaatttttgatagttctgacctttcctttgcaattcagtgcagtaggatactgaaactgacattatttgttaatggccagccaagaccccttgaatcaagtcaggtgaaatatctccgtcgagaactgatagaacttcgaaataaagtgaatcgtttattggatagcttggaaccacctggagaaccaggaccttccaccaatattcctgaaaatgatactgtggatggtagggaagaaaagtctgcttctgattcttctggaaaacagtctactcaggttatggcagcaagtatgtctgcttttgatcctttaaaaaaccaagatgaaatcaataaaaatgttatgtcagcgtttggcttaacagatgatcaggtttcaaggccacccagtgctcctgcagaagatcgttcaggaacacccgacagcattgcttcctcctcctcagcagctcacccaccaggcgttcagccacagcagccaccatatacaggagctcagactcaagcaggtcagattgaagtcagatgtaccacagtaccagcaacatgccggcttatggtgcacagcagccgcaagctccacctcagcagcctc

SEQ ID NO: 114342 - DNA, 973 bp, Homo Sapiens
gatgaagaggatgcaaggggcattcttccgagcaagggcaaataagtctcggaatctagcagggcccacaccaacgaacatctccaaaaactcagatccactaacggtgatgaaggggacatgggcttctccggctgtggccttagctagcagcgtcttcccagtgcctggaggaccagtgagaatggcaccctttgggatttttgctcctaggtcttgatactgctttgggtttttcaagaaattcacaaattccatgatctctagcttggcctcctcacagccagccacatctttgaacttcacatcaatttcatcctttaagaccttggcagtggtttctccgacactgaagagtccgcccatccctcggcctgtccggccaatgccagcaggccctcttctgatggtgtagagcaagaaggcgatgatgagcaccgtaggcagcatgctcagcagaaaagagccatcactttcagcaatgtagacaacaggcacccgattttctccttctatgcccaattcctgctgtaaagtttccagattccgttcaaaggtgtccacactgccaatattaaaccaaacgtattgcccatcaacaggagtttttcctggtgtaaaggtcactcgaacaaaacgcttgttgacgacttccaatctgtctactactccttttgaaagatagttattgacaaagtccttccaagtgatttctctcccggatctcttgagcagcaagtaaaacatgactccaccccagaacagagcagtccagaggaagaacatcctgaaatccttgtcgtcccatggaatgtcacccttctgaaacctggaccaccagtgagaatcatctttcttgccacctcgttttccaccgccaccacctcctcctccagaagagcgtgtggtagcagctggctttgattccaacttttttgtacaaagttggcattaaaagaaaagcattgctcat

SEQ ID NO: 114343 - DNA, 900 bp, Homo Sapiens
gagcaatgcttttcctttaatgccaactttgtacaaaaaagttgggtctgcgagccaggattcccgatccagagacaatggccccgatgggatggagcccgaaggcgtcatcgagagtaactggaatgagattgttgacagctttgatgacatgaacctctcggagtcccttctccgtggcatctacgcctatggttttgagaagccctctgccatccagcagcgagccattctaccttgtatcaagggttatgatgtgattgctcaagcccaatctgggactgggaaaacggccacatttgccatatcgattctgcagcagattgaattagatctaaaagccacccaggccttggtcctagcacccactcgagaattggctcagcagatacagaaggtggtcatggcactaggagactacatgggcgcctcctgtcacgcctgtatcgggggcaccaacgtgcgtgctgaggtgcagaaactgcagatggaagctccccacatcatcgtgggtacccctggccgtgtgtttgatatgcttaaccggagatacctgtcccccaaatacatcaagatgtttgtactggatgaagctgacgaaatgttaagccgtggattcaaggaccagatctatgacatattccaaaagctcaacagcaacacccaggtagttttgctgtcagccacaatgccttctgatgtgcttgaggtgaccaagaagttcatgagggaccccattcggattcttgtcaagaaggaagagttgaccctggaggtatccgccagttctacatcaacgtggaacgagaggagtggaagctggacacactatgtgacttgtatgaaaaccctgaccatcacccaggcagtcatcttcatcaacacccggaggaaagtgga

SEQ ID NO: 114344 - DNA, 917 bp, Homo Sapiens
ttggcgcgcgccgcgcgtgtggcagtcgcggaaggcgcgggagcttgcgtgctgctgggcctgagctgtctgtctcgtttctgtccgcgcgccctgcatcccggccccgggcgcccgctggaggtcgccgaggagccacagggctgactggtctgctgcccgggcccaggagtgcctggtgtagcagtcgcggagccatcccggcgtctgctgccatgaccgactctcccctcagaggagactcttcctcagcggtggctgcagagacagatgagccgcggctcctggccgcgggaccgtgagacgggttcgtggccggccatttagggggacgctgcgaccaccgcctgcgcccctccggactggttccttgggccccggaagctcgcggcgggccctgcgggaggcggcatgctcccgcggaggctgctggccgcctggctggcggggacgcggggcgggggcctgctggcgcttctggccaatcagtgccgcttcgtcacgggcctgcgcgtgcggcgcgcgcagcagatcgcgcagctctacggccgcctctactccgagagctcacgccgcgttctcctcggccgcctctggcgccggctgcacggccgtcctggccatgcctctgccttgatggcggcgttagccggcgtcttcgtttgggacgaggagaggatccaggaggaggagttgcagagatctattaatgagatgaagcggttggaagaaatgtcaaatatgtttcagagctctggagtccagcaccaccctccagaaccaaaagcccaaacagaagggaatgaagattcagagggcaaagagcaacgttgggaaatggtgatggataagaaacactttaagctgtggcggcgcccaattacaggcacccacctttaccagtaccgagtttttgg

SEQ ID NO: 114345 - DNA, 996 bp, Homo Sapiens
ttggggcccaatacagcctgccacctgcaactctaggaaccagagcccacagctggaggggatggcggagggctgcttctgccctgaggaccagatcctcttcaacgcacacatgggcatctgcgtgcaggcctgcccctgcgtgggacccgatgggtttcctaaatttcccggggagcggtgggtcagcaactgccagtcctgcatgtgtgacgagggttcagtgtcggtgcagtgcaagcccctgccctgtgacgcccagggtcagcccccgccgtgcaaccgtcccggcttcgtaaccgtgaccaggccccgggccgacaacccctgctgccccgagacggtgtgcgtgtgcaacacaaccacctgcccccaaagcctgcctgtgtgcccgccagggcaggagtccatctgcacccaggaggagggcgactgctgtcccaccttccgctgcagacctcagctgtgttcgtacaatggcaccttctacggggttggtgcaaccttcccaggcgcccttccctgccacatgtgtacctgcctctctggggacacccaggacccaacggtgcaatgtcaggaggatgcctgcaacaatactacctgtccccagggctttgagtacaagagagtggccgggcagtgctgtggggagtgcgtccagaccgcctgcctcacgcccgatggccagccagtccagctgaatgaaacctgggtcaacagccatgtggacaactgcaccgtgtacctctgtgaggctgagggtggagtccatttgctgaccccacagcctgcatcctgcccagatgtgtccagctgcagggggagcctcacgaaaaccggctgctgctactcctgtgaggaggactcctgtcaagtccgcatcaacacgaccatcctgtggcaccagggctgcgagaccgaggtcaacatcaccttctgcgagagctcctggcccgggagcgtccaagtactcagcagaggcccaggccatgc

SEQ ID NO: 114346 - DNA, 879 bp, Homo Sapiens
atgcttttttataatgccaactttgtacaaaaaagttggcttccttcaaccccaaggccagctcccatctcatttccagaaaggctcatacctggcttgcagggaagcatctgtcttgtcattccaggtgccagaatcctctcagagtcattgaagggtgttcacccatcccacccaaggcttggcacactgccagtgtcttagcagggtcttgtgagggctgggggcatccaggcactcagaaggcaaaggaaccaccctacccatttggcctctggagggggcagaagaaagaaagaaacctcatcctatattttacaaagcatgtgaattctggcattagctctcataggagacccatgtgcttccttgctcagtgcaaaactgatgattctacttgctgtagatgaatggttaacacgagctagttaaacagtgccattgttttgccagtgaagcctccaaccctaagccactgggacggtggccagagatgccagcagcctctgtcgcccttagtcatataaccaaaatccagaccttatccacaacccggggcttggaaaggaaggtattttggaatcacaccctccggttatgttgctccagtaaaatcttgcctggaaagaggcagtcttcttagcatggtgagctgagttcatggcttttttttgtagccagtcctgtccctggccatccatgtgatggttttggatggagttaaacttgatgccagtgggcagtgcatgtggaaagtatcagagtaagcctctcccctccagagccctgagtttcttggctgcatgaaaggttttctttaaaatcagaattgtagccagtttctttgccagaaggatgaatacttggatattactgaaa

SEQ ID NO: 114347 - DNA, 956 bp, Homo Sapiens; identical to SEQ ID NO: 104515

SEQ ID NO: 114348 - DNA, 676 bp, Homo Sapiens; identical to SEQ ID NO: 104516

SEQ ID NO: 114349 - DNA, 899 bp, Homo Sapiens; identical to SEQ ID NO: 104517

SEQ ID NO: 114350 - DNA, 848 bp, Homo Sapiens; identical to SEQ ID NO: 104518

SEQ ID NO: 114351 - DNA, 1185 bp, Homo Sapiens
ttggtttggtgacagataatagtagaaattggcggtttcgagctgaactggctgaacagctgattttacttctagagttatatagtcccagagatgtttatgactatttacgtcccattgctctgaatctgtgtgcagacaaagtttcttctgttcgttggatttcctacaagttggtcagcgagatggtgaagaagctgcacgcggcaacaccaccaacgttcggagtggacctcatcaatgagcttgtggagaactttggcagatgtcccaagtggtctggtcggcaagcctttgtctttgtctgccagactgtcattgaggatgactgccttcccatggaccagtttgctgtgcatctcatgccgcatctgctaaccttagcaaatgacagggttcctaacgtgcgagtgctgcttgcaaagacattaagacaaactctactagaaaaagactatttcttggcctctgccagctgccaccaggaggctgtggagcagaccatcatggctcttcagatggaccgtgacagcgatgtcaagtattttgcaagcatccaccctgccagtaccaaaatctccgaagatgccatgagcacagcgtcctcaacctactagaaggcttgaatctcggtgtctttcctgcttccatgagagccgaggttcagtgggcattcgccacgcatgtgacctgggatagctttcgggggaggagagaccttcctctcctgcggacttcattgcaggtgcaagttgcctacacccaataccagggatttcaagagtcaagagaaagtacagtaaacactattatcttatcttgactttaaggggaaataatttctcagaggattataattgtcaccgaagccttaaatccttctgtcttcctgactgaatgaaacttgaattggcagagcattttccttatggaagggatgagattcccagagacctgcattgctttctcctggttttatttaacatcgacaatgaaattcttacagcctgaaggcagacgtgtgcccagatgtgaaagagaccttcagtatcagccctaactcttctctcccagaagacttgctgggctctgtggccagctgtcagcccagccctgtgtgtgatcgtttgtgacgtgtgcaaaatgggaaaggagggttttacatctcctaaaggacctgatgcc

SEQ ID NO: 114352 - DNA, 636 bp, Homo Sapiens
ttggagcggagcggccgcgggcgcagctagcgggtcggccgcggagcggaggtgcagctcggcttcccccggcacccctccccctcgggcgccagccccacccctccgccggccgggccgaccccgccgtactatcccctgcggcgcgagcccggggcggctccaagcgccccccagcagacccccatcatgggcagccagagctccaaggctccccggggcgacgtgaccgccgaggaggcagcaggcgcttcccccgcgaaggccaacggccaggagaatggccacgtgaaaagcaatggagacttatcccccaagggtgaaggggagtcgccccctgtgaacggaacagatgaggcagccggggccactggcgatgccatcgagccagcaccccctagccagggtgctgaggccaagggggaggtcccccccaaggagacccccaagaagaagaagaaattctctttcaagaagcctttcaaattgagcggcctgtccttcaagagaaatcggaaggagggtgggggtgattcttctgcctcctcacccacagaggaagagcaagagcagggggagatcggtgcctgcagcgacgagggcactgctctggaaagggaaggccgcaaccacccc

SEQ ID NO: 114353 - DNA, 1393 bp, Homo Sapiens
  misc_feature (597)..(639): n is a, c, g, or t
tttgtacaaaaaagttggagagcgcggagcctttaaaaaaaagagcgcagcgcacggccacagacagccctgggcatccaccgacggcgcagccggagccagcagagccggaaggcgcgccccgggcagagaaagccgagcagagctgggtggcgtctccgggccgccgctccgacgggccagcgccctccccatgtccctgctcccacgccgcgcccctccggtcagcatgaggctcctggcggccgcgctgctcctgctgctgctggcgctgtacaccgcgcgtgtggacgggtccaaatgcaagtgctcccggaagggacccaagatccgctacagcgacgtgaagaagctggaaatgaagccaaagtacccgcactgcgaggagaagatggttatcatcaccaccaagagcgtgtccaggtaccgaggtcaggagcactgcctgcaccccaagctgcagagcaccaagcgcttcatcaagtggtacaacgcctggaacgagaagcgcagggtctacgaagaatagggtgaaaaacctcagaagggaaaactccaaaccagttgggagacttgtgcaaaggactttgcagattnnnnnnnnnnnnnnnnnnnnnnnnnnnnnnnnnnnnnnnnnnngcctttctttctcacaggcataaaacacaaattatatattgttatgaagcactttttaccaacggtcagtttttacattttatagctgcgtgcgaaaggcttccagatgggagacccatctctcttgtgctccagacttcatcacaggctgctttttatcaaaaaggggaaaactcatgcctttcctttttaaaaaatgcttttttgtatttgtccatacgtcactatacatctgagctttataagcgcccgggaggaacaatgagcttggtggacacatttcattgcagtgttgctccattcctagcttgggaagcttccgcttagaggtcctggcgcctcggcacagctgccacgggctctcctgggcttatggccggtcacagcctcagtgtgactccacagtggcccctgtagccgggcaagcaggagcaggtctctctgcatctgttctctgaggaactcaagtttggttgccagaaaaatgtgcttcattcccccctggttaatttttacacaccctaggaaacatttccaagatcctgtgatggcgagacaaatgatccttaaagaaggtgtggggtctttcccaacctgaggatttctgaaaggttcacaggttcaatatttaatgcttcaaaagcatgtgaggttcccaacactgtcagcaaaaaccttaggagaaaaacttaaaaatatattgaatacatgcgcatacacagctacagacacacattctgttgacagggaaaac

SEQ ID NO: 114354 - DNA, 667 bp, Homo Sapiens
  misc_feature (168)..(305): n is a, c, g, or t
ttggcgcccagcgagttccagaggcgccagtggaagctgcggcggcggtgtctcgcgttcggcgggatttctcttcgctccggctcggcctaggtctacgtccccagctccagccgccggctcggactcggtctctgacccccaactcggtcccctagtccggccccnnnnnnnnnnnnnnnnnnnnnnnnnnnnnnnnnnnnnnnnnnnnnnnnnnnnnnnnnnnnnnnnnnnnnnnnnnnnnnnnnnnnnnnnnnnnnnnnnnnnnnnnnnnnnnnnnnnnnnnnnnnnnnnnnnnnnnnnnntcgccttcctcttcccggcgcggccccccggcttccgcgcgccgcccgccaccaatcctcttgctaccatgtccgtggagctcgaggaggccctgccagtgacgaccgccgagggaatggccaagaaggtgaccaaggctggcggctcggcggcgttgtccccatctaagaagaggaagaatagcaagaagaagaaccagccgggcaaatacagccagctggtggtggagaccatccgtaggttgggcgagcgcaacttctcgtctctggccaaaatctacaccgaggccaagaaagttccgtggttcgaaaaacagaatgagcgcacctacctcaagaactccaatcaaaagcgctggtgc

SEQ ID NO: 114355 - DNA, 1142 bp, Homo Sapiens
ttgggcagcccttgccttgagtcagtgcgccgctctccagcccgcttgaacgctccccgcagccaccgccacccattggaatggccaacaggggacctgcatatggcctgagccgggaggtgcagcagaagattgagaaacaatatgatgcagatctggagcagatcctgatccagtggatcaccacccagtgccgaaaggatgtgggccggccccagcctggacgcgagaacttccagaactggctcaaggatggcacggtgctatgtgagctcattaatgcactgtaccccgaggggcaggccccagtaaagaagatccaggcctccaccatggccttcaagcagatggagcagatctctcagttcctgcaagcagctgagcgctatggcattaacaccactgacatcttccaaactgtggacctctgggaaggaaagaacatggcctgtgtgcagcggacgctgatgaatctgggtgggctggcagtagcccgagatgatgggctcttctctggggatcccaactggttccctaagaaatccaaggagaatcctcggaacttctcggataaccagctgcaagagggcaagaacgtgatcgggttacagatgggcaccaaccgcggggcgtctcaggcaggcatgactggctacgggatgccacgccagatcctctgatcccaccccaggccttgcccctgccctcccacgaatggttaatatatatgtagatatatattttagcagtgacattcccagagagccccagagctctcaagctcctttctgtcagggtggggggttcagcctgtcctgtcacctctgaggtgcctgctggcatcctctcccccatgcttactaatacattcccttccccatagccatcaaaactggaccaactggcctcttcctttcccctgggaccaaaatttaggggcctcagtccctcaccgccatgccctggcctattctgtctctccttcttccccctggcctgttctgtctctgagctctgtgtcctccgttcattccatgggctgggagtcactgatgctgcctctgccttctgatgctggactgggccttgcttctacaagtatgcttctccaccactgtggctgcaggaacttaattataagg

SEQ ID NO: 114356 - DNA, 1223 bp, Homo Sapiens
tacagattgccttgatgtcagcaccagagaggtcatctttagccatgatcaggtcgtccagggttacatcatcagccagcgtcatcctgcttgtgtgaatctgaaagatgcgcttcttcgtcttttcatcaggcagggggaactcaatcttcctgtcaatgcggcctggtctgataagtgctggatccaaagtttctattcggtttgtggccatgataactttcacatctcccctagaatcaaatccatccaactggttcagcagttccaacattgttcgctgaatttctctctcaccaccagaattggagtcatatctttttgtcccaatggcgtcaatttcatcaataaacacgatggacggtgcatgttcttcagcaactcggaacaattcccgtacgagtttgggcccatcacctaggtacttctgaataagttcagagccaaccactctcaagaaagtggctgaggtttggtttgctactgctttggctaacaaggttttacctgtgccaggtggaccatagagaatgacccccttaggaggctttatacccatctcttcataatattcaggatgggtgagaggaagctccacagattccttaatttcctgaatttggttgtccaaccccccaatatctgcataggtctcctggggggccttttctaccttcatcactgtgaccaggggatccgtgtcatccatcagcacccctatcacggcatgcaccttgtggttgagcaggaccgagcagccaggttccagcagatccttgtctacaaatgaaagaatgctgacgtagtgttctgagcccacagatgtagacacgatggcatgattgtcatcaatgatctcttccaaggttcctactgacatcggggtccccctcagatcatccacttttgatctttcctcctcttgcttttcttctaatggtttcatttgttcctgatttctaatgaattcttcctccatgagaagatagtctttaattctctctaacttcagtaattttaaccggcactgagtgtgaggtgtcaccagtggcagtttgctggcagcatctggtccctttgttttcttcttctttttccccactctagttggtacaggaggttcatatttctttttcttgtccttgtcatccttcttgccacctccaggaccatgaccaccactctgactttggcccatcttgccccaacttttttgtacaaag

SEQ ID NO: 114357 - DNA, 914 bp, Homo Sapiens
actttgtacaaaaaagttggcgaggccttcccccacgactctcagctcggccagggcaatctcaaagtccgctttaagaaggtccctcacaacatcaacttccgtgagaagaagccaaagccatccaagaagaaagcagaaggtggcggcgcagaggagggggctggggcccggggccgcgtggcgcgtttccgctacttcgaggatatttatggctactcaggggtcttcatctgcggcccctcccctcactggctcttggtgaccggccgaggggctctgcggctacaccccatggccatcgacggcccggtcgactctttcgctccattccacaatgtcaactgtccccgcggcttcctgtacttcaacagacagggcgagctgaggatcagtgtcctgcctgcctacctgtcctatgatgccccatggcctgtcaggaagatcccgctgcgctgcacggcccactatgtggcttaccacgtggagtctaaggtgtatgctgtggccaccagcaccaacacgccgtgtgcccgcatcccacgcatgactggcgaggagaaggagtttgagaccatcgagagagatgagcggtacatccacccccagcaggaggccttctccatccagctcatctccccggtcagctgggaggctattcccaatgccaggatcgagctgcaggagtgggagcatgtgacctgcatgaagacagtgtctctgcgcagtgaggagaccgtgtcgggcctcaaaggctacgtggccgccgggacctgcctcatgcagggggaggaggtcacgtgccgagggcggatcttgatcatggatgtgattgaggtggtgcccgagcctggccagcccttgaccaagaacagttcaaagtcctttacgagaaggagcagaagggcccgtga

SEQ ID NO: 114358 - DNA, 942 bp, Homo Sapiens
actttgtacaaaaaagttggctgagaagaatttctctttagttctttgcaagaaggtagagataaagacactttttcaaaaatggcaatggtatcagaattcctcaagcaggcctggtttattgaaaatgaagagcaggaatatgttcaaactgtgaagtcatccaaaggtggtcccggatcagcggtgagcccctatcctaccttcaatccatcctcggatgtcgctgccttgcataaggccataatggttaaaggtgtggatgaagcaaccatcattgacattctaactaagcgaaacaatgcacagcgtcaacagatcaaagcagcatatctccaggaaacaggaaagcccctggatgaaacactgaagaaagcccttacaggtcaccttgaggaggttgttttagctctgctaaaaactccagcgcaatttgatgctgatgaacttcgtgctgccatgaagggccttggaactgatgaagatactctaattgagattttggcatcaagaactaacaaagaaatcagagacattaacagggtctacagagaggaactgaagagagatctggccaaagacataacctcagacacatctggagattttcggaacgctttgctttctcttgctaagggtgaccgatctgaggactttggtgtgaatgaagacttggctgattcagatgccagggccttgtatgaagcaggagaaaggagaaaggggacagacgtaaacgtgttcaataccatccttaccaccagaagctatccacaacttcgcagagtgtttcagaaatacaccaagtacagtaagcatgacatgaacaaagttctggacctggagttgaaaggtgacattgagaaatgcctcacagctatcgtgaagtgcgccacaagcaaaccagctttctttgcagagaagcttcatcaagccatgaaa

SEQ ID NO: 114359 - DNA, 1909 bp, Homo Sapiens
ttggggtagcaaccgcgagcgtgccggtcgctagtcgcgggtccccgagtgagcacgccagggagcaggagaccaaacgacgggggtcggagtcagagtcgcagtgggagtccccggaccggagcacgagcctgagcgggagagcgccgctcgcacgcccgtcgccacccgcgtacccggcgcagccagagccaccagcgcagcgctgccatggagcccagcagcaagaagctgacgggtcgcctcatgctggctgtgggaggagcagtgcttggctccctgcagtttggctacaacactggagtcatcaatgccccccagaaggtgatcgaggagttctacaaccagacatgggtccaccgctatggggagagcatcctgcccaccacgctcaccacgctctggtccctctcagtggccatcttttctgttgggggcatgattggctccttctctgtgggccttttcgttaaccgctttggccggcggaattcaatgctgatgatgaacctgctggccttcgtgtccgccgtgctcatgggcttctcgaaactgggcaagtcctttgagatgctgatcctgggccgcttcatcatcggtgtgtactgcggcctgaccacaggcttcgtgcccatgtatgtgggtgaagtgtcacccacagcccttcgtggggccctgggcaccctgcaccagctgggcatcgtcgtcggcatcctcatcgcccaggtgttcggcctggactccatcatgggcaacaaggacctgtggcccctgctgctgagcatcatcttcatcccggccctgctgcagtgcatcgtgctgcccttctgccccgagagtccccgcttcctgctcatcaaccgcaacgaggagaaccgggccaagagtgtgctaaagaagctgcgcgggacagctgacgtgacccatgacctgcaggagatgaaggaagagagtcggcagatgatgcgggagaagaaggtcaccatcctggagctgttccgctcccccgcctaccgccagcccatcctcatcgctgtggtgctgcagctgtcccagcagctgtctggcatcaacgctgtcttctattactccacgagcatcttcgagaaggcgggggtgcagcagcctgtgtatgccaccattggctccggtatcgtcaacacggccttcactgtcgtgtcgctgtttgtggtggagcgagcaggccggcggaccctgcacctcataggcctcgctggcatggcgggttgtgccatactcatgaccatcgcgctagcactgctggagcagctaccctggatgtcctatctgagcatcgtggccatctttggctttgtggccttctttgaagtgggtcctggccccatcccatggttcatcgtggctgaactcttcagccagggtccacgtccagctgccattgccgttgcaggcttctccaactggacctcaaatttcattgtgggcatgtgcttccagtatgtggagcaactgtgtggtccctacgtcttcatcatcttcactgtgctcctggttctgttcttcatcttcacctacttcaaagttcctgagactaaaggccggaccttcgatgagatcgcttccggcttccggcaggggggagccagccaaagtgacaagacacccgaggagctgttccatcccctgggggctgattcccaagtgtgagtcgccccagatcaccagcccggcctgctcccagcagccctaagatctctcaggagcacaggcagctggatgagacttccaaacctgacagatgtcagccgagccgggcctggggctcctttctccagccagcaatgatgtccagaagaatattcaagacttaacggctccaggattttaacaaagcaagactgttgctcaatctattcagacaagcaac

SEQ ID NO: 114360 - DNA, 965 bp, Homo Sapiens
gtttttgctaaaggtcaggctgatagcagcatcatcttcaggaccagaatatttgaactggatacgatgtcttttcatatctgcaaagtattctttagcttcctttgatgtgctggtgcccaaacctttgtaatatttgactttccattttttatgatttggagtagaactcttccactcttcaaattcaggaaggctgtaaaatgccatttcttgcttgtttttagatacctttacaatgggagtgataaattcctccagaaaacgatgtcgcagaagagagggccagttgtgatggataaaattaatcagcaagcctttgatgtgggaaccatcttggtcctgatctgtcataatcattatcttcccataacgaagcgtcttcaatgaatcttcatcttcatagtttttcttgtactgaagacccacaatcttgatgatattgttaatctcagcattttccatgatctgcttatgagaagcttctcgaacattgagtatttttcctctaagagggaaaaccccatatttgtctctcccaaccacaccaaggcctgaaacagccaaagttttggctgaatctccctcagtcaggataagcgtacactcagtggagtttcggccccctgcatcattggcatcatcgagtttgggaattcccttgattctattatgttttacagctgaacacttcttgtttaactggacttgggccttaaacttcacccagtttagtatgctttctacaataccacagccaatggcagctttgataaatttttcactcaattggcatgttgatccaaagctcttgggttgtaaagtcatgttttcttttgtctgagagtcaaaggttgggttttcaattaaggcatttacaaaaatccacatgtgatttttcacctgatgtgcttttactgcaacaccacccttgttcttcttcttcacaacatcaacaagtccaa

SEQ ID NO: 114361 - DNA, 1000 bp, Homo Sapiens
ttgggttcaggcagtgggcagaatgatctggaaaagatgaccagcatcctggaagctgtgccacaggttaagtttatttgcctggatgtggccaatgggtattcagaacattttgtggaattcgtgaaacttgtccgtgccaaatttcctgaacacaccattatggcagggaacgtggtgacaggagaaatggtagaagagcttattctttccggagcagatatcatcaaagtgggagttggaccaggttctgtgtgcaccacccgcaccaagacgggagtggggtacccccagctgagtgccgtcattgagtgtgccgactctgcccatggcctgaagggccacatcatctctgatggaggctgtacgtgtccaggggatgtcgccaaagcctttggagctggagcagattttgtcatgctgggaggaatgttttcgggtcatacggagtgtgctggagaagtgattgagaggaacggacggaagctcaagctcttctacgggatgagctctgacaccgccatgaacaagcacgcaggaggagttgctgagtacagagcctctgagggtaagactgtggaagttccttacaaaggagatgtggaaaacactatcctggatattctcgggggactgaggtccacgtgcacctacgtgggggccgccaaactcaaggagctcagcaggagggcaacattcatccgggtgacccagcagcacaacaccgtgttcagctaaccctggggacaaagcagcgtctggctcgagtggaagcgtccaaacctgcttttcccatctccccccaagtctgttccgtcagagcttctggctgctcctgaatggtggaatgctgtgtcctctcttctgtctcctgctgcctggaggcttcggggctctcccgcctgccttctcggggcccatacgcaaggcaccgattgggccaacatcaaagccctgctgcccaaaactcataacctcattgttcaaaccaacacttgca

SEQ ID NO: 114362 - DNA, 945 bp, Homo Sapiens; identical to SEQ ID NO: 104519

SEQ ID NO: 114363 - DNA, 900 bp, Homo Sapiens; identical to SEQ ID NO: 104520

SEQ ID NO: 114364 - DNA, 897 bp, Homo Sapiens; identical to SEQ ID NO: 104522

SEQ ID NO: 114365 - DNA, 945 bp, Homo Sapiens; identical to SEQ ID NO: 104523

SEQ ID NO: 114366 - DNA, 957 bp, Homo Sapiens; identical to SEQ ID NO: 104524

SEQ ID NO: 114367 - DNA, 562 bp, Homo Sapiens
tttgtacaaaaaagttgggtaacggcggccgtgtcggcagctgctgtagcgaagagagtttggcgcgatgtctcacaccattttgctggtacagcctaccaagaggccagaaggcagaacttatgctgactacgaatctgtgaatgaatgcatggaaggtgtttgtaaaatgtatgaagaacatctgaaaagaatgaatcccaacagtccctctatcacatatgacatcagtcagttgtttgatttcatcgatgatctggcagacctcagctgcctggtttaccgagctgatacccagacataccagccttataacaaagactggattaaagagaagatctacgtgctccttcgtcggcaggcccaacaggctgggaaataattgtgttggaagcactgggggggttggggtgggcttggaacacaggtgtgtacagcgtgctgtagtggaagttttgtatcatagtaatcctgtttccactttgttatactctagccaagattgactgtattagatgaaatgtgaggatcttgttcaatcggaaacccccgttacctcctc

SEQ ID NO: 114368 - DNA, 1725 bp, Homo Sapiens
  misc_feature (898)..(934): n is a, c, g, or t
  misc_feature (1540)..(1563): n is a, c, g, or t
actttgtacaaaaaagttggatattccgtaggtagatgtgtaacctcttcaccttattcatggctgaagtcacctcttggttacagtagcgtagcgtgcccgtgtgcatgtcctttgcgcctgtgaccaccaccccaacaaaccatccagtgacaaaccatccagtggaggtttgtcgggcaccagccagcgtagcagggtcgggaaaggccacctgtcccactcctacgatacgctactataaagagaagacgaaatagtgacataatatattctatttttatactcttcctatttttgtagtgacctgtttatgagatgctggttttctacccaacggccctgcagccagctcacgtccaggttcaacccacagctacttggtttgtgttcttcttcatattctaaaaccattccatttccaagcactttcagtccaataggtgtaggaaatagcgctgtttttgttgtgtgtgcagggagggcagttttctaatggaatggtttgggaatatccatgtacttgtttgcaagcaggactttgaggcaagtgtgggccactgtggtggcagtggaggtggggtgtttgggaggctgcgtgccagtcaagaagaaaaaggtttgcattctcacattgccaggatgataagttcctttccttttctttaaagaagttgaagtttaggaatcctttggtgccaactggtgtttgaaagtagggacctcagaggtttacctagagaacagtggtttttaaggttatcttagatgtttcacaccggaaggtttttaaacactaaaatatataatttatagttaaggctaaaaagtatatttattgcagaggatgttcataaggccagtatgatttataaatgcaatctccccttgatttaannnnnnnnnnnnnnnnnnnnnnnnnnnnnnnnnnnnnaaccttctgcctttgatgttacagatttaatacagtttatttttaaagatagatccttttataggtgagaaaaaaacaatctggaagaaaaaaaccacacaaagacattgattcagcctgtttggcgtttcccagagtcatctgattggacaggcatgggtgcaaggaaaattagggtactcaacctaagttcggttccgatgaattcttatcccctgccccttcctttaaaaaacttagtgacaaaatagacaatttgcacatcttggctatgtaattcttgtaatttttatttaggaagtgttgaagggaggtggcaagagtgtggaggctgacgtgtgagggaggacaggcgggaggaggtgtgaggaggaggctcccgaggggaaggggcggtgcccacaccggggacaggccgcagctccattttcttattgcgctgctaccgttgacttccaggcacggtttggaaatattcacatcgcttctgtgtatctctttcacattgtttgctgctattggaggatcagttttttgttttacaatgtcatatactgccatgtactagttttagttttctcttagaacattgtattacagatgccnnnnnnnnnnnnnnnnnnnnnnnnatgtgatcaattttgacttaatgtgattactgctctattccaaaaaggttgctgtttcacaatacctcatgcttcacttagcccatggtggacccagcgggcaggttctgcctgctttggcgggcagacacgcgggcgcgatcccacacaggctggcggggg

SEQ ID NO: 114369 - DNA, 1619 bp, Homo Sapiens
ttggcagcgaggtcggcagcggcacagcgaggtcggcagcggcacagcgaggtcggcagcggcacagcgaggtcggcagcggcagcgaggtcggcagcggcacagcgaggtcggcagcggcagcgaggtcggcagcggcgcgcgctgtgctcttccgcggactctgaatcatggcgaccacggccacgatggcgacctcgggctcggcgcgaaagcggctgctcaaagaggaagacatgactaaagtggaattcgagaccagcgaggaggtggatgtgacccccacgttcgacaccatgggcctgcgggaggacctgctgcggggcatctacgcttacggttttgaaaaaccatcagcaatccagcaacgagcaatcaagcagatcatcaaagggagagatgtcatcgcacagtctcagtccggcacaggaaaaacagccaccttcagtatctcagtcctccagtgtttggatattcaggttcgtgaaactcaagctttgatcttggctcccacaagagagttggctgtgcagatccagaaggggctgcttgctctcggtgactacatgaatgtccagtgccatgcctgcattggaggcaccaatgttggcgaggacatcaggaagctggattacggacagcatgttgtcgcgggcactccagggcgtgtttttgatatgattcgtcgcagaagcctaaggacacgtgctatcaaaatgttggttttggtgaagctgatgaaatgttgaataaaggtttcaaagagcagatttacgatgtatacaggtacctgcctccagccacacaggtggttctcatcagtgccacgctgccacacgagattctggagatgaccaacaagttcatgaccgacccaatccgcatcttggtgaaacgtgatgaattgactctggaaggcatcaagcaatttttcgtggcagtggagagggaagagtggaaatttgacactctgtgtgacctctacgacacactgaccatcactcaggcggtcatcttctgcaacaccaaaagaaaggtggactggctgacggagaaaatgagggaagccaacttcactgtatcctcaatgcatggagacatgccccagaaagagcgggagtccatcatgaaggagttccggtcgggcgccagccgagtgcttatttctacagatgtctgggccagggggttggatgtccctcaggtgtccctcatcattaactatgatctccctaataacagagaattgtacatacacagaattgggagatcaggtcgatacggccggaagggtgtggccattaactttgtaaagaatgacgacatccgcatcctcagagatatcgagcagtactattccactcagattgatgagatgccgatgaacgttgctgatcttatctgaagcagcagatcagtgggatgagggagactgttcacctgctgtgtactcctgtttggaagtatttagatccagattctacttaatggggtttatatgggacttcttctcataaatggcctgccgtctcccttcctttgaagaggatatggggattctgctctcttttcttatttacatgtaaatataacattgttctaagtctttttcattaaaa

SEQ ID NO: 114370 - DNA, 936 bp, Homo Sapiens
ttggctggaaaggacactgacaacttcaaagcaaaatgaagctcttttggttgcttttcaccattgggttctgctgggctcagtattcctcaaatacacaacaaggacgaacatctattgttcatctgtttgaatggcgatgggttgatattgctcttgaatgtgagcgatatttagctcccaagggatttggaggggttcaggtctctccaccaaatgaaaatgttgccattcacaaccctttcagaccttggtgggaaagataccaaccagttagctataaattatgcacaagatctggaaatgaagatgaatttagaaacatggtgactagatgcaacaatgttggggttcgtatttatgtggatgctgtaattaatcatatgtgtggtaatgctgtgagtgcaggaacaagcagtacctgtggaagttacttcaaccctggaagtagggactttccagcagtcccatattctggatgggattttaatgatggtaaatgtaaaactggaagtggagatatcgagaactataatgatgctactcaggtcagagattgtcgtctgtctggtcttctcgatcttgcactggggaaggattatgtgcgttctaagattgccgaatatatgaaccatctcattgacattggtgttgcagggttcagaattgatgcttccaagcacatgtggcctggagacataaaggcaattttggacaaactgcataatctaaacagtaactggttcccggaaggtagtaaacctttcatttaccaggaggtaattgatctgggtggtgagccaattaaaagcagtgactactttggtaatggccgggtgacagaattcaagtatggtgcaaaactcggcacagttattcgcaagtggaatggagagagatgtcttacttaaagactggggagaagttggggtttca

SEQ ID NO: 114371 - DNA, 524 bp, Homo Sapiens
tgtacaaaaaagttgggggccgaggagccttagaaaggctcaggcgaagctggggtgctgttgggggtatccgagtcccagaagcacctggaaccccgacagaagattctggactccccagacgggaccaggagagggacggcatgagcgacacacacaaacacagaaccacacagccagtcccaggagcccagtaatggagagccccaaaaagaagaaccagcagctgaaagtcgggatcctacacctgggcagcagacagaagaagatcaggatacagctgagatcccagtgcgcgacatggaaggtgatctgcaagagctgcatcagtcaaacaccggggataaatctggatttgggttccggcgtcaaggtgaagataatacctaaagaggaacactgtaaaatgccagaagcaggtgaagagcaaccacaagtttaaatgaagacaagctgaaacaacgcaagctggttttatattagatatttgacttaaactatctcaataaagttttgcatctttc

SEQ ID NO: 114372 - DNA, 1005 bp, Homo Sapiens
ttggcattgttcaactgtgccctttggggctgtggttcatttggctctgatttttcctatatgttctctcctccaacccccatagctccatcttgtctacaagattttgttagaagccgtcaaaatcctgctgactcgagatgcgctgtggtgcatgttttccccgggcacagcaggctaataatcctgttacaaagagaaatgctgtacatttcgagcagtgctggcccctgggactcaccgtggccttttctaagtgcttacagactctctgtttaataatccattccagaaattttccagggctcattgttgagcttggtgttcgcaactttgagtgatcagcccttctcctttgtgggagcaccaggacagagcagcctttgtccctccccagtctcagttccctcccactgcccctgtggacctcgaatgcagagcttatgcacctaccgaaggtcgtgtcagcacccaaggcagaacgaggctgccctgggaactagggtcaattaagacagcttgtgctggaggaccctttacagcagatgaaggcctctccccagccagaaaagatggagcacacgctgggtggtggccccgcttcctcactggaaggagatggtgctcttcttttttctttctgaattgtggccaccttcataccagtctgtcatggaacacttaagccgcttgagtgcctgctggtactcccagccctgccatgcctgagccccctgcacacaaggagccaggagtaatcagggcagaccctttagggcacggggactcctggattgtgaaattggctctctgggggccaaggccttctaacgttggtggaagtggctttggcttattgggtcggattctaagccattcattccaacctttagagacatcccagctttccctagcccagagtctgcagcccctccaccatcccacatcctccccctccctttcctcatgaaccccagtcgcgcctctgccttctcaaacccctcc

SEQ ID NO: 114373 - DNA, 1285 bp, Homo Sapiens
ctttgtacaaaaaagttgggacctcttggtgattcctggatgatcatacacagaggacttacaccatacaaaaatattgggcaccgcagtgccagagaagatgcttgaggttagattttaaggagtggggaattgtgaagcccacagatgcgcacgcaatgaccagcaggaaccggaagccctgggtcacccccactctgcctcatttctgcctccaggatgccactgcctctgcttccaggaaaggcaagggggagggtgcttatccgtgtctctggttccagcttcctgtctttgctccctcccctctcttagagactgtgccttcagcaggactcttaatatctgctgcaacttggagaacctccctgccctgaaatgtgaaccaagcacactttggttccttctccgggcggctctctctgagacccaaggctgcagtccctcagtgctggtggtatcgtgtggggatagcaatacttctctgcccttcattgtctcatctagacatcaagcagggaaaatccagggagattaaattcatggtgacaagtcctgggcagttctggtaaacggtccagttagggagggagtagaaactattgactcaaaagagtttctggctgatctgtggctttgcctccaccatccctaaccaacctctcatcacagctttgtgtgtgggctgagtgctggccttaaccctaggcgtggaagagaaaatgtgaggttgtttagatactcatcaggacctcacaggagctgagacttatcagccagaatgtgttcttcggacagtcgtacacatcttacagaaaaccctccttgtagagttggttgtggtatgtgtttgatgctataaagctcatttttaatgtgtacacctgctctagggacgattcgtttgaaagagagtaagatgcattaacagaaactatcctgggattaggtgaaaaatgtctagcaaaagaaacaaagtctttaatagagtggcctctttcgctcttcgattatgactgctgcagttttaccccagcagtcagctgtctttgtcaaccatacgtttttggagattgggtctagcacatgtcacccttgtccacgttgtttcacatctggttagggggcagattttaaaatgtagttttgtaatgttacatttaagcatgataaatgattagactaccagatgttactagtgctaactttgtattcttagacattaaaatgattgacataaactctttgtgccttgaaaatgaaacaaattataaaaatgttttaa

SEQ ID NO: 114374 - DNA, 933 bp, Homo Sapiens
ttattcaacacagataccacagaatcagcagggtgagaaacaattgcacaaagactccagctatgtaacttgctacaaatgttacaaccagctgctctggctttgaacattcactgcggggcttaggaaccacaaacttgtacagtgcttcaacagtacgttcaaagcaggcgaacttcatcatggtgtatggtatctgtctcatccagagaggagcaacccccttgtagaatgcttttaggccttcttccttatacattttgggagctgcatccctcaaagtgttggcataacctggctgggtttgaattcgaaccttagcagcttccataggagccagggcaatgtcagcaaagaattcagcactggcagaggcagccaaatatagtgatgtgcgccagagataagtattctcctctccaagcatattgctatacaagactttaaagacttcataaaagccaaacttgcagagtccctgcatggagtagccaaggaaagtcggagcccatcctttagccaaaccacgaacaccatcctctttaagtgtaactgagaatccgttaaatatgcccttgtacttttgggggtccacctgcatacggcatttcactaaatccaggggaaccacagcagtgtgtgtcagaccacaacttaagaccccaccaaagccacacagtgcataatacttcgcggagccaaattcacaactgtactcttccacggcggcggctgccaggttgcgagggcggcggggctggcccgtgggccctggggagctgctgcggaggtccccgagaccatcgtgcaccagctgcagatgtggcgtgttgaaggggttcgcccgcgccaggtgcgccacggacgagaacatcttttccctaagatggcgatcacacaaccactcccttggccaacttttttgtacaaagt

SEQ ID NO: 114375 - DNA, 907 bp, Homo Sapiens
cactcagctgccacatgctccatgaaatagaaagccctcccggtctcagcactctgcacacctcgcggagaatccgctcctggttcttcacagagcacagcaccagggtgcagaccaccacatccacagagccatcagccacctggtgcatgttctccccggcagctaccacaaagcgctcaaactgcaggtgtcggttctctgcaatgctcttgatcaaaaacttctcaaagttggggttggggtcaatacaggtcaccctgcacccaggtgggtagaacttgaagttggcccccgtgccacagcccacttccagcagggagagtttcccggaggggcccgcaaactcctgcaggttactgaagagctcccgcttcttgcttgccatctgttcgttgtatatcacagtgaacctcaccaagaagtaggggaaccattttttgcatatccagctccacaagcccagaaagttcagcaggtacaagggaaatgtcaggatgtaaatggccagtctcaggataaagatggtaagctccattgctcagaagggaaaaaaacagatcaacagttagagacccgactcctttaattgcaggagagaggcttctggccacactccagagccaatcagctgcagaggagaaaaagaactggctgtgctggaaagtcaaatcatgggcaagaggccaattttgcctaatagatgtttggcagcagtcgattcagcttagttttcataaggcaaaatgagaaggttcccagcttttcctcagaaggaaagtggattataatcctttattcctaatcgattcctgtttccccttctctgggtttggagacagctgctagcttcctgctagagttttataagcgcagtgtacttacaccccaccgggctctccaccaa

SEQ ID NO: 114376 - DNA, 480 bp, Homo Sapiens
tggtagcgagcgcgggcaccagggcctccaaactttttggactcgcagcgacgagggtcagctaccagcagggtccggtcatactggatgaggatgtctttgatctccttcttggaagcctcatccacatatttctggtaataggccaccagggctttggagatggactgacggatagcataaatctgggccacgtgaccaccaccctttacacggacacggatgtctacaccagcaaatcgctccttgccgagaagcagaactggctccagcagcttgtactgtagcgtgcgcggctcaatcatctccaggggccgcccgttcaccttgatgagaccattgccgcgtttgcagtgcgccacagctgtcgctgtcttcttgcgtccgaagacctgcacagactgcagcgggcccttggacggcatggctccgagcgtggactagacaacctcaccgcgcggcgccaacttttttgtacaa

SEQ ID NO: 114377 - DNA, 1139 bp, Homo Sapiens
  misc_feature (277)..(333): n is a, c, g, or t
  misc_feature (351)..(404): n is a, c, g, or t
  misc_feature (408)..(415): n is a, c, g, or t
  misc_feature (431)..(538): n is a, c, g, or t
actttgtacaaaaaagttggggaagacgtggatcgatgaggaagacgtggatgaagatgcccatgattcagaggccaaagtggcgagcctgagaggaatggagttacaggggtgcgccagcactcaggttgaatcagaaaataaccaagaagaacagaaacaggtgcgcttaccagaaagccgcctgacaccatgggaggtgtggtttattggcaaagaaaaagaagaacgtgaccggctgcaactgaaagctctagaggaattaaatcaacaactnnnnnnnnnnnnnnnnnnnnnnnnnnnnnnnnnnnnnnnnnnnnnnnnnnnnnnnnngcacaaggaatgggttcnnnnnnnnnnnnnnnnnnnnnnnnnnnnnnnnnnnnnnnnnnnnnnnnnnnnnntggnnnnnnnngcagcaaaggaactgnnnnnnnnnnnnnnnnnnnnnnnnnnnnnnnnnnnnnnnnnnnnnnnnnnnnnnnnnnnnnnnnnnnnnnnnnnnnnnnnnnnnnnnnnnnnnnnnnnnnnnnnnnnncaacagcaagctgcaatacaggagaaaaaggaaatagcagaaaaaaagtttcaagaatggttggaaaatgcgaaacataaacctcgtccagctgcaaagagctatggttatgccaatggaaaacttacaggtttttacagtggaaattcctatccagaaccagccttttataatccaattccgtggaaaccaattcatatgccacctcccaaagaagctaaggatctatcaggaaggaagagtaaaagacctgtgataagtcagccacacaagtcatcatctctggtaattcataaagccaggagcaatctttgccttggaactctgtgcagaatacaaagatagcgtatgtggaaaataacatgcttttatctggagctatttaatttaaaaatcagaaattgttttttactgctcagtcaataactcaacacttaatgtgattattgacaaatagcaatttttgcatttgtatatggagtccttagagttgaggaagatattttctggattttggtttttataaacttttcaaagttgatcttggcatgttgttttgcagaattaagtggctgatatgtaagaattgtgtttgtattta

SEQ ID NO: 114378 - DNA, 1096 bp, Homo Sapiens
ttggggatgatttttaatctctttagtcaagagacggtgatgaagtttgtgccgcggtacagcctcgtcctagaactcagcgacagcggtgccttccggaaaagcctgcatgatcccgatgggctggtggccacctacatcatcgaggtgcacgaacacgatgggcacctgtacctgggctctttcaggtcccccttcctctgcagactcagcctccaggctgtttagccctcccagatagctgcccctgccacgcaggccaggagtcttcacactcaggcaccaggcctggtccaggaggagctgtggacacagtcgtggttcaagtgtccacatgcacctgttaatccctgagaggtggtgggaatggctgcttcattcctcgaggatgcccgggccccacctgggcttgtctttctgtttagagggaagtgtaacatatctgccatgaggaacataaattcatgtaaagccattttctcttaaacaaaacaaaactttctaagtacagtcattctctaggatttgggaagctccttgcacttggaacagggctcaggtgggtggagcagtaaggcactacccagagagcttgctgctgcggccctgtcctgcggcctcaaagttcttctttactatatataacgtgcggtcataccttttttcgttgtggtggggatggaagagcagagggagcatggcccaggggtgttgaggccagcggtgagagccgtgttagccaagacatggaactgtgttttcaagggttatgtggggcgtgggctctccatagtgtgtatgaaaagcttgttgactctagcggctcagagaggactttgctgggtttctttctgtgaatatttccgtgctgaccatgctggaattggatgattttgcaattcgggacctactgcaggggtccgtttagtaacgttttgtctgtgatctttgttcttgacctctagaccccaagatgtgaacagtgcacgtgttaatgtcatctttgctcatgtgttataagccccaagttgctgtatattttcacaagtatgtttacacactggtcatgattttgataataaataacgataaatcg

SEQ ID NO: 114379 - DNA, 944 bp, Homo Sapiens
gttcgttgcaacaaattgatgagcaatgcttttcttttaatagccaactttgtacaaaaaagttggggcagcggctgcagcgctctcgtcttctgcggctctcggtgccctctccttttcgtttccggaaacatggcctccggtgtggctgtctctgatggtgtcatcaaggtgttcaacgacatgaaggtgcgtaagtcttcaacgccagaggaggtgaagaagcgcaagaaggcggtgctcttctgcctgagtgaggacaagaagaacatcatcctggaggagggcaaggagatcctggtgggcgatgtgggccagactgtcgacgatccctacgccacctttgtcaagatgctgccagataaggactgccgctatgccctctatgatgcaacctatgagaccaaggagagcaagaaggaggatctggtgtttatcttctgggcccccgagtctgcgccccttaagagcaaaatgatttatgccagctccaaggacgccatcaagaagaagctgacagggatcaagcatgaattgcaagcaaactgctacgaggaggtcaaggaccgctgcaccctggcagagaagctggggggcagtgccgtcatctccctggagggcaagcctttgtgagccccttctggccccctgcctggagcatctggcagccccacacctgcccttgggggttgcaggctgcccccttcctgccagaccggaggggctggggggatcccagcagggggagggcaatcccttcaccccagttgccaaacagaccccccaccccctggattttccttctccctcatcccttgacggttctggccttcccaactgcttttgatcttttgaattcctcttgggctgaaacagaccaagttccccccaggcaccccagttgtgggggagcctgtattttttttaacaacatccccattccc

SEQ ID NO: 114380 - DNA, 1002 bp, Homo Sapiens
actttgtacaaaaaagttggcttcaccgttacgttattgggcagaaaggaagtgggatccgcaagatgatggatgagtttgaggtgaacatacatgtcccggcacctgagctgcagtctgacatcatcgccatcacgggcctcgctgcaaatttggaccgggccaaggctggactgctggagcgtgtgaaggagctacaggccgagcaggaggaccgggctttaaggagttttaagctgagtgtcactgtagaccccaaataccatcccaagattatcgggagaaagggggcagtaattacccaaatccggttggagcatgacgtgaacatccagtttcctgataaggacgatgggaaccagccccaggaccaaattaccatcacagggtacgaaaagaacacagaagctgccagggatgctatactgagaattgtgggtgaacttgagcagatggtttctgaggacgtcccgctggaccaccgcgttcacgcccgcatcattggtgcccgcggcaaagccattcgcaaaatcatggacgaattcaaggtggacattcgcttcccacagagcggagccccagaccccaactgcgtcactgtgacggggctcccagagaatgtggaggaagccatcgaccacatcctcaatctggaggaggaatacctagctgacgtggtggacagtgaggcgctgcaggtatacatgaaacccccagcacacgaagaggccaaggcaccttccagaggctttgtggtgcgggacgcaccctggaccgccagcagcagtgagaaggctcctgacatgagcagctctgaggaatttcccagctttggggctcaggtggctcccaagaccctcccttggggccccaaacgataatgatcaaaaagaacagaaccctctccagcctgctgacccaaacccaaccacacaatggtttgtctcaatctgacccagcggctggaccctccgtaaattgttgacgctcttctcccttccc

SEQ ID NO: 114381 - DNA, 1756 bp, Homo Sapiens
ttgggctatggtggtggtggcagccgcgccgaacccggccgacgggacccctaaagttctgcttctgtcggggcagcccgcctccgccgccggagccccggccggccaggccctgccgctcatggtgccagcccagagaggggccagcccggaggcagcgagcggggggctgccccaggcgcgcaagcgacagcgcctcacgcacctgagccccgaggagaaggcgctgaggaggaaactgaaaaacagagtagcagctcagactgccagagatcgaaagaaggctcgaatgagtgagctggaacagcaagtggtagatttagaagaagagaaccaaaaacttttgctagaaaatcagcttttacgagagaaaactcatggccttgtagttgagaaccaggagttaagacagcgcttggggatggatgccctggttgctgaagaggaggcggaagccaaggggaatgaagtgaggccagtggccgggtctgctgagtccgcagcactcagactacgtgcacctctgcagcaggtgcaggcccagttgtcacccctccagaacatctccccatggattctggcggtattgactcttcagattcagagtctgatatcctgttgggcattctggacaacttggacccagtcatgttcttcaaatgcccttccccagagcctgccagcctggaggagctcccagaggtctacccagaaggacccagttccttaccagcctccctttctctgtcagtggggacgtcatcagccaagctggaagccattaatgaactaattcgttttgaccacatatataccaagcccctagtcttagagataccctctgagacagagagccaagctaatgtggtagtgaaaatcgaggaagcacctctcagcccctcagagaatgatcaccctgaattcattgtctcagtgaaggaagaacctgtagaagatgacctcgttccggagctgggtatctcaaatctgctttcatccagccactgcccaaagccatcttcctgcctactggatgcttacagtgactgtggatacgggggttccctttccccattcagtgacatgtcctctctgcttggtgtaaaccattcttgggaggacacttttgccaatgaactctttccccagctgattagtgtctaaggaatgatccaatactgttgcccttttccttgactattacactgcctggaggatagcagagaagcctgtctgtacttcattcaaaaagccaaaatagagagtatacagtcctagagaattcctctatttgttcagatctcatagatgacccccaggtattgtcttttgacatccagcagtccaaggtattgagacatattactggaagtaagaaatattactataattgagaactacagcttttaagattgtacttttatcttaaaagggtggtagttttccctaaaatacttattatgtaagggtcattagacaaatgtcttgaagtagacatggaatttatgaatggttctttatcatttctcttccccctttttggcatcctggcttgcctccagttttaggtcctttagtttgcttctgtaagcaacgggaacacctgctgagggggctctttccctcatgtatacttcaagtaagatcaagaatcttttgtgaaattatagaaatttactatgtaaatgcttgatggaattttttcctgctagtgtagcttctgaaaggtgctttctccatttatttaaaactaccc

SEQ ID NO: 114382 - DNA, 888 bp, Homo Sapiens
ctttgtacaaaaaagttggcggccagacggccggcaagacagctgggtgtacagcgtcctcgaaaccacgagcaagtgagcagatcctccgaggcaccagggactccagcccatgccatggcggattctgagcgcctctcggctcctggctgctgggccgcctgcaccaacttctcgcgcactcgaaagggaatcctcctgtttgctgagattatattatgcctggtgatcctgatctgcttcagtgcctccacaccaggctactcctccctgtcggtgattgagatgatccttgctgctattttctttgttgtctacatgtgtgacctgcacaccaagataccattcatcaactggccctggagtgatttcttccgaaccctcatagcggcaatcctctacctgatcacctccattgttgtccttgttgagagaggaaaccactccaaaatcgtcgcaggggtactgggcctaatcgctacgtgcctctttggctatgatgcctatgtcaccttccccgttcggcagccaagacatacagcagcccccactgaccccgcagatggcccggtgtaggcgaacttccctcatttctctctgcaatctgcaaataactcctccattgaaataactcctccccaccccaacaacaacattcccagcagaccaactcccaccccctctttgaggtaaaagtgcctttattgggagacttttgtcttccagcctgccaatcaaccctcctgggtgtggccaccatatgtgtgtgcctaggtcctccttctgcacgatccaaaggaaacacagttctgactgaaccatgcccccacctaagtccaaaagaaggaagtggggagtagatttcaaatccaggcctaggttgggacc

SEQ ID NO: 114383 - DNA, 707 bp, Homo Sapiens
ttggggcagagggcagggggctgggcaggtggaggtgcagggggtgggcttgacctgggaccaagggcacagatcaggcacgtgaggagtcaggggctcccatacactgtgggatccagaaagggctgggctttccttcctgagctgggggatcgggggacagggtctgggcggtcaggggccaaaccgcagcagggccggcagcaggctcagcagcagcccggcacccagcagggtgacgcttgcccgcagcccgccatcggccgcactgaaattgcacagaaagctctggcagcagctgatgcccatggaagccacaccaacattgacgccttctgggatggggcaggccggggaacaggtcttgctcaggctgtggccaaatgtcacgagattccctgcatgggaaatgaggcaatgccggcactagcagacacagtcacgcagtagttgtcctggtcggagcagatggtcggcttcaggcagtacagattgctcttctggttcaagcaggagaagcacatcagcgagctggctcgctccacacccagaagggcagccagcagcactggcaagaagatcttcattctggagaggatggccgtcctgcctggaggtcacaaaccaaagcagcctgtcctgctcgccgggcggacgcaggtaccagcagcctggccgagctccccgccaacttttttgtacaaagt

SEQ ID NO: 114384 - DNA, 1719 bp, Homo Sapiens
actttgtacaaaaaagttgggtgaaaaggttttgtgtacaccacctccaaaaataaaaaatggaaaacacacctttagtgaagtagaagtatttgagtatcttgatgcagtaacttatagttgtgatcctgcacctggaccagatccattttcacttattggagagagcacgatttattgtggtgacaattcagtgtggagtcgtgctgctccagagtgtaaagtggtcaaatgtcgatttccagtagtcgaaaatggaaaacagatatcaggatttggaaaaaaattttactacaaagcaacagttatgtttgaatgcgataagggtttttacctcgatggcagcgacacaattgtctgtgacagtaacagtacttgggatcccccagttccaaagtgtcttaaagtgtcgacttcttccactacaaaatctccagcgtccagtgcctcaggtcctaggcctacttacaagcctccagtctcaaattatccaggatatcctaaacctgaggaaggaatacttgacagtttggatgtttgggtcattgctgtgattgttattgccatagttgttggagttgcagtaatttgtgttgtcccgtacagatatcttcaaaggaggaagaagaaagggaaagcagatggtggagctgaatatgccacttaccagactaaatcaaccactccagcagagcagagaggctgaatagattccacaacctggtttgccagttcatcttttgactctattaaaatcttcaatagttgttattctgtagtttcactctcatgagtgcaactgtggcttagctaatattgcaatgtggcttgaatgtaggtagcatcctttgatgcttctttgaaacttgtatgaatttgggtatgaacagattgcctgctttcccttaaataacacttagatttattggaccagtcagcacagcatgcctggttgtattaaagcagggatatgctgtattttataaaattggcaaaattagagaaatatagttcacaatgaaattatattttctttgtaaagaaagtggcttgaaatcttttttgttcaaagattaatgccaactcttaagattattctttcaccaactatagaatgtattttatatatcgttcattgtaaaaagcccttaaaaatatgtgtatactactttggctcttgtgcataaaaacaagaacactgaaaattgggaatatgcacaaacttggcttctttaaccaagaatattattggaaaattctctaaaagttaatagggtaaattctctattttttgtaatgtgttcggtgatttcagaaagctagaaagtgtatgtgtggcatttgttttcactttttaaaacatccctaactgatcgaatatatcagtaatttcagaatcagatgcatcctttcataagaagtgagaggactctgacagccataacaggagtgccacttcatggtgcgaagtgaacactgtagtcttgtcgttttcccaaagagaactccgtatgttctcttacgttgagtaacccactctgaattctggttacatgtgtttttctctccctccttaaataaagagaggggttaaacatgccctctaaaagtagtggttttgaagagaataaattcatcagataacctcagtcacatgagatcttagtccatttacattgccttggctagtaaaagccatctatgtatatgtcttacctc

SEQ ID NO: 114385 - DNA, 989 bp, Homo Sapiens; identical to SEQ ID NO: 104525

SEQ ID NO: 114386 - DNA, 940 bp, Homo Sapiens; identical to SEQ ID NO: 104526

SEQ ID NO: 114387 - DNA, 1433 bp, Homo Sapiens
  misc_feature (1020)..(1043): n is a, c, g, or t
ttggctcaccatgagctttaggaccagaagaggaatgacaagtgaagcgatgaagcaagccatcttcacagagtagaaaagacatcggagagttggtagataactgtctgaaaagatagttgttcatttgaaactattctgtgatacagtcatgtgggaagggatgtttggctgtgattattttttcagttaatggataacaatttctttactgctcaaaaaccaaaatctttggaaaagaaagtggggatggttagtttcagaacaagttacagctgtaaacaaaagcacttagtatttgggatggcatgccaaaacctgtataaatgtccttgtatcacatcacttctcaagtattccttcattgggcttcatccttttagcagaactcttggtggtgggatagagacttagggagggtagggggagagtgtggaaataggtgcttcctttggctggcaaatgtctacatcttgaaacaaacagatgtacctaatgagcttctccattcactttgtaaaaataatttgtatgtgtaccatcttggtcctctcccctcccgttttgttaaaatatcaggatagcactcccaggccactttggtctcagtgtaagatccctattaactatctgaaaggaaaatagagccaagacctctggtctcaaatatataggaattgcctttctttagtcttcaggactattgtgtgaaaacaagtaggggtctaatctcctagaaggtaggggcttttatccttaaagagaatatgtccccagattattagcacttttagaggagaagccaaggtatgtagggtgtgtggctggcccatcagtggagcacgaagagagaatgggataccattgtgggaagagaagaaaagttcctcaggggcctcccactgctaaagttttttgtgagatgttgatctgtgcttcctggatttgacttttaaaggaattattctggcagcacatgtagtattcttggatgatcttgctgctcttatttctcctttnnnnnnnnnnnnnnnnnnnnnnnngctatgggttttcatttgtaactccatctgcttaggagagtgggctctctataagggaacctgctgtaaacttcattgcagcaaggatgtagagagaaataggacttaattccactagggctctcatctcacaccttaaggaggagatttctagaaaaactgggccagattttctttgttctccatcattttaatgtggcggctgttcagttttcttactcttacctatgtgatatttcttcgtaacgtgtccaaaaagaaaaaagacccaatcagtgtctcttgactttgttctttgatccctcagtttcttcttgatttcagcatgttgtcgggttcctaattttgggtatgagttagcaatttaacccattgtgtttgtgccctacc

SEQ ID NO: 114388 - DNA, 1359 bp, Homo Sapiens
  misc_feature (660)..(682): n is a, c, g, or t
  misc_feature (1147)..(1156): n is a, c, g, or t
tttgtacaaaaaagttgggcggggaaaatggctggacgggaaggcgggagacgagaagcctgaaaagtcgcagcgagctggagccgccggaggacctgaagaagaagcagaaaaacctgtgaaaactaagactgtttcttccagtaatggaggggaaagttccagtcgcagcgctgagaagcgatcagctgaagaagaagctgccgacctcccaacaaagcctacaaagatctccaagtttggatttgccataggtagtcagacgacaaagaaagcatcagccatatccatcaaacttggatcaagtaagcctaaagaaactgttccaactcttgctccaaaaactctttcagtagcagcagcttttaatgaagatgaagatagtgaaccagaggaaatgcctccagaagcaaagatgaggatgaagaatattggaagggatacaccaacatcagctggaccaaactccttcaataaaggaaagcatgggttttctgataaccagaagctgtgggagcgaaatataaaatctcatcttggaaatgtccatgaccaagacaattaaatgatgttttgaaattggggtgtggggtgggtgtaaagttaaaaggaacagtttccttttttaaagaatggtataagactatctttggagccgcnnnnnnnnnnnnnnnnnnnnnnnaaaagattgagtggtacactaataaatgagagtttgaaattagaggtaatttatgttttatatacagatttcaagacatttgctaattttgtagtttcatgtgattagtttccaaaggttacagataataaagaaatcagaaatggtacctttttaagaattgcatatttttttagacacaactattagcacattaagagggaagcaaagttactgtctatttaaaactgcaagcagttaactctcttaactcccttattacctaaacttgtctggctcccaggaacagccttatagagagagggagtattgtattgggaagaaaatgttactgaactattgactgaaagtaaatttagataaaatacagcttttttccttatgggcatttgttttgtttcaagtcatcataaactaggtattgcattgctatccgtggatacagacgcttagctcttaaaagannnnnnnnnnatgtaaactgttgaatatttgaaatagtccacttcaccttaatgggtcttgtctatcttcattagtcttcaaagaaaaccatttgctaccaaagtaaatcagtattttgaatgtgcttctcttgttttttgtttattagctagttcctgtagcatttccaccaaaccttgaggcaaatcgtaaggaagctgtttcctttaaac

SEQ ID NO: 114389 - DNA, 1020 bp, Homo Sapiens
ttgggggtcatatgttggtgaagattgtccccagtggatggtccctatcacaatctctactagtgaagaccccaaccaggccaaactaaaaattctaatggacaagccagagatgaatgtggttttgaaaaatgtcaaaccagaccaatgggtgaagttaaacttaggaacagttgggttttatcggacccagtacagctctgccatgctggaaagtttattaccaggcattcgtgacctttctctgccccctgtggatcgacttggattacagaatgacctcttctccttggctcgagctggaatcattagcactgtagaggttctaaaagtcatggaggcttttgtgaatgagcccaattatactgtatggagcgacctgagctgtaacctggggattctctcaactctcttgtcccacacagacttctatgaggaaatccaggagtttgtgaaagatgtcttttcacctataggggagagactgggctgggaccccaaacctggagaaggtcatctcgatgcactcctgaggggcttggttctgggaaaactaggaaaagcaggacataaggcaacgttagaagaagcccgtcgtcggtttaaggaccacgtggaaggaaaacagattctctccgctgatctgaggagtcctgtctatctgactgttttgaagcatggtgatggcactactttagatattatgttaaaacttcataaacaagcagatatgcaagaagagaaaaaccgaatcgaaagagtccttggcgctactcttttgcctgacctgattcaaaaagtcctcacgtttgcactttcagaagaggtacgtccacaggacactgtatcggtaattggtggagtagctggaggcagcaagcatggtaggaaagctgcttggaaattcataaaggacaactgggaagaactttataaccgataccagggaggattcttaatatccagactataaagctatcagttgagggatttgcagttgataaaatggctggagaggtt

SEQ ID NO: 114390 - DNA, 535 bp, Homo Sapiens; identical to SEQ ID NO: 104527

SEQ ID NO: 114391 - DNA, 919 bp, Homo Sapiens; identical to SEQ ID NO: 104528

SEQ ID NO: 114392 - DNA, 977 bp, Homo Sapiens
ttggttcattttaagaattattatgatctgaatgtactttgtaattttcttctggaaaacccagattatccaaagagagaagacagaatcattataaatcccagtagcagtctgctggccagccaagatgagacaaagttgcctaaaatagacttttttgactattctaaattgacccctcttgaccagcgctgcttcatccaagctgctgacctcctcatggccgacttcaaagtgctcagtagtcaggacatcaagtgggccctgcacgagctcaaaggacactatgcaatcacccgaaaggccttgtctgatgccattaaaaaatggcaggagctgtcaccagaaaccagtggaaaaaggaagaagagaaaacaaatgaaccagtattcttacattgatttcaagtttgaacaaggtgacataaaaatagaaaagaggatgttctttcttgaaaataagcgacgacattgtaggtcctatgaccgacgtgctctccttccagctgtgcaacaagagcaggagttctatgagcagaaaatcaaagagatggcagagcatgaagactttttgcttgccctacagatgaatgaagaacagtatcaaaaggatggccagctgattgagtgtcgctgctgctatggggaatttccattcgaggagctgacgcagtgcgcagatgctcacttgttctgcaaagagtgtctcatcagatatgcccaagaggcagtctttggatctggaaagttggagctcagctgcatggaaggcagctgcacgtgttcgttcccaaccagtgagctggagaagtgctcccccagaccatcctgtataagtactatgagcgaaaagccgaggaggaggttgcggcagcctacgccgacgagcttgtcagtgcccgtcctgtagctttccggctctgttggacagtgatgtgaagaggttcagctgtcctaatcctcactgccgaaaggaaa

SEQ ID NO: 114393 - DNA, 1239 bp, Homo Sapiens
ttttacatcactttggtaagtttttgtgcttggtccaggattcctccccagtgagaactaaaggcgggggatactgcccagcccagcttccttgacttgagagctcttagtttcaatggcatgccaatctccaccatctttgtctgtcaagtgtaactgtcccattggctcaggctcagctgcagctcagggtaatcttactagctacacaccaggggtggtccaggctgtactttaggctgcatgaaagtctcctggagatggaaagcattccaacccaatctgcccccaaccaaaagcaaaggcggcagatgagtggggcaacgggctggaagctgtagcatcacttgcaggtggcatagtagagcacgcgcccattgatgtggtcacggatctgctccacacgcttctccagtcctgtcaggtccgctgagcgcagcatgatggcctggctgccccgcagcagctccaactccatgtctttcatcctgtccatcatctccatggtctccccaaacagctcctctgcctctgtcttcacactctggatccgggcaccctgctcacccagcatggaactctgacccaaccggtccttcaactcagcatacttttgttttattctctcaaatccctcttgggcactcaatgcctgctcgctggcaccttccgcaagctgctgggcctggactgcctctgccccctgctgccgggcttggtggcggagctcctccatccgtgtccagaagtcacccagctgcttggtcatgcttgtcaccagcttttctgctggccgcagtacctgctgaacctcagcaaccctgtcctggataagccgaagggagcggctggtgccttgcatggtgtcctgagcttcctgcagtgccactgtcccctgccgcaggttcccaaccacatcttccacctggccctccactgcatgggctcggctcctggcttcctcagcctcagcctgcaaccggcgggcacgcgcaatgtcctgcttggtctgggacagcaccaagtccacgttggggagcctggctgcaatggcctggatctcattcatcttctgcagaacagtagctgagtctgtgggcagccacagggccagcacggcctcgctgacctcctggatagtggctgcatcagtgtcggggtctgttaggaagtcccggacctgctggattaggagccgtgtgcgtctgacatcttcctccatctgggagcggctgccaa

SEQ ID NO: 114394 - DNA, 892 bp, Homo Sapiens
actttgtacaaaaaagttggcggcaggagaggttgtggtgctagtttctctaagccatccagtgccatcctcgtcgctgcagcgacacacgctctcgccgccgccatgactgagcagatgacccttcgtggcaccctcaagggccacaacggctgggtaacccagatcgctactaccccgcagttcccggacatgatcctctccgcctctcgagataagaccatcatcatgtggaaactgaccagggatgagaccaactatggaattccacagcgtgctctgcggggtcactcccactttgttagtgatgtggttatctcctcagatggccagtttgccctctcaggctcctgggatggaaccctgcgcctctgggatctcacaacgggcaccaccacgaggcgatttgtgggccataccaaggatgtgctgagtgtggccttctcctctgacaaccggcagattgtctctggatctcgagataaaaccatcaagctatggaataccctgggtgtgtgcaaatacactgtccaggatgagagccactcagagtgggtgtcttgtgtccgcttctcgcccaacagcagcaaccctatcatcgtctcctgtggctgggacaagctggtcaaggtatggaacctggctaactgcaagctgaagaccaaccacattggccacacaggctatctgaacacggtgactgtctctccagatggatccctctgtgcttctggaggcaaggatggccaggccatgttatgggatctcaacgaaagcaaacacctttacacgctagatggtggggacatcatcaacgccctgtgcttcagccctaaccgctactggctgtgtgctgccacaggccccagcatcaagatctgggattagaggg

SEQ ID NO: 114395 - DNA, 418 bp, Homo Sapiens
ctttgtacaaaaaagttggacggtgaggtcaaattcacattctcaggaactctccttctttgggtctggctgaagttgaggatctcttactctctaggccacggaattaacccgagcaggcatggaggcctctgctctcacctcatcagcagtgaccagtgtggccaaagtggtcagggtggcctctggctctgccgtagttttgcccctggccaggattgctacagttgtgattggaggagttgtggccatggcggctgtgcccatggtgctcagtgccatgggcttcactgcggcgggaatcgcctcgtcctccatagcagccaaaatgatgtccgcggcggccattgccattgggggtggagttgcctcgggcagccttgtggctactctgcagtcactgggagcaactggactc

SEQ ID NO: 114396 - DNA, 1651 bp, Homo Sapiens
ttggagctgcccgccgagtctccgagatttgtccctggtggtcccgcggacccctcgtccctccgcagtctccggctggcagcgatggagggcgctggggagaacgccccggagtccagctcctctgcccctgggtccgaagagtctgccagggatccacaggtgccgcctccggaggaagaatcgggggactgcgcccggtccctggaggcggtccccaagaaactctgtgggtatttaagtaagttcggcggcaaagggcccatccggggctggaaatcccgctggttcttctacgacgaaaggaaatgtcagctgtattactcgcggaccgctcaggatgccaatcccttggacagcatcgacctctccagtgcagtgtttgactgtaaggcggacgctgaggaggggatcttcgaaatcaagactcccagccgggttattaccctgaaggccgccaccaagcaagcgatgctgtactggctgcagcagctgcagatgaagcgctgggaattccacaacagcccgccggcacctcctgccacccctgatgccgccctggctgggaatgggcccgtcctgcacctcgagctagggcaagaagaggcagagctggaggagttcctgtgccctgtgaaaacaccccctgggctagtgggcgtggcagctgccttgcagcccttccctgcccttcagaatatttccctcaagcacctggggactgaaatacagaacacaatgcacaacatccgtggcaacaagcaggcccagggaacaggccatgaacctccaggggaagattctccacagagtggggagcctcagagggaggagcagccctcggcctctgacgccagcaccccagggagagagccagaggattctccaaagcctgcacccaagccttctctgaccatcagtttcgctcagaaagccaagcgccagaacaacaccttcccattcttttctgaaggaatcacacggaaccgaactgcccaggagaaagtggcagccttggagcaacaggttctgatgctcaccaaggagttaaagtctcagaaggagctagtgaagatcctgcacaaggcactggaggccgcccagcaggagaagcgggcgtccagcgcatacctggcggcggctgaggacaaggaccggctggagctggtgcggcacaaagtgcggcagatcgcggagctgggccggcgggtggaggccctggagcaggagcgggagagcctggcgcacacagcgagcctgcgggagcagcaggtgcaggagctacagcagcacgtgcagctgcttatggacaagaaccacgccaagcagcaggtcatctgcaagctctctgagaaggtcacccaggacttcacgcacccccctgaccagtctcctttgcgccccgacgctgccaacagggacttcctgagccagcatggaagatagagcacctgaaggatgacatggaagcttaccggacccagaactgcttcctcaactccgagatccaccaggtcacaaagatctggagaaaagtggctgagaaagagaagcccttctgacgaagtgcgcctacctccaagccagaaactgccaggtggaaagcaagtacctggcccggtctgagaaagctgcagaaggccctggggga

SEQ ID NO: 114397 - DNA, 881 bp, Homo Sapiens
aaaagaccaggctggcacagtcacctgggtgttgaatgccttttcagtgaggttctcaatcttctcctcaaagctagaaagaaactcttctatcttcttatcaacaatttcagaactgaaacaaaacatcttcaatcagaactaaaacaaaacatcttcaattaagtcatcagaaacccgatctcaggcagaaggcaaaagaaggaattaagactaagacatatatccaggaaaaaaagctaaagtgttttcccaggcctcagtattccacctgactttgaggacagaaagagaaagaaccctccccctcaccccacctccagcccagtttcctggtatcctcataatgaagcagtcacaaccatgtatgaccattccaaagctgaaaactaacaggtttcagcaatgcctgtcagatcaggcatcctttcccttcttgtcctcaggtctgcctgaagagaagaaacactggcaagccccacacaatgaccacaggacttgaatcaagtctgaaagggccactggaactattgatcagtcctggaacagaccatctataacaacccccatcttcccagcttccactgactaaatagagcaaacctgcttggtcagggttgcccaaggtttaaggaaacacatgtagcccctactctccatgtccataataggttacactcatctattcactcactcactcacttgtatttggttgcctgagtccccacagtgacagaaaatcctagaatcccggatgtgttcctacaggtagggtagacatggtacccaagggtctgcttggttcgaaggaagtcaaaacaaggttcttccatgtgcatcacaagcagctccataagcgtatattctcttagactccccaa

SEQ ID NO: 114398 - DNA, 924 bp, Homo Sapiens
ttggacctcctcccgccaggcgctttctcggacgccttgcccagcgggccgcccgaccccctgcaccatggaccccgctcgccccctggggctgtcgattctgctgcttttcctgacggaggctgcactgggcgatgctgctcaggagccaacaggaaataacgcggagatctgtctcctgcccctagactacggaccctgccgggccctacttctccgttactactacgacaggtacacgcagagctgccgccagttcctgtacgggggctgcgagggcaacgccaacaatttctacacctgggaggcttgcgacgatgcttgctggaggatagaaaaagttcccaaagtttgccggctgcaagtgagtgtggacgaccagtgtgaggggtccacagaaaagtatttctttaatctaagttccatgacatgtgaaaaattcttttccggtgggtgtcaccggaaccggattgagaacaggtttccagatgaagctacttgtatgggcttctgcgcaccaaagaaaattccatcattttgctacagtccaaaagatgagggactgtgctctgccaatgtgactcgctattattttaatccaagatacagaacctgtgatgctttcacctatactggctgtggagggaatgacaataactttgttagcagggaggattgcaaacgtgcatgtgcaaaagctttgaaaaagaaaaagaagatgccaaagcttcgctttgccagtagaatccggaaaattcggaagaagcaattttaaacattcttaatatgtcatcttgtttgtctttatggcttatttgcctttatggttgtatctgaaaataatatgacagcatgaggaaacaaatcattggtgatttattcaccagtttttattaataccaagtcactttttcaaaaatttgg

SEQ ID NO: 114399 - DNA, 1084 bp, Homo Sapiens
ctttgtacaaaaaagttgggccgccgggggtcccctgcaagctgttccgcgcgtcctgcccgtctgtccccgcgggtcgtcgcccgccacagccgcgccatgaccacccagcagatagacctccagggcccggggccgtggggcttccgcctcgtgggcggcaaggacttcgagcagcctctcgccatttcccgggtcactcctggaagcaaggcggctctagctaatttatgtattggagatgtaatcacagccattgatggggaaaatactagcaatatgacacacttggaagctcagaacagaatcaaaggctgcacagacaacttgactctcactgtagccagatctgaacataaagtctggtctcctctggtgacggaggaagggaagcgtcatccatacaagatgaatttagcctctgaaccccaggaggtcctgcacataggaagcgcccacaaccgaagtgccatgccctttaccgcctcgcctgcctccagcactactgccagggtcatcacaaaccagtacaacaacccagctggcctctactcttctgaaaatatctccaacttcaacaatgccctggagtcaaagactgctgccagcggggtggaggcgagcagcagacccttagaccatgctcagcctccaagcagccttgtcatcgacaaagaatctgaagtttacaagatgcttcaggagaaacaggagttgaatgagcccccgaaacagtccacgtctttcttggttttgcaggaaatcctggagtctgaagaaaaaggggatcccaacaagccctcaggattcagaagtgttaaagctcctgtcactaaagtggctgcgtcgattggaaatgctcagaagttgcctatgtgtgacaaatgtggcactgggattgttggtgtgtttgtgaagctgcgggaccgtcaccgccaccctgagtgttatgtgtgcactgactgtggcaccaacctgaaacagaagggccatttctttgtggaggatcaaatctactgtgagaagcatgcccgggagcgagtcacaccaacctgagggttatgaagtggtcactgtgttcccc

SEQ ID NO: 114400 - DNA, 944 bp, Homo Sapiens
caactttgtacaaaaaagttggcgccattattacgcgtccttgcctaccgcaacaccgcccagcgccaggagatcaggacagcctacaagagcaccatcggcagggacttgatagacgacctgaagtcagaactgagtggcaacttcgagcaggtgattgtggggatgatgacgcccacggtgctgtatgacgtgcaagagctgcgaagggccatgaagggagccggcactgatgagggctgcctaattgagatcctggcctcccggacccctgaggagatccggcgcataagccaaacctaccagcagcaatatggacggagccttgaagatgacattcgctctgacacatcgttcatgttccagcgagtgctggtgtctctgtcagctggtgggagggatgaaggaaattatctggacgatgctctcgtgagacaggatgcccaggacctgtatgaggctggagagaagaaatgggggacagatgaggtgaaatttctaactgttctctgttcccggaaccgaaatcacctgttgcatgtgtttgatgaatacaaaaggatatcacagaaggatattgaacagagtattaaatctgaaacatctggtagctttgaagatgctctgctggctatagtaaagtgcatgaggaacaaatctgcatattttgctgaaaagctctataaatcgatgaagggcttgggcaccgatgataacaccctcatcagagtgatggtttctcgagcagaaattgacatgttggatatccgggcacacttcaagagactctatggaaagtctctgtactcgttcatcaaggggtgacacatctggagactacaggaaagtactgcttgttctctgtggaaggagatgattaaaataaaaatcccagaaggacaggaggattctcaacactttgaatttttttaccttcatttttc

SEQ ID NO: 114401 - DNA, 643 bp, Homo Sapiens
ctttgtacaaaaaagttgggcccagagaccacaccagagaacccaccatggccccctttgagcccctggcttctggcatcctgttgttgctgtggctgatagcccccagcagggcctgcacctgtgtcccaccccacccacagacggccttctgcaattccgacctcgtcatcagggccaagttcgtggggacaccagaagtcaaccagaccaccttataccagcgttatgagatcaagatgaccaagatgtataaagggttccaagccttaggggatgccgctgacatccggttcgtctacacccccgccatggagagtgtctgcggatacttccacaggtcccacaaccgcagcgaggagtttctcattgctggaaaactgcaggatggactcttgcacatcactacctgcagttttgtggctccctggaacagcctgagcttagctcagcgccggggcttcaccaagacctacactgttggctgtgaggaatgcacagtgtttccctgtttatccatcccctgcaaactgcagagtggcactcattgcttgtggacggaccagctcctccaaggctctgaaaagggcttccagtcccgtcaccttgcctgcctgcctcgggagccagggctgtgcacctg

SEQ ID NO: 114402 - DNA, 1561 bp, Homo Sapiens; identical to SEQ ID NO: 104529

SEQ ID NO: 114403 - DNA, 885 bp, Homo Sapiens; identical to SEQ ID NO: 104530

SEQ ID NO: 114404 - DNA, 968 bp, Homo Sapiens; identical to SEQ ID NO: 104531

SEQ ID NO: 114405 - DNA, 713 bp, Homo Sapiens
tttgtacaaaaaagttgggagaagccatgagcagcaaagtctctcgcgacaccctgtacgaggcggtgcgggaagtcctgcacgggaaccagcgcaagcgccgcaagttcctggagacggtggagttgcagatcagcttgaagaactatgatccccagaaggacaagcgcttctcgggcaccgtcaggcttaagtccactccccgccctaagttctctgtgtgtgtcctgggggaccagcagcactgtgacgaggctaaggccgtggatatcccccacatggacatcgaggcgctgaaaaaaactcaacaagaataaaaaactggtcaagaagctggccaagaagtatgatgcgtttttggcctcagagtctctgatcaagcagattccacgaatcctcggcccaggtttaaataaggcaggaaagttcccttccctgctcacacacaacgaaaacatggtggccaaagtggatgaggtgaagtccacaatcaagttccaaatgaagaaggtgttatgtctggctgtagctgttggtcacgtgaagatgacagacgatgagcttgtgtataacattcacctggctgtcaacttcttggtgtcattgctcaagaaaaactgggcagaatgtccgggccttatatatcaagagcaccatgggcaagcccccagcgcctatattaaagcacatttgaataaattctattaccagtt

SEQ ID NO: 114406 - DNA, 1033 bp, Homo Sapiens
tttgtacaaaaaagttgggtcatcttcgggagccgtggaggtacgaacttaagacatgcctattttattaatttacttccaaacgcaacgaaaggtccatggacaatttgtgggccatttaattcagggcccccaattcgtacgtggagaagtgggaatgcaaaagtactttgacctttaaccttcggtccggcgcggtggagggaaacgcctccgtctctatataaggaattttccggtctcttcgggtcctttttcctctcttcagcgtggggcgcccacaatttgcgcgctctctttctgctgctccccagctctcggatacagccgacaccatgggtttcggagacctgaaaagccctgccggcctccaggtgctcaacgattacctggcggacaagagctacatcgaggggtatgtgccatcacaagcagatgtggcagtatttgaagccgtgtccagcccaccgcctgccgacttgtgtcatgccctacgttggtataatcacatcaagtcttacgaaaaggaaaaggccagcctgccaggagtgaagaaagctttgggcaaatatggtcctgccgatgtggaagacactacaggaagtggagctacagatagtaaagatgatgatgacattgacctctttggatctgatgatgaggaggaaagtgaagaagcaaagaggctaagggaagaacgtcttgcacaatatgaatcaaagaaagccaaaaaacctgcacttgttgccaagtcttccatcttactagatgtgaaaccttgggatgatgagacagatatggcgaaattagaggagtgcgtcagaagcattcaagcagacggcttagtctggggctcatctaaactagttccagtgggatacggaattaagaaacttcaaatacagtgtgtagttgaagatgataaagttggaacagatatgctggaggagcagatcactgcttttgaggactatgtgcagtccatggatgtggctgctttcaacaagatctaaaatccatcctggatcatggc

SEQ ID NO: 114407 - DNA, 908 bp, Homo Sapiens
acaaaaaagttggtgaaggtgacggcgtcgagcttgacattcagggacgtggccatcgaattctctcaagatgagtggaaatgcctgaactctacacagaggactttatacagggatgtgatgttggagaactacaggaacctggtctccctggatccatctgtgatagcctctcttcttatccaagcaaagggctgagattcttgaaaagccacagcacatcatgttccattcattttataagcgggaaattctcttcctgaccagagtattatcctatgtgggagcacaggaaagagccctggaccatagaaagccaagtacgagtagcaagaaaaccaaaagggtgggaatggatcaaaggtgtgaaaacagatctgtctcgtaactgtgtaatcaaggaactagcaccacaacaggaaggtaacccaggagaagtattccacacagtgacattggaacaacatgaaaaacatgacattgaagagttttgcttcagggaaatcaagaaaaaaatacacgactttgactgtcagtggagagatgacgaaagaaattgcaacaaagtgactacggccccaaaagaaaatcttacttgtaggagagaccaacgcgatagaagaggtataggaaacaagtctattaaacatcagcttggattaagctttctaccacatccccatgaactgcagcagtttcaagctgaaagggaaaatttatgaatgtaaccatgttgagaagtctgtcaaccatggttcctcagtttcaccaccccaaatactttcttctaccgtcaaaacccatgtttctaataaatgtgggactgatttcatctgttcttcattactcacacaagaacagaaatcatgcattagggaaaaccttacagatatattgagtgcgacaaa

SEQ ID NO: 114408 - DNA, 1695 bp, Homo Sapiens
ttttaaaaggcatgtgcccattaacgtcattcgaggagagggaagagcccctttcttcttcctcctttactatgaattcgtgtttggggtgggccagaaattagcacttttaatatttcagagaagtccaaagtgttaaaaaaagtcttttatgcaaaagaacgtctttctgcatcagtgaatagtaatgctcatcagaaatttctaatagcacaaaaaacaaagccaagtctatacatttgatcagatatcaaagtaatgggaggtggactattatgtcaaccttagtcagagctcctgctggcttcttcctatacactgttcaccaatttgagtaaagtggactttgtgagagaattatgtttgatggccaggacctcttttgggcatttcttcctaagtggaatacacaacagataagggagtaggggaggtaatacagggaagctactctttccagctcagaaggagttgatgaagcccatatatgcattcaagaagcccatgggatcctctagctgtggatagtggctaatgtggtcatccagaatcgacactgtggaccgcggcagcgttttcctgtacagctccaaaaactctggatagggatttacaggatccaatggcccatagataaaatgaatggggatagttacagaggcaagagctcccacccagcgccttctgaacttcttcctctgattgatgtactgtaagagactgtcaatgactaagttcccgtcattgttgcggatccctgcccacatgtcccacagctcactctcagagggccgagtatacggcccaaagactggggtgagacctcgagagaatacaaagaagttcatcagtcgtgtgaggatgggtgacagcacacctccatctttgagtagcttttggagaaggagtggacggtgagtctcaggaaagatacctccatttgacagacagagactctttatggtaagccgaccagatcgattctgcttgtacctgtagagaagctcttgagcaacaatatctccatagtcatgagaaagaaggttgatcctgcggttctggagccccagatgccgcaaaagcgcttccacgatgctggcctgctcaaatatggaatagtgatgtggtctcggtttgtcactgaagccaaagcctaagaaatcaagggcaatcacccgatgaaacctcaaggtcagaccttcccaaatcttgtaccagtcgtagctggatgttggaaaaccgtgtaaaagcacaactatctctggacttccaaccacacccacagagtcttggtagaagatacgcagtcccttgtaagtgaaaaacttgcctgaagacttccatgagtgaagggcaggggagagctgagggggtgggatgtgcaggtacgcagcaagcaggggcacggccagcagccccacctggacccaccactccctcatcctgcggaggcgatctcggcgcaccatggccgcgttatcccatgccgcccgccgcagcgttgcagagcaccgggcgccgcagagcccgcagccgtgcagagctggccagcagcgggggcgcagcccgcagcccacagcccgcgcagggcggcgccgcgccgggcagctacagccactccggcgtgcgctgcggcactgcgcttgcgaggcgcagctgccgcagaggaggtgccggggtgccaacttttttgta

SEQ ID NO: 114409 - DNA, 960 bp, Homo Sapiens
actttgtacaaaaaagttggccggatctcattgccacgcgcccccgacgaccgcccgacgtgcattcccgattccttttggttccaagtccaatatggcaactctaaaggatcagctgatttataatcttctaaaggaagaacagaccccccagaataagattacagttgttggggttggtgctgttggcatggcctgtgccatcagtatcttaatgaaggacttggcagatgaacttgctcttgttgatgtcatcgaagacaaattgaagggagagatgatggatctccaacatggcagccttttccttagaacaccaaagattgtctctggcaaagactataatgtaactgcaaactccaagctggtcattatcacggctggggcacgtcagcaagagggagaaagccgtcttaatttggtccagcgtaacgtgaacatctttaaattcatcattcctaatgttgtaaaatacagcccgaactgcaagttgcttattgtttcaaatccagtggatatcttgacctacgtggcttggaagataagtggttttcccaaaaaccgtgttattggaagcggttgcaatctggattcagcccgattccgttacctaatgggggaaaggctgggagttcacccattaagctgtcatgggtgggtccttggggaacatggagattccagtgtgcctgtatggagtggaatgaatgttgctggtgtctctctgaagactctgcacccagatttagggactgataaagataacgaacagtggaaagaggttcacaagcacgtggttgagagtgcttatgaggtgatcaaactcaaaggctacacatcctgggctattggactctctgtagcagatttggcagagagtataatgaagaatcttaggcgggtgcacccagtttccaccatgattaaggtctttacggataaaggatgatgtcttcctta

SEQ ID NO: 114410 - DNA, 217 bp, Homo Sapiens
gtacaaaaaagttggggagctggtgctgataacagcggaatcccccgtctacctctctccttggtcctggaacagcgctactgatcaccaagtagccacaaaatataataaaccctcagcacttgctcagtagttttgtgaaagtctcaagtaaaagagacacaaaacaaaaaattctttttcgtgaagaactccaaaaataaaattctctagagat

SEQ ID NO: 114411 - DNA, 963 bp, Homo Sapiens
ggagcaacttaggtaaaggtagaggaggtatttaacgggggcattctctggagagcttgctttcctgctggccaatacaatctgccaaagaaaattagcagcctttccctttatgtttgtgccatttccttatcaaagaatgtctctgtgacactgaaacatgggggtgagtcgagggtccttgcgcgcagagaatcgtgcattgtatcagaaaaaaggggtctccagtggcttgtaaatctgggaaaaactcttcagccatcattggcgtcttctttattaatctgaaaattttccttttcagctccctcttcttggtattacagaatttcatacttatccactaggaaagtggtctctgtggaaaacctgacggggctgtttccatctacctgggtcactttggtaacctgtatgttacagtaatttttcttggagacaaaggaaacttgaacagggaagaagtcattgggctgcccagcaatgctaaactccaggctgccactcttatttttggcatcaatcacaggcaggcaccactccagggtatttcgtcgactgtcatgtcgatactccccatcgatctcaccgataacaggcgcgccgacaccagacgggagtgggatggtgataaccacatcattcagttctaaattatcttcttgtagctcatattctatgttgacatcacagccatttccactctccgagggccagcaattaattgtcagtggaataaaagattcctctgtggtttgtagtctccactttagcacccctacgtcactgttgactggaaatgacttctctggattcttcaggccaattagagactctgcagtgaaaagttttttatccacatttggatgggtctgtagctgcacccctttcttatcttcattttccacatgaagacgaattcggccatacttgtcatctgagatcctaagcatgatcatccaa

SEQ ID NO: 114412 - DNA, 860 bp, Homo Sapiens
actttgtacaaaaaagttggagaacaggcaggttccctcgacccaggaccccctgttcccaggctatggcccccagtgccctgtagacctggcaggccccccgtgcttgcgacccctatttgggggtctgggtggctactggagggccttgcagaggggcagagaaggcaggaccatgacatctagggcctctgaactttctccggggcgcagcgtgacggctggcatcatcattgttggagatgagatccttaagggacacactcaggacaccaacaccttctttctgtgccggacactgcgctccctaggggtccaggtttgccgagtctcagttgtacctgatgaggtagccaccattgcagctgaggtcacttctttctccaaccgcttcacccatgtcctcacagcagggggcatcggccccactcatgatgatgtgacctttgaggcagtggcacaggcctttggagatgagctgaagccacaccccaagttggaagcagccaccaaagccctaggaggggaaggctgggagaagctatcattggtgccctcctctgcccgcctgcattatggcacagatccttgcactggtcaacctttcagattccctctggtctccgtccgaaacgtctacctcttcccaggcattccagagctgctgcggcgggtgctggaggggatgaagggactattccaaaacccagctgttcagttccactcaaaggagctatatgtggctgctgatgaagcctccatcgcccccattctggctgaagcccaggcccacttttggacgtaagcttggcctgggttcctaccctgactggggcagcaactactatcagtgaagctga

SEQ ID NO: 114413 - DNA, 1001 bp, Homo Sapiens
ctttgtacaaaaaagttggcagggtcgcccccggcaaccacgagcccagccaatcagcgccccggactgcaccagagccatggtcggcagaagagcactgatcgtactggctcactcagagaggacgtccttcaactatgccatgaaggaggctgctgcagcggctttgaagaagaaaggatgggaggtggtggagtcggacctctatgccatgaacttcaatcccatcatttccagaaaggacatcacaggtaaactgaaggaccctgcgaactttcagtatcctgccgagtctgttctggcttataaagaaggccatctgagcccagatattgtggctgaacaaaagaagctggaagccgcagaccttgtgatattccagttccccctgcagtggtttggagtccctgccattctgaaaggctggtttgagcgagtgttcataggagagtttgcttacacttacgctgccatgtatgacaaaggacccttccggagtaagaaggcagtgctttccatcaccactggtggcagtggctccatgtactctctgcaagggatccacggggacatgaatgtcattctctggccaattcagagtggcattctgcatttctgtggcttccaagtcttagaacctcaactgacatatagcattgggcacactccagcagacgcccgaattcaaatcctggaaggatggaagaaacgcctggagaatatttgggatgagacaccactgtattttgctccaagcagcctctttgacctaaacttccaggcatgattcttaatgaaaaaagaggtacaggatgaggagaaaaacaagaaatttggcctttctgtgggccatcacttgggcaagtccatcccaactgacaaccagatcaaagctagaaaatgaaattccttagcctggatttccttctaacatgttatcaaatctgggtatctttccaggcttccctgacttgctttagtttttaagattttgtgttttt

SEQ ID NO: 114414 - DNA, 612 bp, Homo Sapiens
actttgtacaaaaaagttgggggagaaatgacttgccaggaacccctgttaaggaaaattaacaaagtgtggttattaaagaagaactgagttgggagtcagacctggaggcccgcacccgtggttaagacattataccaccttgagtctggcctgttgactgagggtgagccactccatcctcatgtgattgtggggtcttaacctcaaggggtttcctgcaggaagaagcaaatgggtttgctttcctagctctgtccagtacgttagggaccctgaggactgaagagattcttggagagccatctggtgtatgtcatgggtgggtctttttggaaggtcagactgcccagtgggctggctcagcccaaatgaactgtcttgaatctttggagttgtctgtgtacttttaagggcttctcagccttgcaccaaaagatccccctggaaattaggtgggaaaaaccttaacttttgtggggccttgtgtttgtcttaaaagttcatgcacatagccaggtgtggtggctcccacctgttatcctttcctggatcccttgagtcaaggagtttgagaccaacctggacaatatagtgagaccccatctctac

SEQ ID NO: 114415 - DNA, 1580 bp, Homo Sapiens
  misc_feature (681)..(689): n is a, c, g, or t
  misc_feature (1132)..(1175): n is a, c, g, or t
ttggctctatgaagactttaaagcccaaataatcatttttcacattgatattcaagaattgagatagatagaagccaaagtgggtatctgacaagtggaaaatcaaacgtttaagaagaattacaactctgaaaagcatttatatgtggaacttctcaaggagcctcctggggactggaaagtaagtcatcagccaggcaaatgactcatgctgaagagagtccccatttcagtcccctgagatctagctgatgcttagatcctttgaaataaaaattatgtctttataactctgatcttttacataaagcagaagaggaatcaactagttaattgcaaggtttctactctgtttcctctgtaaagatcagatggtaatctttcaaataagaaaaaaataaagacgtatgtttgaccaagtagtttcacaagaatatttgggaacttgtttcttttaattttatttgtccctgagtgaagtctagaaagaaaggtaaagagtctagagtttattcctctttccaaaacattctcattcctctcctccctactcttagtatttcccccacagagtgcctagaatcttaataatgaataaaataaaaagcagcaatatgtcattaacaaatccagacctgaaagggtaaagggtttataactgcactaataaagagaggctcnnnnnnnnncttccagtttgttggtttttaatggtaccgtgttgtaaagatacccactaatggacaatcaaattgcagaaaaggctcaatatccaagagacagggactaatgcactgtacaatctgcttatccttgcccttctctcttgccaaagtgtgcttcagaaatatatactgctttaaaaaagaataaaagaatatccttttacaagtggctttacatttcctaaaatgccataagaaaatgcaatatctgggtactgtatggggaaaaaaatgtccaagtttgtgtaaaaccagtgcatttcagcttgcaagttactgaacacaataatgctgttttaattttgttttatatcagttaaaattcacaataatgtagatagaacaaattacagacaaggaaagaaaaaacttgaatgaaatggattttacagaaagctttatgatannnnnnnnnnnnnnnnnnnnnnnnnnnnnnnnnnnnnnnnnnnnctcaccaaatgaccttacctgtaatacagtcttgtttgtctgtttacaaccatgtatttattgcaatgtacatactgtaatgttaattgtaaattatctgttcttattaaaacatcatcccatgatgggatggtgttgatatatttggaaactcttggtgagagaatgaatggtgtgtatacatactctgtacatttttcttttctcctgtaatatagtcttgtcaccttagagcttgtttatgggaagattcaagaaaactataaaatacttaaagatatataaatttaaaaaaacatagctgcaggtctttggtcccagggctgtgccttaactttaaccaatattttcttctgttttgctgcatttgaaaggtaacagtggagctagggctgggcattttac

SEQ ID NO: 114416 - DNA, 925 bp, Homo Sapiens
tacaaaaaagttggggctaagcaaggctgacctgctgcagctcccgcctcgtgcgctcgccccacccggccgccgcccgagcgctcgagaaagtcctctcgggagaagcagcgcctgttcccggggcagatccaggttcaggtcctggctataagtcaccatggcacagcaagctgccgataagtatctctatgtggataaaaacttcatcaacaatccgctggcccaggccgactgggctgccaagaagctggtatgggtgccttccgacaagagtggctttgagccagccagcctcaaggaggaggtgggcgaagaggccatcgtggagctggtggagaatgggaagaaggtgaaggtgaacaaggatgacatccagaagatgaacccgcccaagttctccaaggtggaggacatggcagagctcacgtgcctcaacgaagcctcggtgctgcacaacctcaaggagcgttactactcagggctcatctacacctattcaggcctgttctgtgtggtcatcaatccttacaagaacctgcccatctactctgaagagattgtggaaatgtacaagggcaagaagaggcacgagatgccccctcacatctatgccatcacagacaccgcctacaggagtatgatgcaagaccgagaagatcaatccatcttgtgcactggtgaatctggagctggcaagacggagaacaccaagaaagtcatccagtatctggcgtacgtggcgtcctcgcacaagagcaagaaagaccagggcgagctggagcggcagctgctgcaagccaaccccatcctggaggccttcgggaacgccaagaccgtgaagaatgacaactcctcccgcttcggcaaattcattcgcatcaactttgatgtcaatggctacattgttgggagccaacattga

SEQ ID NO: 114417 - DNA, 973 bp, Homo Sapiens
actttgtacaaaaaagttggcgcggctggtcactgtgcaggcgcttgggtgacgcgacgatctcagcggatctggtcaccttcgtctccccgccatggagacctcagcactcaagcagcaggagcagcccgcggcgaccaagatcaggaacctgccctgggttgaaaaataccggccacagaccctgaatgatctcatttctcatcaggacattctgagtaccattcagaagtttatcaatgaagaccgactgccacacttgcttctctacggtcccccagggacaggcaagacatctaccatcctagcctgtgcgaaacagctatataaagacaaagaatttggctccatggtcttggagctgaatgcttcagatgaccgaggaatagacatcattcgaggaccgatcctgagctttgctagcacaaggacaatatttaagaaaggctttaagctagtgatcttggatgaagcagacgccatgactcaggacgcccagaatgccttgagaagagtaattgagaaattcacagaaaataccagattctgcctcatctgtaactatctgtcaaagatcatccctgccttgcagtcccgctgcacgaggtttcggttcggtcccctgactcctgaactcatggttccccgcctggaacatgtcgtggaagaagagaaagttgatataagtgaagatggaatgaaagcactagtcactctttccagtggagacatgcgtagggctctgaacattttgcagagcaccaatatggcctttgggaaggtgacagaggagactgtctacacctgcaccgggcacccgctcaagtcagacattgccaacatcctggactggatgttgaatcaagatttcaccacagcctacagaaatattacagagttgaaaactctgaaggggttggcactgcatgatatcctgacagagatacacttgtttgtgcatagagttgacttt

SEQ ID NO: 114418 - DNA, 937 bp, Homo Sapiens
agcaatgctttctttaaaagggcccactttgtacaaaaaagttggggaacatttctgtaccctactggtttgaccagagccttagtaagtacgtgcctgaaactgaaaccatgtgcactttaatggaaggtaagctgaacttctttcttttcaaacctagatgtatcggcaagcagtgtaaacggaggacttggggaaaaaggaccacatagtccatcgaagaagagtccttggaacaagcaactggctattgaaaaggttattttgtaacatttgtctaactttttacttgtttaagctttgcctcagttggcaaacttcattttatgtgccattttgttgctgttattcaaatttcttgtaatttagtgaggtgaacgacttcagatttcattattggatttggatatttgaggtaaaatttcattttgttatatagtgctgactttttttgtttgaaattaaacagattggtaacctaatttgtggcctcctgacttttaaggaaaacgtgtgcagccattacacacagcctaaagctgtcaagagattgactcggcattgccttcattccttaaaattaaaaacctacaaaagttggtgtaaatttgtatatgttatttaccttcagatctaaatggtaatctgaacccaaatttgtataaagacttttcaggtgaaaagacttgattttttgaaaggattgtttatcaaacacaattctaatctcttctcttatgtatttttgtgcactaagcgcagttgtgtaacagttgagtaatgctggttagctgttaaggtggcgtgttgcagtgcagagtgcttggctgtttcctgttttctcccgattgctcctgtgtaaagatgccttgtcgtgcaaaaacaaatggctgtccagtttattaaatgcctgacactgcacttccagtcacccggg

SEQ ID NO: 114419 - DNA, 914 bp, Homo Sapiens
aaaaaagttggctggattgccaacaaactcaattttggcctggccttctcccttaatggagtagagctcctgcacctcaacaatgtcagcactggctgcatcctgctgggcggactcttcatctacgatgtcttctgggtatttggcaccaatgtgatggtgacagtggccaagtccttcgaggcaccaataaaattggtgtttccccaggatctgctggagaaaggcctcgaagcaaacaactttgccatgctgggacttggagatgtcgtcattccagggatcttcattgccttgctgctgcgctttgacatcagcttgaagaagaatacccacacctacttctacaccagctttgcagcctacatcttcggcctgggccttaccatcttcatcatgcacatcttcaagcatgctcagcctgccctcctatacctggtccccgcctgcatcggttttcctgtcctggtggcgctggccaagggagaagtgacagagatgttcagttatgaggagtcaaatcctaaggatccagcggcagtgacagaatccaaagagggaacagaggcatcagcatcgaaggggctggagaagaaagagaaatgatgcagctggtgcccgagcctctcagggccagaccagacagatgggggctgggcccacacaggcgtgcaccggtagagggcacaggaggccaagggcagctccaggacagggcatggggcagcaggatacctccagccaggcctctgtggcctctgtttctttctccctttcttggccctcctctgctcctccccacaccctgcaagcaaagaaacccccagcttcccccctccccgggagccaggtgggaaaagtgggtgtgatttttagattttgtattgtggactgatttttgcctccatttaaaa

SEQ ID NO: 114420 - DNA, 933 bp, Homo Sapiens
ctttgtacaaaaaagttggggagaagcaacgcggtggaggaacggaagcgcgagaacctccgcacaccatggaagcccaaatattttatccaggagggcgatggctgggtatacttcaatcccctctggaaagcacactgatggggtggaggtgcagagctttccagtatagccctgtttttgtaggaatattaaagtagtagagtatcagggttttgttggcattcactgagaccttgtattagcatccaagaaatgatgagagagagagaaattatatactatgaaaagtgcacccccacactctgctagaggaatgaatttattcaagagccattcggggcacgtgtgtgtacacaccgtatacgttcacacacatgcactatgtaaacatctgagtatgattacacatttaaatactgcactcaccaaggttaaagtgggtaatcataagctcctttttatcaatgaagtttgaagtttttctatttttcactttgccaaaaatgttttacactcacaaagatattctcacttagtcaactcctgtcaaaatgaaggtgaactggcatggcccgatcactgtccataagggagaaagtggctcattcctggtagaagtatgggtggttatcatttcaaaattattgtgattctcacctccctccccacctcagtgttttgtctgtccgcgcccaaaaaagataagcaagtatttcctgctggatgggggttggcaggaagctgttaaagatttatgccagtagccttgcaggatggagcacctctgggacaactaagagccaaagcccaccaaggagttttccacccgtctctcatggtcacagcgctagtcattcatttttgagaagttgcttcttttacatcagaaaccagtcaatcatatggagacttcttttgtgatgaaaaagg

SEQ ID NO: 114421 - DNA, 945 bp, Homo Sapiens
tggggaaaaacaaaatatcatggccttcacaaggaggcaacaacacagctttgtaacagggtttatacaggtttcaactgagaggcaaaggatgcacttaactgcctacacatacccaggtatgtaacaagcaaggaggccacctcaagttcagtttctttcatgcatgacacatgctttttttctcctcatggacaattattgaagtgtttcgttacatgtcttaggcagcctgaagaaggtaggaaagccttagtagagggaaaatcaaaccaaatgagattaagtcaaaagaacagataactatcgtctgcttatctacttaaaggtgtgtggcatttaccacagtgaggagctaacaggagcctcccacactacatgcagggcccaaaggggccagcgatggtgtgataaccagtcaccgatgatgagttgcagttggaccaagtacagatggaggggctggcccatgcagggcctcggggtgaggttcactaggactagctgcagggggacctggctacactctgtggcacaacagggcttcacaaaatggacactacacgtgacgtgggctgaaaggtggagcagagactgggtgggagtgtcagttgcacgttgtggggtaaggggtagagggagcagggcaagtgtattatgtactgtgctctaacattctttggaagtctttcaaagattgctgcagttcctttttaaaacaggtctcttattccgtcattcttgaaagacttctccttacaccatctcatactgattggccgtgatgaaccgggacagacagcaggccagcagcatgccaattaactgggagaatgcgattccaaacgccactccagcgatgattcccatgttagtctccatgaaactagttaccagatcataacaacccttctggttaactttggtggcgccaacttttttgta

SEQ ID NO: 114422 - DNA, 907 bp, Homo Sapiens
ctttgtacaaaaaagttggcgcctgggaggagatacagaaaccagcctcgaggtccagttggaaatgaaccattggttactgacgtggttttgcagagttttccacctttgccgtcatgcgaaattttggatatcaacgatgagcagacacttccaaggctgattgaagccttagagaaacgacataacttacgacaaatgatgattgatgagtttaacaaacaatctaatgcttttaaagctttgttacaagaatttgacaatgctgttttaagtaaagaaaaccacatgcaagggaaactaaatgaaaaggagaagatgatctcaggacagaaattggaaatagaacgactggaaaagaaaaacaaaactttagaatataagattgagattttagagaaaacaactactatctatgaggaagataaacgcaatttgcaacaggaacttgaaactcagaaccagaaacttcagcgacagttttctgacaaacgcagattagaagccaggttgcaaggcatggtgacagaaacgacaatgaagtgggagaaagaatgtgagcgtagagtggcagccaaacagctggagatgcagaataaactctgggttaaagatgaaaagctgaaacaactgaaggctattgttactgaacctaaaactgagaagccagagagaccctctcgggagcgagatcgagaaaaagttactcaaagatctgtttctccatcacctgtgcctctttctagtaactatattgctcagatttccaacggccagcaactcatgagccagccacagctacataggcgctctaactcttgcagcagcatttctgtagcttcctgtatttcggaatgggagcagaaaattcctacgtacaacacacctctcaaagtcacatctattg

SEQ ID NO: 114423 - DNA, 955 bp, Homo Sapiens
ctttgtacaaaaaagttggcggactcactagcccccactcatgaatcggcaccatctgcaggatcactttctggaaatagacaagaagaactgctgtgtgttccgagatgacttcattgtcaaggtgttgccgccggtgttggggctggagtttatcttcgggcttctgggcaatggccttgccctgtggattttctgtttccacctcaagtcctggaaatccagccggattttcctgttcaacctggcagtggctgactttctactgatcatctgcctgcccttcctgatggacaactatgtgaggcgttgggactggaagtttggggacatcccttgccggctgatgctcttcatgttggctatgaaccgccagggcagcatcatcttcctcacggtggtggcggtagacaggtatttccgggtggtccatccccaccacgccctgaacaagatctccaatcggacagcagccatcatctcttgccttctgtggggcatcactattggcctgacagtccacctcctgaagaagaagatgccgatccagaatggcggtgcaaatttgtgcagcagcttcagcatctgccataccttccagtggcacgaagccatgttcctcctggagttcttcctgcccctgggcatcatcctgttctgctcagccagaattatctggagcctgcggcagagacaaatggaccggcatgccaagatcaagagagccatcaccttcatcatggtggtggccatcgtctttgtcatctgcttccttcccagcgtggtttgtgcggatccgcatcttctggctcctggcacacttcgggcacgcaaaattgtgaagtgtaccgctcggtggacctggcgtttcttatcactctcagcttcacctacatgaacagcatgctggaccccgtgtgtactacctctccagcccatcctttcccaacttctt

SEQ ID NO: 114424 - DNA, 962 bp, Homo Sapiens
actttgtacaaaaaagttggcaccccggcagctgtggcgcaggagccccctcccccggcagctctgacgtctccaccgcagggactggtgcttctcggagctcccactcctcagactccggtggaagtgacgtggacctggatcccactgatggcaagctcttccccagcgatggttttcgtgactgcaagaagggggatcccaagcacgggaagcggaaacgaggccggccccgaaagctgagcaaagagtactgggactgtctcgagggcaagaagagcaagcacgcgcccagaggcacccacctgtgggagttcatccgggacatcctcatccacccggagctcaacgagggcctcatgaagtgggagaatcggcatgaaggcgtcttcaagttcctgcgctccgaggctgtggcccaactatggggccaaaagaaaaagaacagcaacatgacctacgagaagctgagccgggccatgaggtactactacaaacgggagatcctggaacgggtggatggccggcgactcgtctacaagtttggcaaaaactcaagcggctggaaggaggaagaggttctccagagtcggaactgagggttggaactatacccgggaccaaactcacggaccactcgaggcctgcaaaccttcctgggaggacaggcaggccagatggcccctccactggggaatgctcccagctgtgctgtggagagaagctgatgttttggtgtattgtcagccatcgtcctgggactcggagactatggcctcgcctccccaccctcctcttggaattacaagccctggggtttgaagctgactttatagctgcaagtgtatctccttttatctggtgcctcctcaaacccagtctctacactaaatgcagacaacaccttcctcctgcagacacctgggactgagccaaggaagcctgggggaggccctagggga

SEQ ID NO: 114425 - DNA, 220 bp, Homo Sapiens
ttggggggaccctgcgggctggatgaggaccccctcactggtctttgacttctcaggctggggaccctgcgggctggatgaggaccccctcactggtctttggcttctcaggacttctttctttgtagaatctccctcatcccttcctttttctgtttgatgtctctttcctcatttcttctgtaaaataaacgtaaaaagggactgaataatttccaac

SEQ ID NO: 114426 - DNA, 891 bp, Homo Sapiens
cccactttgtacaaaaaagttggagagcggtgcccgcgtcagtgaccgaaggaagagaccaagatgaatgcagagcccgagaggaagtttggcgtggtggtggttggtgttggccgagccggctccgtgcggatgagggacttgcggaatccacacccttcctcagcgttcctgaacctgattggcttcgtgtcgagaagggagctcgggagcattgatggagtccagcagatttctttggaggatgctctttccagccaagaggtggaggtcgcctatatctgcagtgagagctccagccatgaggactacatcaggcagttccttaatgctggcaagcacgtccttgtggaataccccatgacactgtcattggcggccgctcaggaactgtgggagctggctgagcagaaaggaaaagtcttgcacgaggagcatgttgaactcttgatggaggaattcgctttcctgaaaaaagaagtggtggggaaagacctgctgaaagggtcgctcctcttcacagctggcccgttggaagaagagcggtttggcttccctgcattcagcggcatctctcgcctgacctggctggtctccctctttggggagctttctcttgtgtctgccactttggaagagcgaaaggaagatcagtatatgaaaatgacagtgtgtctggagacagagaaaaaagtccactgtcatggattgaagaaaaaaggacctggtctaaaacgaaacagatatttaagcttccatttcaagtctgggtccttggagaatgtgccaaatgtaggagtgaataagaacatatttctgaaagatcaaaatatatttgtccagaaactcttgggccagttctctgaaaagaactggctgctgaaaagaaac

SEQ ID NO: 114427 - DNA, 935 bp, Homo Sapiens
aactttgtacaaaaaagttggagaagaaatggggaacccagatgcgtcatacaatcttggagtcctgcatttggatggcatcttccctggagttcctggaaggaatcaaactttagctggtgaatatttccataaggctgcgcaaggtggacacatggaagggaccttgtggtgttctctctactatatcacaggcaacctggagacattccctagagatcctgagaaagctgttgtatgggcaaaacatgtagctgagaaaaatggctacttgggccatgtcatccgcaaaggcctcaatgcctacctggaaggttcatggcatgaagctttgctgtattatgttttagcagcagaaactggaattgaagtgtcacagacaaatttagcacacatctgtgaggagaggccagacctggccaggagatacttgggtgttaactgtgtttggagatactataatttctctgtttttcaaatcgatgctccttcctttgcatatttgaagatgggagacctttactactatggccaccaaaaccagtcacaagacctggagttgtctgtgcagatgtacgcccaagccgccctggatggagactcccagggattttttaacctggccctgctaatcgaggaaggtacgataatcccacaccatatcttggatttcttggaaattgactcaactctccattctaataacatctccattctccaggaactgtacgaaaggtgctggagccaccagtaacgaggagtccttcagcccctgctccttggcctggctttacctgcacttgcggcttctctggggggctatcctgcactcagccctggatctactttctgggaacctttctgctatccatattgatcgcctggactgtgcagtatttcccagtctggtctcaacaaagcgattccccctccaa

SEQ ID NO: 114428 - DNA, 905 bp, Homo Sapiens
ctttgtacaaaaaagttggcttagtcgcgggccgactggtgtttatccgtcactcgccgaggttccttgggtcatggtgccagcctgactgagaagaggacgctcccgggagacgaatgaggaaccacctcctcctactgttcaagtacaggggcctggtccgcaaagggaagaaaagcaaaagacgaaaatggctaaattcgtgatccgcccagccactgccgccgactgcagtgacatactgcggctgatcaaggagctggctaaatatgaatacatggaagaacaagtaatcttaactgaaaaagatctgctagaagatggttttggagagcaccccttttaccactgcctggttgcagaagtgccgaaagagcactggactccggaaggttacagtctctagcttcgccatgtacatggcccttccgtgtacatggatgggcggggaggtaactaaaagatcctttacacaataaagtagatgatcatgataaatgaggacacagcattgttggttttgccatgtactattttacctatgacccgtggattggcaagttattgtatcttgaggacttcttcgtgatgagtgattatagaggctttggcataggatcagaaattctgaagaatctaagccaggttgcaatgaggtgtcgctgcagcagcatgcacttcttggtagcagaatggaatgaaccatccatcaacttctataaaagaagaggtgcttctgatctgtccagtgaaaagggttggagactgttcaagatcgacaaggagtacttgctaaaatggcaacagaggagtgaggagtgctgctgtagatgacaacctccattctatttaaaataaattcccaacttctcttgctttctatgctgtttgtagtggaaataata

SEQ ID NO: 114429 - DNA, 942 bp, Homo Sapiens
actttgtacaaaaaagttgggaggggactcagagttgaacataagggctcttgagatgtggagactcattttgttaactattcagagaccttctccctttattccagctgtctaactgacaagacctttctctctttctttctgcctcatgctctctccaacaggcttgcagccaatttactggagcagggatgacgtagcccagtggctcaagtgggctgaaaatgagttttctttaaggccaattgacagcaacacgtttgaaatgaatggcaaagctctcctgctgctgaccaaagaggactttcgctatcgatctcctcattcaggtgatgtgctctatgaactccttcagcatattctgaagcagaggaaacctcggattcttttttcaccattcttccaccctggaaactctatacacacacagccggaggtcatactgcatcagaaccatgaagaagataactgtgtccagaggacccccaggccatccgtggataatgtgcaccataaccctcccaccattgaactgttgcaccgctccaggtcacctatcacgacaaatcaccggccttctcctgaccccgagcagcggcccctccggtcccccctggacaacatgatccgccgcctctccccggctgagagagctcagggacccaggccgcaccaggagaacaaccaccaggagtcctaccctctgtcagtgtctcccatggagaataatcactgcccagcgtcctccgagtcccacccgaagccatccagcccccggcaggagagcacacgcgtgatccagctgatgcccagccccatcatgcaccctctgatcctgaacccccggcactccgtggatttcaaacagtccaggctctccgaggacgggctgcatagggaaaggaagcccatcaacctctctcatcgggaagacctggctta

SEQ ID NO: 114430 - DNA, 544 bp, Homo Sapiens
ctttgtacaaaaaagttggctcggcggccggcccctccttcacgaagctcggggagctgacgatgcagctgcatcccgtggccgactcttctcctgcgggcgcgaagtggacggagacggaaatagagatgctgagggctgctgtgaagcgatttggggacgatcttaatcacatcagctgtgtcatcaaggaacggacagtggcccagataaaggccactgtgaaacgcaaggtatatgaagattctggcatcccccttccagctgagtcacccaagaaagggcccaagaaggtggcatctggtgtcttgtcacctcctccagctgcccctcctcccagcagctccagtgtccctgaggccgggggtccccccataaagaaacagaaggctgtgacgtggtggatattgaagggctaggagaaactcctccagctaagaaactcaacttcgaccaggcctgaccctggattctggccttctcatgacctctgctgatcctcctctcctctcctgctgagccttccacctctgacctctcactg

SEQ ID NO: 114431 - DNA, 898 bp, Homo Sapiens
actttgtacaaaaaagttgggtccttcggcgagcgagcaccttcgacgcggtccggggaccccctcgtcgctgtcctcccgacgcggacccgcgtgccccaggcctcgcgctgcccggccggctcctcgtgtcccactcccggcgcacgccctcccgcgagtcccgggcccctcccgcgcccctcttctcggcgcgcgcgcagcatggcgcccccgcaggtcctcgcgttcgggcttctgcttgccgcggcgacggcgacttttgccgcagctcaggaagaatgtgtctgtgaaaactacaagctggccgtaaactgctttgtgaataataatcgtcaatgccagtgtacttcagttggtgcacaaaatactgtcatttgctcaaagctggctgccaaatgtttggtgatgaaggcagaaatgaatggctcaaaacttgggagaagagcaaaacctgaaggggccctccagaacaatgatgggctttatgatcctgactgcgatgagagcgggctctttaaggccaagcagtgcaacggcacctccatgtgctggtgtgtgaacactgctggggtcagaagaacagacaaggacactgaaataacctgctctgagcgagtgagaacctactggatcatcattgaactaaaacacaaagcaagagaaaaaccttatgatagtaaaagtttgcggactgcacttcagaaggagatcacaacgcgttatcaactggatccaaaatttatcacgagtattttgtatgagaataatgttatcactattgatctggttcaaaattcttctcaaaaactcaaattgatgtggacatagctgatgtgggcttatatttggaaaaatatcaaccaaatggttcgctgctgccgttattttgtcctcc

SEQ ID NO: 114432 - DNA, 735 bp, Homo Sapiens
ttagggaatgctctgcctaagtttcactgctgcttattggacattgcttcaggtaccacatcgaggtgaaccgtgttcctgctggcaactgggttctgattgaaggtgttgatcaaccaattgtgaagacagcaaccataaccgaaccccgaggcaatgaggaggtagagtttctgaagagaccaactgggttggcttaagctagatggtcccagggacacacatgagcacaaacgggactaatccacagtcattgccatgtcctggtttcaggcttagccttctagatatgaccctgctggattctccctgtactcagttcagatgcgaggaattaggacgggtgccttttattattttcctcctctctttgttctgccagaatacctgggaagaatggcccttcaggttacccccactcagcaccaggctcctggttggggaatacatagtctgatcctaagcaagtcctcttctcttctcatacctctgcactttctgtgcctgctcatgccagttgccctcagtcctttgtgctttggatctcaagctcagattttccgacccttgaagttcaataccacatctgttatcaagattgctgtggagccagtcaacccctcaaagctgccccaggatgcttgatggcctgcgcatggtcacaagagcctatccatcccttcaccaccaaggtatgcctgggcctgcagcagccgcctagccccactatcccca

SEQ ID NO: 114433 - DNA, 782 bp, Homo Sapiens
actttgtacaaaaaagttggcgtagccgtcgcccccaccgccgccagcccgtgcgccctcggcgcgtacccgccgcgctcccatccccgccgccggccaggggcgcgctcggccgccccggacagtgtcccgctgcggctccgcggcgatggccaccaagatcgacaaagaggcttgccgggcggcgtacaacctggtgcgcgacgacggctcggccgtcatctgggtgacttttaaatatgacggctccaccatcgtccccggcgagcagggagcggagtaccagcacttcatccagcagtgcacagatgacgtccggttgtttgccttcgtgcgcttcaccaccggggatgccatgagcaagaggtccaagtttgccctcatcacgtggatcggtgagaacgtcagcgggctgcagcgcgccaaaaccgggacggacaagaccctggtgaaggaggtcgtacagaatttcgctaaggagtttgtgatcagtgatcggaaggagctggaggaagatttcatcaagagcgagctgaagaaggcggggggagccaattacgacgcccagacggagtaaccccagcccccgccacaccaccccttgccaaagtcatctgcctgctccccgggggagaggaccgccggcctcagctactagcccaccagcccaccagggagaaaagaagccatgagaggcagcgcccgccaccctgtgtccacagcccccaccttcccgcttcccttagaaccctgccgtgtcctatctcatgacgctcatggaa

SEQ ID NO: 114434 - DNA, 898 bp, Homo Sapiens
  misc_feature (330)..(344): n is a, c, g, or t
  misc_feature (432)..(457): n is a, c, g, or t
tgtacaaaaaagttggagagtttaatggggcaactggacaaccaagttaaccccaattgaaagcacccctaggaccattgaacacccactgccggggaccactgtccagtgaatggattgaggccttttaaaggtcactcaggttccaggttgacagttggaggacttcaccgtaccaaccctgaagagattgtattacacattaaggaccttggtagctgtgcttcagcaaacgtcaaccatggtagcaaattggtgaggctgtgaccaataatgaggaaataatctggcaaatttttaggggtgggaacttttttaaatgttcatttnnnnnnnnnnnnnnncagggcagtcttgtagtttaaaatatatttctaaaagcttaacagttcgttttcaactaaattgtgtttagggatctgtgtttgagannnnnnnnnnnnnnnnnnnnnnnnnnaaatagtaagtcacaggtccacactgtgtaaacatgcatctgataagatactgctgatattctaaacaagttgaaataatcttgccttagtgatcatgattacacaaaagaggtgcactgccaataagtatctctaattcaatagttgaaagcaacctgcatgctaatcgtggtttcggggtgagaataaaacacccccacataacatgcatttgcatgggcccgaacctgtgaaatgttacgtttgtgcttcatttttgccaaggtaaaaatgttccatcatttctagctaaaactccatttggtggaaccaacatatccatttcttttcctagttacagatgatttggggatgcttttgcagaaatgtgttcatagatgatgctgaatgggggaggggggcagcacgtcagagaatttactattaatcccagagttttc

SEQ ID NO: 114435 - DNA, 956 bp, Homo Sapiens
actttgtacaaaaaagttggggcgccgggcggagggggagagcgcgggccgcgcgggcgggaagcgaagaggcgggcgggccagcgaggagcgcggagagaaaaggcgcgagcggccaggagggctcaggccgagacaccttgcagctgccgccgccgccaccgagccgccgctgtgctcactgatccgcctccagggccaccgccatgtcgagccgcggtgggaagaagaagtccaccaagacgtccaggtctgccaaagcaggagtcatctttcccgtggggcggatgctgcggtacatcaagaaaggccaccccaagtacaggattggagtgggggcacccgtgtacatggccgccgtcctggaatacctgacagcggagattctggagctggctggcaatgcagcgagagacaacaagaagggacgggtcacaccccggcacatcctgctggctgtggccaatgatgaagagctgaatcagctgctaaaaggagtcaccatagccagtgggggtgtgttacccaacatccaccccgagttgctagcgaagaagcggggatccaaaggaaagttggaagccatcatcacaccacccccagccaaaaaggccaagtctccatcccagaagaagcctgtatctaaaaaagcaggaggcaagaaaggggcccggaaatccaagaagaagcagggtgaagtcagtaaggcagccagcgccgacagcacaaccgagggcacacctgccgacggcttcacagtcctctccaccaagagcctcttccttggccagaagttgcaagttgtacaggctgacattgcctcgatcgacagtgatgctgtcgttcacccgacaaacactgacttctacatcggtggtgaagtaggaaacacgctggagaagaaaggtggcaggaagtttgtggaagctgtcctggaactccggaaaaagaacggg

SEQ ID NO: 114436 - DNA, 648 bp, Homo Sapiens
gggggctgtggggttttgttgggcgtgaagaagatgtcagcaaagctctccagcttggagcggacggaacggaagagcggggccaagccccagggactgaggcgggggcgtaaaaggctggacggtggtggggtggatgggagctccagagcaggatctggggctgaggaaaggagagggtcacaggtggatattccttggctgcagtgtctcagcccctccccacatgctcaactttgtgcacaggggaattagcccacccttaaaacactaagttctgcatttaagaattgaacttcaagcctctgacatcaacatcccatctttatataccaagccctgccctgggaggtggcttaagccctatccccaactctgtacctgacacttccaagctcaactaggatgtcccagacacccaagtctcatccgatctctacccaagtccttacctgttggtgggctctccagagggtctgcaggcagagcagatggctggaatgggggttctaggtccccaggtggaggcgttggctggcgaactatcctcatgggctcagctctggggtgaagggcaaggtaaaggctaggggaacttccaggtatcccacctgagccagcaactcccctatcccttaaggcttcttc

SEQ ID NO: 114437 - DNA, 989 bp, Homo Sapiens
ctttgtacaaaaaagttggcaaggacaggaaggatagtcacccaagcgcatagctaaaagaaggtcccccccagcagatgccatccccaaaagcaagaaggtgaaggtctcacacaggtcccacagcacagaacccggcttggtgctgacactaggccagggcgacgtgggccagctggggctgggtgagaatgtgatggagaggaagaagccggccctggtatccattccggaggatgttgtgcaggctgaggctgggggcatgcacaccgtgtgtctaagcaaaagtggccaggtctattccttcggctgcaatgatgagggtgccctgggaagggacacatcagtggagggctcggagatggtccctgggaaagtggagctgcaagagaaggtggtacaggtgtcagcaggagacagtcacacagcagccctcaccgatgatggccgtgtcttcctctggggctccttccgggacaataacggtgtgattggactgttggagcccatgaagaagagcatggtgcctgtgcaggtgcagctggatgtacctgtggtaaaggtggcctcaggaaacgaccacttggtgatgctgacagctgatggtgacctctacaccttgggctgcggggaacagggccagctaggccgtgtgcctgagttatttgccaaccgtggtggccggcaaggcctcaaacgactcctggtccccaagtgtgtgatgctgaaatccaggggaagccggggccacgtgagattccaggatgccttttgtggtgcctatttcacctttgccatctcccatgagggccacgtgtatgcttcggcctctccaactaccatcagcttggaactccgggcacagaatcttgcttcataccccagacctaacatccttcaagaattccaccaagtcctgggtgggcttctctggtgccagcacatacagtctgcatggattcgaagaaaagcatacagcctgggccggg

SEQ ID NO: 114438 - DNA, 977 bp, Homo Sapiens
ttggagcaacctcagcttctagtatccagactccagcgccgccccgggcgcggaccccaaccccgacccagagcttctccagcggcggcgcagcgagcagggctccccgccttaacttcctccgcggggcccagccaccttcgggagtccgggttgcccacctgcaaactctccgccttctgcacctgccacccctgagccagcgcgggcgcccgagcgagtcatggccaacgcggggctgcagctgttgggcttcattctcgccttcctgggatggatcggcgccatcgtcagcactgccctgccccagtggaggatttactcctatgccggcgacaacatcgtgaccgcccaggccatgtacgaggggctgtggatgtcctgcgtgtcgcagagcaccgggcagatccagtgcaaagtctttgactccttgctgaatctgagcagcacattgcaagcaacccgtgccttgatggtggttggcatcctcctgggagtgatagcaatctttgtggccaccgttggcatgaagtgtatgaagtgcttggaagacgatgaggtgcagaagatgaggatggctgtcattgggggcgcgatatttcttcttgcaggtctggctattttagttgccacagcatggtatggcaatagaatcgttcaagaattctatgaccctatgaccccagtcaatgccaggtacgaatttggtcaggctctcttcactggctgggctgctgcttctctctgccttctgggaggtgccctactttgctgttcctgtccccgaaaaacaacctcttacccaacaccaagccctatccaaaacctgcaccttccagcgggaaagactacgtgtgacacagaggcaaaaggagaaaatcatgttgaaacaaaccgaaaatggacattgagatactatcattaacattaggaccttagaattttgggtattgtagtctgaagtatggtattacaaa

SEQ ID NO: 114439 - DNA, 1033 bp, Homo Sapiens
ttcgttgcaacaaattgatgagcaatgctttctatatataaagtgccaactttgtacaaaaaagttgggttctttgatcagctttactcaaacaggaagggatagccacaagtgacaacttcatgcaggctttcctgaatgtattggaccagtgtcccaaactggaggttgacatccctttggtgaaatcctatttagcacagtttgcagctcgtgccatcatttcagagctggtgagcatttcagaactagctcaaccactagaaagtggcacccattttcctctcttcctactttgtcttcagcagttagctaaattacaagatcgagaatggttaacagaactttttcaacaaagcaaggtcaatatgcagaaaatgctcccaggtaagagaatgctgacttgtttgttttgtttttttaatattatatctagagatttcaggtaccttgagtggatttatgtaggtcagacagtctgattgtcctgctcagataatgataaacattaccacagatctcacctataaagagagatttataatttaactactttcatttgatccgtatgttgagtttttttcatttgctgggttggttctctattctgctacatggatcttacatacttggggacatcatttgtgaagctctgctctctggacaggacaacttggtaaaatgaactattagatgatgcaggtggctttgtctcttcagaaattgatcagaataaggaccgcatgttggagattttggaaggaaagggactgagtttcttattcccactcctcaaattggagaagaactgttgaagcaaataaagttggatccatcccctcaaaccatatataaatggattaaagataacatctctcccaaacttcatgtagataaaggatttgtgaacatcttaatgactagcttcttacagtacatttctagtgaagtaaacccccccagcgatgaaacagattcatcctctgctccttcaaagaacagttagagcaagaaaaacaactactactatttt

SEQ ID NO: 114440 - DNA, 862 bp, Homo Sapiens
atttgaagtgccaaattaactttagtcagaatgtgagcagatggctaagttctctcctccccagaatggattaacagctgcgtggaaagtgggggagagagtggatggagacttttagagatgttaaaactgcagtagaatgaaatgagtcagggagcttcagttagaaaataaagttgaggcagtttttgtgaagataatatggttagggctggagtgcactagtctttttgcttattcattttgcatggttttaaaattaaaaataattccgaagatacaccagctcacaaatgaaaacgtcagcctctgccccaccctccctcctgcccagagtgaatttggtactcagaaaagaactgtttataccactcacctttctcccagcatgtactcactgtgggcagatgcaccaatacatggtaatcctcttactcattttaagacgtaggaaactcaatattcttctctaaccatatacgatagggctcttcgcttttaatgatatctgggatttctgtggaacttggcaaattttcagagcaccttcactcacataatgtcatttgaacctcacaatgttcttgggatggagtcagttgttcagggtccccgtgtgtgtgataagcagtgctggctggctgtcttcagaactcttggaaatctttacacatgcgagtgctaaccactttgagcaaggctgccttcttgtagatgacttgctgttctttatgacagggatcagtggcatttgtttcctagcagtatttagcacctttttgccaccttggtgaacagaaaattgtattttcctgtctttcatggctgaaaacaaaagtaatgggaattttaaatacgtttg

SEQ ID NO: 114441 - DNA, 724 bp, Homo Sapiens
ctttgtacaaaaaagttgggcctgaggaaacccagacccaagaccaaccgatggaggaggaggaggttgagacgttcgcctttcaggcagaaattgcccagttgatgtcattgatcatcaatactttctactcgaacaaagagatctttctgagagagctcatttcaaattcatcagatgcattggacaaaatccggtatgaaagcttgacagatcccagtaaattagactctgggaaagagctgcatattaaccttataccgaacaaacaagatcgaactctcactattgtggatactggaattggaatgaccaaggctgacttgatcaataaccttggtactatcgccaagtctgggaccaaagcgttcatggaagctttgcaggctggtgcagatatctctatgattggccagttcggtgttggtttttattctgcttatttggttgctgagaaagtaactgtgatcaccaaacataacgatgatgagcagtacgcttgggagtcctcagcagggggatcattcacagtgaggacagacacaggtgaacctatgggtcgtggaacaaaagttatcctacacctgaaagaagaccaaactgagtacttggaggaacgaagaataaaggagattgtgaagaaacattctcagtttattggatatcccattactctttttgtggagaaggaacgtgataaagaagtaagcgatgatgaggctga

SEQ ID NO: 114442 - DNA, 786 bp, Homo Sapiens
  misc_feature (542)..(565): n is a, c, g, or t
  misc_feature (698)..(721): n is a, c, g, or t
tacaaaaaagttggggactttgagcggaccctggggctaagcagcccgtgcgacaaccacgcgtcgagtgagcagctctacttttccacgcccaccaaccacaacctgttcccactcaatacgctggagtccacgtgaggcctggtgcacggggggcatggcaccaggcccctgctcggctctccacagggctaggtgggagagcccaagcccgccacctctggcctgaggaacccccagatgtcacctgtgcccagaggcccaggctgatcggtgtcggagcgcccctcaccatccttgggggcagggcccgcaggcaaggtctcccactgcagggcttgctggagaggcctcggctcttggacacgtggctttgggcgtccaccagggcctcatcctgtccaggacgctcctttctgctgacagcccagccagtttggctgttttttaaagacacatccacggacctgagtttactttttacttttggcaggtaaatccaagctccctggagcacaaagagtgtttgagctcttcttgannnnnnnnnnnnnnnnnnnnnnnnaacaaaaagtgttattttcaggctacatgcaacagtggattgtataacccagtatttcatccctttcctgatcctgcaagagagagaaatgttcagttttgtttttcgttcaatttcaaaaagcaagtatcgnnnnnnnnnnnnnnnnnnnnnnnnaatggaaaagacagacgccatgttgaccttgaccaatgcgttttgcacatgtgtgaagcctctgt

SEQ ID NO: 114443 - DNA, 1002 bp, Homo Sapiens
ttttgtttttaaaaagggcccccagggcaagtatttacagtttaatggcactgtcaactgatctggaccttgatcgggaccgggacctctggcgatccacagatgctggagacttagatctacttgaagaaccacgtttctggctcttctcaggcacgggagacgactaacagaacgggacttgctccggctccggctctgctctgcttcttgaccggctgtaagatttgcgactacgggaacgggatcggctacgagacctagaggaacttctggtccgggatcgagacctgcttcttgacgtactgtgccttttgctgccttcaattaattttatttttctcccatttatttcctttccagaaagtttttcaatagcattctttaagtcaccataagaggcaaactcaaccaccccttcatttaatttaggtcggtgtgcatccgcaaacgttacttccccagcttgtctcatgaaatctttgagatcctgccagctgactcttgaggataaattctcaactataagacgattttctgttcttacaggtggagcatttcgtctatcatttcgaggtctgcgactactaaaacggtcagagtatcgtcctctacctcttccacctcgtgaccgagccctagcatgttcaatagtaaccctttcactacagagttcttttccatcaagctcatacacagcatcatctgcatcccttggatcctcaaattccacaaaaccaaagcctcttttcagatcaatatctcttatccgtccatatcccttgaagaatctttccacgtccttctccctggccgctggatttagtctcccgatgaatacccgacagccactcatgatgtccggctagtacttccggacggggtctttggcggctgagacccagacaggtccgtagtctgcgacggagtcgtcgacctccacgcagaccaggacttaactcgtctactgcactccacaactgccaacttttttgtacaaag

SEQ ID NO: 114444 - DNA, 608 bp, Homo Sapiens
cattaaagacaactttgtacaaaaaagttggctagaaaactcacaaaatagtgtgatgcttttgtaggtacctggaaacttgtctccagtgaaaactttgatgattatatgaaagaagtaggagtgggctttgccaccaggaaagtggctggcatggccaaacctaacatgatcatcagtgtgaatggggatgtgatcaccattaaatctgaaagtacctttaaaaatactgagatttccttcatactgggccaggaatttgacgaagtcactgcagatgacaggaaagtcaagagcaccataaccttagatgggggtgtcctggtacatgtgtagaaatgggatggaaaatcaaccaccataaagagaaaacgagaggatgataaactggtggtggaatgcgtcatgaaaggcgtcacttccacgagagtttatgagagagcataagccaagggacgttgacctggactgaagttcgcattgaactctacaacattctgtgggatatattgttcaaaaagatattgttgttttccatgatttagcaagcaactaattttctcccaagctgattttattcaatatggttacgttggttaaataaactt

SEQ ID NO: 114445 - DNA, 951 bp, Homo Sapiens
aaaccaaaatcaataagggattaacttattacagtgacgcccaatacccattaggaagttatctggtttaatgtctctgtgtataaaattctttgtatgcacatattcaattctactgatcatctggtcagctaacataagtacagttttcattgtgacctttttgaacagaaattgaagaggtcttcgaggctaggtcccagaagatccatgactagtacattgtagtctttttcctgaccataccaccgtatgtgggggatgccaaccccacctgaagaatcttatagagcttgctctcgtacagcaactggggatgcctggccttctgagattctagcttcactgccacttcctcgccgttggtgatgttgatcgccaaatagatgtccccgaaggagccagacccgatcttccgtaccagtttatatttccctccgacaatgaattcagccttggagccgctgctactcgccatcctgagagacgaagatggaggctggggccaagccccgacacctctgggaagaggacggaggcctcggggctcctacactaggcaaggctacggaggagggcggcaggaaacggaacacggaggcctttaccggggttcggggcccagaatcagcagaggggaacctgatcaccgccgctcagtcaggtttctttttgccaggccgcagtttgtgaagggcttctcggcggttaccaggctgggccacttgtttctcggcggccgccgctgcctcgcttgcgcggcgacgtcgcgggctggaaaaggggcgcggtgagctagggcggcgataccgctgccaccactgccgccggctccggcccagagggacccctgtcactccgcggacgacgccatcttgttactccagctccagccaacacaaaatgcccccagtgtccccgggagccgcttcccaacttttttgtacaaag

SEQ ID NO: 114446 - DNA, 914 bp, Homo Sapiens
actttgtacaaaaaagttgggcagatgcagagattcaacgttggtgaggactgtccagtattcgatggcctgtttgagttctgtcagttgtctactggtggttctgtggcaagtgctgtgaaacttaataagcagcagacggacatcgctgtgaattgggctgggggcctgcaccatgcaaagaagtccgaggcatctggcttctgttacgtcaatgatatcgtcttggccatcctggaactgctaaagtatcaccagagggtgctgtacattgacattgatattcaccatggtgacggcgtggaagaggccttctacaccacggaccgggtcatgactgtgtcctttcataagtatggagagtacttcccaggaactggggacctacgggatatcggggctggcaaaggcaagtattatgctgttaactacccgctccgagacgggattgatgacgagtcctatgaggccattttcaagccggtcatgtccaaagtaatggagatgttccagcctagtgcggtggtcttacagtgtggctcagactccctatctggggatcggttaggttgcttcaatctaactatcaaaggacacgccaagtgtgtggaatttgtcaagagctttaacctgcctatgctgatgctgggaggcggtggttacaccattcgtaacgttgcccggtgctggacatatgagacagctgtggccctggatacggagatccctaatgagcttccatacaatgactactttgaatactttggaccagatttcaagctccacatcagtccttccaatatgactaaccagaacacgaatgagtacctggagaagatcaaacagcgactgtttgagaacctttagaatgctgccgcacgcacctggggtccaaaatgcaagcgattcctgag

SEQ ID NO: 114447 - DNA, 816 bp, Homo Sapiens
caccactgagggggcacatagctgtaagtgggcgttcctggagcccggtacgtgggcacagtgaccgggtggggggcgacaggagttggggagtgagcagtcagcagggtacatgctgacatggccatggtggtaccagccaccatgcccatggtgaccccgttgcctctaggaggggggatgggagcagggtacaccgttgcaggcatgccgttgggctgcaccaccgtggtgtggtggatgacgtgaggaggtgatgcatacagcggctgtgtgtagtacgtgccatgctgtgcatacgggctctgctggaggtaggcacttcgcacagggtacacggcagtctggtaggggttcggggaggaggagtacggtggcacagccccgctggtgggggaacaggacactttgtaaggtgtgccaggagtgtaacctgtttggaaggtaggattcgctccaggatacatgttaggagaataggcaggagctgctgctgcatagcccatgggaaaaccagctggataaccaattcctttggcatttgcatagggaaccccagaagatccaggactataaacaggattcatgatttcaaaaacgcgccgcggcggcgacctgggcctcagtgaccagcgcacgccggcccgcggcgggtttggccgtggggcgaaacaaggggggcgtgccgaggagacctgctacgataagaggctgaccctccgagccccgcgtctccgccgcctcccggacgccgcgctcccgctcgctcggctccgcttggcccggcccgcctctccgcagcccgcgctcccccaa

SEQ ID NO: 114448 - DNA, 869 bp, Homo Sapiens
ttggtggaaaaggagaacctgcagctgaaatccaagcttcacgacctggaattggaccgggacacagataagaaacgaattgaggagctgctggaagaaaacatggtccttgagattgcacagaagcagagcatgaacgaatctgcccaccttggctgggagctggagcagctgtccaagaacgcagacttgtcagacgcctccaggaagtcgtttgtgtttgagctgaacgaatgtgcgtccagccgcatcctgaagctggagaaggagaatcagagcctccagagcaccatccaggggctgcgggacgcgtccctggtgttggaggagagcggcctcaagtgcggggagctggagaaggagaaccaccagctcagcaagaagattgaaaagttacaaacccagctggagagagaaaagcagagcaaccaagatctggagaccctcagtgaggagctgatcagagagaaggagcagctgcagagtgacatggagaccctgaaggctgacaaagccaggcagatcaaggaccttgagcaggaaaaggaccacctcaaccgagccatgtggtcgctgcgggagaggtcgcaggtcagcagtgaggcccgcatgaaagacgtggagaaggagaacaaagccctccaccagacggtgacggaggccaatggcaagctcagccagttggagtttgagaagcggcagctgcacagggacttggagcacgccaaggagaaggggagcgggcagagaagctggagagggagctacagcgactccaggaggagaacgggaggctggccaggaaagtgacctccctggagacagccaccgagaaagtcgaggccctggagcatgagagccagggcctg

SEQ ID NO: 114449 - DNA, 878 bp, Homo Sapiens
ctttgtacaaaaaagttggtgcaaacatttcaacttgctatcctctaaaggagctgataaatcaagcaattttttatatctacaagttaagggagaagtagaagccaaggttgaagaattaaaatttgatcgttactctgtatttaggcctggagttctgttatgtgataggcaagaatctcgcccaggtgaatggctggttagaaagttctttggctccttaccagactcttgggccagggggcattctgtgcctgtggtgaccgtggttagagcaatgctgaacaatgtggtgagaccaagagacaagcagatggaactgctggagaacaaggccatccatgacctggggaaagcgcatggctctctcaagccatgaccacactggagaaatggtttttattgtcaaccttaacacccatcaccaaatcggtaatttcagggtctaaaaaaagtcagcatgttttaactttgttgttttactatcctcaggcatccattccaatcaagaaatgatggtgctctgcatcagtggttcagagcctggttatacatatagatcactcagggagctttggaaaaataaagatttgtcagccctatctcaaacttgaatcaaaatttctggggtgtgggcacaataatctgtaattttctttgtttatacttcccctgatgccactggttccgatgccactggctggggggcctgctttgaaatgcttgtctgcagagtcacagcagccatgaaaaccttatgaccgtgcaaatgagctctgctctaaaattgttgacattcatgtctctgagtttacaaaagtgctaattcactacatgtaaatgtgtaagtaaacattgtgcctttactactttcttta

SEQ ID NO: 114450 - DNA, 797 bp, Homo Sapiens; identical to SEQ ID NO: 104532

SEQ ID NO: 114451 - DNA, 887 bp, Homo Sapiens; identical to SEQ ID NO: 104533

SEQ ID NO: 114452 - DNA, 1340 bp, Homo Sapiens
ccactgctcgtggcaccggaggctcggggacagcaggccccggatgtgcacacacacttgcctgctcttgagtcgcttgctgatgaggtacatggccgctgcacccatgtacttggccacggcaccctccacggctccgaacttgccctcgcggacaatgtagtcaaaggacgccagagcctcggtgggcgtgcggtacacattgggggagatcaggtgcaccagccagtcgtccgcccactgccgccacttcatctcctccgtcctggcctccttcccaccatacacttgctgggcctccttctcgttgagcatgagccagtacttattgccgaactcggtcacctccttgccctgctcgttcacagccttcatggctgggtagtaggtgatgatctcttccaggggctgccccgacaccaggtaggtcttgagggcgctgatgatgacagaggagtcatttagttgttgcgagctttctccttcctgggccaccaggatgggcacctttctgtaggaggagaacttgatctcagccctgcgcacagggttcacctccaccacctggtagggcagggcatggaagtcgaggaaggctcggaccttgctgcagaagggacacgtcttgtactggtacagggtcagctgcaggcggctggacagggagagctgcgcggctgagcgctctgcgtggaggtcctgggcgcgcaggtgccaccgcgccgtgtggtacagccccagggctccccccagggccagcgccgcagctcccagcagccgcgggctccccttacgagctgcagccacggggctcgggccgcccgccgcccccgcgaagccagcccggctctgcgtgggtagcagcggctgggggcggcctcccagcctccaggccaaggcgcacccaccaggccacagcgcccgcaccacccgcgcagccgggtccatgttcgctccgccggcgccgcgggcgggcgcgcgaaacgaagacgccgaggcacgcgcggcgtttaaagggccaggactctggcgccccgcgggttggccggggtgagggcgacgctaagggaaccctcagcgctctcgggactgggcgtgtgcccggcgcccaagttcgaaacgcccgccagagccgcagaggcccgctcgggaacgtttgcagaccgttccatgcttccgcctccaaaggctcttgggtagtgacccggccgactgcaggggggcgaacgtctgctcgccccaccttgaccgcctaaagggcggcgtggccgtctgtaacacgtacttgcccacctctcttacgggcgcccattcaaaacccaacttttttgtacaaagtt

SEQ ID NO: 114453 - DNA, 974 bp, Homo Sapiens
ttggcccggacggagggccggcgaggtgcggggtctggtgatgcgagctgcgcctctcggcaagatttcgcgctgcccatcccgggccctttcatcagtaatcggtagtggatcactctgccaagcggcaggaagaattaaggaaacgacaaggagacgctcggctctctcccgcttggctccttgcggcctcctcttcccttcgctccggcccggtgaaactgaacttataatcgtcactggattgtaagtacccgaggcgaagagagctcgctgagccctgattttttgagtgtctttgttccgggagagtttgtgagttgaaagtatctctgctgggctttctgggccgaaaaccgttccgggggagccgccatttgctttcctgttccctagctagctagctagctctctccgcgttgtccggcagcggcacctagaggttgggacttggcattgcatctgatttaatgaacttaagtctgtgaataagcctttgtgttaacgactggtattcggtcacagcatatttagagaaaagacttggagcttaaataaaaactaaggcaaaatagacgcttagctgctgatctacagagaacttcttgtaattaaaagatttcaattcatagcaaactggtgttttaaactattgcagtagctggaactttttagtgtaaccagcatttattggagaagtgaatcacaaggaaataaagatgagtaaaagcaaagatgatgctcctcacgaactggagagccagtttatcttacgtctgcctccagaatatgcctctactgtgagaagggcagtacagtctggtcatgtcacctcaaggacagactgacaattgagttacatcctgatgggcgtcatgaaatcgtcagagtggaccgtgttccattggcctcaaattagtagacctgccctgtgttatggaaagcttgaaaaccattgataaaaaaacttttta

SEQ ID NO: 114454 - DNA, 937 bp, Homo Sapiens
ttttttgagtattttaaaggaaaagaacataaatgtttcaggatatgactaagaaaaatatagccctatattactttgtctagcctgtttttgtactgtatgccaagccatttgaaaatgctcatttttgacttgaagtgactaccaacattttcatgaacttcaagatactggggaataacaaaaccaacataaatgtacacagcctttgtctgagtctgattacattttagtcaaaaaaaccctaatttatttggtcctctgcattctttgaaggatgaggacttatatcaacaccatacttaatgtagctgttaccctaaaaacttattacacctcaaactaagtacaatcatacatctggcgtacttgtcatcattttaccaagcaaacccacacttcttaccttttcgtatttttccttcagcttcgcagccttcttttcataaggctgcttgtcatctgcagcagtgttattccacatctctcccagtttcttcgcaacatcaccaatggacaggccaggatgttctcctttgatttttgggcgatactcagagcagaagaggaagaaggccgaaggaggcctcttgggtgcattgggatccttgaacttcttttttgtctcccctttgggagggatataggttttcatttctctttcataacgggccttgtccgcttttgccatatcttcaaattttcctttctctttagcagacatggtcttccacctctctgagcacttcttagaaaactctgagaagttgactgaagcatctgggtgcttcttcttatgctcctcccgacaagtttgcacaaaaaatgcatatgatgacattttgcctctcggcttcttaggatctcctttgcccatgtttagttatttttcctcagcgaggcacagagtcgcccagtgcccgtccggctctcccaa

SEQ ID NO: 114455 - DNA, 685 bp, Homo Sapiens
ctttgtacaaaaaagttggctcggctgtttccctgcgcaggagccgcagggccgtaggcagccatggcgcccagccggaatggcatggtcttgaagccccacttccacaaggactggcagcggcgcgtggccacgtggttcaaccagccggcccgtaagatccgcagacgtaaggcccggcaagccaaggcgcgccgcatcgccccgcgccccgcgtcgggtcccatccggcccatcgtgcgctgccccacggttcggtaccacacgaaggtgcgcgccggccgcggcttcagcctggaggagctcagggtggccggcattcacaagaaggtggcccggaccatcggcatttctgtggatccgaggaggcggaacaagtccacggagtccctgcagaccaacgtgcagcggctgaaggagtaccgctccaaactcatcctcttccccaggaagccctcggcccccaagaagggagacagttctgctgaagaactgaaactggccacccagctgaccggaccggtcatgcccgtccggaacgtctataagaaggagaaagctcgagtcatcactgaggaatagaagaatttcaaagccttcgctagtctccgtatggcccgtgccaacgcccggctcttcggcatacgggcaaaaagagccaaggaagccgcataacaggatgttg

SEQ ID NO: 114456 - DNA, 1718 bp, Homo Sapiens
atttcataaacccggtcgatgccaccaaccacaagcatctatgatagagttctggagcaattctcatatataagttcatgtccagctcgttgtgataagtgatgaaaggcttggccacggctccccctgggatgatgttcatcatgggagtttcaatctctaggaatcccagctcatctaagaaacttcttatatatgtgatgatcttagagcggatgataaatttctgcctcacaaagtcattcaggatcaagtccaagtatctctggcgataccttgtttccttgtctttgaggccaaagtgaagatgaggtaacatatgcaaacagggagacagcagtgtgatctcatacggaatgatgctcagctcacccttcttggttttaccaggattcccctgaactccaattatgtctccccgacgcagtttgttattaatatgaataaattcttcttctgatttataatttctggaattggccatgacttgcaacttcaccccctctcctcgaagatcatagaagatgagctttcccccagaagctcttttggcatggatcctacctgccacctttaaggtgatgtcagtcaggtgatccccaggctgcaggtgactatatttttggatgaagtcagtgagtgagatgtctacatggaacttgtgtgggtatgggtcttccccattgaccttcagctgatgaattgcttgactgcggattttgtagtattgatttgggtccacgctctcttcctcaggacccacaccattatcagtggtgtggttggtggcagcagcagtggcttggcttagctgtttctcactgagctctttctgtttggcctccttctctgctactttcttctcagctttcaggcgtctcttcagctcattcttgctcagtttcggctcgctgccatccactttcacctcggccgcctgcacggccgccatcttcccggagggcccgacccaaaagtaaggaggatagtacgttaatttccaggtcaaggtgcgaagccccacctcttccgggggagagggggcgggcactctcgatgcgccgcggctgctgctgcgcaggcccagtgctgcgcttcgcggcagaggcgtctgcggtgacagctcagtcagttgagctctgtgtgccaggcgctcgcgagggggtagctcttctagtagtgctcggcgtcagacatggcggaggcgatggatttgggcaaagaccccaacgggcccacccattcctcgactctgttcgtgagggacgacggcagctccatgtccttctacgtgcggcccagcccggccaagcgtcggctgtcgacgctcatcctgcacggcggcggcaccgtgtgccgagtgcaggagcccggggccgtgctgctggcccagcccggggaggcgctggccgaggcctcgggtgatttcatctccacgcagtacatcctggactgcgtggagcgcaacgagaggctggagctggaggcctatcggctgggccccgcctcggcggcggacaccggctcggaagcaaagcccggggccctggccgagggcgccgcggagccggagccgcagcggcacgccgggcggatcgccttcacggatgcggacgacgtagccatccttacctacgtgaaggaaaatgcccgctcgcccagctccgtcaccggtaacgccttgtggaaagcgatggagaagagccaacttttttgta

SEQ ID NO: 114457 - DNA, 970 bp, Homo Sapiens
ttggatattttgaaacagcttacagtgctctcggatcagcaaaaagctaatgtagaggcaatcatgttggccgttatgaaaaaattgacttacgatgaagaatataactttgaaaatgagggtgaagatgaagccatgtttgtagaatatagaaaacaactgaagttactgttggacaggcttgctcaagtttcaccagagttactactggcctctgttcgcagagtttttagttctacactgcagaattggcagactacacggtttatggaagttgaagtagcaataagattgctgtatatgttggcagaagctcttccagtatctcatggtgctcacttctcaggtgatgtttcaaaagctagtgctttgcaggatatgatgcgaactctggtaacatcaggagtcagttcctatcagcatacatctgtgacattggagttcttcgaaactgttgttagatatgaaaagtttttcacagttgaacctcagcacattccatgtgtactaatggctttcttagatcacagaggtctgcggcattccagtgcaaaagttcggagcaggacggcttacctgttttctagatttgtcaaatctctcaataagcaaatgaatcctttcattgaggatattttgaatagaatacaagatttattagagctttctccacctgagaatggccaccagtccttactgagcagcgatgatcaactttttatttatgagacagctggagtgctgattgttaatagtgaatatccggcagaaaggaaacaagccttaatgaggaatctgttgactccactaatggagaagtttaaattctgttagaaaagttgatgctggcaccagatgaagaaaggcaagcctctctagcagactgtcttaaccatgctgttggatttgcaagtcgaaccagtaaagctttcagcacaaacagactgtgaaacaatgtggctgttccgaa

SEQ ID NO: 114458 - DNA, 529 bp, Homo Sapiens
actttgtacaaaaaagttggggcggggtgtctgccgtgtgtggtcacggtcgcctgggcccgtcccacaacctgggacccggcagtctccttcgcctgccctgcggccattcagggatgtgcggggcacctcctgccctccctggccaggtggccccagaggcacaggccgcagacaccgcgggggacctgcgtgggcctccagttcccgcccaagcccttcccgtccccagctcagggcaggtccagctgacgccagcggctggggaagactctgtcccctccaggtgtgaggccttggcaagtgcttcaagcctccctccgatcctcccctgtgagcagaggggtcagagcgcccgcggcgcgaacgcctcatacctcggtccggttcacactgaccccggcctttcctaggcctgagcagcagcccaggcccctcgccctgctgaccccagtgtaggctcagccaggccctgcctgcctcaccaggccgggagctgagtacagaagccagtgtactcaatgaagca

SEQ ID NO: 114459 - DNA, 918 bp, Homo Sapiens
actttgtacaaaaaagttggcctggtaagcagctctacaacgtggaggccacatcctatgccctcttggccctactgcagctaaaagactttgactttgtgcctcccgtcgtgcgttggctcaatgaacagagatactacggtggtggctatggctctacccaggccaccttcatggtgttccaagccttggctcaataccaaaaggacgcccctgaccaccaggaactgaaccttgatgtgtccctccaactgcccagccgcagctccaagatcacccaccgtatccactgggaatctgccagcctcctgcgatcagaagagaccaaggaaaatgagggtttcacagtcacagctgaaggaaaaggccaaggcaccttgtcggtggtgacaatgtaccatgctaaggccaaagatcaactcacctgtaataaattcgacctcaaggtcaccataaaaccagcaccggaaacagaaaagaggcctcaggatgccaagaacactatgatccttgagatctgtaccaggtaccggggagaccaggatgccactatgtctatattggacatatccatgatgactggctttgctccagacacagatgacctgaagcagctggccaatggtgttgacagatacatctccaagtatgagctggacaaagccttctccgataggaacaccctcatcatctacctggacaaggtctcacactctgaggatgactgtctagctttcaaagttcaccaatactttaatgtagagcttatccagcctggagcagtcaaggtctacgcctattacaacctggaggaaagctgtacccggttctaccatccggaaaaggaggatggaaagctgaacaagctctgccgtgatgaactgtgccgctgtgctgagagaattgcttcatacaaaa

SEQ ID NO: 114460 - DNA, 912 bp, Homo Sapiens
ttggatcttgggatccggagagtggccgggccggcagagcagggggccgaggacaccaggtctgttctcagagcgatgggccgcggagactgatctgccgccatgattggaggcttattcatctataatcacaagggggaggtgctcatctcccgagtctaccgagatgacatcgggaggaacgcagtggatgcctttcgggtcaatgttatccatgcccggcagcaggtgcgcagccccgtcaccaacattgctcgcaccagcttcttccacgttaagcggtccaacatttggctggcagcagtcaccaagcagaatgtcaacgctgccatggtcttcgaattcctctataagatgtgtgacgtgatggctgcctactttggcaagatcagcgaggaaaacatcaagaacaattttgtgctcatatatgagctgctggatgagattctagactttggctacccacagaattccgagacaggcgcgctgaaaaccttcatcacgcagcagggcatcaagagtcagcatcagacaaaagaagagcagtcacagatcaccagccaggtaactgggcagattggctggcggcgagagggtatcaagtatcgtcggaatgagctcttcctggatgtgctggagagtgtgaacctgctcatgtccccacaagggcaggtgctgagtgcccatgtgtcgggccgggtggtgatgaagagctacctgagtggcatgcctgaatgcaagtttgggatgaatgacaagattgttattgaaaagcagggcaaaggcacagctgatgaaacaagcaagagcgggaagcaatcaattgccattgatgactgcaccttccaccagtgtgtgcgactcagcaagtttgactctgaacgcagcatcagctttatcccgccagatgga

SEQ ID NO: 114461 - DNA, 876 bp, Homo Sapiens
aactttgtacaaaaaagttgggaagtttggttctttggtctgcagtaccaggacactaaaggtttctccacctggctgaaactcaataagaaggtgactgcccaggatgtgcggaaggaaagccccctgctctttaagttccgtgccaagttctaccctgaggatgtgtccgaggaattgattcaggacatcactcagcgcctgttctttctgcaagtgaaagagggcattctcaatgatgatatttactgcccgcctgagaccgctgtgctgctggcctcgtatgctgtccagtctaagtatggcgacttcaataaggaagtgcataagtctggctacctggccggagacaagttgctcccgcagagagtcctggaacagcacaaactcaacaaggaccagtgggaggagcggatccaggtgtggcatgaggaacaccgtggcatgctcagggaggatgctgtcctggaatatctgaagattgctcaagatctggagatgtatggtgtgaactacttcagcatcaagaacaagaaaggctcagagctgtggctgggggtggatgccctgggtctcaacatctatgagcagaatgacagactaactcccaagataggcttcccctggagtgaaatcaggaacatctctttcaatgataagaaatttgtcatcaagcccattgacaaaaaagccccggacttcgtcttctatgctccccggctgcggattaacaagcggatcttggccttgtgcatggggaaccatgaactatacatgcgccgtcgcaagcctgataccattgaggtgcagcagatgaaggcacaggcccgggaggagaagcaccagaagcagatggagcgtgctatgctggaaaat

SEQ ID NO: 114462 - DNA, 615 bp, Homo Sapiens
gagtgagccactgtgcctggccctaaaaataatttattaagcacataaagcactctatgccagacactgttcaaagaacttcatgttaactcatttaatcctcccagttgtagctataaaggagatgctagtataaaaagttcaagaaactgaggcaaagagcaatttagtaacttttggggatttgaatccaggtagcctttctaataccaagggaataaaacaaaataaattacatgcagtttaaagcagtggcacttctgtcatgtttatctcttcatttcctagagccaaatctttcccaggacttacataagtaatgtccattccttgtcctgtttaaagatagtaccatctagcctcaaagaactgattatagaattgggtctgtaatttgtttctggaaattggtgttctgaaactatttccccaacaaaacacctagaaatgctgaataaaatataagaaaaatcttttaatgtataaatgagtggtgaggaaacaaaaatgaagagagaatagagaactatggatgatagctggtgctaaccctatggctactttggagttgcttgatggtcttgacaacgaaagattttacaagtgcctgagcgc

SEQ ID NO: 114463 - DNA, 912 bp, Homo Sapiens
gaacaaataccatgtcttcttttcaaaggatcaaaggcctttaggacccacagctgaagaaggcgcttgctgccagcatgtccctcccccacggccaccacacacttcaagtttacaaaaataaatatttatcaacagtatatttgacaaaaaccacccccaatcgatggcagaaagcagtattttctagctggcactgaaacttaacctatttttttgagggagaaaaagactaaaatgtaagcactaacttcctccttctgcatcttccacagaagacccacttgtgggcattctctttctgtccgttatcagtgggtttacatccgaaggccggcggcaagacacttgaaccacaaacaccagacatgcaggtgtctcaatggcatgcagattatttaaagtgcatcacttgtgagaagcttctcaaatttctgactgtcataaccaggtgtcacctaaaatctgtcctgtaggccaagatgctacacgcagcgcccaggcagtcagaggtaagtgagcgcctcccgcctcagaaagcttttacagggccacgctcgccaggctttcctcgcccacgctgaacccacgtcctgggcacagcagctcccaagctgtcagcagtcggctggcagtgccaccacaccctctcggaatcatgcacagtgctgcctctatcacctctcaccccagcctcgcaaggcctgttgagaagagaagctccctgggaggacacccacggagctggcacgagcgcagcaggagagacggacggcagcctccggcgggcgaaggacccggcttcagatgcccgctggctggcaatcaggcagagcctggccaaccgtgccaggcccccttcctcactccaggtgtgggttcattctgccttcaggccggagtctgtcccaa

SEQ ID NO: 114464 - DNA, 931 bp, Homo Sapiens
ctttgtacaaaaaagttggcttggaactatcccctaccgacaaaatgatggatgtcactgtgactatcaagtcttccatcgacagtgaacccgccttggtcttaggccctctgaagtctgtgcaggagctgcggagggagcagcagctggctgagatcgaggcccgcaggcaggagagggagaaaaacggcaatgaggaaggtgaagaaagaatgaccaagcctcccgtgcaggagatggtagatgagttacaaggccccttctcgtatgatttctcttactgggcgcggtctggagagaaaatcactgttacaccgtcatctaaagagctgctcttttatcccccttcaatggaagccgttgtcagtggagaaagctgcccagggaagctgatcgagatccacgggaaggcaggcctgtttttagaaggccagatccaccccgagttggaaggagtcgagattgtcatcagtgaaaagggggcaagttcaccgctgatcacagtctttactgatgacaaaggtgcctacagtgttggccccctgcacagtgacctggagtacacggtgacctcacagaaggagggctatgttctgactgcagtggaaggaaccatcggagacttcaaggcctatgccctggcaggcgtaagctttgagataaaagctgaggatgaccagcccctcccgggagtcctcttatccctgagtggtggcctgtttcgttccaacctcttgacccaggacaacggcattctgacattctcaaacctgagccctggccagtattacttcaaacccatgatgaaggagttccggtttgagccatcctcacagatgatcgaaggtgcagaaggccagaacctgaaagatcaccatcacggggtaccgaaccgcttacagttgctatggcacagtgtcttccttaaacg

SEQ ID NO: 114465 - DNA, 924 bp, Homo Sapiens
ttggtgatcacaggcagtgcaaccaccaagccttccagaagcacggtcgctccaccaccacctccgacatgatcgccgaggtgggggccgccttcagcaagctctttgaaacctgagcccgcgcagaccagaagtaaacaggcaccttggacgggggagagcgtgtgtgtgatgggaaaatccggacccacgcgtgtgctgaaggcgtacggtgcttgccagattttcaacttgagcataaattggttgccattgagaatttaagaatctggaatattgcagcttttggttaaacttaatgcatggttggagatgttatggcgacactaaacaaagtattcctgaactttccttagctccttggtagtaactgggaagacagaaatgaagaaaatcacatgagaatgaagaattctttagcagctcaacagagtttctcggcctgctcccagatcggcgaagtttctacttgttactctctctgccggcgcccttcgttcctcctctgcttcccttccctagtctttcctccggcagggagctgggcaggggtccccgggtgtctccctgagtcccgactgcactgactgggtccatcagagggctgcttcgttctccagctcatcttcttttaaagtggtgactagcttggtggtatctggctgctggtgtttggcttattgacatactccagggtaatcaatgatgactttgtttggaaacccttttggaggcaccatgggaacagaaggaaacatgagtgacgctgacccttgagtgtgtgggtggggagctctgagacgcctcctgtcccacgctctccggtgtccgtgtctacacaggggtccccatgatacccaccggccccagcagggcagaccggaccggggagggcacggtgaagggctgcagcctggggtctga

SEQ ID NO: 114466 - DNA, 985 bp, Homo Sapiens
cccaagtttgttggtcactagattccctgtccagctatgagatatttcaagtgcaatgacattgagaagtgacttgtcgcctgccagtagagtaggagttacaaaagtaaggcaaggattctccatgcccaccataagggaagggatggtggcaggaccaataggtcatactgtccccatacatacggtcctcccagatcttctgctattttaagcatagattcagtctcagaaaactcataagcagacttttccacctgctctttctcagaccacaccaaagttcttgggccaatttgcctgctttctaaagctccaacaactaaagcaatcaggtagcagggtattggaactttttggatgaatttgtatattttcctgcttgggtcttctgggtcaggtgtttctccatcacgaatagcactcataagtgccaccagttctttagggacagacacctctgcagtataggttaatttcacagaaggagtgtcctgacaaggaaggattgctctgcagtggatggcctggcactgactaaagagatatgggtgttccttcccagaagtctgttcaggagtgagccactggagagcagaagattttggagaggtctcaaaagaaatttctataacaatttcttgatttttgctcaaagcgataggaagagagatttccattggcgatcccttgtaactttgtctttctccaagagcatatttgacttcttgtccattgatcactactttttctattgtaaggtcctttgtatccaaaaccaggctgcgcagattgtcctcctgagactggaccgtgagagcagcagtcccggtcagcgtccggcgagtaaagtcgacgctgcagcgcaggtgcaggtgcttggtccggcagacggaagccggagaggccaacgaacaggtatccactatctcgggcatggctctgggggatcacacagcacagcgccaacttttttgtacaaagt

SEQ ID NO: 114467 - DNA, 933 bp, Homo Sapiens
  misc_feature (131)..(139): n is a, c, g, or t
gatggcgagacccgcataggctgggggaatctgcccgtgcataagaacgatcatcagccccgtggtggtgatgagggcgatgctgatgaggtccagccgcacagccagccaccgcatcgcacacgtaaacnnnnnnnnnggagcttggttgtcatccagcagctcctggtatctgtgcagaaactcctgccctttattgtaggcgtggatggtggcaaggccctgtatgctggacgtgatgtgggagaggaaaggtgactgcgtgatattgtccagacgcttcagctcccgaatcaggaccctggagacaatgtgcaggactgaaaagaggatgacaaggggccccactgccacaaggaaccacgggaagactcctgcgatcattcccacacagaagaacaccaggataacgttctggatgaacatctcggcctggaacggcagccgcacgtcaacttcatccatgtctttggaaaacctgttgagaatcctccctgtgggggtcgtgtcaaaaaacttcatagggcttcgaaggatccttcggaaaagctcgtcatgcagccgggaggaagctcgcagcgtgcccttgacaaagacaactcctcgaatggctttcaggatcagcatgactgccatggagagggcgtagatgctggcatagtactgcatatgaggattgtccttcatgctgtcactcaccgaggtctcgttccctcgagtcacagtggtgttcccgcttccttgcttgatccagtaactcaaccaccaggtgctgaaggcggtgctgcctacattcagcatgaaaagggccataataaccaggaatgccaaggggcccccagcagcctggatgtagacaccatatactgaccagggcactgaaccctgccctttctcttccagctgcacaagcccaacttttttgtacaaagt

SEQ ID NO: 114468 - DNA, 966 bp, Homo Sapiens
aactttgtacaaaaaagttgggccctgagcccaactgggggagtgagaggccatagctgtctggcatgggcctctccaccgtgcctgacctgctgctgccgctggtgctcctggagctgttggtgggaatatacccctcaggggttattggactggtccctcacctaggggacagggagaagagagatagtgtgtgtccccaaggaaaatatatccaccctcaaaataattcgatttgctgtaccaagtgccacaaaggaacctacttgtacaatgactgtccaggcccggggcaggatacggactgcagggagtgtgagagcggctccttcaccgcttcagaaaaccacctcagacactgcctcagctgctccaaatgccgaaaggaaatgggtcaggtggagatctcttcttgcacagtggaccgggacaccgtgtgtggctgcaggaagaaccagtaccggcattattggagtgaaaaccttttccagtgcttcaattgcagcctctgcctcaatgggaccgtgcacctctcctgccaggagaaacagaacaccgtgtgcacctgccatgcaggtttctttctaagagaaaacgagtgtgtctcctgtagtaactgtaagaaaagcctggagtgcacgaagttgtgcctaccccagattgagaatgttaagggcactgaggactcaggcaccacagtgctgttgcccctggtcattttctttggtctttgccttttatccctcctcttcattggtttaatgtatcgctaccaacggtggaagtccaagctctactccattgtttgtgggaaatcgacacctgaaaaagagggggagcttgaagaactactactaagcccctggccccaaacccaagcttcagtcccactccaggcttcaccccaacctggcttcagtcccgtgctcagttcaccttcacctccagctccacctatacccccgg

SEQ ID NO: 114469 - DNA, 886 bp, Homo Sapiens
actttgtacaaaaaagttggctggaccacgagccggtgggcagcatgggcttggtggagatgctgcaccgctccaaccttctggccttggtgggcggtggtagtagtcccaagttctcagagatctcagtgctgatctgggacgatgcccgggagggcaaggactccaaggagaagctggtgctggagttcaccttcaccaagccagtgctttctgtgcgcatgcgccatgacaagatcgtgatcgtgctgaagaaccgcatctatgtgtactccttccccgacaatccccgaaagctgtttgagtttgatacccgggacaaccccaaggggctctgtgacctctgccccagcctggagaagcaactgctagtgttcccgggacacaagtgtgggagtctgcaacttgtggacctggcgagcacaaagcctggcacctcgtctgctccattcacgatcaatgcacatcagagtgacatagcctgtgtgtctctaaaccagccaggcactgtagtggcctcagcctcccagaagggtacccttattcgcctctttgacacacaatccaaggagaaactggtggagctgcgccgaggcactgaccctgccaccctctactgcattaacttcagccacgactcctccttcctctgcgcttccagtgataagggtactgtcccatatctttgctctcaaggatacccgcctcaaccgccgctccgcgctggctcgcgtgggcaaggtggggcctatgattgggcagtacgtggactctcaatggagcctggcgagcttcactgtgcctgctgagtcacttgcatctgcgccttcggtcgccattactttccaaaacgtcaactctgtcattgccatctgcgtaaatggga

SEQ ID NO: 114470 - DNA, 667 bp, Homo Sapiens
tttgtacaaaaaagttggaaatgatttaggatatagcttgaatgcttaaatatgtgcacctttacaaacctctcagtgtattcttggagttcttgaaatgttgttttaatatttgttgccagtaatgttctttcttcacagccgctccaggaattctgaagttctgggcctttctcagaagactgtaatgtacctgaagtttctgaaatattgcaaacccacagagtttaggctggtgctgccaaaaagaaaagcaacatagagtttaagtatccagtagtgatttgtaaacttgtttttcatttgaagctgaatatatacgtagtcatgtttatgttgagaactaaggatattctttagcaagagaaaatattttccccttatccccactgctgtggaggtttctgtacctcgcttggatgcctgtaaggatcccgggagccttgccgcactgccttgtgggtggcttggcgctcgtgattgcttcctgtgaacgcctcccaaggacgagcccagtgtagttgtgtggcgtgaactctgcccgtgtgttctcaaattccccagcttgggaaatagcccttggtgtgggttttatctctggtttgtgttctccgtggtggaattgaccgaaagctctatgttttcgttaataaagggcaacttagcc

SEQ ID NO: 114471 - DNA, 922 bp, Homo Sapiens
ttgggatggtctcgatctcctgacctcatgatccgcctgcctttaagttccttgtagattctggatattagccctttgtcagatggatagattgcaaaaattttctcccgttctctaggttgcctgttccctctgatgatagtttcttttgctgtgcagaagctctttagtttaattagatcccatttgtcaattttggcttttgttgccaatacttttggtgttttagtcataaagtctttgcccatgcctatgttctgaatggtattgcctaggttttctttagggtttttatggttttaggtcttaaacatttaagtctttaatccgtcttgagttaatttttgtataaggtttaaggaaggagttcagtttcagttttctgcatatggctagccagttttcccaacaccatttattaaatagggaatcctttccccattgcttgtttttgaatgatttggttttttaaagtctctaattcagacttttcacaactttagagttttctctctactacgtgtaaatgagtaggattttgctgtgtttattatgatgtgaaagaccgacattggattggaatttaggtcttctgtgtgcactgttcactacattttgtttgttagagttatttagtgcttataacagaatagtcacagctgtgatgagcagaggaatagttcttatggcctagagaggatgagcaagaaataatctacatgcaataacatactaagaaacagagggcactcatcaacagatgagttgttttaatttctaattctttatgttgactatatttctaatccctttgcctaaaggcatttagaatcactctgggaagaaaaataatcaagatgtttggccaacaatgtaagggataaggaaaagagtatgactccaatgaaaagggctgagaggg

SEQ ID NO: 114472 - DNA, 897 bp, Homo Sapiens
ttgggctataacagagaggaatgtcttcgaacagtcgaatgctataatccacatacagatcactggtcctttcttgctcccatgagaacaccaagagcccgatttcaaatggctgtactcatgggccagctctatgtggtaggtggatcaaatggccactcagatgacctgagttgtggagagatgtatgattcaaacatagatgactggattcctgttccagaattgagaactaaccgttgtaatgcaggagtgtgtgctctgaatggaaagttatacatcgttggtggctctgatccatatggtcaaaaaggactgaaaaattgtgatgtatttgatcctgtaacaaagttgtggacaagctgtgcccctcttaacattcggagacaccagtctgcagtctgtgagcttggtggttatttgtacataatcggaggtgcagaatcttggaattgtctgaacacagtagaacgatacaatcctgaaaataatacctggactttaattgcacccatgaatgtggctaggcgaggagctggagtggctgttcttaatggaaaactgtttgtatgtggtggctttgatggttctcatgccatcagttgtgtggaaatgtatgatccaactagaaatgaatggaagatgatgggaaatatgacttcaccaaggagcaatgctgggattgcaactgtagggaacaccatttatgcagtgggaggattcgatggcaatgaatttctgaatacggtggaagtctataaccttgagtcaaatgaatggagcccctatacaaagattttccagttttaacaaatttaagaccctctcaaactaacaggcttagtgatgtaattatggttagtagaggtacacttgtgaattaagagggtgggtggg

SEQ ID NO: 114473 - DNA, 907 bp, Homo Sapiens; identical to SEQ ID NO: 104534

SEQ ID NO: 114474 - DNA, 918 bp, Homo Sapiens; identical to SEQ ID NO: 104535

SEQ ID NO: 114475 - DNA, 645 bp, Homo Sapiens
ctttgtacaaaaaagttgggaaagatttattggagattaacacctaagacaggaaaagggaagaaataatattgacagtagggaaataggattgcaatgtagatctgacagtctcctaacacactgaagaatctgaagtgaaaattgcttgtttcagaggtgtctcatgttgagtagtaagtggctgggtccttttactacattcttgctcagccatcgattgatgccaccttgagaagagcacgaccttgggatgaaacctggagcagatatgaagaaattaataaccacaggctgacagctaactggaccttttggggctgggtaaacgtcccttcttgaaagaggatccgagcggcatatttccatttttatcatatgagatatcttgctggtctagtgttctatggaacacatttgcatcctgttctattaattctgctaatgataatgaaacagtttagtagtagataagcataattattgttactattagtataacttggcaatatttaaatacttgcacaaatttgggtacaactggatgctttatacctactaaacctctgcttcctatttaaaatttttattttaaataaaaattttaactttctctctcagctttggaatttaaagaatcatgag

SEQ ID NO: 114476 - DNA, 940 bp, Homo Sapiens
ttggcgccgcagccgcggcctcaaggccctgcgcctgtgccgcgcgctggcgctgctggaagacgaggagcgcgtcgtgcgcctgggggtgcgcgcctgcgacctgcccgcctgggttcattttccagacactgaaagagcagaatggctaaataagactgtaaaacacatgtggcctttcatttgccaatttatagagaagttgtttcgagaaactatagaaccagccgtgcggggagcaaacacccaccttagcacctttagtttcacgaaggtcgacgtgggccagcagcccctcaggatcaatggtgttaaggtatacactgaaaatgtagacaaaaggcaaattattttggaccttcagattagttttgtaggaaattgtgagattgatttggagatcaaacgatatttttgtagagctggtgtgaaaagtatccagattcatggtaccatgcgggtgatcctggaaccgttgattggagatatgcccttagttggagctttgtctatcttcttccttaggaaaccacttttagaaattaactggacaggactgacgaatcttctggatgtccctggattgaatggtttatcagatactatcattttggatataatatcaaactatctggtgcttcccaatcgaatcaccgttccacttgtcagtgaagttcaaatagctcagttgcggtttcctgtaccaaagggtgttctaaggatacattttattgaagctcagatcttcaggggaaagacacttaccttaagggacttgtcaagggaaagtcagacccctatggaatcattagagttggcaaccaaatcttccaaagcagagtcatcaagaaacctcagtccaaagtggaatgaagtctatgagctttagtgtatgaacatcctggacagaattagagattgagctctttgatgaagaccc

SEQ ID NO: 114477 - DNA, 521 bp, Homo Sapiens
actttgtacaaaaaagttggaaaatacagttgagccagtgagcacattttataatttggaagacacaaatcaaatgtgaaggatttgattttctacatttaaaatgaagaaccaaaactctcttcttgattttcagctaaaggcaggagactactttccaactccttttgcttctggagaaggccctgaaatcacattgatatatgtttgttagtaaaatgtgcacacctgacttgcaatgttgtgttaaactagaattatattcacttggaaaacatatcgcttaggataaaattttgtcattcaaaaattttttcagaaatgcttgtactagaccacctcatttggatatatagctatcacatttgtaagattctgtttttagcataaaaatcaatagggatgaaaattttcttagaactcaagactccataactatgggggtaaatgaagtcatcccttctcccccagtccacccccaagtgctcttagatactgaaggagtctcccttaacatacag

SEQ ID NO: 114478 - DNA, 923 bp, Homo Sapiens
actttgtacaaaaaagttggaacagatattctgaatgcacagactgtgtctttgagtaatgataccatagcaataagagacaaagctgatgaaaaaataatcttcctctttgaggcatcaaccggaaagccgttaggtgatggaaagtttctttctcataagaatgaaatcttggaaattgctctggatcaaaaaggacttaccaatgatagaaaaattgctttcattgataaaaatagagatctctgtatcacttctgtgaaacgatttgggaaggaagaacaaattatcaagcttggaacaatggtgcatactttggcatggaacgatacatgcaatatcctttgtggacttcaagatactcgatttatagtgtggtattaccccaatacagtttatgtggacagagacattttgcctaaaacattatatgaaagggatgcaagtgaatttagtaaaaatccccatattgtgagttttgttggaaatcaagtaactattagaagagctgatggctccctggttcacatcagcatatcaccatatcctgctattctccatgaatatgtaagcagttcaaaatgggaagatgctgtgagactttgtcgctttgttaaggagcaaaccatgtgggcttgtctagctgctatggcagttgctaatcgagatatgactactgcagaaatagcctatgcagcaattggtgaaattgataaggttcagtacatcaattctataaaaaatcttccatctaaagaatcaaaaatggcccacatactactgtttagtgggaacatacaggagctgaaatagtacttcttcagctggccttgtttatcaagcaatccagatcaatattaatctctacaactgggaaagatattaaatcgtctttcctcttacggattatatgctttcctgaa

SEQ ID NO: 114479 - DNA, 862 bp, Homo Sapiens
ttggacaaaataagaccacaagaagtaggcttttgcgatgtagatgataatatctgtctcagctggcttataagagtatccagaggatgaagtgagatgatacgaacatgctttgaaaaggccaaatccatcaaacttctgcaatgtattattatttatctgccctccatcctgatttcttattttcttaattgaataatccttaacaaattaatacaggtttcttccgctttcctattttccctggagtagatggtcaaattgcccaactactagtatgggccttttgatgggtggtctagacagttgggtttgtctgatttctcctttctcttccttgtttcttgacaccatttggtttggtagcagctccttacttgctgtgcataatgataacttctccgcatctcttgacattgtatcatggcagtgtgcctatgaagtcaaccagtacctccttttgtttgaactttggttaaattaatcatctgatttgcacatcaatctgttgctatgggggttactgatgtcacactgtcagtattatgattaccataatatctaacaggcaaaaagggactggttgctagtggaaacctcagagtgaaactcacccagctttagtaaccaactcgattgcatagactttagataaccatgtgaaggggtaagtgaattaatcatccagttggattccatttgaatatttttcttccatatgtgtgttccctctagcaattgtctagtgccacttgaaattgttgagggctctattgggaggttatttttgggaagctggtgaaacaacagacagctgttctcagaacaaatgtcataggatctgccgaaacaagcttccagt

SEQ ID NO: 114480 - DNA, 896 bp, Homo Sapiens
atctctgcagatgctccagggtctcagtgtggaagaggcggatggaggtgccggaggagaaggcccatccagacgccgctgcccccctttcaccatgtgtgtcacgctcactgcttcgtcctggtgcgcctcgaagctttgttgaggctgcagggtggtggcttccaggacagtgacccggggcccacagctggcccacacggcatcctccaggctcaacagggtgcggacaggcccgggccccacagtcaggcacacgggagggctctccaggtcccacaggacacctccgctggtccgagggtaagcagcaagggtcccatcctgcaggccagcgagcaggtggaaggggctgtgtcgcaggcagagcacaggctgcagacctgggctcctgcagctcaccaggcactgggtgccagtgtccacactgctgtagaggaggatgctgccatcctggagcccgaggcagatggttggatgcactgtggccgaggggtcagcaactgtcgggctctcgtctctgctctccgcctcctcctccagctccgggatatactccatgcagagcacaggggctgccagtgggaaggacttgacggtgcggggcgagggccggttcaaggaaaagatttccacctggccccctgcgccttcctgtccgcccccgacccagaggtagccctgtggaagggaggtgctgacggctgagaaacccagcaggggacagttgacaggactgtggaccagggccccaagctgcaggctgagtgcccgggaggagaaggcagggatgcagcaggccaggatcgggcaccagaatggggctttgctcttcttgtcctcatccgggcatagccagcctggctggttctcctcccggagtccgattttgccaa

SEQ ID NO: 114481 - DNA, 884 bp, Homo Sapiens
ctttgtacaaaaaagttgggtgccaatgactccgggcctggcagggggatgacagctcggacgaagaggacaaggagcgggtcgcgctggtggtgcacccgggcacggcacggctggggagcccggacgaggagttcttccacaaggtccggacaattcggcagactattgtcaaactggggaataaagtccaggagttggagaaacagcaggtcaccatcctggccaccccccttcccgaggagagtgagtgaaaccccggctgcagggcgcatgctccgccccagggattgtgggggttgtagttccacgcaggtggtggccagagtggtttgttgaggtgggggctgctgtttgggagtcttggccttctcttattcaggcatgaagcaggagctgcagaacctgcgcgatgagatcaaacagctggggagggagatccgcctgcagctgaaggccatagagccccagaaggaggaagctgatgagaactataactccgtcaacacaagaatgagaaaaacccagcatggggtcctgtcccagcaattcgtggagctcatcaacaagtgcaattcaatgcagtccgaataccgggagaagaacgtggagcggattcggaggcagctgaagatcaccaatgctgggatggtgtctgatgaggagttggagcagatgctggacagtgggcaaagcgaggtgtttgtgtccaatatcctgaaggacacgcaggtgactcgacaggccttaaatgagatctcggcccggcacagtgagatccagcagcttgaacgcagtattcgtgagctgcacgaaatattcacttttctggctaccgaagtggaaatgcaggggagatgatcaatcgggattgagaagaacat

SEQ ID NO: 114482 - DNA, 575 bp, Homo Sapiens
gctttccagggggatccttggaccaggactcacttgggccgaggacttcctgaggctgcaaggactaggctgactctctctggtttctgggtaggcccttgtatcgtacatgctgctcccatgtctggtagaaaagcaggcctctctttgactccagagagctacctccagtggctggtcttgcacatccacttctaacacctcccgccaactgagataggcagcccccttcatttcatcttcgggacaccagccccaggggctgctcccatcccacctgctcctctgggcctcagaagccgggcatcattggctggacatctcctttccttgcaaggagggagtttgcctttcccctgcaggctgctggcacctttgaaggtccatggaaacctcacctacaaagccttaaagagccccagcccctgggcaggctgaacacacagtgtctgcagccccgttgtcttgtcatggggagctgagagggggcaccaaaggccaccaaagtttggctcttctttcctagaaccccggcttctcttccactagaacatatgcagtagagtatgttccaa

SEQ ID NO: 114483 - DNA, 961 bp, Homo Sapiens
ctttgtacaaaaaagttggggtcagagtgcgcggagcattggggctttccagctctcacagaaccttcagcatccccagctgccggtcttggcatcttcgaagtaaggagagttttagatgcttctggatgttcaatgctagcacctttacagactggagcagctcgattttcttcgtatttactttcaagagcaagaaaagtgctgggctcccacttattttctccctgtggtgttccggagttctgctccatatccaccagaaagctggcggcccacggctttggcgcatccatggcggcaatggtgtccttccctccccagaggtatcactactttttagtgctggactttgaggccacgtgcgacaagccacagattcatcctcaggaaatcatcgagttccccatcctaaagctaaatggccggaccatggagattgagtctacctttcacatgtatgtccagcctgtagtccatccacagcttaccccattctgtacagagctcaccgggattattcaagccatggtggatggtcagccaagcctgcagcaagtgctggagagggtcgatgaatggatggcgaaggaaggcctcttagatccaaacgtcaagtcaatttttgtcacctgtggagactgggacttaaaagtcatgctcccaggccagtgccagtacttgggcttgccagtggcggattacttcaagcagtggattaatctgaaaaaggcttacagcttcgccatgggctgctggcccaagaatggacttctagacatgaacaagggcctcagcctgcaacacataagccggccccacagcggcatttgacgaactgcaagacattgccaacatcatgaaaacactcgcctatcgaggcttcatcttcaagcagacatcgagccgtcctgatgggccgaggacaggatggggcaggacagggtagctgtttgggccc

SEQ ID NO: 114484 - DNA, 906 bp, Homo Sapiens
agcaagggtcagaggaaggtttggagggaggaagagagtaaaaggcccttggtgggcaggaggttgaggagggagctggggagagcaccagggcggggcatcaggccagtgcttggaaggtgtggccaaaggggtctctagctgctgctctgctgctcctgctcatggatgagtttggcgatggggccggtgatgccgcctatcaaggtccagtactcatcgaagctgatgcgcccatcatgattggcatccaggttctggatgagcttatccgcagccttccggttccctgtgtcctggggaggaagcagggtcagcaatgctgatggtggaagccccagagagactccaggcaggaccctaggcagagacccaggatctggcctgcacagctgcttcccttgggaaatgcaaatatagccctcactggctaggcctaagcatcctgagaagacagaggcctgggggtgtagaagaccctggagttagcggggacactggaaggatagaggcctcagcagggaaagacaccctcagaggccagaggcttgcaggggagggaaggggagagggaggcaaggcccttgggtgagaggccttaccgacagcatgtggttcagctctttctggagcatctcgcggaagctgctcttgctgatcttgttcttgaccaggctgtacttagacacatatttgtagaagttttccaccaggacaatgactgccttctccagctccgtgtagcagtctgacatctccctgcttcgcctgctggcggggcctgctgcctcagtctgcctcctctccagcagggctctggggcctgggctctggcactgccaagcagctccctgcgctcagcccagccgggactcctccccgctgcaccaacttttttgtacaaag

SEQ ID NO: 114485 - DNA, 966 bp, Homo Sapiens
ctttgtacaaaaaagttggaacatattgtgccagtgttgcaacgttttaaactgctaacagaccttaaaatatccccctacctgggtcctcagtgctatgtttaaagtgctgcagggatggagtggcgttttcttattgctgtatgtattgtacatagtggagtagttagttacctgataacagtcttgttatttgggtctcttagaccttacctctcaactccctcaagagtaccagtctctgaagttataatgctttggtctctacattaggggcaagatccagtctgagagaagtctcctttgagaagggccaagaggctctttcctgagtgtttgctttcggtttgttggtatgcctgtattgctgggctgtgctgctgctcgaagcagatggttttgactgtctttttgctctttcctatataatgaatagatgagtgaaaggagttttctttttctctttagtacttacgtattgggattcctgtgtcttacagctctccctctccaaataatacacagaatcctgcaactttttgcacagctggtatctgtctggtagcagtgagaccccttgtcttggtgatccttactgggtttccaagcagaggagtcacatgattacaattgccagtagagttgttgtttggggtacaagatgagaagaaagaaaaacctacagcctttctacattctgacatgctaacagtggtttaagtttctaaagtgtttaccagatgctgaaagcaaggggagggagcagaagcacttatgtttacggatattttaaactctgttagagagcagccctttgaaaatcccccatttggttctgctttttgacctctctctaccttttcagggtaatctttgtggcacaaacgatagcatttccaagctttagagttttctgaattcctgcgccttcctgacgtgagccctgagcgatcttctatgcagttc

SEQ ID NO: 114486 - DNA, 883 bp, Homo Sapiens
  misc_feature (50)..(59): n is a, c, g, or t
aactttgtacaaaaaagttggcacagccagcagggcttctgagagctgannnnnnnnnnctcccaatccataaagaaaagtcaagagcccaagtagcttcagaaaatggtgggaggtgggcatggcccatgccaggctggggtcctgcctgccctaagaagatgccgaactgctctcccactgcaaagaatgctgtctatgaggaggatgagctggaggaggagcccaggagcactggggagctgaggctctgggattaccggctcctcaaggtcttctttgtgctgatctgcttcctggtcatgtcctcatcctacctggcgttccgtatttctcggctagagcagcagttatgctccttgagttgggatgacccagtccctgggcacaggtaacagccacttggcctttgtccccattccttctccaagaagaatgttctgggtgctaagtctccaccaatgatccctgtggtttatgctgctgctgtgctaagactgcctatgaaggaaaatattccagatccctcctcctccccgcagctcttctcttccctctatgagagatctgaagtacgtgtttacaaagtaactggcttctacaatttttggactcaagcaaaaagccagattttttggaaccaactgaggaattctgtacacaaagcttcagcaaacacttagagaaaacaaacaaacaaacaaactgggtccttggaaacagttctggcacacaggcagaacactggaggccacctcaaaggacagaggccatgctttcgcatttggaatgtggctctgccacacagctcactcctatggtggggtcagaggtcagaacacaaaccacccatgtgggctctgctccctcccaacactctgtg

SEQ ID NO: 114487 - DNA, 802 bp, Homo Sapiens
ccatagcacctcctttcagctgtttcacagcttctctttgtttacaacatatggaaaggagggacagtagtgaaatttttatctgttgtttattagatgctttggcatacattaaaatgacattcggtgattatctctcaattttactgatccacattctccatgtgcctcattcctttgagcaactgagaatagagacatctaaaatttataaaataggaaagtatattttaaaagtttaagctgcttttcatgctagctgttcattttttctttgtcatgattaaaagccagctggaaatggtacaggtgcaaattttaaagcaattattatgggaggaggtgaaatgtgacttggaaagggtccttttccaggatggctttggtcctatgacagccttcatggagcacagctcctatttgatgtaaaacagagtgctgccaagagaacagaaaaggagcaggaatcagctgagtcagggagatgatagaatagttgagatgtagggaaaacacagtggactcaagaaagtagcatccttgatttataatcagtccaccattattgccagtggcagtttctttgagaattaacatcattgagcatctagcacagtgccttacatcatattgaagatacttaataaaaatttgttaaatgatgaataaaggaatgaatcttcagagattgggacttttaacatttcattttccatcaacctagctaggttataaagcatcaacaatggacaaagccatgagagaattatacccaggtctggccgggcacagtggctcacac

SEQ ID NO: 114488 - DNA, 936 bp, Homo Sapiens
tacaaaaaagttggcggcatcagcagccagtcgcccgtgtcccgcctgtctcctcggcggagcctgctgcccgtcctgccacctctctgctctgttcttgtctctgccttcattcccgaatggatctggtaggagtggcatcgcctgagcccgggacggcagcggcctggggacccagcaagtgtccatgggctattcctcaaaatacaatatcttgttctttggctgatgtaatgagtgaacagctggccaaagaattgcagttagaagaagaagctgccgtttttcctgaagttgctgttgctgaaggaccatttattactggagaaaacattgatacttccagtgaccttatgctggctcagatgctacagatggaatatgacagagaatatgatgcacagcttaggcgtgaagaaaaaaaattcaatggagatagcaaagtttccatttcctttgaaaattatcgaaaagtgcatccttatgaagacagcgatagctctgaagatgaggttgactggcaggatactcgtgatgatccctacagaccagcaaaaccggttcccactcctaaaaagggctttattggaaaaggaaaagatatcaccaccaaacatgatgaagtagtatgtgggagaaagaacacagcaagaatggaaaattttgcacctgagtttcaggtaggagatggaattggaatggatttaaaactatcaaaccatgttttcaatgctttaaaacaacatgcctactcagaagaacgtcgaagtgcccgcctacatgagaaaaaggagcattctacagcagaaaaagcagttgatcctaagacacgtttacttatgtataaaatggtcaactctggaatgttggagacaatcactgggctgtattagtacaggaaaggagtctgttgtctttcatgcatatggagggagc

SEQ ID NO: 114489 - DNA, 280 bp, Homo Sapiens
tgagaggctgaggtgagacaatcgatttagcccaggagtttgagatcagcctggacgacataactaaatctcatctctacaaggacgaggtgggaggatcagttgagcccaggaatttgtggccagcctgggcaacaaaagaagaccccatctggccaacatggccaacctggccaccacggtgaaactctgactctacaaaaatgatctgggcatgggtgacatgcatgtgtagtcccagctacttgggaggttgagatgggaggattgcttgatctca

SEQ ID NO: 114490 - DNA, 909 bp, Homo Sapiens
ttgggcggatgcaggctcagctcctggaactccggacaaacaactaccagctttcagatgaactacgcaagaatggtgttgaactcaccagtcttcgacagaaggtcgcctacttggataaggagttcagcaaagctcagaaggcactgagcaagagcaagaaagctcaggaagtcgaggtattgctgagtgaaaatgagatgctgcaggcaaagctgcacagccaggaggaggacttccgtttgcagaacagcacactaatggccgagttcagcaagctctgcagccagatggaacagctggagcaagagaaccagcaactgaaggagggggctgcaggagcaggggttgcccaagctgggcccctcgtggatggggagctgctgaggctacaggctgaaaacacagccttgcagaagaacgtggcagccctgcaggaacgctatgggaaagaagccgggaagttctcagctgtcagtgagggccagggggatcccccagggggcccggcccccaccgtcctggcccccatgccgttggcagaggtggagctgaaatgggaaatggagaaagaggagaagagattgctctgggaacagctgcaaggcttagagagctcaaagcaggccgaaacatccaggctgcaggaggaacttgctaagctctccgagaaactgaaaaagaaacaagaaagtttttgccgtctgcagacagaaaaggagactctgtttaatgacagcagaacaagattgaggaattacaacaacggaaggaagctgatcacaaagcccagttggctcgaacccagaagctgcagcagaacttgagctgccaatcagagcttggcagagctgagagatcagcggcaggggagcgcctggaacatgcagcagctttgcgggccctaca

SEQ ID NO: 114491 - DNA, 777 bp, Homo Sapiens
ttgaaaggattgtagctggcaccctcctcctcatcttcctcattcaatcagttaggaatgcattcagctgcaagctcaggaaacgcaaccgacagttgcctagatgtgcaggtgtgtttttctcccataacaaggagttcagaagtcgcctgtcagcctgggagcacagctcagcgatgcgtcaggacactgggctttctttccatccccaatcctcaccatcctattgctggtctcctcctggttgccagatacttgctgtagctgcagatctcagattcaagatccaggcaggaagaagggagaaaggacaggaggtaaagggctttctcctagtaagggtttcctgtttattctggaagggacaggaacctcttgcacttcgattgtccagaagtgtccatgcaggttatcttcactgcaagggaggctggaaaatgcctatttttagttgaagtccttgctcctctacctggagttagggttctgttagcatacgagggacatggttattgagtagacaactaacgggacctgccagtgtgctgttgcatggtctacctaacctccactctggagacagaaaaatcagtgccccaataacgctggaaatcttgcccaaggtcacacagctagtgggtgtgacatcccagtctcctgattctaagtattaaatgttctgtaaatcaatgacttgacattgattgttgaaggcatttttatggcatttggttttgaagcactgatgttaattttatgaagcgacttataataact

SEQ ID NO: 114492 - DNA, 898 bp, Homo Sapiens
ttggcgcccggtgccgccttccggctccagtccccgggctcggcctcggcgaggtgtaattcgcagcgcgggccggccccggaggctctcggcgagcgcggcgcggtaacaagtgggcgaggatgccgtacgagatcaagaaggtgttcgccagcctcccgcaggtggagaggggcgtctccaagatcatcggcggcgaccctaagggcaacaattttctgtacaccaatggaaagtgcgtcatcctaaggaacatcgacaacccagcccttgctgacatctacacagagcacgcccatcaggtggtggtggccaagtatgcgcccagcggattctacattgcctccggagatgtgtctgggaagctgaggatctgggataccacgcagaaggagcacctgttgaagtatgagtaccagcctttcgctgggaagatcaaagacattgcttggactgaagacagtaagaggatcgccgtggtcggggaaggaagggagaagtttggagcagtcttcctctgggatagtggctcttctgtgggcgagattacaggacacaacaaagtcatcaacagcgtggacatcaagcagagccggccataccggctggccacgggaagcgatgataactgcgcggcattctttgagggacccccattcaagttcaagttcacaattggcgaccacagccgctttgtcaactgtgtgcgattctctcctgatgggaacagatttgccacagccagtgctgacggccagatatacatctatgacgggaagactggggagaaggtgtgcgcgctgggcggaaacaaggcccactacggtgggatttacgccattagttggagtcccgacagcacccatttgctttctgcttctggggacaaaacttccaa

SEQ ID NO: 114493 - DNA, 602 bp, Homo Sapiens
tggcatgcaccttgaacttgtagggcacgttcttgatgaggcccggcacggtcagccggctctcggggctgtctccatccacccggaatgcggtggctggccctcctccttgggccatctcacaggtcaccaggtagccgacgatatccccattgggcctccgtggccgctcccagctcagctgcagcgagtctgggctcagggcagtgaacaccagcgggcctggggcactgggagtgctcaaagtgaaggcggagcctggcaggggacacagtgggctctgcgggtgcacctgggattcaatggtgatgacaccctcacgctctcggccccagccttcctggctctgggcccgcacgcggaacacgtaggagtggttgggcaggaggtcttccaccaccaccgaggtctgggcagggttggggatgttgagccgatgcagctcaccgccgttcagcagctggtactccacactgtagccctgcagcggccgctcgcaccgcggctcctgccagctcactttgagagatgtgggccccagggcagagaacaccaggcgggtgggcgtgtgcgggcacaccagccaacttttttgtacaaag

SEQ ID NO: 114494 - DNA, 797 bp, Homo Sapiens
ctttgtacaaaaaagttggggcagtgcaaatatccaagaagaggaagtttgtcgctgatggcatcttcaaagctgaactgaatgagtttcttactcgggagctggctgaagatggctactctggagttgaggtgcgagttacaccaaccaggacagaaatcattatcttagccaccagaacacagaatgttcttggtgagaagggccggcggattcgggaactgactgctgtagttcagaagaggtttggctttccagagggcagtgtagagctttatgctgaaaaggtggccactagaggtctgtgtgccattgcccaggcagagtctctgcgttacaaactcctaggagggcttgctgtgcggagggcctgctatggtgtgctgcggttcatcatggagagtggggccaaaggctgcgaggttgtggtgtctgggaaactccgaggacagagggctaaatccatgaagtttgtggatggcctgatgatccacagcggagaccctgttaactactacgttgacactgctgtgcgccacgtgttgctcaaacagggtgtgctgggcatcaaggtgaagatcatgctgccctgggacccaactggtaagattggccctaagaagcccctgcctgaccacgtgagcattgtggaacccaaagatgagatactgcccaccacccccatctcagaacagaaaggtgggaagccagagccgcctgccatgccccagccagtccccacagcataacagggtctccttggcagctgtattctggagtctggatgttgctctcta

SEQ ID NO: 114495 - DNA, 924 bp, Homo Sapiens
ttcattcatgattcacaaaaggcacttcaaaattccacagagccacagggtcactgttagtaggtcaccaatcctcctgtacaggaccgatggagaagctctaagacaatgggctatgtgtttcacttgatggggtccctggccatttgtaaataaatctcggatattagctagtttgtcatttatcttgcagtcaggcatacacaaaacagaaagacacacagtatgtttgcactttgaataaatgagattttgctgtatcatggcagtttataaagtattctcaagtctgttatttgacctaagatccaacattataatcgtacatttaagaggttacaatgtgagaggtactcattgagcagaattttctaataatctaatcaccttgccgatttgcacccagtgtccatttagaaacatgaaattaagctactggcactcaattgccacattgctagcatttaataaggactccactagatggaggaacaagggctctcaaaccaaataaccaacgaccacaagcatttcctgtcagacaagccaaggtcctgctggagctgcctctgaaggcagccggctgatggacaggcctggtcttccctctgtgtgccccactgccaggtggcaccttaccctgcgcaggcgctcagcctgcgcggtggtacagatgcttcactcacacttgccgggggctaaaatcacagcctatgaccaacctggcctggggtgttctgaggtagttcctgaactcgggatgcctgttacctactctctttcagaagtcaggacatgtaggaagtattaaaatatccatgcatcgctttcatcaataatcactgtaattgagtgcaaaataaaggaaacttgagttgctttatttagcttccaatttctgggaggctcaagaattataaccaa

SEQ ID NO: 114496 - DNA, 758 bp, Homo Sapiens; identical to SEQ ID NO: 104536

SEQ ID NO: 114497 - DNA, 899 bp, Homo Sapiens; identical to SEQ ID NO: 104537

SEQ ID NO: 114498 - DNA, 528 bp, Homo Sapiens
ctttgtacaaaaaagttggggcaaccagggctgggcagggcttagggtgtgtgggccaaacccccctggggttggcaaagccgcctgtcaggcctcctggtgggggcccctggacacagggagcagaccctctgcctcatggggtaggagtggctgcctcctgtgttctctggatttcttctcccaacaactacaaccctggacttgcctccccaggcctcttgcctgtaaatagaagcccgcaaactgtacagatttacagaggcatcgagactgggccctgggagttgccatctgagagccgatggccccagcatcccccaggtgcctgcctggcaccacagtgaccctggcctcagcgtggcaaatgcatgtaaatatttttcgtaggcagcgtggctccagagagccccctgaaaacagtgtccctccctcctgtgagtcctttctcctgtacagaacctgcctggggtgggtgggggtctgccattccctcccccaggacttccctgccccttctctcccctg

SEQ ID NO: 114499 - DNA, 932 bp, Homo Sapiens
aactttgtacaaaaaagttggctgataagcagactaccttgcctgctgctggtgctctttgcttcatccacaaggctttacctcccttggtgcaagccaggacaacccctgccacaattccaggtgctttatcaaaataaagcaaggcagccatctcatcctgcacacactttcttaaagcactgtgtacactgaccttgagtcctgctgagaatttcaggtgctcttagtgactccagcacattctctttagtcatcaagcttagtaatcacctaaggtggtgcttggcagactttttctgtaaagggccagatagtcttttcagtttgtgggtcatctgtctgtgtcatgactactgaagttgctatggtagtgcaagagcagccgtaggcaatccttaaagcaatgggcatgactgtgttccattaaataagtcttgagactccagtgtacttttacacactttaatgctgccaaagttgaaggcaagggtttcggggaggattctcaaaggagctgggccttgaagagggtgatggagaacttctgtgaacaattctaagaagtcttggtggctttggggaagctgtggagggaggagtggaagaagatatgtctggagagttcactggagccacacttagaggccctgaaggacatgtgatggtgactctaggggcaggagtgtgattttctgctggttaataggaggttatggtctgcctttaaatgttataatgctatgacaatgttatcaaagaaatatagatttcagagatggaggaaaccttgcattcattttggaagaaaggaaaccagcattgtaactggaacccaaatcttctgagtctagccagtgggttttctcctatacctccctgattttgttagaaaaaatgtgcaattttaaagtctgcaaacctagaagttt

SEQ ID NO: 114500 - DNA, 872 bp, Homo Sapiens
tccccaggggtgcacagcccagcctatacccccagcacagcaccagctgaggacacttgtgttactttagttatgtgttcttcctccaggtcatcctcatcctcatccactctgtgtgtgtgagagagaacagaaaacagtcttccctcagcaaactcagcaaaacgcactgagcatctgctgagcgctggtgctgagccctggccattcccagcaatgggttccaccaaggtagcaggtgctgctcgctcagaaactcccccaggcaaatgccaaccccaacctcccatggccgctcaggtctgtgggtagggaaatgtaaaaaggagaaaggggctcagcacccccaacccaagtcttgagtcggaagcctcgggactcatggcaggctgctctcctctctgccctccctccagcaagctggacccctctgaggccccagggcggatatttgctcttcatcatctcaggccttcggatgttctgtgcctggaatgttgtctcccctcaccagctcccagtcaactctgagatagcagcagaaacatcacctcctccaggaagccttctttgaccttccctggtaggcctggctgctctgacacagattcatggcccctgctcttcacacccatctcattcaaaatcgcttcctctcggtctatctccccagactgtcatgtccacaagggaggacccaggtcggccttgtttctgctgagtccccgtggcctcacctagagcttggtatgcagcaggaaccccatgaccatctcctggatgaagctacaactgaccaatcgagtgaacagaggatgctgtcacttatgaccagctacaactcttcttgtgtcagtgcctcagtctgccaa

SEQ ID NO: 114501 - DNA, 893 bp, Homo Sapiens
actttgtacaaaaaagttggggtccgcctgggccagacgcgcgagcgcaagcagcgggttagtggtcgcgcgcccgacctccgcagtcccagccgagccgcgacccttccggccgtccccaccccacctcgccgccatgcgcctccgccgcctagcgctgttcccgggtgtggcgctgcttcttgccgcggcccgcctcgccgctgcctccgacgtgctagaactcacggacgacaacttcgagagtcgcatctccgacacgggctctgcgggcctcatgctcgtcgagttcttcgctccctggtgtggacactgcaagagacttgcacctgagtatgaagctgcagctaccagattaaaaggaatagtcccattagcaaaggttgattgcactgccaacactaacacctgtaataaatatggagtcagtggatatccaaccctgaagatatttagagatggtgaagaagcaggtgcttatgatggacctaggactgctgatggaattgtcagccacttgaagaagcaggcaggaccagcttcagtgcctctcaggactgaggaagaatttaagaaattcattagtgataaagatgcctctatagtaggttttttcgatgattcattcagtgaggctcactccgagttcctaaaagcagccagcaacttgagggataactaccgatttgcacatacgaatgttgagtctctggtgaacgagtatgatgataatggagagggtatcatcttatttcgtccttcacatctcactaacaagtttgaggacaagactgtggcatatacagagcaaaaaatgaccagtggcaaaattaaaaagtttatccaggaaaacatttttggtatctgccctcacttgacagaggacaataaag

SEQ ID NO: 114502 - DNA, 866 bp, Homo Sapiens
gtacaaaaaagttgggtctggaaagaaaagaggctttggctttgttacttttgatgaccatgatcctgtggataaaatcgtattgcagaaataccataccatcaatggtcataatgcagaagtaagaaaggctttgtctagacaagaaatgcaggaagttcagagttctaggagtggaagaggaggcaactttggctttggggattcacgtggtggcggtggaaatttcggaccaggaccaggaagtaactttagaggaggatctgatggatatggcagtggacgtggatttggggatggctataatgggtatggaggaggacctggaggtggcaattttggaggtagccccggttatggaggaggaagaggaggatatggtggtggaggacctggatatggcaaccagggtgggggctacggaggtggttatgacaactatggaggaggaaattatggaagtggaaattacaatgattttggaaattataaccagcaaccttctaactacggtccaatgaagagtggaaactttggtggtagcaggaacatggggggaccatatggtggaggaaactatggtccaggaggcagtggaggaagtgggggttatggtgggaggagccgatactgagcttcttcctatttgccatgggcttcactgtataaataggagaggatgagagcccagaggtaacagaacagcttcaggttatcgaaataacaatgttaaggaaactcttatctcagtcatgcataaatatgcagtgatatggcagaaggacaccagagcagatgcagagagccattttgtgattggattggattatttaataacattaccttactgtggaggaaaggattgt

SEQ ID NO: 114503 - DNA, 913 bp, Homo Sapiens
  misc_feature (240)..(249): n is a, c, g, or t
tatttaacatgctaaaatgtctatggcacattggactcaacagcatgttctgatgaggcatccatttttagcagtatttttccctagaattttgtttggcatagtaaacccctttgatatattaaaatagttctggtgaaataaatgtaacataaacaaaccttccctgactgacttcactccaccacggtagcttttagtgaaaccacagtaactgattaagtcagaaaacgatcaagnnnnnnnnnnatggcatcttgggttactatactcactcatgcaaaatccaaggtagtgtaatggaaacaatattggtaaaatagatgttgtggctataagcatctccctttatattagacatttagaagcttttaaaactttttagatgctaaaggttgtggcaaaactaggctgtgtagttgttccatttataagcaccttattacaggacagttacatgaacctataagggagtgtgctttcagttcaaaagagtaataaagtgcctagctatataaaaaccacaagacttcaaattgtaatttaagctaactgcagttatacatttgggttaacaaaatctagaccctgtctatgcagagttagactaattgttcatactgttttaataaccacataaaaaaacttactcttaattgactgaataagtagggtccactactgtatcttaacaatcaaattttattgctttattcatgtggtgttttttgcaaggcactgtggtatggactagaaaacttggaatgactcatgaagaaaccttggaatgacacatgaagcatgataggaaagtcattctgaggcaggatgctttactgaattgttttcaaccagggtatcaaacatcaggaatgagttcaagttaaaattcacccaacttttttgtacaaag

SEQ ID NO: 114504 - DNA, 860 bp, Homo Sapiens
ccagacacaaggacaagcggcagagagggaaggctcgctggggacgcccactcgggcacggagctggctgtgggctgggggaagggccagctctggacaccgtgctctctgttcttcaggagatgccaactcagccaagacctcagatggggtccccacacgcaggtgttaacacaacatggggcacacagcagtggaggcatcagtccatggggtctccaggctggagggtcccactttccaaagtgtgtccccagatgcaggtgtggcttttctagaaagctgtcccctcacctgcaaaggggtttcctcgtcatctcatatgggcactcctggcacctgtgtggaccactcactgcttcagacacacgggcctggagccttgcgttctggagacagtggccggcagcttggttttgacgccgtgtgcgtgcagggaggaaggcatggacaaaacaaacgccctgtctggaacaggccgtcgaggacagtcaagtggctggaacgatggccttggctccaaagctggaggggctggggcaggtgcatgggctgggctgtgcattcaggtgacattccctagtgactcaggtcactaaacccactccacaggtggggaagctgagatcagaggtgaaatgcttctgtccaaactccaagcaagccggtagagaaatggggattcactccagagtcccggccccaagcctgagatcctaccaacttcccgagcttgctctgcgtactgtgcccatcacacctgcgctgcctgagctgttcgcctcttcctgaccccctcccagaggccactgttgcctggcttcccccaaaaggagtggggtggagcacatgcgtcccaa

SEQ ID NO: 114505 - DNA, 636 bp, Homo Sapiens
ctttgtacaaaaaagttgggtttcccccagtgattccagtgcacctgaaaagttgagaaccacaggcttagtggtacgttggggtttcccacgctaggctgcatagcattataacctgggaacgttaaaaaaaatacagacattcttgattcttagtgtagttatgatgtggatcctacgtattttttaaaaaactctccagataattttgatgtcacgagtcactagtatagactatctatctagtgagttgtattataagcgatgaaatactttaaaagctacccagtaactcttgggattaattttatgaaataaattctgagctgctgcttttgatatagtcagacttaagactgaaccccagtagacaggcaatagatatagaattctggttagctaattgaacttttgtgacctgtttaaaaacaaatcaaatttattgaacaaatgacaaggcacaaatactttcagaattgtatttcagttttgaagatttaaaaaaaatgtgaaaataaatatatattagtatcctttattttaaagtcaattgtaaaccagaagtactgttattttggtgattaaaatccaaaactttagctgtatttcagtaacaaaaacataccttactagact

SEQ ID NO: 114506 - DNA, 724 bp, Homo Sapiens
acaaataaaattaatggttctcataatttagactccagggcctctctatggaaaggccagctttttatacagacaaggtactatccaaaacaaaaagcaggtatttgagacagtgttcaagacaacaagtgaacttgtacacagtgaagagaaataaaaaggtggcttccgtatttccctccctcagtaaggttatgtgttgcataaagggatgaggctcattttggtgaaaaatgctttcatacagaaaattttgaattgagtgacctccccgcacaggcgttccaggccctgacctgaacaaggaaatcaaagtaagttaacaccactggcttcacatgaacctcaagactataatctaacggtatctaccatctcctttactttaaaaaagtttaatgtccatttacctataccaaatcagtagacttaattttctctcttaggaagtttttaaccaaattacagctaaattaatctcactttaaagtgcaagaaaggctctgctagagtagtgtttgttctgtggcatagaaagaggagcatgcctcctccggcactggcctaagaggccccacatgaagaactagctgcaagacagtgatccattaggtctgccaaaaagcagggggactcaaggttcagcctagaaagaggggtccctgccaagtctggcttttacctgtacccaggtcccaaacaaaccttgggtcccctaacccaa

SEQ ID NO: 114507 - DNA, 884 bp, Homo Sapiens
ttggggcgatagatggatatagaagcatttctctgcaggataccagttcaggccccaccattcctgccaaggccattacatcccacaaacccaaatacaaagcagctgacttccctggatcttccccccactcctcacacctcacatgtccgaggagctgccttcattcaggcgggtagctgcactgggcatggggtggtggtgggagcttaccgccacctattcaagctctcagctactcctgaaacgggcagagatgatgaacagaagtgtatgtaaatacagcagctagtgggagagcaccagttgggcctaatcctgcctcatcattcttggcaggaatctgcaaatggaaacattgtgagtatcagcaatctgggaagtgacagggttaataactccttcccagaagctgtatcatgagattttgaggggaccgagccctgttacatggatgtgaacagtgaggatcagaggttttatcagaacacattatttttttctaccaactctccagagcgtgagtataggagtgccatgagctttttactcagcagttttgtaaactctgtatataaaatcattaaccacacattgtgggtgatgggaagacgatttcagctgacagagttaatggcaaccaataatggtggcctgtagctgctaagagcttcacgcaggtttggcctgggctttcactgttggtgaatttagagtgtccttttagtggggcggctattctaaaagtgtctttctatcactgttaagggggcggaaagtgaggttcgaggatgacgtagtaactctcccctcccaagtccatgttccaagtggctatgtaaagcaagatgatacagaaagctgctctaaatctcactgagtga

SEQ ID NO: 114508 - DNA, 868 bp, Homo Sapiens
actttgtacaaaaaagttggggcaaggctttgttccaggtgaatcagtggctaacctggttagaaactgctgaagaagaagaatcagaggaagaagctgactaaagaaccagccaaagccttaaattgtgcaaaacatactgttgctatgatgtaactgcatttgacctaaccactgcgaaaattcattccgctgtaatgttttcacaatatttaaagcagaagcacgtcagttaggatttccttctgcataaggtttttttgtagtgtaatgtcttaatcatagtctaccatcaaatattttaggagtatctttaatgtttagatagtatattagcagcatgcaataattacatcataagttctcaagcagaggcagtctattgcaaggaccttctttgctgccagttatcataggctgttttaagttagaaaactgaatagcaacactgaatactgtagaaatgcactttgctcagtaatacttgagttgttgcaatatttgattatccatttggttgttacagaaaaattcttaactgtaattgatggttgttgccgtaatagtatattgcctgtatttctacctctagtaatgggctttatgtgctagattttaatatccttgagcctgggcaagtgcacaagtctttttaaaagaaacatggtttacttgcacaaaactgatcagttttgagagatcgttaatgcccttgaagtggtttttgtgggtgtgaaacaaatggtgagaatttgaattggtccctcctattatagtattgaattaagtctacttatttatcaagtcatgttcatgccctgattttatatactttgtatctatcaataaacattgtgatacttgatgt

SEQ ID NO: 114509 - DNA, 766 bp, Homo Sapiens
ttggggacgggcgaggagactcgtggtctggttctgggacttccctaacagcatggcccctaaacgccagtctccactcccgcctcaaaagaagaaaccaagaccacctcctgctctgggaccggaggagacatcggcctctgcaggcttgccgaagaagggagaaaaagaacagcaagaagcgattgaacacattgatgaagtacaaaatgaaatagacagacttaatgaacaagccagtgaggagattttgaaagtagaacagaaatataacaaactccgccaaccatttttttcagaagaggtcagaattgatcgccaaaatcccaaatttttgggtaacaacatttgtcaaccatccacaagtgtctgcactgcttggggaggaagatgaagaggcactgcattatttgaccagagttgaagtgacagaatttgaagatattaaatcaggttacagaatagatttttattttgatgaaaatccttactttgaaaataaagttctctccaaagaatttcatctgaatgagagtggtgatccatcttcgaagtccaccgaaatcaaatggaaatctggaaaggatttgacgaaacgttcgagtcaaacgcagaataaagccagcaggaagaggcagcatgaggaaccagagagcttctttacctggtttactgaccattctgatgcaggtgctgatgagttaggagaggtcatcaaagatgatatttggccaaacccattacagtactacttggttcccgatat

SEQ ID NO: 114510 - DNA, 861 bp, Homo Sapiens
gcagtggccccttttccttggggggttttggagatgtgaggaaagttggtcctcatggcccggtggcaggtgtcccacgagcgcagggacgtccgccgcagtgaggccgctggtggggatggcttccagcacctgcactgtgactgttcgtgaagtgaagaacttcttcttggtgttgtagaaggaggagaaggaagagtacaccacggggacgatgggcacctgtgcctggactgccaggtagaaggcgcccttcttaaaaggcagcaggtccccattgtcgttgcgagtaccctcgggatagatccacactttgaggttctccctgaccatgcgctcgcccaggtcggccatcactgtcatggcagtgctagagcgctgccggttgatgaagaagacgcccccgaggtacatgatgaggcccacgggccccaggaagagcagctcccgcttggcgatctgcacgcagcgctccggaaggacctccatgaggcccatcatgtccaggatgctctggtggttggagacgatgacacagggacgggcctcctgcagcctgcgcgggtcccgcacctcgaagcggagcccgtaaaagtacttgaagcttcgcacgaaccagccgatgatgctcatgttctccaccgtccggccgccgtggcgcagcaggcagacgagcgaggccacggcggacaccgtgaagcacagcgcgcagtacagggcgaccttggcgtagaactcggccgcgcggctcagctgcaccagcagcagcagcaacagcagcgccgcggccagacacggccacagctccatggcccggcccggcgcccgacggcgccgccagcccaacttttttgtacaaag

SEQ ID NO: 114511 - DNA, 493 bp, Homo Sapiens
  misc_feature (280)..(311): n is a, c, g, or t
gagtcttagctcccatttaagttatgcttctgaccttgtatggtctgtaagcttgcccagaaataagaccactgttttgaactaccacaaaagtataaatgaatattttaatgccacaatctttcctgttgcctgtggagtctctgctgaaatgaatcaggattcgagctctaggatgagacagaaaatgaaagcatgttgtttgccaggacactgtgggtttatattgatgtgtaacaagttgatttggaacactggactctcattctgttattctggnnnnnnnnnnnnnnnnnnnnnnnnnnnnnnnngtaaaggcaatgagctagtcccagaaaggatccttcagttacatacaatttgtttaatgaaatgtcatggctctgttcatatttttgtcttgttcttccaattggtatatacaactttcagagcctcttgtatttggaaggctggaagggcccagactatggaataatgtcttggtttcact

SEQ ID NO: 114512 - DNA, 916 bp, Homo Sapiens
gggagaaagtaaattgaagccacaggagatgtctttgggaaggttttctgtcttcactttctttgctttttagtctccataaactttcataattatctggaaaatcatcttctggcttaggttttccactggtgccacaactgcttttcgtcctcttcttcatcttcattaaaccacatttcttcatcctcttccaaggcttttgcatctctgcgaaatctgttactacgcaatatagatggtacactgttcagtttctgattttgtctgtctttttcttgctcatatttagtcttcaatcctttgaatgtctgaacatattcaatcgattcaagtgctttataaaagttttcaactatatgggcagtaagagacttgatatcttccactcttataaattcaaacaactcaataacagctgaattcaacagattataccgagttccattatccagaagtgcatttataactggctcaaaaagatttcccttggtgatgtaacgattataaaattcatctttaagtccaattatccgcctcataaagcgaagggcacacaaggccagaaaagtgtgctttgaattcatcaagaccaagactcttcttagcaagtccttgttcataatatagttttttatgtgatatgtgtgatgttccacacaaaatgtgagtaactctaaaattaaggcaagtagctgtgctgtttgataattatcgggacaaattgtgttgtttttgtttgatccaactatattatccttttcacatttgtcttctgaagtattggtcaaaagtggtgctgtgagaacatgcatacaatggttgtagaaaaaatttagaaattcacttttttcggttttattagttgtagccagcatgttctctggatcaattagagtacgaagaagtcccccaa

SEQ ID NO: 114513 - DNA, 886 bp, Homo Sapiens
ccaactttgtacaaaaaagttgggtgaactccaccttccccgtcactctggccagcgggcaggagtccttcctgggccagctaccgctctattcgtcgggctatgcggacccgctgagacattaccccgcgccctacgggccagggccgggccaggacaagggctttgccacttcctcctattacccgccggcgggcggtggctacggccgagcggcgccctgcgactacgggccggcgccggccttctaccgcgagaaagagtcggcctgcgcactctcaggcgccgacgagcagcccccgttccaccccgagccgcggaagtcggactgcgcgcaggacaagagcgtgttcggcgagacagaagagcagaagtgctccactccggtctacccgtggatgcagcggatgaattcgtgcaacagttcctcctttgggcccagcggccggcgaggccgccagacatacacacgttaccagacgctggagctggagaaggagtttcactacaatcgctacctgacgcggcggcggcgcatcgagatcgcgcacgccctgtgcctgacggagaggcagatcaagatatggttccagaaccgacgcatgaagtggaaaaaggagagcaaactgctcagcgcgtctcagctcagtgccgaggaggaggaagaaaaacaggccgagtgaaggtgctggaaagggagggaggacgcgaggggaaaggcctgtggggagccacgggcgtcagagagacccgggaaggaaggctctcgggtgggggagccaggagacctgctctccggcgcagacaggcggggcccagcgctctcctggacgcccccgcccgcacagctcccggcggggtgtctgaggcctccttactcgagccc

SEQ ID NO: 114514 - DNA, 909 bp, Homo Sapiens
tcaaaaataaatacagtggcatggagctgcttaagatgtgaaaccaaactcaaaataggaagacgggggctaaaaagttttttaagaaccccccccaccacaacccacagtcactccgtgggctaagcggggagcaggaagcatgtctggtcacaccatcttggaataggaagccatggctggacggatcggatccactgatggcacacgtggagctgaacttgacgccagcggcggggcggggaggcactgccctcactgttgcagttccttcattctgttgagggcactgccagcgcggaaccactcaatctgcgtctcgttgaaggtgtggttcaggaggatggtctcctgggtcccgttggggtgcttgatgatgcacttcaggggcttgccaggggtgaagtccttcaggccctgaatggtcagcttgtccacagggtgaatcttgttgtagtcagccgggtcagcgaaggtcagaggcagcaggccctgtttcttcaggttggtctcgtggatcctggcaaagctcttggtgatgatggcccggcccccaaggtggcgaggctccagagctgcatgctcccggctcgagccctcgccgtagttctcgtctccgatcaccacccacctgatgccatgtttcttgtagtagcgggcagtgtcagggacggggccaaactcctgagtgacggcattgcgcacggagttggccttgccgttttcaatgttgatggcaccaatgagcaggttgttggagatgttatccaagtgcccacggaacttgagccaggggccagcagctgagatgtggtcagtggtacacttccctttgaccttgatgaggatctgcaggtcctccaggtccttgccatcccacttgtcaaaagccaacttttttgtacaaag

SEQ ID NO: 114515 - DNA, 753 bp, Homo Sapiens
aactttgtacaaaaaagttggcactcggagcagttccggtgagtccgtgggtggggtccccacctggttggaaggctgtgggtccgggaacccgagcccaaggagtgggggcggccccggagcgaggctcacactccctgccctgcagatgactgtccacaacctgtacctgtttgaccggaatggagtgtgtctgcactacagcgaatggcaccgcaagaagcaagcagggattcccaaggaggaggagtataagctgatgtacgggatgctcttctctatccgctcgtttgtcagcaagatgtccccgctagacatgaaggatggcttcctggccttccaaactagccgttacaaactccattactacgagacgcccactgggatcaaagttgtcatgaatactgacttgggcgtgggacccatccgagatgtgctgcaccacatctacagtgcgctgtatgtggagctggtggtgaagaatcccctgtgcccgctgggccaaactgtgcaaagtgagctctttcgctcccgactggactcctatgttcgctctctgcccttcttctccgcccgggctggctgaagcaacctacctcaagtctcaggagaattcatgtctgcctggggcccttccgaactgtgccaactaaaggccccactgtaagcccccgcacccccaccccctgccagagcaacagactaaaggcctgccccgatgctctcctcctaccaaatgaaaccacagaatcc

SEQ ID NO: 114516 - DNA, 793 bp, Homo Sapiens
  misc_feature (240)..(258): n is a, c, g, or t
gacaaaggcaacattttgctaaaaataattaatagcccctctcccattcttttctcaggccctccctgttaagttgcacctcagagtgcaaacattaaaattaatgtaaggcttttttgtctgaagacattaaagacatgtgcttctgtacaacgtagatcttcaaaatggaggtttttttaatacagcacaaagtgagatacatggaaacacgtaaattaatcactgtaagacttggtnnnnnnnnnnnnnnnnnnntcaatggttaagcaaacctgacgtatattggtatgaatgtgggagatgtaaacataaagtgagcaggcaaataaccatgtaggccctactttcaatgtttgaaatgattgaaggaataaaccacataaggtctagtgttcatagttcctgggattttacttctgtatggtactaaaaatatacaagtattgtgctgggtattttggcacttaatcttcataaatttcttatgtattgataagattctggcatgggaatagatttaacaagtcataactcaatactgcatgatttggggaaaggtcaattgatacaaatgacaagcacattttatatgctgacagcaagaatcttttgccaagtatccaaataggttgactgtaacccaaatacagaggttgccaaatctgtctagcttgaggcctggtaaaactgcctttcaatactcctatggaagcttcattagacttagtaagccaacatgttggctaatatgtataacaaattaggccctatctcaagttccatttcccaa

SEQ ID NO: 114517 - DNA, 945 bp, Homo Sapiens
tacaaaaaagttggcatcagtgattctaaaaacacaaggaaagctcgagagatgttgttaaaactggctgaagaaaccaatattttcccaacaagttgggagctctcagagagatatctctttgttgtggaccgtctcattgcacttgatgctgcagaagagttctttaagcttgctcgtcgaacttaccccaagaagcctggggttccatgcctggcagatggccagaaagaactgcactaccttccgtttccaagtccctaaaggagaggctcaggggcagaatgggaattcttccatgaggactcagcagtcaaccaaagttggacaattacatgtagaagagagtgagcaaatagagtttgcttagtgaaaaatgatactgaattctacataaatgtaaagtctttaatctgaggaccctgccccatgaattgtgcaggctgcattgaaacgccttggtgatctcatatttaggaagaaagttaaagagttggtcagatggatagttcataatgggtggttccattctgagagcccattgccccagctttggttttagttgtgtcataatctctgatcattaatcctactgactgagtggactatttcagttaataaaacaatatgattaatagagagagctgtcattgagtcccaaaatggattgccagttttaaataattattataaaatgtatgctaaccccaaaataatactaggcatgaggtgacctctctgatttggtcaccttgtaaaccttagagggtgtcagggcatctctttgagtatcaattatgattattcagaagtatagatgtatcaaatgatagaaatgacaaggaatggctgggattacaggcgtgagtcaccgcgcccggccaagcccttggcattttatctggatagcatctgtaaactgaagtgtttgaccctctgtttttc

SEQ ID NO: 114518 - DNA, 878 bp, Homo Sapiens
ccaactttgtacaaaaaagttggacaacatcttcattctggtgcaggcctaccagagagatgaacgtcttcaaggggaaaccctggatcagcagctgggcagggtcctaggagaagtggctcccagtatgttcctgtcatccttttctgagactgtagcatttttcttaggagcattgtccgtgatgccagccgtgcacaccttctctctctttgcgggattggcagtcttcattgactttcttctgcagattacctgtttcgtgagtctcttggggttagacattaaacgtcaagagaaaaatcggctagacatcttttgctgtgtcagaggtgctgaagatggaacaagcgtccaggcctcagagagctgtttgtttcgcttcttcaaaaactcctattctccacttctgctaaaggactggatgagaccaattgtgatagcaatatttgtgggtgttctgtcattcagcatcgcagtcctgaacaaagtagatattggattggatcagtctctttcgatgccagatgactcctacatggtggattatttcaaatccatcagtcagtacctgcatgcgggtccgcctgtgtactttgtcctggaggaagggcacgactacacttcttccaaggggcagaacatggtgtgcggcggcatgggctgcaacaatgattccctggtgcagcagatatttaacgcggcgcagctggacaactatacccgaataggcttcgccccctcgtcctggatcgacgattatttcgactgggtgaagccacagtcgtcttgctgtcgagtggacaatatcactgaccagttctgcaatgcttcagtggttgaccctgcctgcgttcgctgcagcctctgactccgga

SEQ ID NO: 114519 - DNA, 956 bp, Homo Sapiens
ctttgtacaaaaaagttggcaccgcaatggcggctgtgagggccctggtggcctcgaggctcgctgcggcatctgcattcacgtccctgtcccccggcggtcggacgccttcccagcgcgcagcccttcacctctccgtgccgcgccccgcggccagggtcgcgctggtgctgtctggatgcggagtctacgatgggaccgagatccacgaggcctcggcgatcctggtgcacctgagccgtggaggggctgaagtccagatctttgctcctgacgtccctcagatgcacgtgattgaccacaccaaggggcagccgtccgaaggcgagagcaggaatgttttgaccgagtctgcgaggatcgcccgtggcaaaatcacagacctggccaacctcagtgcagccaaccatgatgctgccatctttccaggaggctttggagcggctaaaaacctgagcacgtttgccgtggacgggaaagattgcaaggtgaataaagaagtggagcgtgtcctgaaggagttccaccaggccgggaagcccatcggcttgtgctgcattgcacctgtcctcgcggccaaggtgctcagaggcgtcgaggtgactgtgggccacgagcaggaggaaggtggcaagtggccttatgccgggaccgcagaggccatcaaggccctgggtgccaagcactgcgtgaaggaagtggtcgaagctcacgtggaccagaaaaacaaggtggtcacgaccccagccttcatgtgcgagacggcactccactacatccatgatgggatcggagcccatggtgaggaaggtgctggaactcactggaaagtgacgcgcatggactgggcccagctaggcgccaggacttggcctcaccctctggctgagagctgtcggctgctttccatccagctgggaatctggcaggccctttattttttttcctttgcaaaa

SEQ ID NO: 114520 - DNA, 946 bp, Homo Sapiens
atgagcaatgctttttcctataaatgagcgcaactttgtacaaaaaagttgggaatttccagagtcctggtcagttcccaggttggctgaaggctttgatgtcagcactgatgtgatccgaagagttttaaaaagcaagtttttacccacattggagcagaagctgaagcaggatcaaaaagtccttaagaaagctgggcttgcccactcgctgcagcacctccggggctctggaaatacctcaaagctgctccctgcaggccactctgtatcaggctctttgcttatgccagggcatgaagcctcatctaaagacccaaatcacagcacagctttgaaagtgatagagtcagacactcacaggacaaatacaccaaggagaaggaagggaagaaataaagaaatccaggacctggaggagagctttgtgcctgttgctgcacccctaggtcatccaagagagctgcagaagtactccagtgattctgagagccccagaggaactggcagtggtgcgttgccaagtggtcagaagctggaggagttgaaggcagaggagccagataacttcagcagcaaagtagtgcagaggggccgagagttctttgacagcaacgggaacttcctgtacagaatttgagtcggggcttggcttatggagatgcctcgtgaaacacagctgggcaagtattaatgtatatggaacagcctggatttctgcatatggataagccaccttggaataggaagaggtgttgagcctggactgtgggaggaaagagctgcgtggatagattcaaacttcctgtggtagtgctcccagtctgacctctgtagacctttcagtactcactcttcttgcttaggctctctgtgtgttgaagcccatcccgtgttgcatgtgttgttacaattttctgtgatacttgcaatttatgtttgagaa

SEQ ID NO: 114521 - DNA, 837 bp, Homo Sapiens
ggtttcatgaaagtggtagagatgcagtccactagctgggccccaatgaggtcgtgcacatggtaggtgaggccaagccgcaccacgacaggcgcccgccggcccaggagctctgataggagcagttcccggtactttgccttccggaccatgctaaggacagcctggcgccctttaacaaagtacttgatgaatctcccagctccaggcacagctagccaccagctcccagcatctcggacggtgaggactccagcattcaccagatgcgtgatttctgagtccctgaagccaaaggtctgtgtcatttggtcctgctggaaactaaggtccccacaggctggaagtactgaagctagaaatttctgcactgccccagcatacggtcggccatcacaggccttgaggactctggtcctgtagtcctcagtgaagataattccatgggcatccaagtcgaagcccagctggacgattctgatctccccctgctcttgaagctccttctgtctccacagagaagagagtgaaaagaggcgtatcagggtaagatgctctgctatactctgggcgctctcaggcagggagattttgtttgccaatatgggggcattttctcttagtaaaggaaaaactgtgtgagaaaataatcaagcaaatgaccaagcagccttttccaactagctacccacattctcatccacctgccttatatatggtctatcaaagagtcaatataatttctaagaccaggcactaagataaaatagtgattaagatgcaggctgtggcttcaaaacattaacagtctaaattcccaacttttttgtacaaagt

SEQ ID NO: 114522 - DNA, 912 bp, Homo Sapiens
ttggttcggtatttatgcaactcaccacagaaaccaaatgaccgtgatcataaagtgagactggcactgggaaatggcttacgaggagatgtgtggagacaatttgtcaagagatttggggacatatgcatctatgagttctatgctgccactgaaggcaatattggatttatgaattatgcgagataagttggtgctgttggaagagtaaactacctacagaaaaaaatcataacttatgacctgattaaatatgatgtggagaaagatgaacctgtccgtgatgaaaatggatattgcgtcagagttcccaaaggtgaagttggacttctggtttgcaaaatcacacaacttacaccatttaatggctatgctggagcaaaggctcagacagagaagaaaaaactgagagatgtctttaagaaaggagacctctatttcaacagtggagatctcttaatggttgaccatgaaaatttcatctatttccacgacagagttggagatacattccggtggaaaggggaaaatgtggccaccactgaagttgctgatacagttggactggttgattttgtccaagaagtaaatgtttatggagtgcatgtgccagatcatgagggtcgcattggcatggcctccatcaaaatgaaagaaaaccatgaatttgatggaaagaaactctttcagcacattgctgattacctacctagttatgcaaggccccggtttctaagaatacagacaccattgagatcactggaacttttaaacaccgcaaaatgaccctggtggaggagggctttaaccctgctgtcatcaaagatgccttgtatttcttggatgacacagcaaaatgtatgtgcctatgactgagacatctataatgccataagtgctaaaaccctgaaa

SEQ ID NO: 114523 - DNA, 564 bp, Homo Sapiens
ctttgtacaaaaaagttgggaacttcgttatccgcgatgcgtttcctggcagctacattcctgctcctggcgctcagcaccgctgcccaggccgaaccggtgcagttcaaggactgcggttctgtggatggagttataaaggaagtgaatgtgagcccatgccccacccaaccctgccagctgagcaaaggacagtcttacagcgtcaatgtcaccttcaccagcaatattcagtctaaaagcagcaaggccgtggtgcatggcatcctgatgggcgtcccagttccctttcccattcctgagcctgatggttgtaagagtggaattaactgccctatccaaaaagacaagacctatagctacctgaataaactaccagtgaaaagcgaatatccctctataaaactggtggtggagtggcaacttcaggatgacaaaaaccaaagtctcttctgctgggaaatcccagtacagatcgtttctcatctctaaatgcctcattgagttcggtgcatctggccaatgagtctgctgaaactcttgacagcacctccagctctgctg

SEQ ID NO: 114524 - DNA, 894 bp, Homo Sapiens
tacaaaaaagttggtgaggactttccccgctttcctcaccggggcttgctgttggatacatctcgccattacctgccactctctagcatcctggacactctggatgtcatggcgtacaataaattgaacgtgttccactggcatctggtagatgatccttccttcccatatgagagcttcacttttccagagctcatgagaaaggggtcctacaaccctgtcacccacatctacacagcacaggatgtgaaggaggtcattgaatacgcacggctccggggtatccgtgtgcttgcagagtttgacactcctggccacactttgtcctggggaccaggtatccctggattactgactccttgctactctgggtctgagccctctggcacctttggaccagtgaatcccagtctcaataatacctatgagttcatgagcacattcttcttagaagtcagctctgtcttcccagatttttatcttcatcttggaggagatgaggttgatttcacctgctggaagtccaacccagagatccaggactttatgaggaagaaaggcttcggtgaggacttcaagcagctggagtccttctacatccagacgctgctggacatcgtctcttcttatggcaagggctatgtggtgtggcaggaggtgtttgataataaagtaaagattcagccagacacaatcatacaggtgtggcgagaggatattccagtgaactatatgaaggagctggaactggtcaccaaggccggcttccgggcccttctctctgccccctggtacctgaaccgtatatcctatggccctgactggaaagatttctacctaatggaacccctggcatttgaaagtacccctgagcaaaagctctggtgattggtg

SEQ ID NO: 114525 - DNA, 891 bp, Homo Sapiens
ttggcaagcccagccaggcccttcctggccgggtggctcaggaacacagcctcttcctcttttttttcccctcctagccctattcaggcaggagctgctcttctggggtatcgcgatccacttaaggatgaggcagacttggtgacaagctggtctgagcagcgcttccagagccagaactgagcccagtgagagcgcaccctggagcagcctggattcctggggtgtccccggcagccacacacagccatgcactacccaactgcactcctcttcctcatcctggccaatggggcccaggcctttcgcatctgcgccttcaatgcccagcggctgacactggccaaggtggccagggagcaggtgatggacaccttagttcggatactggctcgctgtgacatcatggtgctgcaggaggtggtggactcttccggcagcgccatccccctcctgcttcgagaactcaatcgatttgatggctctgggccctacagcaccctgagcagcccccagctggggcgcagcacctacatggagacgtatgtgtacttctatcggtcacacaaaacacaggtcctgagttcctacgtgtacaacgatgaggatgacgtctttgcccgggagccatttgtggcccagttctctttgcccagcaatgtccttcccagcctggtgttggtcccgctgcacaccactcctaagccgtagagaagagctgaacgccctctacgatgtgtttctggaggtctcccagcactggcagagcaaggacgtgatcctgcttggggacttcaatgctgactgcgcttcactgaccaaaaagcgcctggacaagctggagctgcggactgagccaggcttccactgggtgattgccgatggggagga

SEQ ID NO: 114526 - DNA, 861 bp, Homo Sapiens
actttgtacaaaaaagttgggagcggcggggccgagagcgtgactcgcccgctccgcgctgcttcccccgcgccgcctccccgcgccgctcgcgcagccatgtccgaggagaagcccaaggagggtgtgaagacagagaatgaccacatcaacctgaaggtggccgggcaggacggctccgtggtgcagttcaagatcaagaggcacacgccgctgagcaagctgatgaaggcctactgcgagaggcagggcttgtcaatgaggcagatcagattcaggttcgacgggcagccaatcaatgaaactgacactccagcacagctggagatggaggacgaggacaccatcgacgtgttccagcagcagacgggaggtgtgccggagagcagcctggcagggcacagtttctagagggcccgtccccagcccgggccgtccatcctcgcattgctgttgaatggtgagcacgtgaccatgccgaccacaaaggtgtctgcggaaactcgaggacattcaccacgatgattttcctctctttgatgtacttcaagtgcaactcaaaactatatctgcagggatgaatctgtaacttaaattgggccaatcagaattgttatctttgttcaggtaaaatgagttgcaagatattgtgggtacttttgtgtgctcatttgtgttttccccccctcctacaacatttttttaaccccaaaattatagcctgaatgttcgcttttagtctggccagggatctgactcctgagttggttgcctctcccctgctcactccagtcacatagagaattggtgtttcccgcagtggggatgcagctgttggacaggtattgggggcaaggttgg

SEQ ID NO: 114527 - DNA, 728 bp, Homo Sapiens
cagcccatccccggtcaggtccacgtgagccatggccagcaggggactggagaagctccgctgccacagcagatggaacccgtgctgggcctcaggaagccccgactgtgggccccggtacttataacacagcagttcctgtccataggtggccaccaggacttctggccgcccatccaaatccacatcggtgaccaggctgcagaggacgctgtcaaactggtcactgccgggcaggagaagctggtcttcaagaccccggttcagcaggtcccgatacaccactgctggctccaacatgctggccacgagcacgctgtactcatcttgtagtggcctgtccttggtctccttggcggccgagaggctgaacacaatcactcgggagatgggaccgtcctgcaggaccgaccacatctgcagaacctctcgactccgctggtccacgtgggcgacacggacataaccactctgacagcccagagctgagaggcgccgggacgtgccggggaagttgtggacgtccagccagaggacgctggcgggcgggtggatggacaggacggacggccattgctgggcccagccccgcccctctgcctccccaggggcagccgcccctccctgtagccctgggaccctgctgcttgattcctcctggataatccccaccgcccaattcctctgaggtcaattctcaccacccgagggctgagtccacctcccaa

SEQ ID NO: 114528 - DNA, 948 bp, Homo Sapiens
tacaaaaaagttggggggccaaacacctctaacggaaggctctgaagacctagatggtcacagtgatccagaggaatcctttgccagagaccttccagacttcccttccattaatatggatcctgctggcctggatgatgaggacgacactagcattggcatgcccagcttgatgtaccgttctccgccaggggctgaggagccccaggccccacctgccagccgggacgaggctgcgctgccggagctcctgcttggtgctcttcctgtaggatccaacctcaccagcaaccttgccagcctggtctcccagggtatgattcagctggccttgtcaggggcctcccaaccaggcccttctggagcacctgcccagagagcaacgagaggcttcctccggtcccccagttcagacctggacactgatgctgagggggatgactttgaacttctggaccagtcggagctgagtcagctggaccctgccagttctaggagccactgaggcagagactccttttgggagtcactgtggtttaggtttttttctccccatcccacttaaggtgatggggcaagggaagaactcagctcccctcccctgaattatatttgtatgctgggtggcctggctgatgctcagaggcctccttagagaggacactcactcccctcccaccagctggatgcccatttctgagctcagtcactgaagtgagagtgtgctcccccaagggaggcttctctccatcagatggtactttgggggaacaaaatagtcagggatattggttcccctttgaggaggtgctgctgtttgcttttagtatgagtgctcatgggccctcactgaaagagcccatgcctgccttcctcctttcatcgcctctctagagcccccaaagtcagcagcagctggagtagttacattgtcatcatctttttttt

SEQ ID NO: 114529 - DNA, 918 bp, Homo Sapiens
gtacaaaaaagttgggtgagacaaagcggagaacgctggtgggcctgttgtggagtacgctttggactgagaagcatcgaggctataggacgcagctgttgccatgacggcccaggggggcctggtggctaaccgaggccggcgcttcaagtgggccattgagctaagcgggcctggaggaggcagcaggggtcgaagtgaccggggcagtggccagggagactcgctctacccagtcggttacttggacaagcaagtgcctgataccagcgtgcaagagacagaccggatcctggtggagaagcgctgctgggacatcgccttgggtcccctcaaacagattcccatgaatctcttcatcatgtacatggcaggcaatactatctccatcttccctactatgatggtgtgtatgatggcctggcgacccattcaggcacttatggccatttcagccactttcaagatgttagaaagttcaagccagaagtttcttcagggtttggtctatctcattgggaacctgatgggtttggcattggctgtttacaagtgccagtccatgggactgttacctacacatgcatcggattggttagccttcattgagccccctgagagaatggagttcagtggtggaggactgcttttgtgaacatgagaaaagcagcgcctggtccctatgtatttgggtcttatttacatccttctttaagcccagtggctcctcagcatactcttaaactaatcacttatgttaaaaagaaccaaaagactcttttctccatgggggggtgacaggtcctagaaggacaatgtgcatattacgacaaacacaaagaaactataccataacccaaggctgaaaataatgtagaaaactttattttttgtttctcgtacggagcaaacaacaac

SEQ ID NO: 114530 - DNA, 916 bp, Homo Sapiens
gacagaagatttgtttgcagtgctattatcgctatacaaagttgtgtgttctacatcaaggcttctatgtggaagagtgcaattggtcatacccccttcaagtccccagattcagatcctcccatttcacccccatgaagagcagatgaagtgagagcccgttttcccccattgagggaagtggaattgtcatgatcagaatgtgttgaacttttagtcaatttcttagccaacccatttacaggtgcttgtggcagagctgtctgaccactcgtattcatggttctcagattttctaaggaaaactccaaaactggctgtctccccaacagctcagctcggagttcataggactgagataagagaggatgagatttaaggactgtctgcgtgctgaagaccccttgcaacttcaaagactcctttgagggaacagatgttacatcagagcagagataagatgccaccagtggttgcagctttcccaagtcttccttggtaggattatttcggaaatctaggctgggatcctctgcagcaatggcttttcttttggttccgttggcagcaataaggatgttggcgttgccgttattttcggcactgccaggggacaaggtagaggatgggggagccagtttgaaccggatatggtgtgcttcagctgctgcgtcagtgagagcgggcgccatcgcagccattcagcacagagagacaggaagtccagcctctcccgatgccgaggccgaggccagctccacggccccttactgcctccccagagaacagactgacaacgcctgtagacaattgaaattttctaaattggtcagacagcatgctagaaaaggaaccaagtagagccacgtgatggaggagcgtagcccgggcggattcccaacttttttgtacaaag

SEQ ID NO: 114531 - DNA, 833 bp, Homo Sapiens
tgtacaaaaaagttggatttccagagcaatcaaagacctccgtgctgcacatgtgctccctcttccacgcgttcatctttgctcagctgtggacagtttattgcgagcaaagtgccgtcgctacaaatctccaaaatcagaatgaattcagcttcacggcgatactgacagcactagaattttggagtagggtgacacccagcatccttcagctaatggcccataacaaagtgatggtagaaatggtgtgtctccatgtgattagtttaatggaggcattgcaggaatgcaattcgaccatttttgtcaagctgatacctatgtggttgccaatgattcagtcaaatatcaagcacttatctgcgggactccagcttcgcctccaggctattcagaaccacgtgaaccaccacagcctaaggacgctgccgggctcgggccagagcagtgctggcctggcagccctccgaaagtggttgcagtgcactcagttcaaaatggcccaggtggagatccagtcctcggaagcagcctctcaattttatcctctatgagtggactcctcggcgctcagtgtcaacactctggtttagcaataatgggtttaaaaacaaacaatttgatccaagcaggttggggaacatattagtactgtacattctctttctagtttagtaaaagatgtgcaaaggccagagagggccgaaaatgaagcttttcttgctacacatattttctgatgactccttggggctatctgattaaagtgtttccttacattattttttaaaaaccaaatcatttttctttaactaatcttctattttttttag

SEQ ID NO: 114532 - DNA, 703 bp, Homo Sapiens
  misc_feature (330)..(412): n is a, c, g, or t
tacaaaaaagttggaaacaaaaccaattatgaatagaagccatgtatttgatatgccagtgtgtgctcctgggaatgtctgacagccattggatttatacctattttcccatccactctgacggaactgacacctccccacattctggtgataaagatgggatgattgggaaagtgccctccttttacggagctgggcccaacatgattactgtcaaattccatttagagtggtttttcccatacttgaaaaatatgctcattaactccacaaacatttgtggccatatgcctatgtggaaaattgattttttctaaatcctccctgctnnnnnnnnnnnnnnnnnnnnnnnnnnnnnnnnnnnnnnnnnnnnnnnnnnnnnnnnnnnnnnnnnnnnnnnnnnnnnnnnnnngttttccagggaggactcacgggtacattatagttggagctgcctcctggagactgtactggttcttgcgaggccaagtcttgacctcgaggtggcgctgctcttctccttgctaggcctcctggcctctggttgcccagggcccaggtgaaatgcagttagagagcagggcttgtgtgctgatctctcccctcccttcacttcctttctgccccggtgaccagtaccctcgccacagagacaccagcttcagtggcctgtcgttggaagagtacaagctgatcctgtcca

SEQ ID NO: 114533 - DNA, 921 bp, Homo Sapiens
tttttagacaaatgattttagtatataaatttgcttttgttttaatacagaattataaagatttccctcattaatcctccatgtgaagggtattacaagcctggaggaagatactttctgcacacaaggtatgtatctttatgtgtgcagtatttggaaaccaatggtgtagtgctcctacacataaatggggtcaagtgacatcacaaattaaaagggggaaagagaaatattttagttaatcagatgcaagaagcaaacaagacgcaaaaactgtgcaaataagaccaagccagtaactttagttacgacactgcagattacactggaataacaggtttgtgaggctatagtgtgcaccacattaaaacagcaagaaagagctatttatatagaaaggctggaatgagggatttttactaaagcaaattaacttcttgtcaactgccaaaacaaaacaaaactgagcatatgagtgttagtatactgaaggcatgttataccagtttctgtgcagcatgctaaaagttagaacttcttcactggtgcttatcaatcattaatagtcacgtttttgccccttcttgccaaatttcaggcatgtcttattttagatggagtatagcttttatctattatttcatcttgtaaaaacatgtgaagacaacgttcgttctgtgccagaggatgaccagcgaccttgtttataaactgctccagcccttgttttctttcctcaataaaattgtcatcaaatattccatcatctcctctaaaaggaagctgacgcaaaaacgctttcccagggagcgggggaactacgaccttgctctctctttctaattcacttcgcagccattcaaagtcactgtatcttcttctaacagtagattctttcagcccaacttttttgtacaaagt

SEQ ID NO: 114534 - DNA, 504 bp, Homo Sapiens
ctttgtacaaaaaagttgggacagcccacagaaacccatgtggccagccagagctccgacaagccctcaagggaccctgagactcccagatcttcaggttctatgcgcaatagatggaaaccaaacagcagcaaggtactagggagatcccccctcaccatcctgcaggatgacaactcccctggcaccctgacactacgacagggtaagcggccttcacccctaagtgaaaatgttagtgaactaaaggaaggagccattcttggaactggacgacttctgaaaactggaggacgagcatgggagcaaggccaggaccatgacaaggaaaatcatcattttcccttggtggagagctaggccctgcatggccccagcaatgcagtcacccagggcctggtgatatctgtgtcctctcaccccttctttcccagggatactgaggaatggcttgttttcttaaactcctcctcagctaccaaaatgggactcacacctttcttg

SEQ ID NO: 114535 - DNA, 946 bp, Homo Sapiens
taatgcatgtgaatttgctttggagagactatcttctgagtgaaccaggacagccagctgagctgaccagagtacctaccaacatatgtcagccaaggtcagtagacccactgggagccacagaaaaaaagccacgtcagcttaaagaaaaataatttagaaaacataacaatatattactaacattaataacaataatgtaaaaggttaaaatataataccacttgaagggctttctacattgaaatactcaagggaacatgaggaaagatggccatccagtctcctttgccaactgaggtgcagactgagttgtggaaggtgggtgttgatggaacccagcattacaatattgtgtagaactagtctcctaatatacctcactctgcaacttacggaagctgaggaagatcagaaaaagaccacactcctcactcagaatatttattatattctgccccatggggccttgcaggaaaagggacccaagctatacccctactccttttccaagctactttcctgaaccaagggacaggattctaagagaatcatgtatctcaaataagccagaatgtatctggggaagaatagccattaatttcctagacctgacactgggtttatttgtgtctgccaggaagacggggagtcagtgagaatcgtaaatggactagatgaggggaaataggatgggcccttctttatcacagcttgagctcaaaaaggttgggataaacaggtgtttaaaaaagagaggaggtaaaagggaggatgggcaggggatagaggaaggtcaggggctgggttcacccatatcacacagcattgtaggaagaagcagggtaaccatttgagttctcagcctggaacagggaggtgagggctcagcacctagagagaggagaatccgtaaggcctctcttccaacttttttgtacaaagt

SEQ ID NO: 114536 - DNA, 919 bp, Homo Sapiens
ctttgtacaaaaaagttgggttcaggccctttgtaccacatatcccatttgacttctatttgtgtgaaatggcctttccccgggtcaagccagcacctgatgaaacttccttcagtgaggccttgctgaagaggaatcaggacctggctcccaattctgctgaacaggcatctatcctttctctggtgacaaaaataaacaatgtgattgataatctgattgtggctccagggacatttgaagtgcaaattgaagaagttcgacaggtgggatcctataaaaaggggacaatgactacaggacacaatgtggctgacctggtggtgatactcaagattctgccaacgttggaagctgttgctgccctggggaacaaagtcgtggaaagcctaagagcacaggatccttctgaagttttaaccatgctgaccaacgaaactggctttgaaatcagttcttctgatgctacagtgaagattctcattacaacagtgccacccaatcttcgaaaactggatccagaactccatttggatatcaaagtattgcagagtgccttagcagccatccgacatgcccgctggttcgaggaaaatgcttctcagtccacagttaaagttctcatcagactactgaaggacttgaggattcgttttcctggctttgagcccctcacaccctggatccttgacctactaggccattatgctgtgatgaacaaccccaccagacagcctttggccctaaacgttgcatacaggcgctgcttgcagattctggctgcaggactgttcctgccaggttcagtgggtatcactgacccctgtgagagtggcaactttagagtacacacagtcatgaccctagaacagcaagacatggtctgctatacagctcagactctcgtccgaatcctctc

SEQ ID NO: 114537 - DNA, 874 bp, Homo Sapiens
ctttgtacaaaaaagttggctgtatgtggagaaattccttctacaatattccacacaggtttttggccacagtccttgatggagtcccaaaaccatggtgcagccagttccaatgctggacacctcaaccatcagggtgaaatctggggcctcagctttttaatttaattattttaattcttaatactttaatttgtgcatttcataagccccctgctcttggactgaattttgtgctttttattgaagaattttattatttttatcttaaaatcagtttctattatccttggggagaccatccctaacaaagtacaggtgggatctcctgtgagtcattggctgggttctgattgctagatgtcacacccaccagcatcaccaaagtgactctgagatagaccggtcccttctcagcgttccagtcacttcaggaggaatttagttattgacttagtctatgacatctggctacatgtaggtagagaagaaagacaattttaaaaaggaaatcaggtcttttgcaactgtgcctccctctgtctgttttcacttgaatgggtaaataaccagcagctaggttttgaattcctaccttgttattctaaacagatgtccacattgttaattaaatctaaattatgagccttgctgagtggatacggtacttacacctgaaccaggattcctgggttctgttgttgacattgcccttcagcacctgtttggccagctgtataagataggactaatgactaggaagcctaccccaatgaatgatatactagatgaaatagtgttcaaaacctgtagcactctctggctaaaacaaactctgaggccaccagcagatcatctttaagctaagttacta

SEQ ID NO: 114538 - DNA, 884 bp, Homo Sapiens
ttggcatggcgttgctggtgcgagtccttaggaaccagactagcatttctcagtgggttccagtatgcagccgattgatacctgtgtctcctacccaaggacagggggacagggctctgtctcgcacttcccagtggccccagatgagccagtcccgagcatgtggtggatcagaacagattcctggaatagacatacagctgaataggaagtatcacaccacacgtaagctttctactaccaaagattccccacagcctgttgaggagaaggttggtgctttcacaaagataatagaagccatgggattcacgggacctttgaaatacagtaaatggaagattaagattgcggccctgcgcatgtatactagctgtgtggagaaaactgacttcgaggaattctttctaaggtgtcagatgcctgatacattcaattcatggtttcttataaccctactccacgtctggatgtgtctagtccgaatgaagcaggaaggccggagtgggaagtacatgtgtcgtatcatagttcattttatgtgggaggatgttcagcagcgcggcagagtcatgggggtaagtgagtgctgtcagatgcttgtcctggacaattccagagaagggtttgagtttggagttttatctgttgtaaaatggccctgcttttagatttctgtgaaatgctgcctaatatcaagtggcagttccgctaaagtcactttttctgcctctgtggaaactaatactccacagatactttatgtgtttgtacacattatagtgatttgtcagtgtgaagtcatcctgtatggagatgggattgtaaagcccaaatcgtggtgataggagggatggatttggtgaatggagggaatcaaatga

SEQ ID NO: 114539 - DNA, 944 bp, Homo Sapiens
ttggggaggcgactgctgggcctcctgcctggccgcccagggctggccgcgctcctgggacgcctgtccgaccgcctcggcaggaaccgggaccgccagcgcaggaggtcaccatggctgttattggctcccttgctgtccccagctgttccccaggtcacctccccaccttgctgcctgtgtccagaaggcgtgcaccggttccagtggatcagaaacctggttccagaatttggagtctccagttctcacgttagggtgctttcttccccggcagagtttttcgagctcatgaaggggcagataagagtagccaagaggcgggtcgtgatggcatccctctacctggggacaggtcctttggaacaggagctggtggactgcctggaaagtactctagaaaagtcactccaagcaaagtttccttcaaatctcaaggtctccattctcttagacttcacgcggggctcacgaggccggaagaactcccgcacaatgctgctcccactcctgcggaggttcccagagcaggtccgagtctccctctttcacacgccgcacctccgtgggctgcttcggctcctcatccctgagcgcttcaacgagaccatcggcctccagcacattaaggtgtacctcttcgacaacagcgtcatcttgagcggtgcaaacctgagtgactcctacttcaccaaccgccaggaccgctacgtgttcctgcaggactgtgcggagattgccgacttcttcacggagctggtggacgcggtgggggatgtgtccctgcagctgcagggggacgacacggtgcaggtggtggatgggatggtgcatcctttacaaaggggaccgggccgagtactgcaaaggcagccaataagagggtcatggatgtgatcactcagccaggacccgccagcagatgctgcatgcccagaccttcc

SEQ ID NO: 114540 - DNA, 975 bp, Homo Sapiens
aaagcagcgaagttggaattcctaacttccatgctctgaaggaagcggccaatttactgcagctcagcttgaactgtttgatgatgttgctgatcttctcaaaccggtggacgtcgcgctgctctttgcactggtagtgggaaataaccaagaatgtagctctttcgaacagcagaacttcatcggcctcaatgatttgggcaaaattcctgaggttcatctccagctgctgaacgttgggaatcagctggtagacgatgctggaccaggctttgtagagcgtctcatcccagatggacgttcgaaaacaagcacactccagcgggcgagacagacgcctcaggtcttcctctcgctctttaaaaatcaggtcacgctgatcctcctgaaccagatccattttgtgcaccaggcagaagattttggcgtcaggagagttctggaggatggcctccagacacgactggtaataatgcatgtccttttccagttcgcggctctccacgtcaaacacgtaaatcaaaacttccacgttacggaagatattgtctcgctggctggtgaagtaattttccatgaaggtgtcctgaccgccacagtcccacaggttcagcaccaggttccctaggaatcggacgtgggagtgttccacgtcaatggtggcccccaggcgccgggtgtcgcgagcaatgtaattggcgaagattatcgacctcatgctggtcttccccgacccgctcttccccatcagcagcacctttttcttcatggctgtatttggcatcacccgccggggcaccgcggactgggcctgagggcgcggcctacacgcagcgccgagggaggggtcgggggctgccggggactcgcaggccgcgcctcgctccgctccgccgcgcagctgggcaggcaggagagtcgagagcgcgaacccggggctggagaggccgcggacggccaacttttttgtacaaa

SEQ ID NO: 114541 - DNA, 901 bp, Homo Sapiens
ctttgtacaaaaaagttggcactccgctctcacgactaagctctcacgattaaggcacgcctgcctcgattgtccagcctctgccagaagaaagcttagcagccagcgcctcagtagagacctaagggcgctgaatgagtgggaaagggaaatgccgaccaattgcgctgcggcgggctgtgccactacctacaacaagcacattaacatcagcttccacaggtaacctgggcagggagtgggggtgacggaaactggagttcctattgtggctatcgcttgtgtggaaggaacaggaggattctgctaattctaataactttcccagctggtagcagggaagcatcgtatgtcctttgtgtttctcaaatctgcccaattgttctctgctttcggggaagctttactcattttctaaaagaaatccaagtactgtttggtcattaccccttagtaaaaaaaagtaacaggaggatatcgtaattttctactgttttattcctctgttagaccgggccttgacatgaatgacgccgtaagggagaaagagatcttcccaatcagcaatcaccgtaaaagcctgctgtgttcccgttaaaattaggaaattctcactagatgaattgacatgggaggcatttagatttctaatagtcacatagtaattctgcggaggaattgagtcatctttgatagccatggaattaagcgatgttaattaaagtgcaaaagataacctttctgttcttactagaatagagtaataaaaagaacctaagttttcttttgtttgctggaagaaaaatcaaaattctttagttctgtcaaaccaaaactcttggaaagcactttgaacaatgcctggaaataacaggtactctgtaaatgattaccttctctg

SEQ ID NO: 114542 - DNA, 896 bp, Homo Sapiens
gcgggggctctgcacacatgatcttcctgtccctggaggtgagcagccgctggccgccctccttgatccaggcacccagccagtgcagggcgcagtcacagcgccatgggttctctgtgggagagcagcgttaggcaggtggcttgagggtgctgctaaaacagcctgtgcagttgggttttgcaggccaggacagaggcctctttcccacctcccacagcgttttcacacggagtccaaggccctgccaccccttccttgaccccaagctccttggggcggcaggcccttcaccctcgcccccctcccctttagctctgtgatgcctgcctgttacagatcacttctccgtcggtctctgagaaagcacctgctccttaagtcttcctgcaacaagtgccactgtttttaggaacctgggcgtccacatagacatctcaccagcactgaaacctcacaagtcctctcagccttgcctttggatgccctctcttgggaatgtccccagtcctggtcagctgtctctctcctttgcaattttgtctgcctcccctcagcctaaaagtgtgcagaaccctcaattctgttaagtcaccctgtggagttcctgtcttctgttttccccaggcagggtgcctgagctgtattccccagcacacccactcccgcagccctccagtgtggctgcaggcggtggtgcagccttccagactgctgcccagttgcctgatgtcagagcccctccacacatgagcctgctccctactgccaacaccgtggcccagacagagacgctttccgaggaagaggtacctgtgaggcgcaggacttgcagactggccaggggctgcagggcctctcggctgatggtgcccagctggttcctgctgagccaa

SEQ ID NO: 114543 - DNA, 925 bp, Homo Sapiens
tttgtacaaaaaagttgggcaagactggagtccctgatggaattatgcagtttattaagttgtgtactgtcagctatggaaaagtcaagctggtcttgaagcacaacagatacttcgttgaaagttgccaccctgatgtaatccagcatcttctccaggaccccgtgatccgagaatgccgcttaagaaactctgaaggggaggccactgagctcatcacagagactttcacaagcaaatctgccatttctaagactgctgaaagcagtggtgggccctccacttcccgagtgacagatccacagggtaaatctgacatccccatggacctgtttgacttctatgagcaaatggacaaggatgaagaagaagaagaagagacacagacagtgtcttttgaagtcaagcaggaaatgattgaggaactccagaaacgttgcatccacctggagtaccctctgttggcagaatatgacttccggaatgattctgtcaaccctgatatcaacattgacctaaagcccacagctgtcctcagaccctatcaggagaagagcttgcgaaagatgtttggaaacgggcgtgcacgttcgggggtcattgttcttccctgcggtgctggaaagtccctggttggtgtgactgctgcatgcactgtcagaaaacgctgtctggtgctgggcaactcagctgtttctgtggagcagtggaaagcccagttcaagatgtggtccaccattgacgacagccagatctgccggttcacctccgatgccaaggacaagcccatcggctgctccgttgccattagcacctactccatgctgggccacaccaccaaaaatcctgggagccgagcgagtcatggagtggctcaagacccagagtggggcctcatgatcctggatgagtgcacaccatacca

SEQ ID NO: 114544 - DNA, 907 bp, Homo Sapiens
ctttgtacaaaaaagttgggctgaaggaggtgagggaccgcttggaccgtgtctccagggaggacagtcagtacttggaactggctactctcgagcacaggatgctgcaggaggagaagaggcttcgcacagcctatctgcgtgcagaagactctgagcgagagaagttctccctcttctctgcagctgtgcgggaaagtcatgagaaggagcgcacaagggctgagaggaccaagaactggtccctcattggctcagtcctgggggccctgattggtgtggctggctccacctatgtgaaccgtgtgcgactacaggagctgaaggctttactcctggaggcgcagaaggggcctgtgagtctccaagaggccattcgagaacaggcgtctagctactcccgccagcagagggacctccacaatctcatggtggacctgaggggcctggtacatgctgctgggccagggcaggactctgggtcacaggcaggtagtcccccgaccagagacagagatgtagatgtcctttcagctgccttgaaagagcagcttagtcattccaggcaagtccattcatgtctagaaggcttacgagagcagcttgatggcctagaaaagacttgtagccaaatggctggggtggttcagcttgtaaagtctgcagcacacccaggcctggtggaaccagcagacggggctatgcccagcttcttgctggagcaggggagcatgatcttggcactgtcagacacggagcagagactagaagcccaagtcaacagaacaccatctatagcaccctggtcacctgtgtgacatttgtggccacactgcctgtgctctacatgctattcaaagccagctaacccctggcccctcctccagagggtctgagcaatagctgt

SEQ ID NO: 114545 - DNA, 967 bp, Homo Sapiens
gggggatgagctcagcgacaccaatctctccttgaagtgcacgtggaccaggctctccgcccgaaggctgcagttggggctggggtgcagaagcatcaggcgggcacgcaggctgcccaggaacttggcatggtagtgctggaagaccagggtgatggtgtaggagaccatcctcttcctggtgtagaggctcaccccgctgtacttcccaggaacaccaaataacaagtctttgagtgtggctgaagtctgcagggttttaggctcgtgctggtggatggtcccaatgatgtcaggatcagcatggaagcgttcccagtcattctgccagaagttcccaggggacagcagcaggcatccatgctcagggagtaggttcctgagcttcctaaggcctggcagcaggtcggtcacttgcagacacaactcctccaagctcctgatcccagagctgtctctcagcacgtggttccggatctcctccaccagttggaatgcccgggacaaaggtgaacgaaatacatctactgccaggaggttcttgtgccagggaaacactgaggacttcacaaatatctgctggacataagccaccggggcacccacataccactcaggctgctcagtaggctctccttgtttgcggtcagagtccacaggtgggggcgagtaatccttcacaggggtggtgaattccacaggtcctgttcctggcaaggggagtttcagcagtgggtagcagcaggctaagatgcagaaccctgtgaagaggatgatggggatgggataggatgcacagaggagcccatggttgtagaaggcccgagatatcttctcacgcagcctttcagtcagggtcatcctcagccgaagtcaccttgctgccatcccggaaagtgaccatggatcaccctggcacacacttgacagcactgacaaagaacaacccaacttttttgtacaaagt

SEQ ID NO: 114546 - DNA, 800 bp, Homo Sapiens
ctctctggccacgataacagggtgagctgcctgggagtcacagctgacgggatggctgtggccacaggttcctgggacagcttcctcaaaatctggaactgaggaggctttgtccaggcctgggtggtatagggcgtttggccctgtgactatggctctggcaccactagggtcctggccctcttcttattcatgctttctcctttttctacctttttttctctcctaagacacctgcaataaagtgtagcaccctggtacatctgtgatgtttgccttctactctcttctgttccaaaaagacccaggtcccatttaagggcagtaatgtgttacaggtgctgtgataaaggctgggtactggatagcttgtgggcttatgggaggaggcctgagatgggtcagggggagaaggtattcagcaggtggctgggggactgtgtgcagcagttcgctatggcctgcctgtggtgcccatgtgtttgtacgggagggttagcttgagaaggaatcagattataaaaggtcttgaatgtcaagccagagagtccagactttttcctaagggcaatgagaagccattgaggagttctgagcagagtagtaacatgatcagttatgcttctcagaaagattgctccagatctttcagaaagaagcagtgtaggttgatgaaagggagggactggcactggggaaacaaggtaggaggcaggtggcaagaaatgcaagagcgacaggacagaggggttagggagagggattaggaagagattaaagatgtggaatcagctggaaca

SEQ ID NO: 114547 - DNA, 568 bp, Homo Sapiens
acaaattgatgagcaatgctttttctataaaagccaactttgtacaaaaaagttggcacaagaagaatatgaacagatacaagccaaacgtgctgctaagaaacaagaattcgagaggagaaaacaggagagagaagaagcccaaaggcagtacaaaaagaagaaaatggaagtgtttaaaatactgaacaaaaagactaaaaagggccaaccaaacttgaatgtacaaatggagtaccttcttcaaaaaatacaagaaaaatgttaaacattttgttcctacaggttaaaatatctgctgcctattaggttcttctgtgacatgtgcctcccagcagtgaactaaatttgtcgacataaactggattgctaaactatgctaaatataagatgttcacatatttttattatggtaaaaaattttctaaatatgttctacatgtttcttatttatttgcctctgaaggaaggttggcctgaagaactgaaagaacctcttattttgcaagacaggcccaagcatgtaatacttttgtaccatatgagatttatatgaaataaatttttt

SEQ ID NO: 114548 - DNA, 801 bp, Homo Sapiens
cccccaggagcagcctccccatggctgtggtgcagggtggcagcaggagggggatggagacacagatgaccacgtcatcgtcttctgagctgtggttattctatgaaagggcagaaggaagtcccactgctctggaggtgtggaagggtgggagtctggtcttcctggaggcggaggtgagccaggaggcaggaccaggcaggagctcacctagaaacggcacggctcttccatctgtttcaagtccagcaagtaccataggtgcctgggcaggggcctgaaagccctgatgaatccctgcatgatctcatcgtcctccaccaggactctggccaggtactggcacatcatgctctggatgggggtggtggtgtcctgtaggcagagaaacaggaaattgtcgtagtcagtatcgagcagcgtggcctcgttcgccaccgtatagttgatcttgaacttctttggattctcagtcttctctccaaggaccttcttctcaacacagctgttgttctcccatctgtgcagaacgatctccaggttgtcctcgggggtgggcaacagtgaggtgatgtggaccctcagaggggccttcagtgtcgccatgagggagatgttgttggtcgccatggccatggagtgccaggtccctgccaactttgggagctccaggtcctgcttggtctgggggatgtccatggccgggacaccacagaccagggccacgcccagggtgagcaggaggcacagcatggctgcggctgtgggtggctctgagctctccaacttttttgtacaaag

SEQ ID NO: 114549 - DNA, 915 bp, Homo Sapiens
aatgccagaaagagttgctgtaagagttaactcagcaggcctgtgtttaccaaacctgcacattcccaagaaagtcctattttcatgactggcagttggctgcctcgtgagaattgagcaattagaatattctgcctgatcagagtgtttttgcatacctgaggtcttgagccactgctgtaccaagttttcccagacagtttatactagcaatgtgattgatggtgaatacctgcttttcactggaggtctagaacttgaataactaaggtcagtctgtaggcctacatgactgataagggctatatgctgagtcttgggtcctgtgagtccttttggcaaatctgcaggcctgaggatagtcaggcattcctgccacagtctaaagagctattcacctaatactacaataccagggggttcaccacgtatatataagctaaccaactcattacctttgtgttcttgttatgatctggcgtcaattttctttttttattgctgtgaaattctaccacttctacttgttccctattgttctttagggaagagggaggaactgcagcagcaaggatctctggtcctgtgggggtcccagaaggagcacaatgccgctcttctctaagttccttgaagaagctcgaagcgctcttcctctggcctcttatgagagaaccaggtaggggagatggctctgctgccaaggccgctgaagccatcacatctctcttcttgttttcccttttctttatgatcttcttctgttctgtttcaccttctgtacctccaaagtcgtaaaggttctggagcagagcgtcaagaagtgtcggagaactgggaggcgtggaggaccccggcccttgctcctgcgacattgtggggtcagccgaggaatccaacttttttgtacaaagt

SEQ ID NO: 114550 - DNA, 732 bp, Homo Sapiens
tttgtacaaaaaagttggcacttttacgtatacattttattttatttcatatatttcctattggctttttacatttaaattatggagcacttcatcatataaaaaacttcaattatatttaaacagtaagtctttggatttttttgccttgtaatttccatattacataataatgagataaacattaatgttttcagggtactttaaattttagataattactcattgtattcatgtgaaatttgtttttactgcatgtgtgggttggaggactgttttcacttctgattcatctttactcttatctcatcagagctcatacctcttgtagttgggggattgcagtttataattccaataaatggggcaaattcaataataacataatacaaatgagtttgaatgcaggacaggtcttcaaagcatacacaacatgggcctacatatgtacaacaataataatttataagttactgtttggatggaaagtaaaagtacagaaaatttgttaaaggaaattaaaatggagatcatgtctcaataatctctgagcagacaaaattagttaggtctcataagtgatctcaacctcgcttgatttgcaaatacaaacaaaacttaaattatttcttgtagctgcatattgaaaaaagagaaatgaagctcaaccagtcagaagtagccaacaaccttatataaatagaaactgtccaacaaggtaaacagacaaac

SEQ ID NO: 114551 - DNA, 744 bp, Homo Sapiens
ctttgtacaaaaaagttgggcactgtgtgctcctctccgacaggatgagctcgctgcatcggggctgccgagctgcgatgccgccgtcaacctggccggagagaacatcctcaaccctctccgaagcttactaccagcccagtctgactgcggagtatgatgaagacagcccaggaggggactttgactttttctccaacctcgtaaccaaatgggaagctgcagccaggcttcctggagattctacacgccaggtggtggtgcgctcaggggttgtgctgggccgtgggggtggtgccatgggccacatgctgctgccctttcgcctgggcctggggggccccatcggctcaggccaccaattcttcccctggatacacatcggggacctggcaggaatcctgacccatgcccttgaagcaaaccacgtgcacggggtcctgaatggagtggctccatcctccgccactaatgctgagtttgcccagaccttcggtgctgccctgggccgccgagccttcatccctctccccagcgctgtggtgcaagctgtctttgggcgacagcgtgccatcatgctgctggagggccagaaggtgatcccacggcgaacactggccactggctaccagtattccttcccagagctaggggctgccttaaaggaaattgtagcctaattaggtcatggcaagagcctgaggcctgttcctcacaggcttccaggttaggcactgtgaaata

SEQ ID NO: 114552 - DNA, 908 bp, Homo Sapiens
ttggctgctagattccacccaggatacagatcttaaatttgtcaggacaagggctcagaggactggacgtgctcagacatcggtgttcttcttcccagttcttgacccctggtcctgtctccagcccgtcttggcttatccactttgactcctttgagccgtttggaggggcggtttctggtagttgtggcttttatgctttcaaagaatttcttcagtccagagaattcctcctggcagccctgtgtgtgtcacccattggtgacctgcggcagtatgtacttcagtgcacctactgcttactgttgctttagtcactaattgctttctggtttgaaagatgcagtggttcctccctctcctgaatccttttctacatgatgccctgctgaccatgcagccgcaccagagagagattcttccccaattggctctagtcactggcatctcactttatgatagggaaggctactacctagggcactttaagtcagtgacagccccttatttgcacttcaccttttgaccataactgtttccccagagcaggagcttgtggaaataccttggctgatgttgcagcctgcagcaagtgcttccgtctccggaatccttggggagcacttgtccacgtcttttctcatatcatggtagtcactaacatatataaggtatgtgctattggcccagcttttagaaaatgcagtcatttttctaaataaaaaggaagtactgcacccagcagtgtcactctgtagttactgtggtcacttgtaccatatagaggtgtaacacttgtcaagaagcgttatgtgcagtacttaatgtttgtaagacttacaaaaaaagatttaaagtggcagcttcactcgacatttggtgagagaagtacaaagttgcagtgctga

SEQ ID NO: 114553 - DNA, 874 bp, Homo Sapiens
ccggcagccactgctgatgttgggttcggaggctgcatccgactcggtcacaaggaaaatggattcagtttgcatctctccctcctttaaacagcttctccgggtctcagcatgggcttccagggcagcgattgaggagaccttaccaaggagcaccacacagtagatgctgagacatcgtactccaggataagaaacagtaacatggcagcacctgcttgaaagaaattaaaaaccaacagactccatttagaaaggaacaatgtccaagaaagggcgaaataagggcgagaagcccgaggcactcattgttgcccttcaagctgccaatgaagacctcaggaccaagctcacagacattcagatagagctgcatcaagagaagtccaaggtatcaaagcttgaaagagagaagactcaagaagcgaagaggattcgtgagctggagcagcgcaagcacacggtgctggtgacagaactcaaagccaagctccatgaggagaagatgaaggagctgcaggctgtgagggagaaccttatcaagcagcacgagcaggaaatgtcaaggacggtgaaggtacgtgatggagagatccagaggctcaagtctgctctctgtgctctccgcgacggcagcagtgacaaagtaaggacagcgctcaccattgaggcccgggaggaggcccggaaactgtttgacacagagcgccttaagctcttacaggaaattgcggacctgaaaacggccaagaagcagtggacgaggctctgagcaatatgatccaagcagataaaatcaaggctggggaccttcggagtgagcatcagtcccaccagaagccatctcgaagatcaagtgggagtcggagcggga

SEQ ID NO: 114554 - DNA, 987 bp, Homo Sapiens
actttgtacaaaaaagttggaagcgcggctgccccagggcgaggctccaggtggggtcggttccgcatccagcctagcgtgtccacgatgcggctgggctccgggactttcgctacctgttgcgtagcgatcgaggtgctagggatcgcggtcttccttcggggattcttcccggctcccgttcgttcctctgccagagcggaacacggagcggagcccccagcgcccgaaccctcggctggagccagttctaactggaccacgctgccaccacctctcttcagtaaagttgttattgttctgatagatgccttgagagatgattttgtgtttgggtcaaagggtgtgaaatttatgccctacacaacttaccttgtggaaaaaggagcatctcacagttttgtggctgaagcaaagccacctacagttactatgcctcgaatcaaggcattgatgacggggagccttcctggctttgtcgacgtcatcaggaacctcaattctcctgcactgctggaagacagtgtgataagacaagcaaaagcagctggaaaaagaatagtcttttatggagatgaaacctgggttaaattattcccaaagcattttgtggaatatgatggaacaacctcatttttcgtgtcagattacacagaggtggataataatgtcacgaggcatttggataaagtattaaaaagaggagattgggacatattaatcctccactacctggggctggaccacattggccacatttcagggcccaacagccccctgattgggcagaagctgagcgagatggacagcgtgctgatgaagatccacacctcactgcagtcgaaggagagagagacgcctttacccatttgctggttctttgtggtgaccatggcatgtctgaaacaggaagtcacggggcctcttccaccggaggaggtgaatacacctctgattttaatcagttctgcgtttgaaaggaaaccc

SEQ ID NO: 114555 - DNA, 696 bp, Homo Sapiens
caaaagaaaaaagaaagcttattttttcccctaatcaccataatattcactattaagtgagggaaatagaaataatttatttagcaaatcctttctagttcaaataatttgtatacaggctgtgcaaacataataatgagattctttttagtcatcttgctttatatcactaattacactcttatttaatgatattttaaagaaaaacgtgtttattttcaagtagaaaactcatatctgtccaccaaggaaagctgtaacaaatgtaaaatacataaaaaagataactgctaaatttctaaagcattccaaaaaaagacaaatagaagggtgtcagattaggaaagtatgtcttgtaaggtgtaacggacagactgatgagcttagagatgtggatctcaaagtggttctcagagcaacagcatcagggtcacctgggaacgtgttagaaatgcagattctcaggtaccatcccacatttaatgaatcagaagctcagagtagagaccagcaatttgttttaacaagtccttcagggattctgatacagctgatgtttgagaaacactagctttaggtaaacgtaagagggtcacgttagtatttttaaatcattggaagttggtttgttttgttttttcttaagtgggactcatttatacttcaatacacagaccaacttttttgtacaaagtt

SEQ ID NO: 114556 - DNA, 871 bp, Homo Sapiens
ttggatcttattccaccttctgaagcttctgtcgaaccagttgtaaggagaatggagagagcagtgagagtggagtccggggtcctggtcggggtggtctgtctgctcctggcatgccctgccacagccactgggcccgaagttgctcagcctgaagtagacaccaccctgggtcgtgtgcgaggccggcaggtgcctacaagacgtggagagcatgaacagcagcagatttgtcctcaacggaaaacagcagatcttctccgtttcagaggactgcctggtcctcaacgtctatagcccagctgaggtccccgcagggtccggtaggccggtaggcaccccagagggccctgtccacctgatccagctccactatgcctacctgtcccctccccgtccctgtttccaaagcaccctagcggtcctgagactgcctgggctggcaggtgggcagctaaggtctcaggagcttgggggtcagtgccccatggccacctctgcaggtcatggtatgggtccatggaggcgctctgataactggcgctgccacctcctacgatggatcagctctggctgcctatggggatgtggtcgtggttacagtccagtaccgccttggggtccttggcttcttcaggtgagacgacaggcatggccagagcactgcctgcaccggggagaggccagctcaccagagcaactggggatctaggttggggtccggaacctgaaggagggccccttacccatgatgtctgaggcagagaaaggcaccccccaagcctccaccctgggagaggggtccagccaaagccagaattatacagtgaacttggtcccttgggcagagggcattgattcctgggctgaa

SEQ ID NO: 114557 - DNA, 544 bp, Homo Sapiens
tccgagcggggatcgctggcgttggcctcctatgtcctctgggggcccagccgtgatgcacgtcccgcagctgggccccgcgtcggggtaggcgatgaaagtgcaaacggcggtcccccttcgctgggaggcaccagggaggggggtcgctccagaatgtaaggcactggcagcggaggcgtggggggcgcaccggcttccccagagcccacccccgcgccccggcagggcaggacgcttgcgaagtgacgcccagctctgcccctcgggccacgcaggggccccatctctctagctctgggggggcacggcgatgagggttgactggaggggctggtggagaggctggaggggagggggaggaggcccgcggccattccgtgtcccagctggacaaaggggggggcgggtggtggtaatcaggcacttaaaccactcgctctcacctcccaccgccaggggctgacgggccaacttttttgtacaaagttgtcccccggccgcacaactttgtacaagaaagccaacttttttgtacaaagtt

SEQ ID NO: 114558 - DNA, 918 bp, Homo Sapiens
ttggcgcggaaccaagacttggaaacttgattgttgtggttcttcttgggggttatgaaatttcattaatcttttttttccggggagaaagtttttggaaagattcttccagatatttcttcattttcttttggaggaccgacttactttttttggtcttctttattactcccctccccccgtgggacccgccggacgcgtggaggagaccgtagctgaagctgattctgtacagcgggacagcgctttctgcccctgggggagcaacccctccctcgcccctgggtcctacggagcctgcactttcaagaggtacagcggcatcctgtgggggcctgggcaccgcaggaagactgcacagaaactttgccattgttggaacgggacgttgctccttccccgagcttccccggacagcgtactttgaggactcgctcagctcaccggggactcccacggctcaccccggacttgcaccttacttccccaacccggccatagccttggcttcccggcgacctcagcgtggtcacaggggcccccctgtgcccagggaaatgtttcaggctttccccggagactacgactccggctcccggtgcagctcctcaccctctgccgagtctcaatatctgtcttcggtggactccttcggcagtccacccaccgccgccgcctcccaggtaagtttttgatagtacgggtgctgctttgtaggttttattttttaagtcaagggtgaaaagaataaaccccaacccccacaaaaaggcgcatcagaaccctagatctgagatggaaaagctcacagcgcactttgcaaactgcaaagagtcgggagatgtttgcaattggttgcgtgcgtggagcgcaaggaggaacgcggcaaggagggtaggctttggggcgaggtggggg

SEQ ID NO: 114559 - DNA, 899 bp, Homo Sapiens
ggagatagcacccatcagtttgggctcttcagcactccgggcctggagtccaaggggcccagatagaggcggacgatgaggcattccgacagccaggcatgggagtgcaggaagagggagcaggatgccgccagccacagcaggagcagcagcagcttcagctcgaagctcatgtgcagaaagagggagcaggagaggaagcccagcgtgcagcagtgcatggagtatgggacactgatgagaggcagagacccagggagctcccaggagaggttggaaatcatggaggacacattgggagcttggaaagggcagtctgatgatgttgggaagaagaacaggctggtaatggccatggcaaagacaaggaggatggtggcggtgcccaaggctattctcagtcctggtcgtgtggccaccaggccagacagtgcaggcagccagtgcagcatcttggggcctttcaggacacacctcatcaggtcctctgagaagcagacaaaaaggatgaggaggaagaggaggaaggtgatgctatacgtgatggccagagctgggggcctgtttgtcactagcatctggatgatgaagttggagagaaaaaccaggaaggtgcaggcttcatagtatttgaaggcggggattgcagagagtcggtactctttctccatctccttctctctgaagtacagtgtcagtgggttgaagtccttcgactgcttccactgtctggaagaacttggcatccccggtgtccagttcatcatctagtccccggggggtacggctccgatccaggctccactgggtgctgaaggaagccagggtcttctccgggagaggggtggaggtggacacagggctgtctccgtggctcagccaacttttttgtacaaagt

SEQ ID NO: 114560 - DNA, 920 bp, Homo Sapiens
ctttgtacaaaaaagttggccggcatggccgggtgagctgcaggctaccttatttaagaccgggaatttagtcagcctggtgagccgactctgaggagatggagtatcgctgaggtgatgagagagaatgtggttgttagcaacatggagagagaaagtgggaagcccgtggctgttgtcgcagttgtgactgagccttggtttacccagcgatacagagaatatctccagaggcagaaactctttgatacacagcaccgtgtggaaaagatgccggatggctcggtggcgctaccggtgctgggagagacgcttccagagcagcacctgcaggagctgaggaatcgtgttgccccaggcagtccctgtatgctcacgcagctcccggatcctgttccttcgaagagggcccagggttgttcacctgcccaaaaattgtgtcttgaggtgagtcgctgggtggagggtcggggagtcaagtggtcagccgagttggaggctgatttgccccgatcatggcaacggcatggtaatctcttgttgctgagtgaagactgtttccaagccaagcagtggaaaaatctgggaccggaactctgggagaccgttgccttggcacttggcgtccagcgtttggcaaaacgagggcgggtatcaccggatggtactcgaactccagcagtgacactgctgctgggtgaccatggctgggtagagcatgtggataatggtatccgttataagtttgacgtgacccagtgtatgttctcctttggaaacatcactgagaagcttcgagtggcatcgttgtcctgtgctggagaagtgctggtggatctctatgcagggattggttattttacattgcctttcctagttcatgctggtgctgcctcgtccatgctgtgagtggaatcccc

SEQ ID NO: 114561 - DNA, 989 bp, Homo Sapiens
ttttgatcagtcggctacagttgtagatgaacatgccatccagatcccggtgttcaatgttgacaccaaaacaaaattcagttcctaggttctttaagtgctcgctgcttggcctccttgatcctcttcttgacatcggcttctctgcgcagagtgatggctctgttctggacctgtcgcaacatcaccctggagtcccgcgtgaggtctccacctaggcgtacttctaatgtccgagctttgctctctgcctcccgcgcttctcttcagcaatccttgctacgtgctctgctttcttcacctcctgctccgcacgggtcttgaaacggcttgacgtgtacttgtacatcctgggcttgtacaggcagcaggagagcctcttggtctgcaccttgtgcccatggatgaagatcctcatccggggatcaatatagagcacagcggcataggcacggaacgagcgccgctctggcttcgtgccctctggggacgtctctgccatctggatatctcttggatttgagattatgtctagttctggctctccattatccatgagtttgagattgaagatgatcaccaatgttccgctgtccccaggaatcttcataaactgggtcatcacttcctcctcagtgcggaatggagagtacttatagatgagttctgtctcaatggcaaatttctctacattgtctgtgacaggttcccgggtccgagcattccaggtgggcagtgggactatcacttcatcaatgccttcttcctcatgaaacgtgcgagacaggaagaggcacgtcatggtgtcttccttcttggtgaacaggataaaatccttcccaatgcgcattgagcccgattttaacccattcccgtactgcccaatctgagtagactcaggtgttcgcttggccgacttcccaaactggatcacactggcagcatcacttggatccattcctgctccatcccaacttttttgtacaaag

SEQ ID NO: 114562 - DNA, 907 bp, Homo Sapiens
ttgggatccacacagctcagaacagctggatcttgctcagtctctgccaggggaagattccttggaggaggccctgcagcgacatggagggagctgctttgctgagagtctctgtcctctgcatctggatgagtgcacttttccttggtgtgggagtgagggcagaggaagctggagcgagggtgcaacaaaacgttccaagtgggacagatactggagatcctcaaagtaagcccctcggtgactgggctgctggcaccatggacccagagagcagtatctttattgaggatgccattaagtatttcaaggaaaaagtgagcacacagaatctgctactcctgctgactgataatgaggcctggaacggattcgtggctgctgctgaactgcccaggaatgaggcagatgagctccgtaaagctctggacaaccttgcaagacaaatgatcatgaaagacaaaaactggcacgataaaggccagcagtacagaaactggtttctgaaagagtttcctcggttgaaaagtaagcttgaggataacataagaaggctccgtgcccttgcagatggggttcagaaggtccacaaaggcaccaccatcgccaatgtggtgtctggctctctcagcatttcctctggcatcctgaccctcgtcggcatgggtctggcacccttcacagagggaggcagccttgtactcttggaacctgggatggagttgggaatcacagcagctttgaccgggattaccagcagtaccatagactacggaaagaagtggtggacacaagcccaagcccacgacctggtcatcaaaagccttgacaaattgaagaggtgaaggagtttttgggtgagaacatatccaactttctttcccttagctggcaatacttaccactc

SEQ ID NO: 114563 - DNA, 885 bp, Homo Sapiens
actttgtacaaaaaagttggcttagccgctatgcacactgggtggtcagccagccgccagacacgtacctgaagccattaatgacagaattgctaaagcgcatcctggatagcaacaagagagtacaagaagctgcctgcagtgcctttgctaccctagaagaggaggcttgtacagaacttgttccttaccttgcttatatacttgataccctggtctttgcatttagtaaataccagcataagaacctgctcattctttacgatgccataggaacattagcagattcagtaggacatcatttaaacaaaccagaatatattcagatgctaatgcctccactgatccagaaatggaacatgttaaaggatgaagataaagatctcttccctttacttgagtgcctatcttcagttgccacagcactgcagtctggattccttccgtactgtgaacctgtgtatcagcgttgtgtaaacctagtacagaagactcttgcacaagccatgctaaacaatgctcaaccagatcaatatgaagctccagataaagattttatgatagtggctcttgatttactgagtggcctggctgaaggacttggaggcaacattgaacagctggtagcccgaagtaacatcctgacactaatgtatcagtgcatgcaggataaaatgccagaagttcgacagagttcttttgccctgttaggtgacctcacaaaagcttgctttcagcatgttaagccttgtatagctgatttcatgccaatattgggaaccaacctaaatccagaattcatttcagtctgcaacaatgccacatgggcaattggagaaatctccattcaaatgggtatagagatgcagccttatattcctatgg

SEQ ID NO: 114564 - DNA, 938 bp, Homo Sapiens
ctttgtacaaaaaagttgggccagtgggaacccaaacccataggagacccgcgtccccgctcggcctggccaggccccgcgctatggagttcctctgggcccctctcttgggtctgtgctgcagtctggccgctgctgatcgccacaccgtcttctggaacagttcaaatcccaagttccggaatgaggactacaccatacatgtgcagctgaatgactacgtggacatcatctgtccgcactatgaagatcactctgtggcagacgctgccatggagcagtacatactgtacctggtggagcatgaggagtaccagctgtgccagccccagtccaaggaccaagtccgctggcagtgcaaccggcccagtgccaagcatggcccggagaagctgtctgagaagttccagcgcttcacacctttcaccctgggcaaggagttcaaagaaggacacagctactactacatctccaaacccatccaccagcatgaagaccgctgcttgaggttgaaggtgactgtcagtggcaaaatcactcacagtcctcaggcccatgacaatccacaggagaagagacttgcagcagatgacccagaggtgcgggttctacatagcatcggtcacagtgctgccccacgcctcttcccacttgcctggactgtgctgctccttccacttctgctgctgcaaaccccgtgaaggtgtgtgccacacctggccttaaagagggacaggctgaagagagggacaggcactccaaacctgtcttggggccactttcagagcccccagccctgggaaccactcccaccacaggcataagctatcacctagcagcctcaaaacgggtcaatattaagttttcaaccggaaggaggccaaccagcccgacagtggccatccccacccttcacctcggaagggatggagaaagaa

SEQ ID NO: 114565 - DNA, 892 bp, Homo Sapiens
ttgggttcattattggaagaaagttttgccattgttgaagataataaagaagaacagtattcctgaacctattgatcctctgtttaaacattttcatagtgtagacattcaggcatcagaaattgttgaatatgaagaagacgcacacataacttttgctatgttggatgcagtaaatggaaatatagaagatgctgtgactgcttttgaatctataaaaagtgttgtttcttattggaatcttgcactgatttttcacaggaaggcagaagacattgaaaatgatgccctttctcctgaagaacaagaagaatgcagaaattatctgacaaagaccagggactacctaataaagattatagatgacggtgattcaaatctttcagtggtcaagaaattgcctgtgcccctggagtctgtaaaacagatgcttaattcagtcatgcaggaactcgaagactatagtgaaggaggtcctctctataaaaatggttctttgcgaaatgcagattcagaaataaaacattctacaccgtctcctaccaaatattcactatcaccaagtaaaagttacaagtattctcccgaaacaccacctcgatggacagaagatcggaattctttactgaatatgatttgccaacaagtagaggccattaagaaagaaatgcaggagttgaaactaaatagcagtaagtcagcatcccgtcatcgttggcccacagagaattatggaccagactcggtgcctgatggatatcaggggtcacagacatttcatggggctccactaacagttgcaactactgggcccttcagtatattatagtcagtcaccagcatataattcccagtatcttctcagaccaggcagctaatgttactcccacaa

SEQ ID NO: 114566 - DNA, 943 bp, Homo Sapiens
ggatgactccaaaaggaaagatgctttctgaaagttgcaaaactctcaagaagtgataatcacaaatgagaagagaaaattaacccccaaacccagtatagtttcactgggagtcttttttgagaataatccataaggatttttaaagaactttgtccatccattgatctacctattaccaacataaatagaattccctgaaaatgcttcatttctaatcaatgtaacattaaattataataaaatatgacccatactggtttcaaagccattttctagtgagagatttctctttggactgttaaaagaattttaagaggtgttgcggaaggcaatggattttaatccctcagaagagggtcccaacaaacaggcatttacaattaggttcagagcaatcacttgggcaaggaagagctgagccaaccattatgctgctggggtaactgcttagagaaggctcagctttccagttcatattttgcaaagtgagtggaccaagtactgatgaaaacgaattaaagtcagaagagaatgaactggggaaagaatgcatctaatggtacccaagtgaattcagatctcctggctcaaataaattatgtctcagagtgctgagagactataagaatagtgaaacagctttcctgtggtctttgaaaaaatatggagaatgagaatgaggttctgtaagagtgggatgggcaagcatgaccttaacaccccaaaaagggaaaaaaggcaagggcagtatgaattaagattggagatgaattaatgggatgtggatgtagacgatactaaaaaaataccttgaaagcaatatgctaatgaaaccttaagaataaagtacattaagtactttcccataatgctatcacaccgacctaagaagtatttttacttgtagaaggaggggatttctttccaggttttgccccaa

SEQ ID NO: 114567 - DNA, 899 bp, Homo Sapiens
ctttgtacaaaaaagttggtgcgagcgtggacctgggacgggtctgggcggctctcggtggttggcacgggttcgcacacccattcaagcggcaggacgcacttgtcttagcagttctcgctgaccgcgctagctgcggcttctacgctccggcactctgagttcatcagcaaacgccctggcgtctgtcctcaccatgcctagcctttgggaccgcttctcgtcgtcgtccacctcctcttcgccctcgtccttgccccgaactcccaccccagatcggccgccgcgctcagcctgggggtcggcgacccgggaggaggggtttgaccgctccacgagcctggagagctcggactgcgagtccctggacagcagcaacagtggcttcgggccggaggaagacacggcttacctggatggggtgtcgttgcccgacttcgagctgctcagtgaccctgaggatgaacacttgtgtgccaacctgatgcagctgctgcaggagagcctggcccaggcgcggctgggctctcgacgccctgcgcgcctgctgatgcctagccagttggtaagccaggtgggcaaagaactactgcgcctggcctacagcgagccgtgcggcctgcggggggcgctgctggacgtctgcgtggagcaggcaagagctgccacagcgtgggccagctggcactcgaccccagcctggtgcccaccttccagctgaccctcgtgctgcgcctggactcacgactctggcccaagatccaggggctgtttagctccgccactctcccttcctccctggcttcgccagtccctgacgctgagcactggcttccgagtcatcaaaaaaagctgtacagctcggaacagctgctcattgagaagtgtgtactccaccc

SEQ ID NO: 114568 - DNA, 728 bp, Homo Sapiens
actttgtacaaaaaagttggctgggttctttgccctcccttcacaccatgggataaatctgtatcaagacggttcttttctagatttcctctacctttttgctcttaaaactgcttctctgctctgagaagcacagctacctgccttcactgaaatatacctcaggctgaaatttggggtgggatagcaggtcagttgatcttctgcaggaaggtgcagcttttccatatcagctcaaccacgccgccagtccattcttaaggaactgccgactaggactgatgatgcattttagctttgagcttttgggggttattctaccaacaaacagtccattggaaagaaaacagtccctggaattaacagatcagaatgttcacactggttaatctttttttaacaatgagcatgaaggtagcagaagctggtgtgtttccagatggttcttctaaccaaactaatttttcactgttgacaagcgaggcaagggttgcactggaccaaaggctgaggcttggccatctagcattccatacaaaattgtttcctataagcattccttttattctctattctatcctgggtctgcctcaaccgtgagataggagagtctctggtactagctgctgtagcagtgcccttcatccagggcagttaatggagtcttggaccctttctttctctgggatccctgcccagcaccttcctatagagatgactttaaaagg

SEQ ID NO: 114569 - DNA, 592 bp, Homo Sapiens
tcaagtagaatgctcaaacaaggatatttcccttcaatgtaagacaaaaagcagcagccacaatttaaaactttactccataatgaaatcagcatgaattctgaaactaagacattgggaaattgcactggtttgctgaggcaaggcccatgtctaccccaaggagttagcagtctccatgacaacctgactccatttttagtctcccaaacctttttctgcttgagaaccatgagcttgagttactgctgacaaatatttgattttaacaatgaatttcaggtttaatgattttttacctttcctctgaaagacagttgaaaaggacacaaatgattcacaacagaggtttatgtttgaggtgatcaccactaatacacactttgaaaagtaccatcaccatatatatatttgctttaaaaaaattatgacaagcttcaggtaaaaataatttttaaagggtccatttttcatttacgtacaatcagtacatcttatttacatatatgactggatctttattctattttcttcatataagatattttaactggtaggtaactgctctattctgtttttatagaaagaccaa

SEQ ID NO: 114570 - DNA, 682 bp, Homo Sapiens
ctttaaaaaagccaactttgtacaaaaaagttggctcttctttttaaaaaagaaaatagagaatagcaaatcttcatgataatcctcaaaagaacaaaatgcttaactttatctcttaatttctaaaggtaaataacctaggttcagcttttgcttaaacattaaatatcttttccattttttaatgtttgtaagctagatatgccagctttgtttctacattgcaaccaaaaactgtttcttttcacttaattataaaaccagtaattcatttactcttgcccaaaactatacactgtatttctgttatagtaacaaaatagagttatgtagaattgtatggaactcaaatttaaaccatgctttcttgtagtactgattgaaacttacacgttttattctactcatagtgagcttattcttattttggattgattttccaaaaccacagcttcagcagcaacaatcagaatgtccaaatgctgtcctttcccttacagagaagaacaatggtaactaaaagctgcatataactagcaataactacattgaacggtgtgcattgttcatgattgttgtgttttaagacttgtatataaactgctttttccaaactctgtataacttttaaatggctggaactactcgtataaggactagaactgtattttttgacatgctc

SEQ ID NO: 114571 - DNA, 915 bp, Homo Sapiens
ccagtaatcgcaggtggtataaagtgcgatgtcttgcttgagccacgccctttatcgaacttcaggtattcaatgtcctctaccactttttgaatcttgagcttcccttgcagaatactgtaaaacctcacatttttcactcatctcagggagaaaggttttcttataggcattctcaatgtcctgtagataggcagaggtgatcttcatttcatgtggatctcctttcttctgaatccgcctctggacctctggaacgggcacatcgatgtaaatcaccaggtgggggggcaggtaatcgcagatggtgacgctcttcacctcgttgtagtggtccacacactgctttcggatgaatccctggttgtacatcgcctccaggaacacaaagtcactgaagatggagcgctccaacacaacaccttgtcctgtggtcagcaagtgctccaaggcatctgagtactgcagcaggcgactgctgtacaaccaggactgcaggcggtaactgttgccatcattgcttctcggatcatcgtaaaatttctccaaactacagttgccattatagtcggtggcgaggggcttcccatctcctgtggtactgtctggataatgaatccccgcttcaggaaagtgcttgaagcctagtttctctgctatttcttttgcaagtttgccttttccagtacatatattgccatctacagttatcactctgctgcgttctgtcagtcttttgcttgctttatccccaagtaggaaatgccacattccatagcgcagcttgcactgcacactgctatgaattcctctcacgcgctgggcgcccgccgccacgacccgggcggacgcggacgtcgctgccagcttcaggagccgcaaggccatggctacccggtcagctcaggatcccaa

SEQ ID NO: 114572 - DNA, 925 bp, Homo Sapiens
ctttgtacaaaaaagttgggctggcccttggtgacgggtcgcctcagttccgacccggacccgtacgctgctgcgctgacgtggctcccggaagtagggctggcgtagggccgccatgttgcagcaggatagtaatgatgacactgaagatgtttcactgtttgatgcggaagaggagacgactaatagaccaagaaaagccaaaatcagacatccagtagcatcgtttttccacttattctttcgagtcagtgcaatcatcgtctatcttctctgtgagttgctcagcagcagctttattacctgtatggtgacaattatcttgttgttgtcgtgtgacttttgggcagtgaagaatgtcacaggtagactaatggttggcctacgttggtggaatcacattgatgaagatggaaagagccattgggtgtttgaatctagaaaggagtcctctcaagagaataaaactgtgtcagaggctgaatcaagaatcttttggttgggacttattgcctgtccagtactgtgggtgatatttgcctttagtgcactcttctccttcagagtaaagtggttggcggtggttatcatgggtgtggtgctacaaggtgccaacctgtatggttacatcaggtgtaaggtgcgcagcagaaagcatttaaccagcatggctacttcatattttggaaagcagtttttaagacaaaacactggagatgatcagacttcctgaatagagaaagcttatgtgctttgttacattggggaacaactgaagagattcttgactcaaccttttagagcttagtccatgttgcaacgaggagtgttggctttgttttttcacttaaaactttatttataaaaaggaaaagtagttttcatattaagtttttatttcctttccagcagtttggggctagaa

SEQ ID NO: 114573 - DNA, 689 bp, Homo Sapiens
ttttttgtacaaagttggcacgcgctcctacatggctccggagcggttgcagggcacacattactcggtgcagtcggacatctggagcatgggcctgtccctggtggagctggccgtcggaaggtaccccatccccccgcccgacgccaaagagctggaggccatctttggccggcccgtggtcgacggggaagaaggagagcctcacagcatctcgcctcggccgaggccccccgggcgccccgtcagcggtcacgggatggatagccggcctgccatggccatctttgaactcctggactatattgtgaacgagccacctcctaagctgcccaacggtgtgttcacccccgacttccaggagtttgtcaataaatgcctcatcaagaacccagcggagcgggcggacctgaagatgctcacaaaccacaccttcatcaagcggtccgaggtggaagaagtggattttgccggctggttgtgtaaaaccctgcggctgaaccagcccggcacacccacgcgcaccgccgtgtgacagtggccgggctccctgcgtcccgctggtgacctgcccaccgtccctgtccatgccccgcccttccagctgaagacaagctggcgcctccacccaccctcctgcctcacccctgcggagagcaccgtggcggggcgacagcgcatgcaggaac

SEQ ID NO: 114574 - DNA, 532 bp, Homo Sapiens
tgagccaccgcacccggcagagttttataatgaaaaattaactaatattctagtatgaagtgaggaggatactgaacaggatgtggctaaagccaacctgggacagccatggggtggcttggtttcttcactccagtgttgtccctaccatttcgcagcattgatttaggaggctctgggacaaaagagaagccaaagagcagttttcccagttcactcactctggcaaaatcaggaaaaaaaagtctgcttttgacatcaaattccactaatttggggcagcgttgggtgaggaaagtattgtgaagacaggcttcttggagtaggggcagccacaattcagtagacactctagctcggaggctgccactgtagttgccagctcagttgggtggttctgtgctgtatggatggaataggacctggctggtcatcttcatgtcgtttcctctctgtatcatggaagttcacccgcccctacctcttcagatagttgtaggccacttttctcttgtaactttggaaaacaaaa

SEQ ID NO: 114575 - DNA, 807 bp, Homo Sapiens
tttgtacaaaaaagttgggcacatgtgaataaccccttccatcccattcacagcatcgcactcccagtccttaaggcaaagggaggcagtgctgaagcattggtggtgcagtgtaaagagacaagacctgatcatctgatcacacttgtgccaacttgattcatattgggcattactaacaacccctgggcaaggtaaataggttgaacaatcaataacattatccctgcctgcatacatgtgaacaaaagctatagaggacatgcaaattctacagtcattcctcatatgctttagacagagtgcagctactggaatcttccagatttcagtgttttaaaatcagagctctgaatacacaaaaggaaagagaaatggagcagctgacatattttaagctcacagtgatactcagtgacaggagcacagagctctaatgtccacaggatgttgtagggtagggtctctcagtaaatcaagtcccttacctatgttctgacactgaggctcttggagctatgggttagaaatccaggaggcaatgtctttattctaatgaagtcctcatcttgcactcagaggcccactagtttgcccttctatatattaagtaaaaccaagagaaattaagaggatgatggcttctttctgtcacatgggtgcttaaacctttttacaaacacttgatacttctatagagggaacaaggacctcaaagtcctgagcagtctccatactgtgctactcactactgtctcaacactgtaatgagtctgtctttaacaaatttcgtccaataagaataaa

SEQ ID NO: 114576 - DNA, 931 bp, Homo Sapiens
ctttgtacaaaaaagttgggtctgctccaaccccggcctgggatgaggacactgcacacctaaagagggggagacaccaccagcccctgcagcactctccagtcctcttgctgtgccggccttgtcagcatcctcattgagttccagagctcctccacctgcagaagtcagggtgcagccacagctcagcaggacccctcaagcggcccagcagactgaggccctggccaggtaacctgatggctgagacagaaagggcaggggcgtcctgggatgtggccctccctcgaggccctctgctccctctttgctgcccgtagcactgggagtcaggcccagtctgctccaaccccggcctgggatgaggacactgcacaaattggccccaagagaattaggaaagctgccaaaagagagctgatgccttgtgacttccctggctgtggaaggatcttctccaaccggcagtatttgaatgtgaggggcacaggttggggcctgtgtggctgctggggtgggggaaagggctaaaagaaaaactgaggaaaaggatcttaaggcatgggaggattcagaaccaggaagcagagggtacctgacatgtataaagtcttttggtcctcacaatatccccatagattaggtgctgctattattcccactttgcagacagaaaggttagggcattgctcaaggctcttcagctagtgtgtgttagtgctagggttctgagcctggtggcctggcttcagagtccatgcctgggctgccacatatcctgggcttgagagggtagtttctagagtgaaacgggctgggagatggtcctgtccccaatctcattgcctgagaaatttgaggcacagaagcaaggggtccaatcctacagtcaccagagcacttggcacagcaggtaccaaggctggggagg

SEQ ID NO: 114577 - DNA, 910 bp, Homo Sapiens
tatgaggccaaaatcatatggtgcttgacgtactggggcccccccagcatggtctccagtaaaaagacagtttctaagaattcaggctttgaattcatatccttctctgctaaataccacagcaattcagacccctcttgctgaaggtgagtactaagacgattgcctctgtaatctggacactcaatgccaactgtaccatcgagggtatatagttccttaaggaggtcaaacttagttctctcctgagctaacctgacaaaccctggactgagagcgaaatcaattaactctactggaaagtactccaaaaatgccaggcccagcaggcaggtgggcaggtgttctgggtactggttgaattcaggcatctttctgtgaatctcacttatcaggctggagtaaaattcttctgcattgggtggcttataattcagagttccaaatgaccacagaatcttggcaacatctttacttcgacagtgtgccactctaggaggcaaagacgcagccactgcattcattactccttcattcaggaagcgtaaggccgagcagtaaagagtcaggtgcatgacaccttgaactcccagggaaggaattcgctgaggagctatctctccaatctgcttcatgaaattgatgtgatccacgtgagtgaaacggaacattttaacaatattcactaaggagcgactactcagatgctgaatgttagcacaagccaagtctccaattttccgcatgacaaattcagagagattagtacttgatttaaagaaccccaaacagatggtaccaacctcctccaaattgatcaaatctatatatttaaggatcaatgattccaatttttgcattaggtcctgggatacctgacgattttcacctataacataaattaagccaa

SEQ ID NO: 114578 - DNA, 922 bp, Homo Sapiens
gttttcgcgggcgcttcccccaggatgaagggggtgcctcgctcaggtctgcgccctcgggcgacggttcgacgcgcgctctgggctccggcagcgccgctcgggtcctcagaaggccaccacggcccgcacgagcacgttgagcatgctgtccgccgggcggcaagcgggctttgcctcgcacgcgggcggcgcagtcggaggggccgcggggctgcagttcaggaggccggagaagcgcctctgcaggacgcgggccaggttgggaaaggcgccctccgcttgcgccggagggggctgcaggcgatcggcgacttcggatgacgctccctcctcttcttccttttcttccagacgggctttcttgctcgggaccagtccagcgtccccgccgtcgctcaggctgctgctgcgtcgtttgcggctgactttggcggggcgcggggcacagcaggcggaggtctcctcggctgtcggcgcctcctgcgtgtccattggctccggaaacgggtgctcaccgtcgggggtcgctgtctcggccgtggactcggcttctcggggcgggtgcaggcgagggtcagaggggagggcggccggcaacgacacctcgggctcgagggcctccaccttggccgagaggtagagctcccgggcgctgcgcatgaccagcgacagctgcagactccggtgcagccgcaggccaccgcgctgcatgcgggagtgatacatcttccacaccgacagggtcatgatgcgctgtgcctctttctgcacttccatggcgactcgacggcgacagcggcgggggctcccgggagggacagaacaggcagcaggtgcactccggacaacgggctcgctcacgcctctctacacaaaccaacccacgcagtgacactgctccaacttttttgtacaaagt

SEQ ID NO: 114579 - DNA, 878 bp, Homo Sapiens
ctttgtacaaaaaagttggagaagccactttttccaatcctaaaaccactagcccaaataaaggcaaagagaaggaggctgaggatggcattattgcttatgatgactgtggggtgaaactgactattgcttttcaagccaaggatgtggaaggatctacttctcctcaaataggagataaggttgaatttagtattagtgacaaacagaggcctggacagcaggttgcaacttgtgtgcgacttttaggtcgtaattctaactccaagaggctcttgggttatgtggcaactctgaaggataattttggatttattgaaacagccaatcatgataaggaaatctttttccattacagtgagttctctggtgatgttgatagcctggaactgggggacatggtcgagtatagcttgtccaaaggcaaaggcaacaaagtcagtgcagaaaaagtgaacaaaacacactcagtgaatggcattactgaggaagctgatcccaccatttactctggcaaagtaattcgccccctgaggagtgttgatccaacacagactgagtaccaaggaatgattgagattgtggaggagggcgatatgaaaggtgaggtctatccatttggcatcgttgggatggccaacaaaggggattgcctgcagaaaaggggagagcgtcaagttccaattgtgtgtcctgggcccaaaatgcacaactatggcttacaacatcacacccctgcgcagggccacagtggaattgtgtgaaagatcagtttggcttcattaactatgaagtaaggagatagcaagaagctcttttcccatgtgaaagaagttcagatggcattgagctacaggcaaggagatgaggtggagttc

SEQ ID NO: 114580 - DNA, 936 bp, Homo Sapiens
ttgggtgcagcaatgacaacaagaccttcgactcttcctgccacttctttgccacaaagtgcaccctggagggcaccaagaagggccacaagctccacctggactacatcgggccttgcaaatacatccccccttgcctggactctgagctgaccgaattccccctgcgcatgcgggactggctcaagaacgtcctggtcaccctgtatgagagggatgaggacaacaaccttctgactgagaagcagaagctgcgggtgaagaagatccatgagaatgagaagcgcctggaggcaggagaccaccccgtggagctgctggcccgggacttcgagaagaactataacatgtacatcttccctgtacactggcagttcggccagctggaccagcaccccattgacgggtacctctcccacaccgagctggctccactgcgtgctcccctcatccccatggagcattgcaccacccgctttttcgagacctgtgacctggacaatgacaagtacatcgccctggatgagtgggccggctgcttcggcatcaagcagaaggatatcgacaaggatcttgtgatctaaatccactccttccacagtaccggattctctctttaaccctccccttcgtgtttcccccaatgtttaaaatgtttggatggtttgttgttctgcctggagacaaggtgctaacatagatttaagtgaatacattaacggtgctaaaaatgaaaattctaacccaagacatgacattcttagctgtaacttaactattaaggccttttccacacgcattaatagtcccatttttctcttgccatttgtagctttgcccattgtcttattggcacatgggtggacacggatctgctgggctctgccttaacacacattgcagcttcaacttttctctttagtgttctgtttgaaa

SEQ ID NO: 114581 - DNA, 799 bp, Homo Sapiens
ccctcgggtgctgccagccgggtgctgatgcgagtcggtggcagcgaggacattttctgactccctggcccctgacacggctgcactttccatcccgtcgcggggccggccgctactccggccccaggatgcagaatgtgattaatactgtgaagggaaaggcactggaagtggctgagtacctgaccccggtcctcaaggaatcaaagtttaaggaaacaggtgtaattaccccagaagagtttgtggcagctggagatcacctagcccaccactgtccaacatggcaatgggctacaggggaagaattgaaagtgaaggcatacctaccaacaggcaaacaatttttggtaaccaaaaatgtgccgtgctataagcggtgcaaacagatggaatattcagatgaattggaagctatcattgaagaagatgatggtgatggcggatgggtagatacatatcacaacacaggtattacaggaataacggaagccgttaaagagatcacactggaaaataaggacaatataaggcttcaagattgctcagcactatgtgaagaggaagaagatgaagatgaaggagaagctgcagatatggaagaatatgaagagagtggattgttggaaacagatgaggctaccctagatacaaggaaaatagtagaagcttgtaaagccaaactgatgctggcggtgaagatgctattttgcaaaccagaacttatgacctttacatcacttatgataaatattaaccaactccacgaatatgggttgtttgggctatgatgagccac

SEQ ID NO: 114582 - DNA, 549 bp, Homo Sapiens
  misc_feature (456)..(469): n is a, c, g, or t
tttgtacaaaaaagttgggattcgggagctagcctagccagcctcgtcaaatatggaagagaaacaacctgcggtcaaaagggagtgatttgttaagtggtgcgcgtctatctcataactagatgtaccaaccagggaagggccaaggatggaaaggggtaacttttgtgcttccaaagtagctaagcagaagtgggggagcagtttagccagatgatctttgattaggcaaacattgagttttaaagaggctgtcaagttgaggccacttggtccattagctggggcagcaagatcactactcaacgttttcacactgtggcaagattgctcttctagtggaataatgccctagtttctctgagatgatgtaagtggcatgatgttacctaaggcttaggcttagcttgatttctgggcccactgtctgtgttcttaagatgccaacctgttgcnnnnnnnnnnnnnncccccatttaaaaggataatacctactccctctaaccacctccccccattcttgaatgacattttatccttctgaaaaaa

SEQ ID NO: 114583 - DNA, 912 bp, Homo Sapiens
ccccggtagtactcaaagagaatgcagccaatgctccagacgtcacagggctgtgcccagcccagctcaaggatcactcaggcgggcgatagtgacgggtggccacaatggtggtgtggtgctcatggtcaaatgtggcactgccaaagtcagccactcggatgctggtgttcttcactgacttctcctcacagctcttgtgctcattgtagagggtttcaaactcagaattcacaaacaggatgttctctggtttcaagtctgtatgggtcagctgattctcatgcagaaatctaagggcgtggcagagctggtaggccatgtgccggacatgtggtagggggtaaggctggaagttattctccttcaggaactcaaaggtgttcttgcccaggagctcaaaggcgatgcacatgtgaccgtggaagttgaaccagtcagacatcaagacacacaggaacttgttttctttgtccttctccttgatttttttgagcacgttgatttctagccgggcagcctcccggtacttgcccacgttgcggatgatcttcagggcaacctgagacttccctctggcatggtccaagcactccaccaccttgccaaaggtgccttcacccaggttccccacaatctcatatcgctcttggagccaatcgccgatccggcacaccaggtgaccctccttgtcatcttccacactccggctgctgcgcttactgctctgttggcttctctgcatgcaccgccccccgaaacgccatccgaccaatcgcatggtaggcggttccgattgacagattgaggtgtcagtcaaaggcagaggtggagacggtgaggagccggtgggttggttggttggattttccagatcccagcatttcataaggcacacagcatatataccaa

SEQ ID NO: 114584 - DNA, 953 bp, Homo Sapiens
actttgtacaaaaaagttggcctagattagaccatgaacgagccaagtccttaatggatcagtactttgcccgaatgtgctccttgatgttaagtaaggaattgccagcaaggattcgtttcctgctgcaggataccgtagagttgcgagaacaccattgggttcctcgcaaggcttttcttgacaatggaccaaagacgatcaatcaaattcgtcaagatgcagtaaaagatctaggggtgtttattcctgctcctatggctcaagggatgagaagtgacttctttctggagggaccgttcatgccacccaggatgaaaatggatagggacccacttggaggacttgctgatatgtttggacaaatgccaggtagcggaattggtactggtccaggagttatccaggatagattttcacccaccatgggacgtcatcgttcaaatcaactcttcaatggccatgggggacacatcatgcctcccacacaatcgcagtttggagagatgggaggcaagtttatgaaaagccaggggctaagccagctctaccataaccagagtcagggactcttatcccagctgcaaggacagtcgaaggatatgccacctcggttttctaagaaaggacagcttaatgcagatgagattagcctgaggcctgctcagtcgttcctaatgaataaaaatcaagtgccaaagcttcagccccagataactatgattcctcctagtgcacaaccaccacgcactcaaacaccacctctgggacagacacctcagcttggtctcaaaactaatccaccacttatccaggaaaagcctgccaagaccagcaaaagccaccaccgtcaaaggaagaactccttaaactaactgaaactgttgtgactgaatatctaatagtggaaatgcaaatgaaggctgtcaatggtgtaagagaaatgaagggct

SEQ ID NO: 114585 - DNA, 450 bp, Homo Sapiens
gtaattttcttttattaaaaacatttcctaaaaaatgtgtcttttcctttatgtctgggtgatatatatgactataagctggccttgagcactgtgtggagaggaaaaaggacagctaggagtcttcccaagcatcctatttgtggcttcagagatctaaagggggacagatgctcaacactcccacccaaatgggtaaagtcaacccttcaggtctcaggtccttggcccgaacaacttggaagccccaaattctcttgatgattaactacaactcccaaaactcttggggtcggcaaaaggaaaaatgggtgttgtcaatcatcaaggatttatggaaaggagcccctcccctacaagctgtcccactttccctgaatctaggcagctgggataataggtgtagcaggggaccaggagctcagaaggagccaacttttttgtacaaag

SEQ ID NO: 114586 - DNA, 386 bp, Homo Sapiens
tgcctcaggcatgaaaccaattcgtatttacttagcccagctccatggggtactgagatacatggggccgaaaaggggtaatatggccatcttttatcagaaaaagtgacaaaacgggaatttaaaaaatgaattttccatctgactttatttccaaatacactttcttttttaaaaaaccaatacactttctttgaggatgacagtattaggaaatccaattatacaaaaaatactacatctagtctggggtagatatatttatttttggtaacatacattaagtggcactaattacacagtaactataaggtaactaacatgaaaccacagaactgtaactctgccacagctgcatgaggtttgggcttttctgccaacttttt

SEQ ID NO: 114587 - DNA, 515 bp, Homo Sapiens
acgtaaaatgcaggataatacaaaggacaggatggtcatgccagggaggaaagcattaagaagtggatcaattcctgctactgttgcttttttaagttctctccctcctgtggaaagctaagatgacttcaaaactttggaatcctggagaatccctttgttcattgaagtgagttttcaagctctgtaaaataaaattcggtcttcggacactaacttctggctggggatgtgtatggaaaatacaagcagatggaaagttctccaagaatatgtctcccttcctcagtgaggtgtcagtctcactttgcctgcagcacctctcaggagagccgctccagggtcagtgactctacagggtccccagacaaggcatagccccgcccttgggctgtggatgacttaactaagccatctgtagacggtggctatttccttcttgccctttcttctagttcgctgtctccatgccttttcttggcagttcaaacattcagagagggcatttattgccc

SEQ ID NO: 114588 - DNA, 568 bp, Homo Sapiens
tttgtacaaaaaagttgggcgtttcattgagaccaaggagtggcacttccaaaaaattggcaaagcggaatgcggcggccaaaatgctgcttcgagtgcacacggtgcctctggatgcccgggatggcaatgaggtggagcctgatgatgaccacttctccattggtgtgggctcccgcctggatggtcttcgaaaccggggcccaggttgcacctgggattctctacgaaattcagtaggagagaagatcctgtccctccgcagttgctccctgggctccctgggtgccctgggccctgcctgctgccgtgtcctcagtgagctctctgaggagcaggcctttcacgtcagctacctggatattgaggagctgagcctgagtggactctgccagtgcctggtggaactgtccacccagccggccactgtgtgtcatggctctgcaaccaccagggaggcagcccgtggtgaggctgcccgccgtgccctgcagtacctcaagatcatggcaggcagcaagtgaagccccagctggactcatggatgtgcacccctttgctccctgct

SEQ ID NO: 114589 - DNA, 915 bp, Homo Sapiens
tacaaaaaagttggaggagatgtcttcccctcgtacacctgcacgtgccttaagggctacgcgggcaaccactgtgagacgaaatgtgtcgagccactgggcatggagaatgggaacattgccaactcacagatcgccgcctcatctgtgcgtgtgaccttcttgggtttgcagcattgggtcccggagctggcccgcctgaaccgcgcaggcatggtcaatgcctggacacccagcagcaatgacgataacccctggatccaggtgaacctgctgcggaggatgtgggtaacaggtgtggtgacgcagggtgccagccgcttggccagtcatgagtacctgaaggccttcaaggtggcctacagccttaatggacacgaattcgatttcatccatgatgttaataaaaaacacaaggagtttgtgggtaactggaacaaaaacgcggtgcatgtcaacctgtttgagacccctgtggaggctcagtacgtgagattgtaccccacgagctgccacacggcctgcactctgcgctttgagctactgggctgtgagctgaacggatgcgccaatcccctgggcctgaagaataacagcatccctgacaagcagatcacggcctccagcagctacaagacctggggcttgcatctcttcagctggaacccctcctatgcacggctggacaagcagggcaacttcaacgcctgggttgcggggagctacggtaacgatcagtggctgcaggtggacctgggctcctcgaagaaggtgacagggcatcatcacccagggggcccgtaactttggctctgtccagtttgtggcatcctacaaagttgcctacagtaatgacagtgcgaactggactgagtaccaggaccccaggactggcagcagttagatcttccctgg

SEQ ID NO: 114590 - DNA, 882 bp, Homo Sapiens
actttgtacaaaaaagttggcttgtactccgtggccagcccccagttgccagggctcgacggcagccaaggacaccatacctcagtatagttatatataaaagggacacggattgtgacagtttcaccccatttgtttctaaccccgctgcccaggattagggtctgtggtgtgttctgttttgtttttggtttctcccttgtgtcagttctcttctggcccagctgggtggctgtggaagtctgtgaggtggcccaaccacaagcatacctattaagagaagcccagagcttccagcccccacttcgaaaactctcctctggccccacatagcaaactccttctccgttattttccccacccccagattttttttaaaaggcccacttgccgtaacctcttttggtctattttgcttcccattcagcccaaagtttatatgataaaggtgtttacttttacttcccagtctccaagtgctaacacataaacacatacatgtctgactgttgcagaactgttcgagctcctaattcagtgttaccttgttttagtcgcagcaaccctctcccctaccccttgcccgcccacgtttttctcactcttccgggttgtgcaataactctcccagccagtggtcctttccacagcctttctgtcccttaaaacacctgcaactgggggagaaatgggacccatgggagggggagtcgtcatcccttacacaagaaatagccactttccttttgttgtcattcttgtgatcctgggtgggtttctgtggcactcttttaaacatgtagcatcatcttagaggtctatttttaaaaaatgtgttgaagaggaaaaaaccattctcacgatggggcttaagtcattgtc

SEQ ID NO: 114591 - DNA, 707 bp, Homo Sapiens
tcttcatgggcccataggaggactgatgctggctgtagctgccgaagccgccgaagccgttaccgtagtcgctcccaccgtaggacgaaccgccgccgccgcctccgtaggcattgtagccgccgcctccgccgccgccgtaaccaccgtagctgttgtaaccgccgccgccgcccttggaaaggccgttctggtctcgaccaccgccgcgcccccggccgcctcggccgccccgggaggatcgggagccgcctccacccccaccggagtagatatcctccttggggactgctttcttcacctccacgcgatggccctgaatcggatggaacttgaccaccgcggccttgtctgccgcgtcgtgattctggaaatacacgaagccgaatccacgcttcttgccggactgcttgtcggcaataatctcggccttttccacggtgccaaactgcgagaagtgctcgatcaggtcgccctcagccacgtctcctttaaggcctccgacaaagagcttcttaaccttggcgtgggcaccgggccgcgccgaatcctcccgggacaccgcccgcttcagctccacagtgttgccgtccacggcatggggcgaggcggccatggcggcgtccgcctcctccacattggagtaggtcacgaagccaaagcaacgggagcgcttggtctggggattcaccaacttttttgtacaa

SEQ ID NO: 114592 - DNA, 558 bp, Homo Sapiens
ctttgtacaaaaaagttgggcctcccgggacacaaaagacttcccgagcggtgtggggaccgggctctgacagccctgcggagaccctgagtccgggaggcaccgtccggcggcgagctctggctttgcaagggcccctccttctgggggcttcgcttccttagccttgctcaggtgcaagtgccccagggggcggggtgcagaagaatccgagtgtttgccaggcttaaggagaggagaaactgagaaatgaatgctgagacccccggagcaggggtctgagccacagccgtgctcgcccacaaactgatttctcacggcgtgtcaccccaccagggcgcaagcctcactattacttgaactttccaaaacctaaagaggaaaagtgcaatgcgtgttgtacatacagaggtaactatcaatatttaagtttgttgctgtcaagattttttttgtaacttcaaatataaagatatttttgtacgttatatattgtattaagggcattttaaaagcaattatattgtcctcccccaattttaaaacgtgaatgtctca

SEQ ID NO: 114593 - DNA, 755 bp, Homo Sapiens
catctggccgagaggggacacagggatggcctggacgtacaatctcaaagcccaagaagctgaaggtcttcaggagtggagctctgtcttctcggcccttcctgaagcagatgaagacatagttcactttcatcttctcttcagcaaactctagcagtgctaacaatccttctttgctcccatcagctaataatccatctgggatttctacaaacaggctctggctggacaggactgcatcccaagaagagaccttcacctcggtgacctcatactggaagtggacgatgtgaggttttccatcattcacagggaggtcctgggtcacagtgagcttctcgtccaggcactaagaccagttgatggtggtaaaagcttatatattagagctgagagagaaggatccctgccgccccctcgcccaccggggatcttcgacagtgggtgaggggcatcaggagcaccacagaggccctggaacaatgtgcctgcagcactggagctggggacagttactcaaaggcaaaatactactgtcctgggtgtttatcatcctcggcggctctgctcagggtgggaggaggcggcgcagggagtggatagatggatgagtgggtgggtgtggggtcacgcgcgcggggtcgatctctgcgggctaagtccctgtcaggccgcgggccgagcgcctccttttgcctcagcgagcgcctgcctccaactgaccctccccggccgccaacttttttgtacaaagt

SEQ ID NO: 114594 - DNA, 881 bp, Homo Sapiens
gggggatgacttctttatcttatcagtaagtgtagtttcagcccattgcaaccaagccagcaaagcttccaacaattcctgtttggcaataagcccagccagagcacttgctaatctctgctgatgttgctttgcccaggccagcacctcctcaaacctcgcccggatgattgttatccagtgcttaatggtagtgatggagtcggggtggcagatagccaaaacggtgtcgcccatagtggtggctttatttagttcagctctcttttcttccagtttcttcatgaattctttatgctgatcaatgagagtccggagagcatcctcatcatctgggaggacaccatggaaacgcagggtttgctccgcctcagccagccactccaagagggcatgtaccaccgagtggaattcctctgcctgacgcagggctgcttctaaccgtgtttgctttgatatagaaagtgcacacacggtctcccagcgtgtgcttaattcctgcatctggaccttgacccaggaggagtcatcccgactgccttctatgagttctcgggctgagcgcttcagggcctgcacactgctggtcctcttccccaactctttttggaaggccttgtgattatcgatcagattcatcaccaaatcaatgtctccatgaacaggctggtcttctgccagctggggttcaactctatataaccaatcaatgagagcctgtagggcatctgtgaattgtccagaaaataacagggcttcctccaatttgttttgtctttccacagattttccacatatggtatcccatttgtctctgagttcactcagcatgtcatccagtttcaggttgtcatcagccagggaggttttctccttcccaa

SEQ ID NO: 114595 - DNA, 769 bp, Homo Sapiens
ttggctcagactgacattctccacttcttgttccccactgacagcctcccacccccatctctccctcccctgccattttgggttttgggtctttgaacccttgcttgcaataggtgtgcgtcagaagcacccaggacttccatttgctttgtcccggggctccactgaacaagttggcctgcactggtgttttgttgtggggaggaggatggggagtaggacataccagcttagattttaaggtttttactgtgagggatgtttgggagatgtaagaaatgttcttgcagttaagggttagtttacaatcagccacattctaggtaggggcccacttcaccgtactaaccagggaagctgtccctcactgttgaattttctctaacttcaaggcccatatctgtgaaatgctggcatttgcacctacctcacagagtgcattgtgagggttaatgaaataatgtacatctggccttgaaaccaccttttattacatggggtctagaacttgacccccttgagggtgcttgttccctctccctgttggtcggtgggttggtagtttctacagttgggcagctggttaggtagagggagttgtcaagtctctgctggcccagccaaaccctgtctgacaacctcttggtgaaccttagtacctaaaaggaaatctcaccccatcccacaccctggaggatttcatctcttgtatatgatgatctggatccaccaagacttgttttatgctcaagggtcaatttcttatttc

SEQ ID NO: 114596 - DNA, 940 bp, Homo Sapiens
ggcttggaaacatccacatcgatttggacatgctgttcctgaatcctgagctcgcagctcctggatttcctcttcgtggagtttcttcaaaaaggcaatctcttcttgcaaagattccactttgcgttcaaggtcaagacgtgccagagacgcattgtcaacatcctgtctgaaagattgcagggtgttttcggcttcctctctctgaagcatctcctcctgcaatttctcccggaggcgcatgatgtcctcggccaggttgtcgcgctccacctcgacgcgggctttgtcgttggttagctggtccacctgccggcgcagctcccgcatctcctcctcgtagaggtcccccaggcgcgacttgccttggcccttgagctgctcgagctcggccagcaggatcttattctgctgctccaggaagcgcaccttgtcgatgtagttggcgaagcggtcattcagctcctgcagctccaccttctcgttggtgcgggtgttcttgaactcggtgttgatggcgtcggccagcgagaagtccaccgagtcctgcaggagccgcaccccgggcacgctgctccgcaggcgcacggcagaggagcgcgtggcatacacgccgcccggggacgaggcgtagaggctgcggctggtgctggggcgcagcgcgctgcccaggctgtaggtgcgggtggacgtagtcacgtagctccggctggagctcggccggctcgcggtgcccgggccgccgaacatcctgcggtaggaggacgaggacacggacctggtggacatggctgcggagggtggcgatggcctgggcggcggcggtggcgcggactggctcccggagaagaggcgaacgagggcgcggtgggtgtgggtggtgggagcgcggctgcgtctctggcgcggggacctcggagcccaacttttttgtacaaag

SEQ ID NO: 114597 - DNA, 727 bp, Homo Sapiens
cggcccaccgagccctggtgtggcagcggctcatggcggccgtggggcccccgcagcagcaggtgcggatggcccatcagcaggtctgggcggcgctcgaagtggcgctccgggtgccctgcctttacatcatcgacgccatcttcaactcctacccggattccagccaaagccggttctgcatcgtgctccagatcttcctccggctctttggtgtatttgcatccagtattgttctgatcttgtcacaacgatcacttttcaagttttacacgtacagctcagcctttctgttagctgcaacttcagtgttggtgaattattatgcttctttgcacattgacttctatggtgcctacaacacgtcagcttttggaattgagctgcttcctcgaaaaggtccctcgctgtggatggcacttatcgttctacagctaacatttggaattggatacgttacactactccagattcattccatctattcacaattaattattttggatctcttggttcctgtaataggcttaatcacagagctaccattacacatcagagagactttactgtttacttcttccttgattctcacattaaatacagtgtttgtcctggcagtgaaactgaagtggttttattattccacacgatatgtttatcttttggtgaggcacatgtatcgaatttacgggattacagttatcgatggagacacatgggaagagga

SEQ ID NO: 114598 - DNA, 413 bp, Homo Sapiens
ccagtggctgacttacaatattcaattcattctgaccaaacttcgtatgagaaaatccacggtgagccaaaatgaaaagtacaaggcagtagtacaggaacctggcagccgcactggccgcccagaaacgtcagtggtgctgccccattcggcgaaaggttagggagcaggaaaagaggaagcaggagagggaaggaaagtcccatggaatatgtattccagaatccttacattttctcagccaccgctccccacgtgagttcccacccccaccccgacaagagcaaagagttctgaggatccaagaacgtgattggcttaaatccagttttcaatcttcgacagctgggctggaacgtgaactcagtagctgaaccttttgtaggacccggtcacccaacttttttgtacaa

SEQ ID NO: 114599 - DNA, 766 bp, Homo Sapiens
aaccaggccacccagcctcggaagctctgcccacagaggtggcaggcaaagcccaggtctggggtggcagcagcatggacctggcggtgcagtgctaagaagggggcatggcgaaagcgacggccacactcagggcagggcaagggcagccgggcctggcaccggcgggtgtgaagccacagagccacccagccagggaagtgccttcgacagtgggcacagcgatgggccctgcctggggcttgggcaccagactgggccactgacgtgccttgttgcctcagcccgcgggactccttccccagggtctggggtgactcctgggagggcccagaaaggagtcggggctgggccaggcccatggccagggggcccctgcaacgacgttccagcatcggttcttcctctgcctggagactgcagagctggggatgaggctttttccagctcctcttggggatgttcctggggatacttccgcggctgcagcgcctgcttcggcccacactccggtagcccccaggtgttagagaaaactgcagtaataaagacacccctatccccatggcagagctcagacctctgactgcagagaggccagccttacctctgcggcgggctgtgcagggacgcggcgcccgtccatggagcccgaaggccggcctccgcggcccactctcgctccccgccccgccgcggcgacagcggcaggttcgagttcacaactgccaggcccgtccccaacctccccccgccgggttcccaa

SEQ ID NO: 114600 - DNA, 902 bp, Homo Sapiens
actttgtacaaaaaagttggggcctgctttctgctcgcgccagcagagcactacctgaggcagcgaggcgcagcgagcctagcctccccgcgccctgggcagtgtggccatggagaatcaggtgttgacgccgcatgtctactgggctcagcgacaccgcgagctatatctgcgcgtggagctgagtgacgtacagaaccctgccatcagcatcactgaaaacgtgctgcatttcaaagctcaaggacatggtgccaaaggagacaatgtctatgaatttcacctggagttcttagaccttgtgaaaccagagcctgtttacaaactgacccagaggcaggtaaacattacagtacagaagaaagtgagtcagtggtgggagagactcacaaagcaggaaaagcgaccactgtttttggctcctgactttgatcgttggctggatgaatctgatgcggaaatggagctcagagctaaggaagaagagcgcctaaataaactccgactggaaagcgaaggctctcctgaaactcttacaaacttaaggaaaggatacctgtttatgtataatcttgtgcaattcttgggattctcctggatctttgtcaacctgactgtgcgattctgtatcttgggaaaagagtccttttatgacacattccatactgtggctgacatgatgtatttctgccagatgctggcagttgtggaaactatcaatgcagcaattggagtcactacgtcaccggtgctgccttctctgatccagcttcttggaagaaattttattttgtttatcatctttggcaccatggaagaaatgcagaacaaagctgtggttttctttgtgttttatttgtggagtgcaattgaaattttcaggtactctttctacatgctga

SEQ ID NO: 114601 - DNA, 903 bp, Homo Sapiens
aaagcattattaccctcctgtgttcagtcggtggatttggctcttctgctcttgctgctgccgtttcagttccagtaattcactctttgatgttgttcatccttcatcttttgcaattttctgttttcttctgcctttagagaatctctgtaagcccagcttctggcccatgttgaggattgtgggccacaaacagcactttgacaggcacttctgtctggcgattctgtgttcagtttgctcaagaactcagcggttttgtattgctgatgctctctaaatgcttctcttctaaggttttcttgaagtctttttttctcctccagtttattgctcttctctctctgaattgccttcattttttggagttcagcttcttcagcttccttcttgattcttacagattcttctctttttagcttttgcttgtatttagattgcatcagctggagttgttgtttctgtctgacttcagtttctgactggcttccacctagccgtctgggcaccaggtgaaccggtttagctctgttctgctccttccacttctccaggttggccagctcctgctccgcaattctttgtatctcatttctccggtttatatttggtgctatcaaggtgtatgcacttgtgcgcctctggcccgcgtgcacgacgctctcccgcgaagggcccttaggggctgcctccaaaccctctctctggtcttccacggggctcagctccccttgccgcccagaagggtcctggggatcccgggtcgggcgggaggcaggggaggcgccgagcccggagttcaccactctattgcgggtgttcatggttcacagcccgcgggtcccgggccgccgtcgctgcgggagggatgcggctgggacgcttagcgagtctcaagaccaa

SEQ ID NO: 114602 - DNA, 932 bp, Homo Sapiens
gaaaaaaaacagggagaaagtagattccttctccatcccatatggagttcttccctcctggcccccaaatctggtctagcccagaataggccatatgtagaggcagaaagaggtgtgatctgcttacttttttgccttggaagaatctggagctcactggatttgggggtcaagatagggccaatatttccctgccctggactgggaaagtgctcagccacagaacagaggggcagaggggcaaccctcccccaaacctccttgacctggcttgggagaggccatctccgaagtccaggaatatggggaggaacatggaagatccaaaggcatggaagctgaggaaggtgtcttgatacaagggaaacagggacgtagagacccacgctggggaaggatgaaacccaaagccacactcccaggtgggcggggtcaggtatcacaatggtctggtccaggccctgggccacaaagaatggaatgtgctaggaagcaactgggaagggcttagagaaagcttcagaacaaggcgggtcattaggtgagagagatggtttcccctaggtttacgaatcaggggagcaggttagacattcagagctggtgggggctgtgagtagagattcaggttaagtatattgctcagttgccccaagggctggagaagggatggaagctggccctgcccctcatggaggccattccctggaggaagactgagaggggaacctcgaaagatcccttcccaggagatgggaaaactacatctcacacaaagcagcctgacccctgagctccaggggcccccaagtccctgcacaagagtgtgaaggggctcccaaggggcagggaggccagggagctggtagtggtggggggttcagggagggtggcatctggtgaaagggggattgagccccagggttcaccaa

SEQ ID NO: 114603 - DNA, 943 bp, Homo Sapiens
ttggagcgacgccgctgggaagccccccgcgggggctctgggcaccccggcggccgccgctgccaacgagctcaacaacaacctcccgggcggcgcgccggccgcacctgccgtccccggtcccgggggcgtgaactgcgcggtcggctccgccatgctgacgcgggcggcccccggcccgcggcggtcggaggacgagcccccagccgcctctgcctcggctgcaccgccgccccagcgtgacgaggaggagccggacggcgtcccagagaagggcaagagctcgggccccagtgccaggaaaggcaaggggcagatcgagaagaggaagctgcgggagaagcggcgctccaccggcgtggtcaacatccctgccgcagagtgcttagatgagtacgaagatgatgaagcagggcagaaagagcggaaacgagaagatgcaattacacaacagaacactatacagaatgaagctgtaaacttactagatccaggcagttcctatctgctacaggagccacctagaacagtttcaggcagatataaaaggaagagagataaaccctacacagagcaaggagctgttacgaggagtgggagtgttggagggtgaagagaatggggcagtgaaagatactaaaaggatggaagccagttaagtagttgttggttatttgggaatttcagaatttatcctgtacttctgaatatttgatacttattctaaaagtaggatttacccttgagtcttgtatttcttctcattgctaagctttataatgtctattttagtggaaaattcctctagctataatctcttaatgctgccaatctcattctcatgatagttttaagaattatagtgtaatttttccccaacacaacacccccctgggtgtttctacataagaatggcgaaaaatttcccagaggggggaaaact

SEQ ID NO: 114604 - DNA, 926 bp, Homo Sapiens
accccagagactatgacgaatcactttacagcatccaaggtcatcaacagagaatcctaaaatgtcggtagcgttcatcagtttcaaaaagagtgttgtttgtatatggtccaaaaaatgccaaaccagatgatgggtcaataaagtcagcccaataaccctcagctcgaagagcatagcaaatttcttagcaccattgatgaacttttttaagagcacttctctttcaatttctacttcttcactccaaacagtcatatcattcttagttttttgtgttacagtcagaatcattagtttgccattagctacttctggaaacagtgattcaaaatcttttcgcagcaattctggacatgtctgtattgcacactctactctggcactttcaaagtaagtttctgcactgttaatttcttgttcaacaggtgcatcattaccctgaaattcattcacatattgtgccatcacaaactcatgtctttcacttgataaaggttctgctagaacatcaggcaaagttttatgaaccaggcttttcttctgtgaagcagtcccattgaggtgacaatcaaaacctatgttcccaggaagctggaacctctgatcttgaggtccaaagggtcccatagtttcatcaggccacactgttcgagagcatatatctggaggtgcagcagccacatgagactcatccgaacctgatgatcctgcagtcgaaaaggcgttgggattgacaacccttttaactaaagagcaaaatcctgggagataggaaaccagtctggctctgttacaaagcacattggccatctccgctggagaagatagttcgcaaaatagctttcctttggtaaagttatttcagtcaccaccactgtctccagctgtcccagaaccggactcttccccaacttttttgtaca

SEQ ID NO: 114605 - DNA, 844 bp, Homo Sapiens
gcattcagtccactgccctccggacaccaggagatgaactgaaatccacaaaggatcagagcatggactgaagacagagctatatacatagtgaagagcacaaaaaatctttgattcttttctcctacacaattgttcacccacgggcagtgatgatccattttccgaatacatcttttgcaaatactgcagtggtgggcgcgctcgggtttaatacagcagcacttggggcacttgtagatgacttccccaggcttcagctgcaagctctccatgtattctttcgtagcgtttcctttgggtactgccccaagcaggaggctttgcacagactcggttccctcaccacaaatgcccacaagggttgggtccagcccagttttcactgtgcaggcagatggtcggcagtcactggatttttcagggtcggtgagcatggttctcaggtgggatgacagggcaagcacggccaagcagttaaagatgaccccgttgaccacagagtaccagaagtctttggaaggcagcagcatgacgaaagtcaccacgaagtctgcataggcgaccagaagccacgtcatgacagcacagatcatgccgcagccgtcacggatgaaccagacccggtcagccacgtcagcctcggaggaggaggacgatgaagagtcatagttgtcattttcagccaggagaggatgatgctcgacgtcccggagcctgtgtcctgatggctgcatgatttccctgacgcaccctcacaagttatttctaaacatcacttgaacattttgtgccgtttcttcaggatcttaaggtgcatactgtcctatgtgatcggatccga

SEQ ID NO: 114606 - DNA, 965 bp, Homo Sapiens
ttggggcgccgtccacgccgctcttgacagtccgaggatcagaaggactgtacatggtgaatggaccaccacattttacagaaagcacagtgtttccaagggaatctgggaagaattgcaaagtctgtatctttagtaaggatgggaccttgtttgcctggggcaatggagaaaaagtaaatattatcagtgtcactaacaagggactactgcactccttcgacctcctgaaggcagtttgccttgaattctcacccaaaaatactgtcctggcaacgtggcagccttacactacttctaaagatggcacagctgggatacccaacctacaactttatgatgtgaaaactgggacatgtttgaaatctttcatccagaaaaaaatgcaaaattggtgtccatcctggtcagaagatgaaactctttgtgcccgcaatgttaacaatgaagttcacttctttgaaaacaacaattttaacacaattgcaaataaattgcatttgcaaaaaattaatgattttgtattatcacctggaccccaaccatacaaggtggctgtctatgttccaggaagtaaaggtgcaccttcatttgttagattatatcagtaccccaactttgctggacctcatgcagctttagctaataaaagtttctttaaggcagataaagttacaatgctgtggaataaaaaagctactgctgtgttggtaatagctagcacagatgttgacaagacaggagcttcctactatggagaacaaactctacactacattgcaacaaatggagaaagtgctgtagtgcaattaccaaaaaatggccccatttatgatgtagtttggaattctagttctactgagttttgtgctgtatatggttttatgcctgccaagcgacaattttcaacttgaaatgtgatcctgtatttgactttggaactggtcctcgtaatgcaggcctac

SEQ ID NO: 114607 - DNA, 941 bp, Homo Sapiens
ttggtggggtgtttcgcgagtgtgagagggaagcgccgcggcctgtatttctagacctgcccttcgcctggttcgtggcgccttgtgaccccgggcccctgccgcctgcaagtcggaaattgcgctgtgctcctgtgctacggcctgtggctggactgcctgctgctgcccaactggctggcaagatgaagctctccctggtggccgcgatgctgctgctgctcagcgcggcgcgggccgaggaggaggacaagaaggaggacgtgggcacggtggtcggcatcgacctggggaccacctactcctgcgtcggcgtgttcaagaacggccgcgtggagatcatcgccaacgatcagggcaaccgcatcacgccgtcctatgtcgccttcactcctgaaggggaacgtctgattggcgatgccgccaagaaccagctcacctccaaccccgagaacacggtctttgacgccaagcggctcatcggccgcacgtggaatgacccgtctgtgcagcaggacatcaagttcttgccgttcaaggtggttgaaaagaaaactaaaccatacattcaagttgatattggaggtgggcaaacaaagacatttgctcctgaagaaatttctgccatggttctcactaaaatgaaagaaaccgctgaggcttatttgggaaagaaggttacccatgcagttgttactgtaccagcctattttaatgatgcccaacgccaagcaaccaaagacgctggaactattgctggcctaaatgttatgaggatcatcaacgagcctacggcagctgctattgcttatggcctggataagagggagggggagaagaacatccctgtgttttgacctgggtggcggaacctttcgatgtgtctcttctcaccattgacaatggtgtcttcgaagttgtggccactaatggagatactc

SEQ ID NO: 114608 - DNA, 855 bp, Homo Sapiens
cgacacacacgtcacagcacaggaggggcgccgtgggccctggttgcacaaagctggccacagtgagctggaggatgcttcagggaacttggggtgggggccagggccggggctggcagctgatggactcaggggtccgcctccatgcacttctccagctccttgagtttcttcacgaactcctgcgcctccttgctggtgcggccttccagcctcctcagcgcagatctcactgcaagcagcgcgggcaggtgtgtgggggccggggtcaggcccgctgcccctgcctccacccagatgctcactcaccctgggctctgggccggcacaggtgcagggtgacaggctgcccagcccttgcacccccgcccacctggggccgggcgacaccagtgacgccacctaggccgagggccgcctccccagcgaagtcgttggtggacagccagtcgtggtccatgacggtgaacaacacacaggccgcgcggcggcggcacgcctcggcaggcacggaaaagtagaagagttcgtcgtatacagggtgcagcgtccgggtcttcacctgggtcctctggctgcggaccagtggaaagagatgcggtgggcccagctccacgatcacaaaggggtcacttaagccgttggcatccagggggagcaggtccgcggcgtgcagcacctccacggccagccgctgctcagccgcctcgtaatggcaacggacgctcaggcgtccaaaccggttctgctccagggtcctctgcggaaaggcgggtgagcgcagctgggctctgggagcctcggaggcagcaccctgtccctggcgcctccctacctgtttgagcttgtccccaa

SEQ ID NO: 114609 - DNA, 888 bp, Homo Sapiens
ttggctttccctctcccaacatggcggcctcagcaaaaaagaagaataagaaggggaagactatctccctaacagactttctggctgaggatgggggtactggtggaggaagcacctatgtttccaaaccagtcagctgggctgatgaaacggatgacctggaaggagatgtttcgaccacttggcacagtaacgatgacgatgtgtatagggcgcctccaattgaccgttccatccttcccactgctccacgggctgctcgggaacccaatatcgaccggagccgtcttcccaaatcgccaccctacactgcttttctaggaaacctaccctatgatgttacagaagagtcaattaaggaattctttcgaggattaaatatcagtgcagtgcgtttaccacgtgaacccagcaatccagagaggttgaaaggttttggttatgctgaatttgaggacctggattccctgctcagtgccctgagtctcaatgaagagtctctaggtaacaggagaattcgagtggacgttgctgatcaagcacaggataaagacagggatgatcgttcttttggccgtgatagaaatcgggattctgacaaaacagatacagactggagggctcgtcctgctacagacagctttgatgactacccacctagaagaggtgatgatagctttggagacaagtatcgagatcgttatgattcagaccggtatcgggatgggtatcgggatgggtatcgggatggcccacgccgggatatggatcgatatggtggccgggatcgctatgatgaccgagcagcagagactatgatagaggctatgattcccggataggcagtggcagaagagcatttggcagtgggtatcgcaaggatgatga

SEQ ID NO: 114610 - DNA, 903 bp, Homo Sapiens
attcgggaataggagaggctgatcatgcttacactgtcttaatcacgttgtgccgcagccaggataattagggtgtaggtcccatctgcttgaaacttctccccaaactgatccaggacctggttgaacttggctaggtttcctgtctgacagcttgagtcagaaggaaatagggcatgagtgagcgcttgagggagggctggcggaactgcagccggtcagggatctcccccagcaacagctccaccacgatgagaagcttgtgcaccgtctgtttgaagccgacagctgtgtgctgaggggccttgcgaagggcgttggtcatcgttctccgggcctctgagtactccagctggatggctttgattcgccctgtgtagtagaggtacctggcccactcattgttgttggcctgctctgggaacacagacttggacaccagcttctcagcctggtcgtacaagctgtagtgtaggtaattccgcagcaggaggttcaacagggtggcctgcccgtctgcgtcatgccgaagcgtagctgtccggagccgagcatgcaagaagctgcgcaccacatccagcttgtccaggaactcatagacccgggcgtgataatagtaacactttgcggctacaaggtctagggcccggcggttctgagtactgatcttctgcatcagatcatcagagatcttctgtgcctctttgtagcgcttgctgttcatcatgaagatgaccacgaggagttggagataggcttccacttcaggcaggaggggtgtcgacgcagcttttcccgtgcggggacggaactgtaaatcagcctctgtgtccatgggctcttccaggaaggggagcaaaaagtctcgagtggcattatttgaagtgaagaagccctgcccaa

SEQ ID NO: 114611 - DNA, 884 bp, Homo Sapiens
ttggaacatgaagctaccggccagggttttctttactctggggtcccggctgccctgtggcctcgctcctcggaggtttttcagttatgggacaaaaatattatatcaaaacactgaagctttgcaatctaaattcttttcacctcttcaaaaagcgatgctaccacctaatagttttcaaggaaaagtggcattcattactgggggaggtactggccttggtaaaggaatgacaactcttctgtccagcctaggtgctcagtgcgtgatagccagccggaagatggatgttttgaaagctaccgcagaacaaatttcttctcaaactggaaataaggttcatgcaattcagtgtgatgtgagggatcctgatatggttcaaaacactgtgtcagaactgatcaaagttgcaggacatcctaatattgtgataaacaatgcagcagggaattttatttctcctactgaaagactttctcctaatgcttggaaaaccataactgacatagttctaaatggcacagccttcgtgacactagaaattggaaaacaactaattaaagcacagaaaggagcagcatttctttctattactactatctatgctgagactggttcaggttttgtagtaccaagtgcttctgccaaagcaggtgtggaagccatgagcaagtctcttgcagctgaatggggtaaatatggaatgcgattcaatgtgattcaaccagggcctataaaaaccaaaggtgcctttagcccgtctggacccactggaacatttgagaaagaaatgattggcagaattccctgtggtcgcctggggactgtaaaaaaactcgcaaatcttgctgctttcctttgtagtgattatgcttcttggatta

SEQ ID NO: 114612 - DNA, 961 bp, Homo Sapiens
ttgggttatacttaagcatgaacattgacgacaaactggaaggattgtttcttaaatgtggcggcatagacgaaatgcagtcttccaggacaatggttgtaatgggtggagtgtctggccagtctactgtgtctggagagctacaggattcagtacttcaagatcgaagtatgcctcaccaggagatccttgctgcagatgaagtgttacaagaaagtgaaatgagacaacaggatatgatatcacatgatgaactcatggtccatgaggagacagtgaaaaatgatgaagagcagatggaaacacatgaaagacttcctcaaggactacagtatgcacttaatgtccctgtaagtaattcctttataagatattaaacttagaaacataattttttgttacgtaatactgcaagtcatcgaagaaatttcagaaaatgtttcagggctaaatagtgttcttgaatagatatactaaaatattgacataaatcatatttgaaaggcaaaattaagttcttgtattatattattttagaagcttatttctttcaggataacaatatttctcaggattattttggtattaaattttaaatgcttaattttaaaagatattttatctaacttctaggtttctccttaaagagtaaaacatttgaatcttcaacgtaactagaaaaatatcacacattcaagggtttttcctacaaattctgtaattcttgccttcttaaatttttctaatatgctcctattctctgttctctttgtatcctccgcttgcttgatctgtttatctttttaaagtatatcagccctttactctttcctatctacctcagacgtcatttaagatgtttcataagcacccatatgtttttccttcttctacctttattttacccaataatcagtgaaaccacaaccatcatgtaaattcttgtctcttctttctatga

SEQ ID NO: 114613 - DNA, 769 bp, Homo Sapiens
ggatggcggccatcaacattacagcccactgactgggcagtccccaggatctctttaatagttccagagagttctctggctaaggatcggtgccgcatctgtcgagcaatgttgacaatctcatcaaaagtgatattcccactgtgtttaatgtttttctgtttctttctgtctcttggtggttccttgagggctttgatgatcagggcagaggcagaaggcaccacctcaatctgggcctgtctgttctgaatggtcagtttcactgtaatcctcaggcccttccagtcacccgttgccttggcaatgtcatcaccaactttttttggagacagacccagggggccgatcttgggggccagggcagaagtggcaccgacttcacctccggtgcacctcaggtatacctagggcgtgcgggctcccaagccgccacaggtggtccagtcctccctccccacctacacgtgaagaagctaaggcccagaaaggctgaggcttggccggggcggcgcaacaccgggaaggtctctgggaggcagcggctttaagagccccatacggggaaagctttgcacgcgcggcagggccgagggatgctccatcccgcagccccggccacaaccagagcacgcaccgactttgatctcgttggggtcgaacttcggcggcatggtggaggcggctggtgtcggatgaacccggattcgggacgaccgaaggaagttgcactttggcctcctccgagcccaacttttttgtacaaagt

SEQ ID NO: 114614 - DNA, 899 bp, Homo Sapiens
gggtttctagagaatttatgcatgagtctcaaaaatcaatgcaaaggaaaaatgaataaaattaaaatgggtcaggagaaaagggccatggcacacacaggaggggcagtcagtggctgagctaggagatgaagcagagggaattcttaggtgtcatatctcgtccaacccgtagtcctcctccgagaagtcccccaccgtcacgactgctggcttgacaaaggcgccatacttggcctggcattcgaagtagcgtttcccattcacactgccatcatttttccccagtggctcatcatagcggacaccaatccagtagccaggcttgaaatctgtgagacctacatacatgacggtgccccggcgaggggattgtcccgccgcccgcacctcacagcggctgcccacggggatggagctggcctgggccttctcctcggccaggcgctgggcggcctcggcctcctgctgagcccgctcctcctcgttgtaccggccgagcttgctgcgcttcaggaaagagcggaccgtgtcttgcctctggtcgtaggcttcttgtgagatcgtgtacttctccacccgggacacgtcctcatactcaccaaggcgggcgccactgtggtcaatgacgtggatgcggcagccgtcatctacagggtaggagcccaggagcgcatcctcttgatccagcttgctgtagaacttgtcgtcaactccatacagctccagttccatgcaggaagcagggctgcccaccagcaactccagtttacacttgaactcagcgatggtgaggctgcggctgtatcgcttctcggagcggaaggtgttgagggagctgctgatgaaaacggtcaccgtgggtgccgacacccccgtcaccaacttttttgtacaaa

SEQ ID NO: 114615 - DNA, 271 bp, Homo Sapiens
ttatgccaaagggtacccgtgaaggaaacattaaattttaaagggtgtttctgacacaaggctgtgacagccaactgcaggctgcgccccatcctaggcacgggaggcctcaagcagatgccttagctggccttgaccggtctttcatgtcaccagctgcagcctgtctggagtaaaagacttgatgaagtggggaggaaggtgatgctgaagtggtaacagaagtgtagctggggatgcacgtcacgttcctaagagctcaatgcttctc

SEQ ID NO: 114616 - DNA, 855 bp, Homo Sapiens
ttgggcgagttctggctgggtctggagaaggtgcatagcatcatgggggaccgcaacagccgcctggccgtgcagctgcgggactgggatggcaacgccgagttgctgcagttctccgtgcacctgggtggcgaggacacggcctatagcctgcagctcactgcacccgtggccggccagctgggcgccaccaccgtcccacccagcggcctctccgtacccttctccacttgggaccaggatcacgacctccgcagggacaagaactgcgccaagagcctctctggaggctggtggtttggcacctgcagccattccaacctcaacggccagtacttccgctccatcccacagcagcggcagaagcttaagaagggaatcttctggaagacctggcggggccgctactacccgctgcaggccaccaccatgttgatccagcccatggcagcagaggcagcctcctagcgtcctggctgggcctggtcccaggcccacgaaagacggtgactcttggctctgcccgaggatgtggccgttccctgcctgggcaggggctccaaggaggggccatctggaaacttgtggacagagaagaagaccacgactggagaagccccctttctgagtgcaggggggctgcatgcgttgcctcctgagatcgaggctgcaggatatgctcagactctagaggcgtggaccaaggggcatggagcttcactccttgctggccagggagttggggactcagagggaccacttgggggcagccagactggcctcaatggcggactcaggtcacattgactgacgggggacaagggctggtgtgggtcaagagcgccctcatggtgc

SEQ ID NO: 114617 - DNA, 935 bp, Homo Sapiens
ttgggtttgactaggaaattcattttggggtatattcagcatgggaaataagaacaaaagaggtttacatttagagggagaccctctcagaattatttcagcaataacttacctctagttgctggctgtagttttgcaggcagaagagaacaaacctttacttttgtaccaagagtgcaacttctaaatgtgcttggggcagccgcatctctgatatcaggagagaaatgtactccagtaaacatcttacttagcaaagccccttaacccatggcttctgcgagttctctgccatctggtccctggatggaaagaggaatttttcttgtatatgtgtctccatagcaacgagtttgcagttgatatggaaagtaagcagttgccttagcaacggagttactgatgtggcggcttccttgctttcagggaatggataagctgaccaaactagtttagatgcatcctgtagggcgctgtaatgtagagccgcacacacggcccctgccagtgtaaaattggtctagctttaaaagagatcgcagcccctcccccttccagaaggaagggcttacagctgtaataaatcagacaaaagtagtcgctgtcagttgaaatagattacaagagggatctcctggcagaatttgtttagtttagctcaaaggagaatgttacagtcaagggtacatttggttgcaaggacaagagagtcactcgagttggcttaagtaaaagggtacttgtcccaaaaacataacagccagtcccatggagcgggagcagtgtcagagagcaacaaagcatatctcagtccacggccattggaagtgcctcctctgttcctctgcggccacgtggacactcatcgctgcctttctctgaggatctgttctagcctcctctttgcagcccagctcctctgtgtgctcttgatt

SEQ ID NO: 114618 - DNA, 931 bp, Homo Sapiens
ttaagtccaggaacaggaccatggaaaatggccctcgagaccccctctgctagagttgccttgtaattatgtcatcctttcctagtcctttcaagataaatagaacatgagtggagaagtgagaatacgcaaactgcagataaagcaggcccccttgaagagactgtagacccctctatctcggtcacccgccctgccccagatggggttcttccttcacggaagctttgaccccaccagaccctgcccaggcgtcaaggagagcctcagccagccctgcagtctgggatatgatggggaaccatgagactccccaagagtatagataccacctccccctggtacctgctgggcatagctgccgtcctcctagtagccaggggctaggccgggctcacacatcagactcagtgcagtgtgttatcctttaatgaaaagctgggtcaatggagtcaccactctccccaagacccccctgcagcagatagccctcaccatggctacctatgaggcagggcagccctgtggcagccagccctgctgaggggtcagtttgtagtggcctaggagaggcgttcaactcttagacctaggatgtggcagcagcaacaaggccagaggcagctcaactgaggtcagggatggtggaggaggcagacaggaagcatggggctctcctccttcctctccgaatcccagtgtggccaaggccagtgttcaggaacagtacagtctccccaggggcctggagtctcttccagccactctctggaagcccttagtccccaactccctgcagaccggtgtcacagggtcgctggactcggggagcaggctgggtactaccccatgagccttgaagccccgggtctaggaggtggatccagcagggccgaggccagagccaccaggagactgggagtcaccccaa

SEQ ID NO: 114619 - DNA, 862 bp, Homo Sapiens
ttggggcacagagaagggaggggtgctgaaagccgcggactgcagccgctggcctggctgccgccccgaaacaacgcccacgcccgggagaagggcaggctggcgtccagggccgcggccagagggctagaatccgcgccttccgagggagccgcgccctgcgggccccaccgtacccgaggggatggagggctgcccccgaggcccccgcgcggctcgcggtcccacgcctgccggcccgcgctagctactcgactcgtgcgctaaatttatccgtcacccaggccttgtctcccgagtcattggcgtcgtggttcaaaagaaatggaagaaaaggagcgatgtgaccgattgtgttcggtcctcctgctttgaggcctggcatttgcagagggaaacagcaagaaaatcgtggggattttggaggggggtgggagggaagggtggggaaacggaaacaaggtcttacattttatgtgtttttttaaattctgcactttgacagtggtagcaaaataaaagtaatccaaaagttatttttctattgagaagagagaagaggtgggttttatttttttccttttgattccaatcttttctcccagtgacaaagcataaatcatggacaccagagaataaggtggacctcaggaatccggaaaagactgagaagcttacattcttcctctagagggaagagtggggtgtttatagccatctctggaacctaaaacaaaaaacatgagttgtgtgccatggaaaggagacaaggcccaatctgaatcattggagctgccccaggcagcacccccacaaatctaccatgagaaacaccgcaaggagctttgtgccctcacgcccc

SEQ ID NO: 114620 - DNA, 1556 bp, Homo Sapiens
ccaggccctgggccgcaggtccactagcatccaggtggttgtcagtaccacttgataccagtgagtaagctccgcttctagcagggcatctgccatggcccgagcattcttcagaacctgcagggagtactcccggaacatgggggtgcagggctgctttagggccacagctactgcagcaatggcatgattgtgggggcccccctgcagggatgggaacacggcaaagttgattcggtcctcaaatgtgtaagggatctcccggccagtcttggggtccacagccttcacccctttccggtagaagatgagccctgacctgtgtgagaggtggatggtcagagtctaagctgaaaagaaggacaagggacagagaaggcagaggaagctggcggacctgggccccaagggcacagctcacgtgggcttggtacactggattccagtggtagagggaatcagcccctcaatcccatccacaaatcccctgccagggcatggccaccatgggcaagagaaggagaactctcacagactgggcaggagtcttaagggctgcaggtgggaatgaattcctctcaggtccaggccaacagtgccccaggaataggcctgaaggcagggaaaggcaaggcccgacctcagggagcctgacctggcccctcgaagagtcttgtgagtagtggtggtgacgatgtccgcgtgcttgaaaggcgagggaatcaccttggcagccaccaggccactgatgtgggccatgtctgccagcaggtgtgctttgacttcatcacacacctctctcatgcgggcgtagtcaatgaggcgagcataggcgctggtgccagctatgatgagccgtggccggaaaagtcgagcagtcagtgccagctggttgtagtcaatgaggccagttttggggttgagcttatagggcatagactcgaagaagatggacgtggctgatatccgcttgacgtcagacatgtagccgtgggtgagatggcccccatcgggcaggtccagccccatgatccggtcgtgaggttgcagaagggctgtgtagacggccaggttggctggggacccggagtagggctggacattgactccccactgtgcaggatccaggtcaaaggcttccaaggcccggcgctggcacagcagctcaatttcatccaccacctctgctcccccatagtatctcttgccaggataaccctccgagtacttgttgttcagacaggaccccagggcctccagcgcagctcggctgcagaagttctctgaggcaatgagctccaggccacgacactgcctgtccttctccctctgcagcaactcccacatctcaggatcactgtccgacaggctctcctggcctgtccagcccctgtttgcttccccagtctgagtctgggctgcgttgctgtgctgagcccgaatggccatcctgaccagctgcccacatctctgcagaggccgagccgcccaaaacaaagagaagtacagcatcgcaactcggaagtcgcaggaggtccagccaccaactctgccaa

SEQ ID NO: 114621 - DNA, 906 bp, Homo Sapiens
ttggcggcggggctctcagtgaaaaatgtactctgacctgaatcctgaattttccttgatggtcaaaagattaagaaatcatgagtggaggatctcaagtccacattttttggggtgctccaattgctccactgaaaatcacagtatcagaagacacagcttctttaatgtctgttgctgacccctggaaaaaaattcagcttttatacagtcaacattctttatatctgaaggatgaaaaacagcacaaaaatcttgaaaactataaagtcccagaatctattggttctccagatcttagtggtcatttcttagcaaactgtatgaatagacatgttcatgtgaaagatgactttgtacgttctgtttctgaaacacagaatatagaatcccagaagattcactcctctagactgagtgatataactagctctaatatgcaaatatgtggatttaaaagcacagttccgcatttcaccgaagaagaaaagtatcaaaagcttctcagtgaaaataaaattagagatgaacagcctaaacatcagccagatatatgtggtaagaactttaacacaaatttgtttcagttgggccataaatgtgcagctgtgttggatttggtttgtagtactgaaaaaattaatatagggcctgaagtggtacaaagagagtgtgtgccaacagaatatcatgaaatacaaaaccagtgtttgggattattttcctcgaacgcagtagataagtcaaggtctgaagcagcagttaggaaggtctcagaccttaaaatatcaactgatacagaatttctcagtataattacctccagccaggttgcttttttagctcaaaagaaagataaaagcggagtcctgtaaataaagggaatgtaaacatggagactgaacc

SEQ ID NO: 114622 - DNA, 916 bp, Homo Sapiens
tccaaagcctcaaggaggaaagtgagttcagttcccaagagaacagcaatagctcaacaatgtaaaacttcatctagagtatatcggcattaaattagtgctgtcgaaacaatacgttgaggaattacagtaacacctggaagttccttctcatgtacatataaatagaatcatggaagctttttatattacctgttttatggccttatagaattaatgaaccaaatgaaaactgaatctccattccacaatcccatcctttatttctattcttattttcaaggtagtattaagtgtccatatttctcaagccacattcaaggaaatcatgtcttaactattttggatgttgcctctccttcatcttgtacatgaaactccagcagatttaatattggcatccatcatctagtcaaacctctcacatgttcttcaaatcaatcaaatttgggattctcaacattttctgtgtcaataaaaggtgtggaattagtagattcgatgaagacctgtttttccttgccacattggacttccagacgccatttggattgggtttagaagatggggaaatttagaagacgtttcttggcctgagtctcttaagagtagagatgcagaagagagagtgagaccacgaagagactggctgttgactgcagggcaccaccagccgccttggtggtggcattagttggatttggggccaacccagagttggaagtactctgggaggagttacttgaagttccagttgttgtttcactggaataaatctgcgtgggtaggagcagtgccagcagcagcagccccagcccgagcctggccaccattgctctgcccatgtcccctccgtcggtgcgcggcgcgtctagcaggatgctgggtgcttggagaaccgctggctccgggccaa

SEQ ID NO: 114623 - DNA, 911 bp, Homo Sapiens
ttggtctacccaggaatggtacttttcagtgcagccaggagggctcttgggatttcctttccaaagcacaaaaatactgggacccaagaagaacagctagaggacaactctgttggcacagagacggggacagcccagtctgctgacctcacagggtcagctgggcccccctggtgcttcaccacctgcatcctcttgctcagaatgcctttgcagttgagttttctgggtttctatgattgaccttgaggtttactccttgctcttacaacatttctaaggatttttaaaagtttacttcttgtcttgttcttctaaagctttctccaggacagatattttccctgtcttaaccactggtccagtcatcccagtgggcttctctttgtctctcccagattagacctttgggtgagattggcatcacaacatctaatctgagtctgtcttttgtccttcattctgtatggcagtctccctttgttataaaagctttctaaagcatactaaagaagccttcccagagccccgtcttgcttctcttccaggtgctctatcccctcgagaccctctggtgccaggcttgcttcacggccatcttgtgttgtcactgcagagtttggaggccagttttccacagcctaaacagggaggagctgcagaatggggctctggtctctgggcattcatttccctcatagaggctgagaataaaacaaggacttattcacacatgttctagaaccccagaatggcccaagttacctgagaccagggtttctcaaccttgacaccattgacattttggactgggtaattctttgttctgcagagctgtcctttgcactgtagagatttactaatatccctggcctctacccagtagtaccactagcacctattccccaccc

SEQ ID NO: 114624 - DNA, 850 bp, Homo Sapiens
acctggaggaggggaggtcctggtggtggggtggacccccagcggggggagcaggtgggcctctgcattggagacccggcgctctatgtgctccgacgggccgggctgctgccttttctgctgctccacctcctccggggaggggccgttcgggaccgaccaggtgggaagtgctgggggtggagggggcccacctccttccaacgcctctagggcactggccatgccggcggcaaactgggccgcatcctccttgctgccgaagttgaggccccagacctggcgagcgtcgcgccactgatggaagttgggggtggcctggttatacttgacaccccggacgatggcacagttgatgaccacctgctggtcgggctgcatcttccggcccacgacgcgaaaggaattggccgtggggttgtggtagatctggacgcggctgaaggcctggggacccgtgccagcagggagccatcgcttgttgccatcatcataaagcatcacagtggcccggctggaacagatgaccgtctcgctcatggctgctcggcgggcgggcggctcgcccacgggctggctgctcccggggcgcccctggctggaggttcaggggttcggggctggctccgggctcggctcaggctcccccagggtcccgccccatagagtccggcttcctggggagaatgtggaccgggccggggcgggtctccgggcgccgcttccctcaggcggtctgatgagaggttcctgcagcagaaaggggatgcagcgtccgctccccagcgcgcaccccttgccggtggcggctacagtgttactcttactactgtacttctcttcgttccaa

SEQ ID NO: 114625 - DNA, 924 bp, Homo Sapiens
acaaaaaagttggctcggggactgccagtgtgtggaggtgagctccgggattgccggcattcccgcttctgctggttgcttcatgctgcaggctgcggccgtcagccctcgctcgcattggtggcgctgaggtgccggggcagcaagtgacatgtcgtcgggcctccgcgccgctgacttcccccgctggaagcgccacatctcggagcaactgaggcgccgggaccggctgcagagacaggcgttcgaggagatcatcctgcagtataacaaattgctggaaaagtcagatcttcattcagtgttggcccagaaactacaggctgaaaagcatgacgtaccaaacaggcacgagataagtcccggacatgatggcacatggaatgacaatcagctacaagaaatggcccaactgaggattaagcaccaagaggaactgactgaattacacaagaaacgtggggagttagctcaactggtgattgacctgaataaccaaatgcagcggaaggacagggagatgcagatgaatgaagcaaaaattgcagaatgtttgcagactatctctgacctggagacggagtgcctagacctgcgcactaagctttgtgaccttgaaagagccaaccagaccctgaaggatgaatatgatgccctgcagatcacttttactgccttggagggaaaactgaggaaaactacggaagagaaccaggagctggtcaccagatggatggctgagaaagcccaggaagccaatcggcttaatgcagagaatgaaaaagactccaggaggcggcaagcccggctgcagaaagagcttgcagaagcagcaaaggaacctctaccagtcgaacagatgatgacattgaggtcattgtggatgaaacttctgatcacacagaagagacctctcctgtgcga

SEQ ID NO: 114626 - DNA, 675 bp, Homo Sapiens
ttggctgaactgggttaggtgccgctgttgctgctcgtgttgaatctagaaccgtagccagacatgggactggaggacgagcaaaagatgcttaccgaatccggagatcctgaggaggaggaagagggagaggaggaattagtgataggactgaggctttcagtgcatactggcaaccttggaaggcaggaatgtgaaacttttccctactacttagcatcagaattgaatgggagaccgcattctgccatttctggcggcagtgtggctctgccagctggccttctgcacggatcccctaacaacagtgagagagcaatgcgagcagttggagaaatgtgtaaaggcccgggagcggctagagctctgtgatgagcgtgtatcctctcgatcacatacagaagaggattgcacggaggagctctttgacttcttgcatgcgagggaccattgcgtggcccacaaactctttaacaacttgaaataaatgtgtggacttaattcaccccagtcttcatcatctgggcatcagaatatttccttatggttttggatgtaccatttgtttcttatttgtgtaactgtaagttcacatgaacctcatgggtttggcttaggctggtagcttctatgtaattcgcaatgattccatctaaataaaagttctatgatctg

SEQ ID NO: 114627 - DNA, 970 bp, Homo Sapiens
ttggcttgatattggggccagactcttccacctgtgaaacctcacaggttcctgcagggagtggagacacacagaacctagctcccctggagcctgcaagacttgggccaccagaatcccagtaggtccctgaaccattgtcccccagtaagtctgcagagctgtgaaatgcagacaataacccttccctgcctgaaagagcacttttctggggagcccatgggagtcaggagcaaaagcatctgtcaaacaagtagatacccagagagtcacgtgaaatcatttctatgcctctgacagacgcttcttgagcgaagtttctgccctgagcccgcctgaccccttaggctgggctcagtaccctaccttgtcttcccaccagccgcctccctccatcaagttcctttccacgtctgcttgtgcccctgttgtccctcagtttgtccaccctcctccaatcttcccctccccaaacccatgactgatcagtggcccccaacctaggctcccacctccatgcaggtcttggcccctcggctgacctccctccaacctccccctctgctcttaattttgaataggtagtgactgtaaaagtatccctgggcttctatgtcaaaaggtcagactgaacacatgcatctcactgggctcagaaatccactgaaaccacagaggggagtatttaaaacacataacccacaagtatgaggatggtgacagaggagtcaggagcaatggcattcctaagctagaagtgggtgagagctgtcactaagttagggaaggcaaaatactacgtggcgacttggcgaagaggagagagttcccaccaggctgactccagaaccgcagaagctgagaaccagcagcccagagacgggagacctatatcaaagctgcctggggaacaactactgaagaagcccttaacgccccagtgctctcccccatggtgggagggtgaaag

SEQ ID NO: 114628 - DNA, 779 bp, Homo Sapiens
ttggcttggttccgcgttccctgcacaaaatgcccggcgaagccacagaaaccgtccctgctacagagcaggagttgccgcagccccaggctgagacagggtctggaacagaatctgacagtgatgaatcagtaccagagcttgaagaacaggattccacccaggcaaccacacaacaagcccagctggcggcagcagctgaaatcgatgaagaaccagtcagtaaagcaaaacagagtcggagtgaaaagaaggcacggaaggctatgtccaaactgggtcttcggcaggttacaggagttactagagtcactatccggaaatctaagaatatcctctttgtcatcacaaaaccagatgtctacaagagccctgcttcagatacttacatagtttttggggaagccaagatcgaagatttatcccagcaagcacaactagcagctgctgagaaattcaaagttcaaggtgaagctgtctcaaacattcaagaaaacacacagactccaactgtacaagaggagagtgaagaggaagaggtcgatgaaacaggtgtagaagttaaggacatagaattggtcatgtcacaagcaaatgtgtcgagagcaaaggcagtccgagccctgaagaacaacagtaatgatattgtaaatgcgattatggaattaacaatgtaaccatatggaagcaactttttttggtgtctcaaaggagtaactgcagcttggtttgaatttgtactgtttctatcataaataaaagttatggcttcttgttgg

SEQ ID NO: 114629 - DNA, 905 bp, Homo Sapiens
actttgtacaaaaaagttgggaagcggttggacgtgttcgcttgggttcctgctgcggcagctacctcgcaatctctctgcatcgatcgccgctcgcaagctactgaccgtactcgggcgtattaggagccgcgttccagcctcacaccccacggtgctgttttcgacttcagaaaggatctagtctcagcacagaagcgcctcaggcgcggcgcaaagctcgagcggacggcgggggcggccggagcctctctcgggggagccgcgcctgaggaggcggaagaacccccctgacgcgactggcgtgtgcttctgcccgccaccgcccctcccgctctcacccgggccgtccctggccactgcccctgccgcggaggcagcggcggcagcggctctcctttccacagccggcgctccgcgacccgcttggctcctgagcccgtcgggtaggctctcctcgagttcccgctcttcaccccttccctcaccctcttctttcgtcacccgtccccgaccccacccgagcccggcgcctcagctgcccccggccatggcgtgcggagccactctgaaaaggactctggatttcgacccgctgttgagcccggcgtccccgaagcgcaggcgatgtgcgccattgtcggcgcccacctcggccgctgcctccccgttgtcggcggccgcggccaccgccgcctccttctccgctgcggccgcctcgccgcagaagtatctccgaatggagccatcccccttcggcgacgtctcctcccgcctcaccacagaacaaattctgtacacataaaacaagagtataaacgaatgcagaagagaagacatttagaaacgagtttcaacagacagatccgtgttgtacttctgatgcacagccacatgcatttctc

SEQ ID NO: 114630 - DNA, 882 bp, Homo Sapiens
  misc_feature (615)..(623): n is a, c, g, or t
ttggagaaattctgtataggaaaaaagcattaaaaatactattataactgcttcatttgctgggaaccattaaaagtaatataaattagctttttccagaaggatccttttgtagcagtgtttatgaatgtaacccccagcaaaatatggctatatattaggggagccagtttggagcagaggcctgaaggtccctgctatgcagccgtggccacagctcgcagcccaagcactgtggagcatccacacctttgatggcaatgcagattggtagcaggttccataggcgtacaaaacagtattaaagctcagtgttttgcatattgttagcatttacaaatatttttgctttagtatgaggaaagtaaggatgggcaaagaagcgatcaaaatagctattgctacaacattttcgaaaacaaagttggggctgtatttctttaaaaagataagcctctaaaaatgcttggcaaaaaaaatatagtgttaaaataggccagtgatattaatgagaaaatgaaagtatgtatcaggaataaagtgatattgcataggagtattgtatttttatgaattttatgccagttgtttacatgtactatatatgttaaattnnnnnnnnntcatgagtaatgagggaagtgtttttcttgattgttattttcattttcaccttgattgtgatcaagttcagcctcgttttgtagtcagatagccatgaactggtttgagtcagatggcagtcctgagaagagagggagggatcataaacagtgggggtagactctttggtcttgttgttggtagtggtaggtactgaggttatccaaacttttcctgtatttgtggtagagtcacttacattccttttttatccttttc

SEQ ID NO: 114631 - DNA, 921 bp, Homo Sapiens
ttggcgatcagggcttgaggaacccgcgccatgaagtgcgtgtttgttaccgtagggaccaccagctttgacgacctcattgcgtgtgtgtcggcgcccgacagtctgcaagtgagtgagggaggcgagcaggcggcggcttggctcgccacccgccatctccggccatactgccagccgcgttagccttgcctgaccgtcgcgctcggaaagaaacccccgcaactctaccacagaaaatcgagagccttggttacaaccgacttatcctgcaaattggtagaggaacggtggtacctgaacccttcagtactgagtcgtttactctggatgtttacaggtacaaggattccttgaaagaagacattcagaaagcagatcttgttattagtcacgcaggtgcaggaagctgtttggagactctggaaaaaggaaagccactcgtagtggttataaacgaaaagttgatgaacaatcatcagctggaactggcaaagcagctacacaaagagggtcatctcttctattgtacctgcagttcttccttgagacactagaagcttgccaaagggccagcacgcttcctgggctgttacagtcaatggacttatcaacactgaaatgttatcctcctggccagccagaaaaattttctgcatttttggataaagttgttggattacaaaaataaacactaaactctcaacactttaaaagcaacccccaaattcaacctatgtaatgtgattaaatcaaattaaatacataatatatatttacaaaataatataattaataaacttcctacatctatagaatgtataggaaattttatgttgtgcacatttgcattgggtccaatcctaattgcagtttagtgaaattactagatttttttctaatcttcagtatgtagtgagc

SEQ ID NO: 114632 - DNA, 871 bp, Homo Sapiens
ttgggataacgcggccttgggctctggtgtctcccagtctgctaaagccctaaggccatcaccatggacttccagcatcgccccgggggcaagaccgggagcgggggcgtggcctcctcctccgagagcaaccgtgaccgcagggagcgcctccggcagctggccctggagaccatcgacatcaacaaggacccgtacttcatgaagaaccacctgggctcctatgaatgcaaactctgcctgacacttcacaacaatgaggggagctacctggcacatacgcaggggaagaagcaccagaccaacctggcccggcgagcagccaaggaggccaaggaggcccctgcccagcccgcgcctgagaaggtcaaggtggaggtgaagaagtttgtgaagatcggccgcccgggctacaaagtgaccaagcagagagactcggagatgggccagcagagcctcctcttccaggtgagatcagggacttgggcgtggggggcggccaaaggcacccaagaggcggctctgccacccggccgtgtccctgcagattgactaccctgagatcgccgagggcatcatgccacgtcaccgcttcatgtctgcgtacgagcagaggatcgagcctccggaccggcgctggcagtacctgctcatggccgccgagccctacgagaccattgccttcaaggtgccgagcagagagatcgacaaggcggagggcaagttctggacacactggaaccgggagaccaagcagttcttcctccagttccactttaaaatggagaagcccccggctccacccaacctccctgctgggccccctgggggtgaagcggcctccacccccgctgatgaacggtctgccccc

SEQ ID NO: 114633 - DNA, 964 bp, Homo Sapiens
agtgcgtacatgatactgggaatacacatagtatggctggctactgcaacatgcttttgaagaactacaaacattgaacacttatttttctgcaaaagccctagaatagctaccaaatttgataagtaaaaggattcacagaatgactgtgccctactgttattcttcttccatcttgtaacttaccgataatacttacgcatattagcaaacttaaatatttatagctttgttatcaaggtcagaactttacaggacatgaattaatttaaacagcgaactaaattaagaaaatcttgagacatggaatgctgacaattaatttacatgcacaattttagtaaaattttaatggcttctcttaatagtgtgtgtccaaattttgatttgaaggaagctaagccatggaataaataacaccataaaaatatacaaatgtatataagaaacatttatctctttagtgactatgaattaaaaacttataaaaaaagtgtttccatcttagtcccaaattgtaaatgaaacaataccaaatgcttaacctggctacaaactgtacagtcaagttcctttcattttactattactactttattaattcactcctttactaatattttttaaatattacaaagaaatgacagagttgtactgaatatcatggataaagcaaatctacaaaaagtaaacaaatcagcactcaaaacaatctttataaaaaatatttattcaatcttcaaattaaaattataaaagttcatcattttaagctgttttaagaaagcaaaagaaatatgtctatattttccaaatgaactaaagtggtagtcccctcctcccaactactcagataagaatggtaacaacccttttaatctttaaacccaaattagtttcaggaacatttcaaaaaattgttttggtgacaatgtctcaacagaaagccccaactttttgtaca

SEQ ID NO: 114634 - DNA, 945 bp, Homo Sapiens
ttgggcagctgtcggctggaaggaactggtctgctcacacttgctggcttgcgcatcaggactggctttatctcctgactcacggtgcaaaggtgcactctgcgaacgttaagtccgtccccagcgcttggaatcctacggcccccacagccggatcccctcagccttccaggtcctcaactcccgcggacgctgaacaatggcctccatggggctacaggtaatgggcatcgcgctggccgtcctgggctggctggccgtcatgctgtgctgcgcgctgcccatgtggcgcgtgacggccttcatcggcagcaacattgtcacctcgcagaccatctgggagggcctatggatgaactgcgtggtgcagagcaccggccagatgcagtgcaaggtgtacgactcgctgctggcactgccgcaggacctgcaggcggcccgcgccctcgtcatcatcagcatcatcgtggctgctctgggcgtgctgctgtccgtggtggggggcaagtgtaccaactgcctggaggatgaaagcgccaaggccaagaccatgatcgtggcgggcgtggtgttcctgttggccggccttatggtgatagtgccggtgtcctggacggcccacaacatcatccaagacttctacaatccgctggtggcctccgggcagaagcgggagatgggtgcctcgctctacgtcggctgggccgcctccggcctgctgctccttggcggggggctgctttgctgcaactgtccaccccgcacagacaagccttactccgccaagtattctgctgcccgctctgctgctgccagcaactacgtgtaaggtgccacggctcccctctgttcctctctgctttgttcttccctggactgagctcaacgcaggctgtgaccccgggagggccctgccacgggccactggctgctggggactgggga

SEQ ID NO: 114635 - DNA, 905 bp, Homo Sapiens
gccaactttgtacaaaaaagttggactggacctactgattcaacttggagatgagcgggtctgtcctcttcacggcgggagagaggtggagatgctttctgaccccgtcgaggtcatccctgtactgggccttacataatttctgctgtcggaaaaaatccactacacctaagaaaattactcccaatgttactttttgtgatgaaaatgcaaaggagcccgaaaatgcacttgacaagctcttctcttcagaacagcaggcttccatcttgcatgtgttgaatacagcatctactaaagaacttgaagctttccgattgcttcgtggaagaaggtccatcaatatcgtagagcacagagaaaactttgggccatttcagaatttagagagtttaatgaatgtgcccttgtttaagtataaaagtacagttcaagtttgtaactccatactttgtccaaagactggacgggaaaaaagaaagtcaccggaaaaccggttcctgagaaagctcctcaaaccagacatagaaagagaaagacttaaggcagttaatagtatcatatctatcgtttttggtactcgaagaattgcctgggctcaccttgatcgtaagttgacagtgctggactggcagcaaagtgaccgttggagtttaatgagaggaatatactcatcatcagtctatttagaagagatttcctcgatcatttcaaagatgcctaaagcagatttctatgttctggaaaaaaacaggactttccattcagaactcatctctgtttccaatactgttacattttcatatcatggaagccatgctgtatgccttattaaataaaacttttgcccaggatgggcagcatcagtgctgagcatgaatcgaaatgcagtggggaagcatttg

SEQ ID NO: 114636 - DNA, 922 bp, Homo Sapiens
  misc_feature (344)..(359): n is a, c, g, or t
tctaaacattttctcatttttactatgtagaaagagcacctgagatataaactactacccaaaacatcttttcaaaaagtgaaaaaaggaaaagggaggcactccatcatggatttgcactaaaacaaatatcttctatatatttgaagttgaatgctcttaactaccaactgaatggcacgttcacatatgaagacttcttgtgattcctgcaagacagtgagagtgtgaatgacccctgctgtggccaatttaagaaggaaaaatattaaaggtatgcaaagggtgaggaagagctgctgttctatgtatagttccattaaatttattaagaggctttgtcnnnnnnnnnnnnnnnnggctttagagaggcattaagaagtagggcatgaaggcacaaaaagggaacctgaaatccaattgcaataattactcatgcaattggcctctttctatgtggcattatagaaacctcctgagtaacagagtttatggttttacaaaagagaactcctacatcattgcatggcatggctaccgcttccttagaccattcagagaatgatccccaagtatttttcataaaccccatagggtttcctacattaaaataaagtgacagagatcacgccttgaataatttcacaattccagcaatgagttgtactacttccaaatgacgaattttctgctccaaataatgggacaaagggcatcatcacatggacacagtcaatttcacagtgatggactcacacaggtggatgatctgaggcacaagctgtgattggtcttaagaaaatgaaaggtagagttgggttcaaaatccacatctcacgatttctggtccttattcatccaaaaagttgaactgcttcatatcagtgtattagacacattttaaatctttctcaagagccaa

SEQ ID NO: 114637 - DNA, 846 bp, Homo Sapiens
ttgggttattcttttggtgctagcttaactgtcttcatctaacaataccaaattaagttttcatatagttaaggtctgtaggtttttgacttgctaaagaagaatgagaattgcatactaatcttacccagaagaaggaagtaaaccaaatattcataaatacaaataaacagaaattcactggctcactgaaaagcaggatttcctactgtacttgtttttaaaaatgtgcctctaatacatgttttcaaacccaaatttaaaatatgatttgttgttgtgataggttagaagttcttacttgtaaaatagaagaaaattgttgtagtggattggaacggtgttgtgtccattaatgtttataaataattaggtgtagaccaataatataagattcctacatcagtttgcagtcctgactttacagtttgaaataagtagcaaaagaaaattatgataatcaagtaatttattattttgtaaaatagtataaaggaataaggaaattttaagtattgtttaggggccaaatttgaactcagctaatatgatttaagcgctctattaattgccctgatttttaaagaggtgcatgtaattttgaaatagcacacattttcatttgtaatcactctggataaatttgtatttttcagtgttcattgaacaggcttattgactctggtaaacttattttattgatgttttcatatggaaaataataagtggaatatgatacaattgttattttcagaacatatttctttagggctatttaatataacctttttaacgagcaaaaactttccatttgagagaaaaaattcttcctgctctgtgggaaaa

SEQ ID NO: 114638 - DNA, 930 bp, Homo Sapiens
aactttgtacaaaaaagttggcgcaggtcgaattgttcgtgaaggctggcagtgatggggccaagattgggaactgcccattctcccagagactgttcatggtactgtggctcaagggagtcaccttcaatgttaccaccgttgacaccaaaaggcggaccgagacagtgcagaagctgtgcccaggggggcagctcccattcctgctgtatggcactgaagtgcacacagacaccaacaagattgaggaatttctggaggcagtgctgtgccctcccaggtaccccaagctggcagctctgaaccctgagtccaacacagctgggctggacatatttgccaaattttctgcctacatcaagaattcaaacccagcactcaatgacaatctggagaagggactcctgaaagccctgaaggttttagacaattacttaacatcccccctcccagaagaagtggatgaaaccagtgctgaagatgaaggtgtctctcagaggaagtttttggatggcaacgagctcaccctggctgactgcaacctgttgccaaagttacacatagtacaggtggtgtgtaagaagtaccggggattcaccatccccgaggccttccggggagtgcatcggtacttgagcaatgcctacgcccgggaagaattcgcttccacctgtccagatgatgaggagatcgagctcgcctatgagcaagtggcaaaggccctcaaataagcccctcctgggactccctcaaccccctccattttctccacaaggccctggtggtttccacattgctacccaatggacacactccaaaatggccagtgggcagggaatcctggagcacttgttccgggatggtgtggtggaagaggggatgaggaaagaaatggggggcctgggtcagatttttattgtggggtgggga

SEQ ID NO: 114639 - DNA, 815 bp, Homo Sapiens
gcaggagggggctgcccatctcactggctgagagccccgccctcagctgcccttgtctctttctggctaagatgtagggctttgcgtggaggggtgacgggaggccaggccctgggaagcccatgagtggcacctcacactcagacccgctgggcagggcctctccaccgccctctgttgctttcgggcctggctccaaggggaccttcactccctccagttccaggggcccagcccctggccccacctgccctttgtcctgagccgctgctgccatggcccgcccccgccgcacacagtaggctgcccccaccgcagccagcgcggccaggagcaccgcggccagggcgggcgcaatgaggagcggcaggttgccctcgcgggcctgggtgactggggcgtggttggagtggacggctgggggtgtatgggcctccccgcaggcctcctcgccctccggcacccgcccgggccccaaaggcatgacacagacggagtaagtggcgttgggccgcagctgggtgaccgtgtactcagcgagcgaggcaggcagtcgcagcgtcaccagccgcttatcagggcccgataggttgcgataggtgagacggaggctcctgagctgcacggagctcccctggaggtagcgctgcagccccacgcgcagggaggtggggctcaccggctcgatgcccagggtcagggaccgtggtggcctcggcgtgactggtgtagggctgggccgtgtcccctgccccatctggctctcacagtacaggcccgtgaagccttcggggcacaagcacgccaggtgccaa

SEQ ID NO: 114640 - DNA, 888 bp, Homo Sapiens
ttggctccagagaatgaggctggtgggcttaaactggatggccggcagctcaaggttgacttggcggtgacccgtgatgaggctgcaaagcttcagacgacgaaggtgaagaagccgactggcacccggaatctctatctggcccgagaaggcttgattcgtgctgggacgaaggctgcagagggtgtgagtgctgctgatatggccaaaagagaacggtttgagctgctgaagcatcagaaactcaaggaccagaatatctttgtctcccgaaccaggctctgcctgcacaatctcccaaaggctgtagatgacaaacagctcagaaagctgctgctgagtgctactagtggagagaaaggggtgcgcatcaaggagtgtagagtgatgcgagacctcaaaggagttcatgggaacatgaagggtcagtccctgggctacgcctttgcggagttccaagagcacgagcatgccctgaaagccctccgcctcatcaacaacaatccagaaatctttgggcctctgaagagaccaatagtggagttctctttagaagatcgaagaaaacttaaaatgaaggaattaaggatccagcgcagcttgcaaaaaatgagatccaagcctgcaactggtgagcctcagaaggggcaaccagagcctgcaaaagaccagcaacagaaggcagctcaacaccacacagaggaacaaagcaaggtgcccccagagcagaagagaaaggcgggctctacctcatggaccgggttccagaccaagctgaagtggagcaatggagctgcctgatggaaagaagagaagaaaggtcctggcgctcccctcacaccgaggccccaaatcagttgcgggacaaagaaagtgaagcccgtccat

SEQ ID NO: 114641 - DNA, 584 bp, Homo Sapiens
aaatccacccagggtcaagggacccagtgtgggagttggggtagcccaggctttggtttctcctcagaggcttgaacccagggcaggatgggggcaccgctgggaggcggttctaagatgaaccccaacaacccccaactcctcactttccagagcagtccacggatattttgatccaagagagaattactctgacaaggagtccctgtcgttcatgatagacacaatgaaatccaccctcaaagaggtaaggcggggctcaggcagctggtgtccagccactgtcgcccactctggtcccacctcacccatctcttctcatgcactgggaaagacccctggtctgcccccaggcccaacaagtgaccaccaggatctatcaggcctcatgctccagtgatcagtccctagaggcctggggacacatgtaatcagaatttaagaaacagagacctttggtggggaggttctttaccatcctcaagtacccacccctccttcttggggccaggcacaattaggtgacccaactgccagagacagtcccacattttttgagagacagggtctcattctgttgctca

SEQ ID NO: 114642 - DNA, 897 bp, Homo Sapiens
cccctgatgatcttatccatggtcttcttccggttctctgcggtgaagggcggcgatccagtgagcatgtcgtacatcagggcccccaggcttccaccagtccacagcccggttgtggccactgcgcaccagaatctcaggggccatgtactcaatggtgccgcagaaggtgtgagtgacggcgccctcatggatagactccttgcagagtccaaagtcggtcagtttgatgtggccctggctgctgagcatgatgttctcgggcttgaggtcccggtagatgatgccctgggagtggagatggcccagggccagcgtgatctcagccaggtagaagcaggccgtatcttccaggaagatgccctctcgctccagatgcgtgaagagctcgccaccactgaggcactcaaggatgaggtagagtttgccaccagtctggaaggcataggccagttccacaataaaggggtgcttcactgactctagaatgttccgctcagcccgtgtgtgtgctgtgtccttggcattgcgcacaattttggccttacttaggactttcatggcatatattttgcccaagttggtgccttgcacctttcgcacctggaacaccttgccatagccccccttgcccagcacacgcagcagctcaaagcagtggggcccgatgcgctctgggccaacgttcacgctggtctcagtcagctccacctcttcatagtgtcccacaggctctaggccagctgccctcaactcggcaaggggacatgcgtccgcggggctgagctctggctcgccctcgccctcgctgccttcctccgtctccaaatccaaatcaaacacggccgccatggcggcgccggccccgcgggcccgtcggcccgtacctggccccaa

SEQ ID NO: 114643 - DNA, 873 bp, Homo Sapiens
aactttgtacaaaaaagttggggcctactcacctgagaagaagatctccatcctgctcaagacctgcaaactcatctacgactccatggccctcggcaacccagggaagccctatggggcggatgacttcctgcctgtgctcatgtatgtgctggcccgcagcaacctcacggagatgcttctcaatgtggagtacatgatggagctcatggaccccgccctgcagctgggggagggttcctactatctgaccaccacctacggggccctggagcacatcaagagctacgacaagatcacggtgacccggcagctgagtgtggaggtgcaggactccatccaccgctgggagcgccggcgtactctcaacaaggcccgggcctcccgctcctccgtacaggacttcatctgcgtgtcgtacctggagcccgagcagcaggcgcggacgctggcgtcgcgggcggacacccaggcccaggcgctgtgcgcgcagtgcgcggagaagttcgcggtggagcggccgcaggcgcaccggctgttcgtgctggtggacgggcgctgcttccagctggcggacgacgcgctgccgcactgcatcaagggctacctgctgcgcagcgagcccaagcgcgacttccactttgtctaccggcccctggacggtggtggcggcggcggcggcgggagcccgccctgcctggtggtgcgggagcccaacttccctgtgaggccctcccggggcgcctcccctcacccccaggcgcacgtctggcccgcctctggctgcgcactcccgaccgcgacgtccacggagcagagggacatgggccattccatgacgtgcccagccaacgtctcaagacagttgtgaaa

SEQ ID NO: 114644 - DNA, 593 bp, Homo Sapiens
ttggggaaaaactccacgagctactgggaagttggattttttctgggggccagcgtcctagccaatgaccacatgagagtcattcaagcatctgaaaagctttttaaactgaagacaccagcatggtacctcaagtctattgtagagacaattttaatatataagcattttgtgaaactgaccacagaacagcctgtggccaagcaagaacttgtggacttttggatggatttcctggtcgaggccacaaagacagatgttactgtggttaggtttccagtattaatattagaaccaaccaaaatctatcaaccttcttatttgtctatcaacaatgaagttgaggaaaagacaatctctatttggcacgtgcttcctgatgacaagaaaggtatacatgagtggaattttagtgcctcttctgtcaggggagtgagtatttctaaatttgaagaaagatgctgctttctttatgtgcttcacaattctgatgatttccaaatctatttctgtacagaacttcattgtaaaaagttttttgagatggtgaacaccattaccggagagaaggtagagctgttcttaaatttatt

SEQ ID NO: 114645 - DNA, 922 bp, Homo Sapiens
tgacaggaatcatatagaacatctctaagaaaaggattcttggcttaagcaaaatattagagcagagaaagcaaaactcatgtcctttcatgcagtccggcaaggccccctgcccagaacctcctcttgagtcacatggatgagcagacagaagatctggacacagctatccatgttaagcatgagagagatgtaaagaaatagcagggtaggagggcaggcatactacagaaaaatgagagagaggaaaagagcatgccagagaatacaaatccaagaaacaaactgcactaagacagctaagaagaaatttcaggaatacgatgaatttcggaaaacaacacttcaaagatgagatgataaaatcatcctgagaaggaaacaagaaaaacatgggtaagaaaataaactgaggatcaaagcaacaccatcacagaaccacaaacacataaacagtagtgagatacaaacagccttggctggaatccaaaccgcagaaataagaaagcccgtcgcaaggaatgcaaaggcaggcgcaagacgaaggcaactggagagaagacagcctgccagcctgcagacaagagaggcctggagtggtgtcacttcatggtaacaacggctgggtctgctgtgggctgcagtgatgtttgtgtgcatgcatgtgtgtggtttttatgtacctacttttggctttaatttgattttttttaatgataacacattttgtgactgtaggagagaaaaagatgccctctgcttaaaggaaagccagggtaaactgaataccctacagctttccacaaatacatgtcttatcatttattaccatactatttcatgctttactaataaaaatactcaccaatttaccagtaccttgaaaagaggatctttccaagaaaattaatataattaccaa

SEQ ID NO: 114646 - DNA, 956 bp, Homo Sapiens
ttttcaggtaggcattgtagatgtgcttggagaaggcttcaggtcggccactgtgggttgtactggctccctcatttgcagtcagcctgccaccagcttcctcttctcagctccggcatccgaccaaaacggatagcgttgtgtgacatgcccagtgccaggcacttctggaagcggcagtactggcacttgttgcggttcttttctgaatcttgcagctgcgctcacacttctcgtactccagcttcatgcggatcgtacgacggaagaagcccttgcacccctcacatgcatgaacaccgtagtggaagcccgatgccttgtccccgcacacccggcactccatgttgaggctgccgcatgaggccccgtcacagcccatctgcagttggtccagcagtgagggtggcgaggagctccgggagaggtctgtgtagctgctggaaggaagtgcatgctgtggtcccccattgagctctggggctccttctgcctctgccacttcctctttctcctcctcttcccggacctcaggggcttcctcctgtggctgctccatggctgatctcccctcggcgccacacctgcaggcccagtcatagctctggcatcgtctgggtctgaacgcagatggacctctacaggatggttcccatcagcctgcgactgggagctcaaggctcagggatgaactggacaactgacccctggaaatgcacgtacaattgctgccactgggcctggctgctgctaaagcaaatggcaaagcaaatcagttcaactcagtagctctccccgctcaggaggtactttgacctcttccctcttggggaacctcagaagtctctgaaactccccccttcttcctccctcacattcccttcagaggaaagcacttggtatgggtttgaaagcaggagggccccccacccaggaccttcctgaaagatctccaa

SEQ ID NO: 114647 - DNA, 897 bp, Homo Sapiens
ttggggggaggaaaggttaaattgtcttttacatcctcttctcactcactctggcaacctatcctgtgtccccatagaactgagaagtaaagccctgtgcaggcctgctttagaagactttacatcccagcagaggattcaggcagggactctcaggattttaatcagactgcctttgaataatgtgatattaaattttatttttctcatagactctcaaagtaccacttgcttgaaagtagctacttgtgatctttaatttccttatattgtgatagttctacttttcagtctttcctgtgtatctccatttcatagtgcgttagtacttaaacttcggacacttttccaaactgttaaacaagtcaggaatgcttttcagaatcgcagtagtattattagggtctctgtgtctaggacttacagtcatcagtggtcatcactgggactagaggtgttcttttttttcctcttctcctttgtattaaaaaatagattttgctactgtataatgcggcatttcatgacttcctcttgttacttttcaaggttattctaaagagatggagatcttcattagaggctatttctcataatagtctgccttgcttattttcatactccccctgaaataagcctacttttgcaaacaggccatatgaatcaaattttatgtttgttcctcacaaaattttctacacattatttgttcccactttgctaataataatataatgattttattgtaaatctgtgttttaaatattttataatagagcactaatggaaacctaataaatacaaacaagataactattacccagataacatggaaatacttctgtttttgaagttaacaacaccgtctgccctcaaagcacatttagagtatcaacc

SEQ ID NO: 114648 - DNA, 754 bp, Homo Sapiens
tacaaaaaagtttggggctcccagaccacagtgtttcttcctgaagccggtggttgcagccactttgccttgctcctctacgcctttcctgaaggatgaggtggggccagtctgcctctgggagctcggtcaagttcacccgcctgcctgcctgtccagtgagtaactaagccacccaccatggaagctttcattcagggtgctttggaggggttggcctggggctgcagctctgtgcttcatgacctcgggtctccgggagccttgcccctcggcagccgtttccagggcccatctctgtgggcccacagggagtggcctgctaaccgggtgcctgctttgcccacaggccaagtacctggcccagatcattgtgatgggcgtgcaggtggtgggcagggcctttgcacgggccttgcggcaggagtttgcagcctctaccccctaaaaaggaaaccactcctggagaagaggcagctcctagccacctgtccctgtgtctctcatcctgtgctggtggcaggggtgagccaccaactcggaaggcccagggtgaagtgtgggctgctgaggactgagcgatcacccacatgtccacacagccagccgggccgcagctgatgcccgaggacgcgctggacaccggtctgcagccgcttccaacctctccggcctcagcctccaggaggcacagcagattctcaacgtgtccaagctgagccctgaggaggtccagaaaaactatgaacactta

SEQ ID NO: 114649 - DNA, 190 bp, Homo Sapiens
ctgtcttagaaagaaaaaagaaaagaaagtgttaatccccctatgggaatctcctcttctcctgccctctctggaacctcacttgtcagttcttcctcccactttcctgtatctttaacctatcccccacttttagctccttcccatcataatttaaattactcaaacttcttctgttttaaaaacccaa

SEQ ID NO: 114650 - DNA, 884 bp, Homo Sapiens
ttgggaagtgctgagtaagccgagacagagggggaagacggtggggcctccccacctgccccgcagaagatgcagttctttggccgcctggtcaataccttcagtggcgtcaccaacttgttctctaacccattccgggtgaaggaggtggctgtggccgactacacctcgagtgaccgagttcgggaggaagggcagctgattctgttccagaacactcccaaccgcacctgggactgcgtcctggtcaaccccaggaactcacagagtggattccgacgcctgggctccagtccctgtgtcctgagccccatgaggctgttactggtgctgctcgtctgcccatcctctccagtaacagccacctgaacactgcaattcctgggtttccatcattccttccagcctgatcacatgcccagtagttaactgttaatcgacgcactctctgtggaacaacaggctggtcccgttgagccaacactctctgggcactgccttcactagactctggctggctgctgcgcttgtagagactcttccagctggagttggaggctgacgccctagtgaatttccatcagtattcttcccagctgctacccttctatgagagctcccctcaggtcctgcacactgaggtcctgcagcacctgaccgacctcatccgtaaccaccccagctggtcagtggcccacctggctgtggagctagggatccgcgagtgcttccatcacagccgtatcatcagctgtgccaattgcgcggagaacgaggagggctgcacacccctgcacctggcctgccgcaagggtgatggggagatcctggtggagctggtgcagtactgccacactcagatggatgtcaccgactacaaggga

SEQ ID NO: 114651 - DNA, 394 bp, Homo Sapiens
ggcagagcattatgttatgaataccatgccccaaactccagaatctttttaattgtcataagataatgaatggaaatttctggagaaagttttattccagaactcagagccctgtgtgtccaacaatatgatcaggaagttggcccctgctgggaccagtactaggaagaatgaatgactgacagctgtaattgattggcactagtggggataccaccagcatgactttgttgaggtaaactggttatctcctgccagtgtccacttggatgtcactgggaaggctggagaagagcaatcatggaacccttttaatggtctgttgacagaaggtaagttaagagatagagttacaagactgctggccagagcaaggctgcaagaagatagagat

SEQ ID NO: 114652 - DNA, 891 bp, Homo Sapiens
actttgtacaaaaaagttgggatcatcgtcatcttgtatattccccacaaagccgttcgcagcttccgggagaaggggccagagcccggtggggccagtttctcacagagggaggaggtggcctttgtcccctggagcccgatcagccagttggtgctactgctgtggccagctggggggcttcctccagaccaccggcctcggccccggcatccctgttgggcgtcagcctgagagtccctactgtgcgtcagaatccaccttgcgtgctgtgcgtatctgtgaacctggagcggttacttattttgacagatatcactttgggtctttttacattaaatttcttttctctaaggaatataagacataccccatagctctgtgtgagccagcaataccgctgccccctggcgacagggcagaccaatgatgccaggcagctgtcacacgctagtattggcttcattgtgatctgagccctgcacgctgggccttcagaattaatggccagcagtgtcagggatgagcccgtcagccagggcacaggcctggctcacagtcctgcacacctgctggcctggggagctccagccaggcagcgagtcctgccccgcccgcagctccctcccacaccccgcctggccaagatgactgcttcagggggctttggggaaagaattaggaagggtcagaaccaaacaatacctgctcatttacactgagattcaggcgggagacaggagccttggggtcctgttaaaccacagacagttatgaactgaaagtcataacggggagaggtgcctggcttctacctgggtgctcacgaatgttcctcgtcacccctgccactctgtggtccggtgccctgcttcctcctccactcctggc

SEQ ID NO: 114653 - DNA, 908 bp, Homo Sapiens
  misc_feature (416)..(442): n is a, c, g, or t
tacaaaaaagttggtgctgatggtaaagtttgagacttttgccacacacaaatttgtgaaaattaaacgagatgtggaaggagaacctcagtgattttattccctagtgaggcctctgagggcctccacactgcctggcagaacataccactgaactagtatgtgctagaggagggcacaaacatccgctccttccctaggcctgctggctctggttttctatgcagatgattcattggattgggggtgagtgttttgtttttctgggggcagtgtgagctttgagggttggaatattgggaggcattccttagtttcctcaactagcctggaaagttaggagtctagggtaattaccccccaatgagtctagcctactattcactgctttgtgtgcatttttttctccctctttnnnnnnnnnnnnnnnnnnnnnnnnnnngtagatagtgctaaatattttagctcatgaaacttggttaggatggctgggggtacaagtccccaaactacctcttgttacagtagccagggagtggaatttcgtcaaccggtacttttaaggttaggatgggacgggaaaagtgaagcaggatattagctccttataccttctcccttccatttctgagatctcacattccatctatcacagggttttcaaagagatgctgagggtaacaaggaactcacttggcagtcagagcatcatgctttgaggtttggggtgctcaactgggagggtagaatgccattccagaggacaagccacaaaaatgccttaatttgagctcgtatttacccctgctgataagtgacttgagagttcccggttttttcctcttgtccttccctcccttctgtccttccatgtgtggggaaagggtgtttttggtagagcttggttt

SEQ ID NO: 114654 - DNA, 320 bp, Homo Sapiens
ctttgtacaaaaaagttggcgcggagcttagctgtcgccacctcgcgccgggtccgcgcggcccacgggaccccccactgacgcccccggccagcggtccacatggacgtgcggggccctgaagcccccggcgggcgcgcgctgcgggacgcggcagaaaatctatttcaggaacttcaggaacattttcaagctctgacggcaacattaaacctcagaaaaatgggaaatcgcattgaggacttacagaagaatgtcaatgacttaatggtgcaagctggcattgaaaattctattaaagaacaaatgctgaagaccta

SEQ ID NO: 114655 - DNA, 942 bp, Homo Sapiens
tacaaaaaagttgggattgatggttgtattattttctctgaatcctcttcactggccaaaggttggcagatagaggcaactcccaggccagtgagctttacttgccgtgtaaaaggaggaaaggggtggaaaaaaaccgactttctgcatttaactacaaaaaaagtttatgtttagtttggtagaggtgttatgtataatgctttgttaaagaaccccctttccgtgccactggtgaatagggattgatgaatgggaagagttgagtcagaccagtaagcccgtcctgggttccttgaacatgttcccatgtaggaggtaaaaccaattctggaagtgtctatgaacttccataaataactttaattttagtataatgatggtcttggattgtctgacctcagtagctattaaataacatcaagtaacatctgtatcaggccctacatagaacatacagttgagtgggagtaaacaaaaagataaacatgcgtgttaatggctgttcgagagaaatcggaataaaagcctaaacaggaacaacttcatcacagtgttgatgttggacacatagatggtgatggcaaaggtttagaacacattattttcaaagactaaatctaaaacccagagtaaacatcaatgctcagagttagcataatttggagctattcaagaattgcagagaaatgcattttcacagaaatcaagatgttatttttgtatactatatcacttagacaactgtgtttcatttgctgtaatcagtttttaaaagtcagatggaaagagcactgaagtcctagaaatagaaatgtaattttaaactattcccataaagctggaagaggaggggagtttgactaaagttctttttgtttgtttcaattttcattattgtaatagtgcaaataccatattaagagggaatgtggaggactg

SEQ ID NO: 114656 - DNA, 956 bp, Homo Sapiens
caattcccatgtttcttaaataactatctgtcagataacacacaatataaagagcaattatgaaaaacagacatttacatatatttctaaagtcttatgggaatatcctgttggcattggataaccaatcataggtgcagctgcagtagcaggatatgcatatgcctgtggttcataccattgtgcatatttggacattacttccgtattgctgagtgctatcataaccattctggtaagtccctgttggattaccagtcctaaaactggtctgtataccagcagacacaaaattacttccaaagctcccattggtgtaatttgcagcactgtaaacaccattctgagtttttgccccaaaatctcttttaagcaggctagagtaacctctgtcataattttccctgtctctaaaggtattaaatccaccccttttgcccgcagagtatctgtcccgacggtcatccttcatgcctcctctacccctggaacgacctgtcaagaaaacaattgcaaattgatcaattatgtctatgacacaaatcattgtggacagaaagaaacagatctattcatggtaggcgtgaaatgtttttacaatttttcagcttaagttttcacattcaaggttttactcaccctccaataccatttaaatggatttgtagacaacgatgtgactcgtaactaccaacatttcctatcagtcatccttacctgaacctctgtcttcgaccaactgaagcaacttgggattaattgcttgattagcttcacgaagcacagagataaggtcgctcacttgctttatgttattaggtgtaaagaaagtgtatgctgtgcctgttttggtactgcgagcagttcttccaattcgatgaatataatcctctgaggagttagggtagtcataattgatgacaaatttcacatcttccacatctgtaaggtgccaa

SEQ ID NO: 114657 - DNA, 874 bp, Homo Sapiens
acaaaaaagttgggtgccaggtaacatcgacgccagacaagcaacagaactttaaaacatgtgctgagctggttcgagaggctgccagactgggtgcctgcctggctttcctgcctgaggcatttgacttcattgcacgggaccctgcagagacgctacacctgtctgaaccactgggtgggaaacttttggaagaatacacccagcttgccagggaatgtggactctggctgtccttgggtggtttccatgagcgtggccaagactgggagcagactcagaaaatctacaattgtcacgtgctgctgaacagcaaaggggcagtagtggccacttacaggaagacacatctgtgtgacgtagagattccagggcaggggcctatgtgtgaaagcaactctaccatgcctgggcccagtcttgagtcacctgtcagcacaccagcaggcaagattggtctagctgtctgctatgacatgcggttccctgaactctctctggcattggctcaagctggagcagagatacttacctatccttcagcttttggatccattacaggcccagcccactgggaggtgttgctgcgggcccgtgctatcgaaacccagtgctatgtagtggcagcagcacagtgtggacgccaccatgagaagagagcaagttatggccacagcatggtggtagacccctggggaacagtggtggcccgctgctctgaggggccaggcctctgccttgcccgaatagacctcaactatctgcgacagttgcgccgacacctgcctgtgttcagcaccgcaagcctgacctctatggcaatctgggtcacccactgtctaagacttgacttctgtgaatttagacctgcccc

SEQ ID NO: 114658 - DNA, 947 bp, Homo Sapiens
tacaaaaaagttgggtgaagaatccttaccacctccttgggccacactctttgatggtaaccatcaaatggtcatccagaaaaaggtactgtatcctgcaagtgagccattacatgatgaaaaagggaaaaagagacaagctccccttcctccttctgataaacttccattcagcttaaaatcacagagtaacacagatcaattggttaaggacaactggggaaaaacaagtgtatctcagacatcgtctttggataccaaactatcaactctaatgcatcacttacagaaaccaatggctgctcctcgaaaacttctgcctgccaggagaaatagattaagtgatggtgagcacacagacactaaaaccaattttgaagccaagccagtgccagctccaaggcagaaatccatcaaagacattctggaccctagatcatggctgcaggcacaagtatagaaaactcttaatgataaaacatttaacaaaatctataactgtgaagcttaattcagaggcattatagaataatgtgtaattatataggtaaatatagtgatttataccaataattaataagctattaggtatagaaaaacattttataatgaagaagtggatttctcttttactcctgatttgcagaatgtaagtgatttctccagcagtgtgcaagaggcagtttctagacaatatcctaattgttggaagggttaatttattcctgaattagtaccaggcagtgaataagccctacgcagaataaagcattaaaatttcttttggggagagactgtctagtaatttaaaatgtgttaaatatgaaccatattctcattgtgagaattttaatactaatggaatgtttcaaagttttattcaaaccacaaattatagaatccacccaagaaaattttcttagcattctggaattctcatctaatgg

SEQ ID NO: 114659 - DNA, 907 bp, Homo Sapiens
tacaaaaaagttggggggctggtgcagagttccaagcccacggccccggtcgcggcctcgccgccctcccgcgccccgcgccgggagcgggcctagagcgctcgcctcgcccctccgcgagcagggctctggcgcccgcccctgtccgcaccgctggcagcctgaagagagtcgctggccgtggtcgccgctaggtaggatatatctgcatcttgaaaggaagataaaacaaaagccttctttggaatagatggatttttgtcactttctgtgtgaactaaagtgattcaatgtctcttttggattgcttctgcacttcaagaacacaagttgaatcactcagacctgaaaaacagtctgaaaccagtatccatcaatacttggttgatgagccaaccctttcctggtcacgtccatccactagagccagtgaagtactatgttccaccaacgtttctcactatgagctccaagtagaaataggaagaggatttgacaacttgacttctgtccatcttgcacggcatactcccacgggaacactggtaactataaaaattacaaatctggaaaactgcaatgaagaacgcctgaaagctttacagaaagccgtgattctatcccactttttccggcatcccaatattacaacttattggacagttttcactgttggcagctggctttgggttatttctccatttatggcctatggttcagcaagtcaactcttgaggacctattttcctgaagaatgagtgaaactttaataagaaacattctctttggagccgtgagagggttgaactatctgcaccaaaatggctgtattcacaggagtattaaagccagccatatcctcatttctggtgatggcctaatgaccctctctggcctttcccatctg

SEQ ID NO: 114660 - DNA, 909 bp, Homo Sapiens
acaaaaaagttggggcattttctcctggacaaggagagagtgcggctgctgagagccgagcccagcaatcccgatcctctgagtcgtgaagaagggaggcagcgagggggttggggttggggcctgaggcaagcccccaggctccgctcttgccagagggacaggagccatggctcagaaaatggactgtggtgcgggcctcctcggcttccaggctgaggcctccgtagaagacagcgccttgcttatgcagaccttgatggaggccatccagatctcagaggctccacctactaaccaggccaccgcagctgctagtccccagagttcacagcccccaactgccaatgagatggctgacattcaggtttcagcagctgccgctaggcctaagtcagcctttaaagtccagaatgccaccacaaaaggcccaaatggtgtctatgatttctctcaggctcataatgccaaggatgtgcccaacacgcagcccaaggcagcctttaagtcccaaaatgctaccccaaagggtccaaatgctgcctatgatttttcccaggcagcaaccactggtgagttagctgctaacaagtctgagatggccttcaaggcccagaatgccactactaaagtgggcccaaatgccacctacaatttctctcagtctctcaatgccaatgacctggccaacagcaggcctaagacccctttcaaggcttggaatgataccactaagccccaacagctgatacccagacccagaatgtaaatcaggccaaaatggccacttcccaggctgacatagagaccgacccaggtatctctgaacctgacggtgcaactgcacagacatcagcagatggttcccaggctcagaatctggagtcccggacaataattctggcaaga

SEQ ID NO: 114661 - DNA, 710 bp, Homo Sapiens
tacaaaaaagttgggtccacactggccggcaccccctgctgggtctcctgcattccacggagcccctgctgccagggcggtgtctgagcctgccggcgccacctgggccccggcccttgaggtactccctgagcaggaccccacacttgggtgggggggcttatctgggtgggtggggatgcctgtttacactagcgctgactcccaacggtgacggctcccttccccactccatggcgccagcctcctcccccgctccccaacttctcgcccagctggccgaggcggggcaacactaaggtgctcttagaaacactaatgttcctctggggcagcccccacctccgtcctgacccgacgggggcccggcccactgcctaccctcgagtcccgcagccttaacaggatgggatcgagggtccccatggggtggctcagagataggaccctggttttaaatccctcccagcctggtgctggtgatgggccctggccctactccagggccaatgcacccccgcctcacacacgcactccttctcctcaaggccagggcagagggcctcaccgcctcccgggcctgctgtcagcttgcagcccggggacagaggccagctgggatctgcctgaggacagagaacatggtctcctgcagggccctgcctcccaagccccgccctcaaaaagccaagtaccttttcagcttttta

SEQ ID NO: 114662 - DNA, 967 bp, Homo Sapiens
actttgtacaaaaaagttgggaagtagagctttttccagacctcctaccttttagtctactttgaaaggtgaaagaaagaacatcgtttcaggaataaaaatgcacagtagtagttatagttaccgtagcagtgattctgtgtttagtaacactaccagcactcgaaccagtcttgattcaaatgaaaatcttctcttggttcattgtggtccaacactgatcaactcttgcattagcttcggcagtgaatcctttgatggacacaggttagaaatgttgcaacagattgccaacagagttcagagggacagtgtcatctgtgaagacaaactgattcttgctggaaatgctcttcagtctgattctaaaagattagaatcaggagtgcagtttcagaatgaagcagaaattgctgggtatatacttgaatgtgagaaccttttacgccagcatgtaattgatgtacagattcttattgatggaaaatactaccaggcagatcaattggtacagagggttgcaaaactgcgtgacgaaattatggccttaaggaacgaatgttcttctgtgtacagcaaaggacgcatactgacaacagaacagacaaagctcatgatatcaggaatcactcaaagtttaaactcaggatttgcacagaccttacaccctagtctgacctcagggctgacccagagtttaacaccttccctaacctcttctagtatgacttctggcctgtcatcagggatgacttcccgcctgactccatctgtcactccagcttatacacctggtttcccatcagattagttccaaatttcagttcacgagtagagccaaattcattgcaaactttgaagttgatgcagatccgaaaaccccttctaaagtcttctttgctggatcaaatttaacagaagaagaaatcaatatgaaatttgttcacgatcttttgaattgggttga

SEQ ID NO: 114663 - DNA, 877 bp, Homo Sapiens
ttggatcctgaaggaccatggcatccgcctgctggaggcccagatcgccacgggcggcatcatcgaccctgaggagagccaccggctgcccgtggaggtggcctacaagcgcggcctcttcgatgaggagatgaacgagatcctgaccgacccctcggacgacaccaagggcttctttgaccctaacacggaggagaacctcacctacctgcagctgatggagcgttgtatcactgacccccagacgggcctgtgtctcttgccgctgaaggagaagaagcgggagcggaagacgtcctccaagtcctccgtgcgcaagcgccgagtggtcatcgtggaccccgagacgggcaaggagatgtcagtgtacgaggcctaccgcaagggcctgattgaccaccagacgtacctggagctgtccgagcaggagtgcgagtgggaggagatcaccatctcctcctcggacggcgtggtcaagtccatgatcatcgaccgccgctccgggcgccagtacgacatcgatgatgccatcgccaagaacctcatcgaccgctcggcactggaccagtaccgcgccggcacgctctccatcaccgagttcgccgacatgctctcgggcaacgccggtggtttccgctcccgttcctcctcggtgggatcctcctcctcctaccccatcagccccgccgtctccaggacccagctggcctcctggtcggaccccactgaggagacgggccccgtggctggcatcctggacacggagacgctggagaaagtgtccatcaccgacgccatgcaccggaacctggtggataacatcacggggcagcggctgctggaggcgcaagcctgcaccgggggcatcatcgacccc

SEQ ID NO: 114664 - DNA, 830 bp, Homo Sapiens
actttgtacaaaaaagttggattgtcccaacctgaggtcccacctctatccagctgggaggccttggtgtccccacctgcacacaaaggcacaggagcaggtagtcacagagcccagagcagcaggcagcctcacacgctgcccacagcagtgcccagcgggcccccgagccctcatgcatccctgagccgtgagcacccaacgtgccaaggctcctgccacccacctttgcccacccacaggcctgcctgctgctccagaagaccctgtccatgcgggaggtgaggtcgtgctttgaggaccccgagtggaagcagctgatgggccaggtcctagcaaaggtcaccgaggtaacagccggggggcgccctttccccaccccctcagaatcagttctccgggagaccgatctctgggaaagaagtgaggattggagcctgagtccagagtcgggagaactggggttgtcccaggagacggtccctgcctctgggctttacttccggctgggaaacagaaaggctttgagcagctctccggagtgcctcagcctggccacccttccctagaacttgcgcgtgctgggggaggcgcagaccaaggcgcagcatcagcaggcactgtcctccctggagctgctcaacgttctcttcaggacctgcaaacatgagaagctgaccttggacctgacggtgctcctgggtgtgctgcaggggcaacagcagagcctacagcaggggcacactccaccggctccagccgcctgcacgacctctactggcaggccatgaaaaccctgggagtccagcgccccaagttggagaagaaag

SEQ ID NO: 114665 - DNA, 896 bp, Homo Sapiens
tccagcaggatcctctgacctccctgtcggccccagtctgagcatcgaatctctggtggcgatggcatcaatctcgtctatgaagatgatggcaggtgcattctctttggcccaggcggaacacatcccggaccatgcgggggccctcacccagatactttctgtacaaactccgagcccacgacccggatgaatgcagctgttgtgtgatgtgccaccgcctttgccaacatggtcttcccacagccaggtgggccatacatgaggacgcctcgggggggatcgatgccgatctgcttgtagagctcgaaatgcgtgagcgggagctccacggcctcccgcacctcctgcttctggatgtccatgcctccgatgtccgcgtacatcacatctggcttctggtctgaggtgagcatcatgatgctgctgtcggcttcggggggcagcacgtccaccagtgcattgctgtgcttgtggagggccactgaggcgttgggcttgagcagctcccgatcgatggtgctcaggatgcgcacataatagttggagcctgtggtagagcccacgatggctgtattctgatccacagcctccagaaattgtccgatgaccagcgggatgctttggattcgcttcacctcctcctgggcatggagaaattcctttttcaggttcttttgctcatctttgatgtattcctcctgcacctccaggaactccagctcttgctgcagcttcttgtagcggctgtacaggtcctccaggtcctcaggctcagggcccaggaaggacaggccggtctggggccgggacacggacagtgctgggatctcatcctgagccttctccaccaagatgcctatctcctccatagtgaccaagcccaacttttttgt

SEQ ID NO: 114666 - DNA, 937 bp, Homo Sapiens
aggcagctggagacattagccggagacggcaggcattgtggcacagaaggtatgcagggctccaggaggcaacgggaggtcagtccaaggtcaggcggcccaggtgtaggggtgcaggacagccccaaagactgatgtattacggccaccgatgccacagccagggccacactgctcacatatgccacagctaacaggcaagacagctttaccagccgctggcagagggagcccagggccaactgccaggtcggctgctccagcagcacacacaggtctgtgtaggtgtaccagcctcgccaccgtccctgctgctcagccacacagctctccaaccagctcagcacctcaaagatctcccgagggtcagtgtagagatgccaatccatggcactcaggaagcccctctccaaggcattgagagtgggcacggccacacccccagcagctccccattcgtcgttgaagacctcctcctcctccccttcatcatagaggtacttactggccaccatcatggagatcaggaacaagtcagaggatgacacatgctgcaagtagtctgggtttcggtgccggagccgttcaatgtacaccagagccagcatcatagcacatggggagatgcatgcctcccgggacacatgagctacgtatttcttctggagtcggcgaatagggctgggggctgccttctggagcagttcgacagcaatgtctgccaccgggctggagagctcctccaggctacagtcggcttcccagtcccagccatagtagagcctccttcggatccgggcactcagcttctggtgtcctgggaggaacgtgaagtcctggaagccggcgagggagaaggtgccttcttcgtccagcaggagcccggtcaggtccatcgcgccgccagtcgccgccctgcgaagccaacttttttgta

SEQ ID NO: 114667 - DNA, 840 bp, Homo Sapiens
  misc_feature (626)..(658): n is a, c, g, or t
ttggagaggcagtcgtagcaacagcagctcagaggcagtgcttggacaggaggagctgagtgctcaggctaaagtcctggcccctggggccagccaccctggagaggaggagggggcccggctaccagagggcaagccagtccaggttgccacacccatagtggcctcctctgaggctgtggcagagaaggagggagcccggaaggaggaacgcaagccccggatgggtctcttccaccaccaccaccaaggcctaagtcggagcgagttgggtcgccgaagctctctgggggaaaaggggggtcccatcctgggggcctccccacatcactcatccagtggggaggaaaaggccaagagtagctggtttggcttgagagaagccaaggacccgactcagaaacccagtgcctcgagggccagccccacccccctggcctcccctgggaaagccctgcctgagtgggacaacaccttcaacgtctttgctgccagcaggctgcgtccagaggccaggagcgagatcctggcccctgcaggagtggggctggaggcggcagggctgcaagacccaggccctggggccatgactgcgaaggcagctgagccccagggagagcctgggnnnnnnnnnnnnnnnnnnnnnnnnnnnnnnnnnagaggtgggagcagcgtgtggctggagcccagggttcctctggacttgggaccgaaccaccagagcgcgagcgcggctgacccagggctcctcgggtcggtaggggctggcctgccctcctcgtcagcccagctacagctgagagcctcagctcagaaccagaacagggaactgccagcccc

SEQ ID NO: 114668 - DNA, 869 bp, Homo Sapiens
  misc_feature (698)..(749): n is a, c, g, or t
gtacaaaaaagttggcttcagctccatgtcgccccgcatgcgccacatctgctacttcctcgactacggcgcgctcagcctctacagtctggctcgggctgtgctggggcaggggccacggctgtgggcaggaggccctgagcaccagccatggctaccatctcttctgcgcgctgctcactggcttcctcttcgcctcccacctgcctgaaaggctggcaccaggacgctttgattacatcggtgagggcacgcctggcccggcccgggaagaggcaggggcagatgccttcccagagcacagaatgaactgggccacagccaccagttattccacatctgtgcagtgctgggcacccacttccagctggaggcagtgctggctgatatgggatcacgcagagcctggctggccacacaggaacctgccctgggcctggcaggcacagtggccacactggtcttggctgcagctgggaacctactcattattgctgctttcacagccaccctgcttcgggcccccagtacatgccctctgctgcagggtggcccactggaggggggtacccaggccaaacaacagtgaggccccatccctgaccctgtcctggagggggcagaggccaggccccagtgctgacgaggagcccagatttgggcctaatcaggtggggacgcatctcagcctggaaccnnnnnnnnnnnnnnnnnnnnnnnnnnnnnnnnnnnnnnnnnnnnnnnnnnnntgtctagggggactggcagagtgtgagagggaccgtgaagggctcttgatgggagtggaagaagtgctgagggtctgagaggggagatgcatgcgtgtccaggctgaagatgcccctata

SEQ ID NO: 114669 - DNA, 959 bp, Homo Sapiens
taatctttaggtaagtaaggtaagtaagtatacctcatgacaactggtctcagcaaaattactttacgtctgaatacaacaacattcaaattcacctccagctctgcctcatgaccatgtgctctgtggtaaaagacagccccacttacttcatgcctctactggaccaactcatctgcagagtcctcccacagacagcatctctaagggcatggacggtgtcctctgcatctctcctggccacacttggtaagtgtgacagacagacttcacagtggccccaggcccccagctcctgtaatcccctcccaccttgagcacaggtgagatctctgacttgcttctaagtagcggaattcacaaaaggtgatgatgggctgtatcacagaagagtttagcacctatcttataagagtctctgtctctactgctggctctgaagaagtaaagctgccaagaatgcttcagccctaagaaaaggaattctgtccccagtctagaagagcctggatgtggatcctctgagtcaagtctcctgatgagaacccagccctagccaacaccctgaatgcagcctttatgagaccctaggttgagttcgctgtgcctggactcctgccccacagaagctaggaaataaatggctgctgttcgaagccaccaggcctgtagtgatttgttgcccagcacagagaggtaatacgggggatgctgaagagctgtctgctcaacaacctaacagattcgcacctgaaccaagtcactcacagcaccttcacaatacatcacaagagaatcaggacttggagggactgcacagggtcagacatacaagacacttcagtggcctgtgccctgctggctgtggtactctagaaacagtcctctcaattcagaattctctctcccctctgggtactgctcttttttgggggccatccaacttttttgtacaaagt

SEQ ID NO: 114670 - DNA, 874 bp, Homo Sapiens
ttggcagaaggagagattcctctgccatggagtcctacgatgtgatcgccaaccagcctgtcgtgatcgacaacggatccggtgtgattaaagctggttttgctggtgatcagatccccaaatactgctttccaaactatgtgggccgacccaagcacgttcgtgtcatggcaggagcccttgaaggcgacatcttcattggccccaaagctgaggagcaccgagggctgctttcaatccgctatcccatggagcatggcatcgtcaaggattggaacgacatggaacgcatttggcaatatgtctattctaaggaccagctgcagactttctcagaggagcatcctgtgctcctgactgaggcgcctttaaacccacgaaaaaaccgggaacgagctgccgaagttttcttcgagaccttcaatgtgcccgctcttttcatctccatgcaagctgtactcagcctttacgctacaggcaggaccacaggggtggtgctggattctggggatggagtcacccatgctgtgcccatctatgagggctttgccatgccccactccatcatgcgcatcgacatcgcgggccgggacgtctctcgcttcctgcgcctctacctgcgtaaggagggctacgacttccactcatcctctgagtttgagattgtcaaggccataaaagaaagagcctgttacctatccataaacccccaaaaggatgagacgctagagacagagaaagctcagtactacctgcctgatggcagcaccattgagattggtccttcccgattccgggcccctgagttgctcttcagccagatttgattggagaggagagtgaaggcatccacgaggtcctggtgttcgccatt

SEQ ID NO: 114671 - DNA, 903 bp, Homo Sapiens; identical to SEQ ID NO: 104538

SEQ ID NO: 114672 - DNA, 930 bp, Homo Sapiens; identical to SEQ ID NO: 104539

SEQ ID NO: 114673 - DNA, 853 bp, Homo Sapiens
acaaaaaagttaggccgagccggattccgcgagcgggatggaccctccagtccatctgcgtctctccatttgtggctgccgtttctgtccagtgcccctgaggccctcggctgctggggtccgcaggaagccgcgccatgaatgaccggagcagtcggaggcggacaatgaaggacgatgagaccttcgagatctccattcccttcgatgaggcaccccacctagacccacagatcttttacagtctgagcccctctcggagaaacttcgaggagcctccggaggctgcgtcctccgccctggctctgatgaacagcgtcaagacccagctgcacatggctctggagaggaactcctggctgcagaagcgcatcgaggacctggaggaagagagggacttcctgcggtgccagctggacaaattcatctcttctgctcggatggaggcagaggaccactgccggatgaagcctgggcccaggcggatggagggggacagccgtggtggggctgggggcgaggcctcggaccctgagtcagcagcctcctccctcagcggagcgtccgaagaaggcagtgccagtgagaggaggcggcagaagcagaagggaggtgctagtcggaggcgctttgggaagcccaaggcccgggagaggcagcgagtgaaggacgccgacggggtcctctgccggtacaagaagatcctgggcaccttccagaagctcaagagcatgtcgcgggccttcgagcaccaccgcgtggacaggaacaccgtgggcgctgaccacgcccatcgccgagctgctcattgtggcccccgagaagctggccgaggtggggcgagttcgacccc

SEQ ID NO: 114674 - DNA, 916 bp, Homo Sapiens
ttggccagatcaatgacttggtggagttccctgttaggaacctggacctgaccaagttctgcattggtcacaaagaggagtgtctgcccagctacgatctatatgctgtcatcaaccactatggaagcatgattggtggccactacactgcctgtgcacgcctgcccaatgatcgtagcagtcaacgcagtgacgtgggctggcgcttgtttgatgacagcacagtgacaacggtagacgatagccaggttgtgacgcgttatgcctatgtactcttctaccgccggcggaactctcctgtggagaggccccccagggcaggtcactctgagcaccacccagacctaggccctgcagctgaggctgctgccagccaggtgaggcatgtgggaggctttacagaatactgggggacagttcacagactggggccgggttgggggatatagcttcctctcctccagccacaggcccgttgacccatgggattcatgagaattgcctagttctcttagcatcaaagctttagccaaaggcatccccatgccttggggacactaacaaacttacaactacactaacatgctgccactggcaagcacattggcacctacttggcacaggtcaagcaactgctctgaacctcactgggcactatgctgtgaatgaactatacctgacactctcctagatttcctctgcacattccccatatgctggcccacacaccctcacttgtgatgtccctgagttctagtgtgcactcaagacaatgcctatgtaggctggccatggcctctggtggctgttatactcgttgaggtaagcatctgtctttgctgagccttcacgatcttctctttagtgacatggtgtgccatacgcccagttagtgggcgtaggcacatctcttttc

SEQ ID NO: 114675 - DNA, 710 bp, Homo Sapiens
gtacaaaaaagttggcttcgccaccatcgccgccctacaccgtggtctatttcccagttcgaggccgctgcgcggccctgcgcatgctgctggcagatcagggccagagctggaaggaggaggtggtgaccgtggagacgtggcaggagggctcactcaaagcctcctgcctatacgggcagctccccaagttccaggacggagacctcaccctgtaccagtccaataccatcctgcgtcacctgggccgcacccttgggctctatgggaaggaccagcaggaggcagccctggtggacatggtgaatgacggcgtggaggacctccgctgcaaatacatctccctcatctacaccaactatgaggcgggcaaggatgactatgtgaaggcactgcccgggcaactgaagccttttgagaccctgctgtcccagaaccagggaggcaagaccttcattgtgggagaccagatctccttcgctgactacaacctgctggacttgctgctgatccatgaggtcctagcccctggctgcctggatgcgttccccctgctctcagcatatgtggggcgcctcagtgcccggcccaagctcaaggccttcctggcctcccctgagtacgtgaacctccccatcaatggcaacgggaaacagtgaaggttgggggggactctgaaccgggaggcagaattttgccttcctttctcc

SEQ ID NO: 114676 - DNA, 959 bp, Homo Sapiens
tgaagcactccaaaggtgtgtggtcaatgataagtaggttgtgcacctccacctcttctccaaaggaggtctcatgaggagcagtgctgctggagaacagcttgctggagcttacattgctggacagagcctgggtgctagcgctgggcctcaaggctgtcgtgcccccactcgtgtcttggacttcaatgcggctggagaggaccccgaaacactgggacacttcctggtagcagatcttccttggagactcatagaggggaactgtgcgaatgtgcagcttctggatctcatcgatggtgccaatggtgagggtgctattgttggccagcgccaggctgtcaggatagccatctgaattgaggggacacatgtagttcacttccttgaggttgacatttgagaagaccaatttgtggttgctgctatagatgacagtggggcggtcagaacaagcaaagacgttggtggtagaaagagaacgaaaagtcctcaatacggtgggctgggtgcccaaagtcaccttcttacggtcgctcaacagacctgtctcaatgttgagcccaaagtagaaaagcgctccatctcccaaggcacaaaggaggtaatggctactctcaaaggtggtcatcaggatggagcgaggaatgatctctccacccagcatctccttgtgcagtagttcaaaagagggcaacttcaagatacgagccgagatgtccgtccagaggccaatggcacaaagaggggacagtccattgctgtctcctaatggggtgatgtccaagcaagccacttcatgttccatctctgtgtggctgatctgccggagctcctgaggatggatctgcagatagtagagggccctgcctacagccaccaccacctggctgctattgcaggaggccacactgatgttcttggcctgaggctccttccccaacttttttgtacaaagt

SEQ ID NO: 114677 - DNA, 802 bp, Homo Sapiens
aaaaagttgggcatctctgcctccaacccagcagttctctgccaaagcttgtggaggagggagagccctgtccctgccctcaggctccccagtgctcctggcccttctatttatttgactgattattgcttctttccttgcattaaaggagatcttcccctaacctttgggccaatttactggccactaatttcgtttaaataccattgtgtcattggggggaccgtctttacccctgctgacctcccacctatccgccctgcagcagaaccttggcggtttataggtaatgatggaacttagactcctcttcccagagtcacaagtagcctctgggatctgccaacacacgtccactcccaagccactagcccactccccagttggcccttctgcccttaccccacacacagtccaactcttccacctctggggaagatggagcaggtctttgggaagctcccacacccacctctgccactcttaacactaagtgagagttggggagaaactgaagccgtgtttttggccccccgaggctaaccctgatccatagtgctacctgcacctctggattctggattcacagaccaagtccaagcccgttcttacgtcgccataaaggcccccgaacggcattctcggtacttctgtttgtttttgtacattttattagaaaggactgtaaaaatagccacttagacacttttacctcttcagatgcaaatgtaaataaatttgtaatataaggaaatcttttgttttaatataagaatgagccctgtccaatttctgctgtaca

SEQ ID NO: 114678 - DNA, 932 bp, Homo Sapiens
atagccaactttgtacaaaaaagttggcttgaattgggaaattaggatgtcacagtaaagtgacattaagtgcagaagtgctctggttttctggtccgcagcagagttcacttgggtttcttcgtgaaagtacatgaggctgattgccccgaagtcacttcctgcagcatgtccttcaccccgggcttaccctgttgagtcgggggacccagcaggcggctctgcccctaccattacctactgtgtctgcctctcacagtgccccagtttttgtctaaaaatgaagcagaaacaaagctggctgcgtggctgtttgaggacttaggagctgttgtccggcaccccataccatttccctggggagggctcagcactagctgaaatccactttattccggtgtcggtggagtttctaatcagaacaaacgcctgccgccctcacttccgtttcagctggcgctcacatgggaagggggtgcacgctgcccagtggtggaatatttaaggcatcgcccctcagggagccgagcactgatttccacagccgggggcctgcactccacttttgaccatggggaaggaggtctctcttccgtggcccaaggacttctgaattgtgttcttggagaggaagcgtgctgggagcccagatagtggggctgagacactgtgtctcaggcacagaggtagtcgtgtcccttgtcccagatgaagaaagataaagagtgtttggtagtgatagatttggagatgcaaactttgacatctgaaatacaggaaattaacaaatactagtttttgaaacccttgaattgggaaattaagatgtcacagtaagtgacattaaatgcagaattgctccggttttctggtccgcagcagggttcacttgggtttcttcatgaaagtaaatagatgaggctgattgcccc

SEQ ID NO: 114679 - DNA, 661 bp, Homo Sapiens
gggggtaggcattgcccttcccctttggggctctttgggtgtatttaaaaaaatgttttggcagctcagtgtttatcatgtgggcatgggacaccatgtccatgtccccatattcctagggtacagcagcagtagatggctgcaacaaccttcctcctaccccagcccagaaaatatttctgccccaccccaggatccgggaccaaaataaagagcaagcaggcccccttcactgaggtgctgggtagggctcagtgccacattactgtgctttgagaaagaggaaggggatttgtttggcactttaaaaatagaggagtaagcaggactggagaggccagagaagataccaaaattggcagggagagaccatttggcgccagtcccctaggagatgggaggagggagataggtatgagggtaggcgctaagaagagtaggaggggtccactccaagtggcagggtgctgaaatgggctaggaccaacaggacactgactctaggtttatgacctctccatacccgttccacagcagctgggtacccacctccagcctcccatgtgagcctgtccttatgtatagtgtccaacctctgattctagcagtcaagtgtcttccccaatctttaatgtcccctgatccaacttttttgtacaaa

SEQ ID NO: 114680 - DNA, 332 bp, Homo Sapiens
aaaaaagttgggtaaccgacagtccagcagggccacagccctctcaccctggtactgcatgcacgcaatgctagctgcccctttcccgtcctgggcaccccgagtctcccccgaccccgggtcccaggtatgctcccacctccacctgccccactcaccacctctgctagttccagacacctccacgcccacctggtcctctcccatcgcccacaaaagggggggcacgagggacgagcttagctgagctgggaggagcagggtgagggtgggcgacccaggattccccctccccttcccaaataaagatgagggtactaaatttgtcttgg

SEQ ID NO: 114681 - DNA, 778 bp, Homo Sapiens
cttgtcatccggttggtggtataaaatgacgtctgtaagaccctctgttactttgctaaattcttcaagaatctgttccttggttttactcttaggaatagagcccacaaaaagcctattgttggcaactgagatgcagacaccaatatgttttccagaacgaatttcatgattattatacagtttaacagcctcctgagctgcttcttttgtacaaaaagtgacaaacgcataacctctattgagaccagtgagtggatccatcattagacgaagatcccatataggtccagctttctcaaataatggaacaagttcatcctcaaatagatctcttgggatctttcccacaaatatctcagtgccaacagaaggctgctgacctgaataaacggaatctggaggtggtcctccatacttcctctgtccagtggtcacatcaagtgtgtagcctgttctttccaagagtgccttaatttttgcctcatctggtcctttactagaatctgctactttggtcccttgtttttctctctgcctgtaagtcttcatgactccacataaaaaggcacttttgttctgaacatgagagagatcactgtctttaaactgttgaagaactgccaatgcaccgtcttcattgaattcttttaaagcttcaatagctctttcatctaaatcactatgtgcaactagccctccccgttgggctgaggcggagaaatcctgtccgatggtatcgggttgcgggaaacgcgtgctcgctgctccctgccaa

SEQ ID NO: 114682 - DNA, 912 bp, Homo Sapiens
ttggtgctcacttgcacagcttcagcatgatgcccagcagcgcctgtgaggccatggtggggcacgagatggcctctgactcttcaaacacttcactgccattctcaaacatgggaaatccaatgaacaccacacagttagggaaatcactttttcagtggcaggtggagcaggaagaaagcaaattggcaaatatttcccaagaccagtttctttcaaaggatgcagatggtgacacgttccttcatattgctgttgcccaagggagaagggcactttcctatgttcttgcaagaaagatgaatgcacttcacatgctggatattaaagagcacaatggacagagtgcctttcaggtggcagtggctgccaatcagcatctcattgtgcaggatctggtgaacatcggggcacaggtgaacaccacagactgctggggaagaacacctctgcatgtgtgtgctgagaagggccactcccaggtgcttcaggcgattcagaagggagcagtgggaagtaatcagtttgtggatcttgaggcaactaactatgatggcctgactccccttcactgtgcagtcatagcccacaatgctgtggtccatgaactccagagaaatcaacagcctcattcacctgaagttcaggagcttttactgaagaataagagtctggttgataccattaagtgcctaattcaaatgggagcagcggtggaagcgaaggatcgcaaaagtggccgcacagccctgcatttggcagctgaagaagcaaatctggaactcattcgcctctttttggagctgcccagttgcctgtcttttgtgaatgcaaaggcttacaatggcaacactgccctccatgttgctgccagcctgcagtatcggttgacacaattagatgctgtccgcc

SEQ ID NO: 114683 - DNA, 324 bp, Homo Sapiens
aaaaactttgttcaaaaaagttgggacagagtctactaggacatggctcagacctggggtgagttccgggtggtggagcgcacgatcaccatgaagcagttgctgcgggccctggaggagggccgcgtgcgggaagtctttggctcgggcaccgcttgccaggtctgcccagtgcaccgaatcctgtacaaagacaggaacctccacattcccaccatggaaaatgggcctgagctgatcctccgcttccagaaggagctgaaggagatccagtacggaatcaaagcccacgagtggatgttcccggtgtgaagctgcaggctg

SEQ ID NO: 114684 - DNA, 629 bp, Homo Sapiens
ttgggatggcggcagccagcgctggggcaacccggctgctcctgctcttgctgatggcggtagcagcgcccagtcgagcccggggcagcggctgccgggccgggactggtgcgcgaggggctggggcggaaggtcgagagggcgaggcctgtggcacggtggggctgctgctggagcactcatttgagatcgatgacagtgccaacttccggaagcggggctcactgctctggaaccagcaggatggtaccttgtccctgtcacagcggcagctcagcgaggaggagcggggccgactccgggatgtggcagccctgaatggcctgtaccgggtccggatcccaaggcgacccggggccctggatggcctggaagctggtggctatgtctcctcctttgtccctgcgtgctccctggtggagtcgcacctgtcggaccagctgaccctgcacgtggatgtggccggcaacgtggtgggcgtgtcggtggtgacgcaccccgggggctgccggggccatgaggtggaggacgtggacctggagctgttcaacacctaggtgcagctgcagccgcccaccacagccccaggccctgagacggcggccttcattgaccgcctggagatggaa

SEQ ID NO: 114685 - DNA, 436 bp, Homo Sapiens
ttgggtacgctgcggtggcaggcgtgctggccggcgtggagagccgccagggctctatcaaggggctggtgtactccagcaacttccagaacgtgaagcagctgtacgcgctggtgtgcgaaacgcagcgctactccgccgtgctggatgccgtgatctccagcgccggcctcctcagtgcgaagaagctgcagccgcacctggccaagggtaggggcggggcggggaagtgaaccccgacggtcagcgctttgtcatctggtttcagccccgctgccgtgcacggcgggactggagcaagtcgctcacctgaaatgagtatgagcagaccttccctgggttacgaattgagatgggatgaaaatgctttaacttcgagtgttttgaaggattaaataaccgaagtacaaagtagtagtagcggagacagtaagga

SEQ ID NO: 114686 - DNA, 912 bp, Homo Sapiens
ttgggccttacagcgcggggtcctcggcggcctgggtggctactgcccctgctgctgtcgtaggcgaggacggctgttagtgctgctgctgttggttcgtcgcggcggcgaaggaggaggaggaagagggcgaggcgacaagagaagaaggaggcaggcgcggcggcagcggcggcgccccgagccggcggaggcgaggggggggaagatggcggacgtgcttagcgtcctgcgacagtacaacatccagaagaaggagattgtggtgaagggagacgaagtgatcttcggggagttctcctggcccaagaatgtgaagaccaactatgttgtttgggaaacattggacaggtacatggtaaagcataaatcgcacttgagattctgaattatttggctcctccatttctggaaattgagactcaagctttatgaatttatcaagaacttaaaaatgaagaaggtcacagattgatcttttataagaccttatttgatgctttgtgcttcaaggagatgatacctgtcatccatataagcaaactttttggcttacaactatttttttaatattagccttctagtctgtaatggaaattgtatattttgatagaagttttttctccattggttaaattagcattacttaaaatttgtttctttagaaaataaatgcaggttataaatgtgtgtatatttagagattataaggctctctgagccatcttctgatttttcattgctctataattctttttactgaaaatactatgttatgaatggtattaaattttagtctctggaacatccaaaaccaagcaaagggatgtgactattttgaatgaatcagaatgtcaacttgtatgtacactatatctacacttactcattatttaaaagatatgaaaaatc

SEQ ID NO: 114687 - DNA, 912 bp, Homo Sapiens
tacaaaaaagttgggccgtgcgggcggggagggagggggaggagagaagaggaggtggagaaggcttgggctcgcgccgctgaagtcggcttacccgctggccgcctcctgacaagcgggagggatccgcggtggacccagggaagcggaggagcctggcggccaccccctcttcctcacttccctgtactctcatcgctctcggcctccgacacgaaaaggaagcaaatgagctgatggaagatctgtttgaaactttccaagatgagatgggattctccaacatggaagatgatggcccagaagaggaggagcgtgtggctgagcctcaagctaactttaacacccctcaagctctacggtttgaggaactactggccaacctactaaatgaacaacatcagatagcgaaggaactatttgaacagctgaagatgaagaaaccttcagccaaacagcagaaggaggtagagaaggttaaaccccagtgtaaggaagttcatcagaccctgattctggacccagcacaaaggaagagactccagcagcagatgcagcagcatgttcagctcttgacacaaatccaccttcttgccacctgcaaccccaatctcaatccggaggccagtagcaccaggatatgtcttaaagagctgggaacctttgctcaaagctccatcgcccttcaccatcagtacaaccccaagtttcagaccctgttcaaccctgtaacttgatgggagctatgcagctgattgaagacttcagcacacatgtcagcattgactgcagccctcataaaactgtcaagaagactgccaatgaatttccctgtttgccaagcaagtggcttggatcctggccacaagcaaagttttcatgtatccagagttacttccagtgtgttccctg

SEQ ID NO: 114688 - DNA, 985 bp, Homo Sapiens
tacaaaaaagttggattcgagcagacggctgctgagagccatcccgcgccaggttgcccagacactgcaggcagatgtgctctggcagatgggatatacaggtgctaatgtaagagttgctgtttttgacactgggctgagcgagaagcatccccacttcaaaaatgtgaaggagagaaccaactggaccaacgagcgaacgctggacgatgggttgggccatggcacattcgtggcaggtgtgatagccagcatgagggagtgccaaggatttgctccagatgcagaacttcacattttcagggtctttaccaataatcaggtatcttacacatcttggtttttggacgccttcaactatgccattttaaagaagatcgacgtgttaaacctcagcatcggcggcccggacttcatggatcatccgtttgttgacaaggtgtgggaattaacagctaacaatgtaatcatggtttctgctattggcaatgacggacctctttatggcactctgaataaccctgctgatcaaatggatgtgattggagtaggcggcattgactttgaagataacatcgcccgcttttcttcaaggggaatgactacctgggagctaccaggaggctacggtcgcatgaaacctgacattgtcacctatggtgctggcgtgcggggttctggcgtgaaaggggggtgccgggccctctcaggaccagtgttgcttctccagtggttgcaggtgctgtcaccttgttagtgagcacagtccagaagcgtgagctggtgaatcccgccagtatgaagcagccctgatcgcgtcagcccggaggctccccggggtcaacatgtttgagcaaggccacggcaagctcgatctgctcagagcctatcagatcctcaacagctacaagccacaggcagtttgagccccagctacataaatctgactgagtggtcctacatgtggccctactgctcccagccc

SEQ ID NO: 114689 - DNA, 648 bp, Homo Sapiens
ttgcagggacccaccccagacttgtgagtgcgagtgaagcaggagcagccctggccatcactgtttctttgacgtgtacatcccatcctgagatgcagctgggctgggagccgccacctgggtggatctgattcctggatttccccatcctggggacaggtgacccatcctgttctcctccttaggtccatgtgaaatctgaggtccttgctgtcaagttgtcacaagaaataaactacgcaaagagcctctactatgaacagcagcttatgttaagactcagcgaaaaccgagagcagctggagctggactcctgaagccccgctgctgagatgggcgctcccgacacagcgcagacccaccaggaggaaagaggcccagctctcagctgacgatggaggcagaaccggagtcgggtttggggaagttgtcaaggaatgagggaaagtaaatcctcatgaggaaaagtacaaatggaaatcgtattaatttgtgaggcagggagttattttagattatgggaaataatttttaaaggtattggttaaaataacgtttaaaaacatgtactgagatgaatctaattttagattgccctgtattttgttaacatgtatatatgtacaacagtgtgtttgtaaatatata

SEQ ID NO: 114690 - DNA, 914 bp, Homo Sapiens
actttgtacaaaaaagttggtttttctggcaccaagtttaattcttcttcgtacttctggtagtgacagatctgcaggacagatttatctgttgaatgctcttgggcaggaaaaccatgtaaaacctctggaagcagcatcaggacagcagagcagagcccccgtcctcactgctcacttgcacagaaactccatctggactcggatgcttttactgaagacccatctagcttcaatcatctttagagtccatccattctggagagacctggcgtttgcagttgcctcctgtggccgtgtttttctgtcattctgttcccaggccttctattcaggcggttgaagggtgtggactttggaatggggtttgctgttcttcgggaacttgcttcctttccctggctggtgctgtcaggaaggaccatctgaaggctgcaatttgttcttagggaggcaggtgctggcctggcctggatcttccaccatgttcctgttgctgccttttgatagcctgattgtcaaccttctgggcatctccctgactgtcctcttcaccctccttctcgttttcatcatagtgccagccatttttggagtctcctttggtatccgcaaactctacatgaaaagtctgttaaaaatctttgcgtgggctaccttgagaatggagcgaggagccaaggagaagaaccaccagctttacaagccctacaccaacggaatcattgcaaaggatcccacttcactagaagaagagatcaaagagattcgtcgaagtggtagtagtaagctctggacaacactccagagttcgagctctctgacattttctacttttgccggaaaggaatggagaccattatggatgatgaggtgacaaagagattctcagcagagaactggagtcctggaac

SEQ ID NO: 114691 - DNA, 738 bp, Homo Sapiens
cagcaacagaaagcaggacgtgagacttctacctgctcactcagaatcatttctgcaccaaccatggccacgtttgtggagctcagtaccaaagccaagatgcccattgtgggcctgggcacttggaagtctcctctcggcaaagtgaaagaagcagtgaaggtggccattgatgcaggatatcggcacattgactgtgcctatgtctatcagaatgaacatgaagtgggggaagccatccaagagaagatccaagagaaggctgtgaagcgggaggacctgttcatcgtcagcaagttgtggcccactttctttgagagaccccttgtgaggaaagcctttgagaagaccctcaaggacctgaagctgagctatctggacgtctatcttattcactggccacagggattcaagtctggggatgaccttttccccaaagatgataaaggtaatgccatcggtggaaaagcaacgttcttggatgcctgggaggccatggaggagctggtggatgaggggctggtgaaagcccttggggtctccaatttcagccacttccagatcgagaagctcttgaacaaacctggactgaaatataaaccagtgactaaccaggttgagtgtcacccatacctcacgcagagaaactgatccagtactgccactccaagggcatcaccgtttacggcctacagcccctgggctctccaggatagaacctttgggccaagccagaaa

SEQ ID NO: 114692 - DNA, 884 bp, Homo Sapiens
ttttttcttcggtggtggaaggaagggcaaaggtgactgtgtaaaagcaaagatgtgggaagtagaaatattgtttactagacattataaagtcatggtgaaaagaaagcttcgattaatgcatagcctaagggggaaaagactacactccaacttcagaaaattaatttagaaggataggggaagagattaagtaattgcagtttaacatgaaaaatgcacatgtgatagaatggagcacaatggaggattcataaaacatgctcatcagaaaaatctgttaagtcgactttgtccagattcagaaagagtaagtttatcaacatctggcatccctcatactttgtgaagatagatcttctactgcttaattatgagaaattattttattcaaagaaaggagctcttaatcttttgataaaacaaaataaaggagtagagagctgactagatgtcaagtgcttgctagaaatgatttttaaaatgcttctacacgtaaaatgtactgacaaattttggtaaaccatttaaaaataagaattagttttaaaatcttggagaaaatgcctttttgcccacatttaaaactgaaaatcaattttactatagataggagttctgtggagtgtacaaaattccttttagagatcaaatggccatcccagatagatatcatgtttcacaggcattacttttagtcaccctcaagtttcagccatgggaccaaaatttagtgttctgtgccatgtggtcacagggtcattggtttcacatcatggcttaagaaaatactggcattttgtttcttacgaagtaagtcctaccttgtgcatacaagcaaaaagaaaaaggaagaaaacaggggagggaaaggcgcaagaagc

SEQ ID NO: 114693 - DNA, 761 bp, Homo Sapiens
ttgtacaaaaaagttgggactttgagaatggacttgataagtggatgtctattataggagaagtatgtgctgccaatgtacaagaaggcagcattgtaggattaacattcttgtctactgtatattatcttggaaggctcttgttaatatgttacacttaatattctccacagttacctttagagagaatttatgagaagttattttctgatgcagaggtttttaggctgtgatttcatcaaaagtccttttagcattctacctcaaagggacacttagtatgcctaaaatttattcacttagttttccttttttatttgaaaaaatacatgacatgtaatctttttttcttgaattctttctcagattttaaagtactatattaaagaaaaaaattaatgtctaaagcctagcattcttgcagaaccctatactaacatgtaatggggagagggtggggcagatgagtagagaaacagattcaagcctcaagcttccaaagcatttttataaatggaaaatccttaaattatgaaacagcttgatatagtgtcctttttttaaaattcagaactttttttattgataatggagattgctgtttgagtttttaagcttaatctagaacagaggagtattaacagtaatgctgtgctgcattatttaagactatcagcaaattatttgatagattgttcttacacttgtattccgattacagaaccatcatgagtgtggaataaaaacagaataaatccttt

SEQ ID NO: 114694 - DNA, 887 bp, Homo Sapiens
ttggggcgggcaagaggagcggtgtggagaaggaggtggagaagctgctgcccgacctggaggtcctgcgggcccagaagcccacggtggagtacaaggaggtgacccaggaggtggtgaggcatgagaggagccccgaggtgctgcgtgagatcgaccgcctgaaggctcagctcaacgagctcgtcaacagccacgggcgctcccaggagcagctcatccgcctgcagggtgagcgcgacgagtggaggcgcgagcgggccaaggtggagaccaagacggtgagcaaggaggtggtgcgccacgagaaggacccggtgctggagaaagaagcagagcggctccgccaggaggtgcgggaggcggcccagaagaggcgggccgcggaggacgcggtgtacgagctgcagagcaagcgcctgctgctggagaggaggaagcccgaggagaaggtggtggtgcaggaggtggtggtcacccagaaggacccgaagctgcgcgaggagcacagccggctgagcgggagcctggatgaggaggtgggccggcggcgccagctagagcttgaggtgcagcagctgcgggccggcgtggaggagcaggagggcctgctcagcttccaggaggaccgcagcaagaagctggccgtggagagggagctgcggcagctgaccttgaggatccaggagctcgagaagcggcctcccacggtgcagagaagatcatcatggaggaagtggtcaagctggagaagacccggacctggagaagtccacggaaagccctgcggtgggacctggaccaggagaaagacccaggtaaccgagctgaatcggggagtgcaagaacctgcaggtccagattgacgtcctccagaaagccaaatc

SEQ ID NO: 114695 - DNA, 863 bp, Homo Sapiens
ttgggttgggcggatgttgtgaaccgggtcgcggcggccgaggctcgggggacccgctgcagctgggaggggagctgtccaggaggccggcctgggaatgagcacaggcctgcggctggcagagagccgggtcgagccagccctggagaagcaggcccagctggaggagcagctgcgggacaaggtgctccacgagaaggacctgtcccagcagcagatgcaaagcgacctggacaaggctgacctcagtgccaggagggtccctggtgggtgctgcatgaggcaggcgtcactgcagaagagtgacagagctgggcctggcagtgaagcgtctacagaagcagaatctggagaaggatcaggtcgacaaggacctcaccgagaagcttgaggccctggaatccctgcggctacaggagcaggcggccctggagacagaggacagagaggggctacagcggagcctaagggacctggcacaggccgtcctgtctgacgctgagagcggcagcctgcgtccaacagcgtccgaccgcagcctgcgggggctctcgggccagcggaccccgtctccaccgcggcgctcctcgccgggccgaggccgttcgccccgcagaggcccctccccggcctgctcagacgactccacgctcgcttgccctgattctctccgccctgcacttttgccagctgaagtccagggagaagagcaacctggtccacagcctgcatgtggcccagcagcaagccgaggagctgccgcagagcgggagaagctgcaagttgcccaggaggagctgcagcgccagcgggaccggctggaggagagcaagaagagccggtgcagaatggcgcacgggttc

SEQ ID NO: 114696 - DNA, 845 bp, Homo Sapiens
acaaaaaagttgggtggtgacaactggcggcagcgcgccgcgggcccgagacttagtctcgggccgccatggccagcgtccacgagagcctctacttcaatcccatgatgaccaatggggttgtgcacgccaatgtgttcggcatcaaggactgggtgacgccgtacaagatcgcggtgctggtgctgctgaacgagatgagccgcacaggcgagggcgccgtcagcctcatggagcggcggaggctcaaccagctgctcctgcccctgctgcagggcccagatattacactgtcaaaactttacaagttaattgaagagtcttgtccacagctggcaaattcagtgcagatcagaatcaaactgatggctgaaggcgagttgaaggatatggaacagttttttgatgacctttcagattctttctctggaactgaaccagaggttcacaaaacaagtgtagtaggtttgtttctgcgtcacatgatcttggcctacagtaagctttctttcagccaagtgtttaaactgtacactgcccttcagcagtacttccagaatggtgagaaaaagacagtggaggatgctgatatggaactgaccagtagagatgagggtgaaagaaaaatggaaaaagaagaacttgatgtatctgtaagagaagaggaggtatcttgcagtgggcctctgtcccaaaaacaagcagaattttttctttctcaacaggcttctttgctaaagaatgatgagactaaaccctcactccagcttccttgcagaagaattaaacaatttgttgaaatttaatcctgattttgctgaagcgcattatctcagctacttaaa

SEQ ID NO: 114697 - DNA, 947 bp, Homo Sapiens
ttgggacggagccgctgtcaactctccaactcagctcagctgatcggttgccgccgccgccgccgccagattctggaggcgaagaacgcaaagctgagaacatggacgttaatatcgccccactccgcgcctgggacgatttcttcccgggttccgatcgctttgcccggccggacttcagggacatttccaaatggaacaaccgcgtagtgagcaacctgctctattaccagaccaactacctggtggtggctgccatgatgatttccattgtggggtttctgagtcccttcaacatgatcctgggaggaatcgtggtggtgctggtgttcacagggtttgtgtgggcagcccacaataaagacgtccttcgccggatgaagaagcgctaccccacgacgttcgttatggtggtcatgttggcgagctatttccttatctccatgtttggaggagtcatggtctttgtgtttggcattacttttcctttgctgttgatgtttatccatgcatcgttgagacttcggaacctcaagaacaaactggagaataaaatggaaggaataggtttgaagaggacaccgatgggcattgtcctggatgccctagaacagcaggaagaaggcatcaacagactcactgactatatcagcaaagtgaaggaataaacataacttacctgagctagggttgcagcagaaattgagttgcagcttgcccttgtccagacctattttctgcttgcgtttttgaaacagaggtgcacgtaccacccaattatctatggcagcatgcatgtataggccgaactattatcagctctgatgtttcagagagaagacctcagaaaccgaaagaaaaccaccaccctcctattgtgtctgaagtttcacgtgtgtttatgaaatctaatgggaaatggatcacacgatttcttaaagggaatt

SEQ ID NO: 114698 - DNA, 635 bp, Homo Sapiens
tttgtacaaaaaagttggtcatcgtgcagcacccggagactgtgggctcggggcctcagctcttccagaccttcactgtgcaccgcagccctgtcaccaagatcatgctgtcggagaagcacctcatctcagtctgtgccgacaacaaccacgtgcggacatggtctgtgactcgcttccgcggcatgatttccacccagcccggctccaccccactcgcttcctttaagatcctggctctggagtcggcagatgggcatggcggctgcagtgctggcaatgacattggcccctacggtgagcgggacgaccagcaagtgttcatccagaaggtggtgcccagtgccagccagctcttcgtgcgtctctcatctactgggcagcgggtgtgctccgtgcgctccgtggacggctcacccacgacagccttcacagtgctggagtgcgagggctcccggcggctcggctctcggccccggcgctacctgctcactggccaggccaacggcagcttggccatgtgggacctaaccaccgccatggacggcctcggctaggcccctgcaggtggcctgacggaacaagagctgatggaacagctggaacactgtgagctggccccgccggctccttca

SEQ ID NO: 114699 - DNA, 717 bp, Homo Sapiens
ctttgtacaaaaaagttggccaagtttatctcatcctttatttttaatcacttttttctatgatggatatgaaaaattcaaggcagtatgcacagaatggacgagtgcagcccagccctcatgcccaggatcagcatgcgcatctccatgtctgcatactctggagttcactttcccagagctggggcaggccgggcagtctgcgggcaagctccggggtctctgggtggagagctgacccaggaagggctgcagctgagctgggggttgaatttctccaggcactccctggagagaggacccagtgacttgtccaagtttacacacgacactaatctcccctggggaggaagcgggaagccagccaggttgaactgtagcgaggcccccaggccgccaggaatggaccatgcagatcactgtcagtggagggaagctgctgactgtgattaggtgctggggtcttagcgtccagcgcagcccgggggcatcctggaggctctgctccttagggcatggtagtcaccgcgaagccgggcaccgtcccacagcatctcctagaagcagccggcacaggagggaaggtggccaggctcgaagcagtctctgtttccagcactgcaccctcaggaagtcgcccgccccaggacacgcaaggaccaccctaaatggctgggttggctgtctcaggacacatgaatacgtttgtgaccatcc

SEQ ID NO: 114700 - DNA, 925 bp, Homo Sapiens
ttgggccgtggcgggaaaacggcggccgcggcgtctcctccgggacgctgaggggcccgaggagaccgtgaggctctggcctgcagctcgcgccgccatggacgctgccgaggtcgaattcctcgccgagaaggagctggttaccattatccccaacttcagtctggacaagatctacctcatcgggggggacctggggccttttaaccctggtttacccgtggaagtgcccctgtggctggcgattaacctgaaacaaagacagaaatgtcgcctgctccctccagagtggatggatgtagaaaagttggagaagatgagggatcatgaacgaaaggaagaaacttttaccccaatgcccagcccttactacatggaacttacgaagctcctgttaaatcatgcttcagacaacatcccgaaggcagacgaaatccggaccctggtcaaggatatgtgggacactcgtatagccaaactccgagtgtctgctgacagctttgtgagacagcaggaggcacatgccaagctggataacttgaccttgatggagatcaacaccagcgggactttcctcacacaagcgctcaaccacatgtacaaactccgcacaaacctccagcctctggagagtactcagtctcaggacttctagagaaaggcctggtgcaggcggcttgctgggggatgtgagcgctcaggacgtgatgaggtactcgtggttctggagctctagaaacacttctgatgcatgaaaatgtgtgatggtgcaaggaatggattcaagatgttgttggagaaacaagtttgtgattagtccttaaaacttagctccctgggacattcctcaattccacatctgtttctaaaaaccagccctttttccccccacttttgagaaataaaaaaggccttaggtaaataa

SEQ ID NO: 114701 - DNA, 972 bp, Homo Sapiens
ctttgtacaaaaaagttggcgttgccaggatcccaggacgctggtatcctgcatagatttcaggtacatcactgatgtcctgactgaggaggatgccctagaaatactgcagaaaggtcaaattggtaaaaaagaaagagagaagcaaatgctggcacaaggataccctgcttacacgacatcgtgcgcctggctggggtactcagatgacacgttgaagcagctctgtgcccaggcgctgaaggatggctggaccaggtttaaagtaaaggtgggtgctgatctccaggatgacatgcgaagatgccaaatcatccgagacatgattggaccggaaaagactttgatgatggatgccaaccagcgctgggatgtgcctgaggcggtggagtggatgtccaagctggccaagttcaagccattgtggattgaggagccaacctcccctgatgacattctggggcacgccaccatttccaaggcactggtcccattaggaattggcattgccacaggagaacagtgccacaatagagtgatatttaagcaactcctacaggcgaaggccctgcagttcctccagattgacagttgcagactgggcagtgtcaatgagaacctctcagtattgctgatggccaaaaagtttgaaattcctgtttgcccccatgctggtggagttggcctctgtgaactggtgcagcacctgattatatttgactacatatcagtttctgcaagccttgaaaatagggtgtgtgagtatgttgaccacctgcatgagcatttcaagtatcccgtgatgatccagcgggcttcctacatgcctcccaaggatcccggctactcaacagaaatgaaggaggaatctgtaaagaaacaccagtatccagatggtgaagtttggaagaaaactccttcctgctcaagaaaattaagtgctcagccccaacaactttttttctttctgaa

SEQ ID NO: 114702 - DNA, 906 bp, Homo Sapiens
acaaaaaagttggcataaatgattgttgactctggtctgtttctgacacctttccagaaaaaagtcaattgttcaggtacaccaaagaggaagaagagctgtggaggccaccctctacaaagctttatagaacttctggatctaactcacaaacaagcttccagaagagactagagaccttaggccaggagatgaaggagttcagtagcaaagtcacacctgtccaattccctgagctttgctcactcagctaatgggatggcaaaggtggtggtgctttcatcttcaggcagaagcctctgcccatccccctcaagggctgcaggcccagttctcatgctgcccttgggtgggcatctgttaacagaggagaacgtctgggtggcggcagcagctttgctctgagtgcctacaaagctaatgcttggtgctagaaacatcatcattattaaacttcagaaaagcagcagccatgttcagtcaggctcatgctgcctcactgcttaagtgcctgcaggagccgcctgccaagctccccttcctacacctggcacactggggtctgcacaaggctttgtcaaccaaagacagcttcccccttttgattgcctgtagactttggagccaagaaacactctgtgtgactctacacacacttcaggtggtttgtgcttcaaagtcattgatgcaacttgaaaggaaacagtttaatggtggaaatgaactaccatttataacttctgtttttttattgagaaaatgattcacgaattccaaatcagattgccaggaagaaataggacgtgacggtactgggccctgtgattctcccagcccttgcagtccgctaggtgagaggaaaagctctttacttccggccctggtcaggacttctgggttatggga

SEQ ID NO: 114703 - DNA, 944 bp, Homo Sapiens
aactttgtacaaaaaagttgggtaaaatataccacagatgagtttgatcaacgaattctttatgaatacttagcagaggccagtgttgtgtttcccaaagtctttcctgttgtgcataatttgttggactctaagatcaacaccctgttatcattgtgccaagatccaaatttgttaaatccaatccatggaattgtgcagagtgtggtgtaccatgaagaatccccaccacaataccaaacatcttacctgcaaagttttggttttaatggcttgtggcggtttgcaggaccgttttcaaagcaaacacaaattccagactatgctgagcttattgttaagtttcttgatgccttgattgacacgtacctgcctggaattgatgaagaaaccagtgaagaatccctcctgactcccacatctccttaccctcctgcactgcagagccagcttagtatcactgccaaccttaacctttctaattccatgacctcacttgcaacttcccagcattccccaggaatcgacaaggagaacgttgaactctcccctaccactggccactgtaacagtggacgaactcgccacggatccgcaagccaagtgcagaagcaaagaagcgctggcagtttcaaacgtaatagcattaagaagatcgtgtgaagcttgcttgctttcttttttaaaatcaacttaacatgggctcttcactagtgaccccttccctgtccttgccctttccccccatgttgtaatgctgcacttcctgttttataatgaacccatccggtttgccatgttgccagatgatcaactcttcgaagccttgcctaaatttaatgctgccttttctttaactttttttcttctacttttggcgtgtatctggtatatgtaagtgttcagaacactgcaagaaagtgggaggtcaggaaccttttaac

SEQ ID NO: 114704 - DNA, 829 bp, Homo Sapiens
tttttctttttcttgcagggccagagaccccagcagcttcctgtttggcccctggccctggctctctctggctcctatagccaggccccccagactttcacctcggcctgggagaggaaagtgggggcccgggaggggcccagaggcctgagaggctccccgcctgggtgggccgcagcccctcactggctgtgccaccttcacttgcacggggaaggctgggccagccggggtgctggcggtagtgtaagaggctggagtggggcccccatagggagacgctgggagcggcgaggctggatttggcttcagggagcccgtgcggtaggcaggaggtggcgggggctcatatgcctgtcggtctggtcgccgtgacgcatgaccccgacccccattcagctcggccagcgtgctgctcagcaagtctatctcggcgtccaggcttccagggcgaaggccccccctgtctgcagggagcccctgcgtgtgctggagtactccatgggaccccacccacgccggcccccgatcctccggtccccctggggcctggtaacactgctcagatggaagggggcaaaaattgaccctggggtggggctggagtgctgctccgtgggccggtggtggccccggggtgccgcgggggatcgccctcccctgaggggctctggcgggctccggctgcttcgggggcagccaggtgggccccgacatggcctggaaagggggactccagacagcggtcttgaagccccgagcctctggccttcaccccctcttccgtcccgcaccgtcgtttgggactccccaacttttttgtacaaag

SEQ ID NO: 114705 - DNA, 956 bp, Homo Sapiens
tacaaaaaagttggcacccagagctcctgcccctgcgccccctgggaccgtcacccaggtggatgttagaagtcgagtggcagcctggtctgcatgggcagccgaccaaggggactttgagaaaccaaggcagtatcatgagcaggaagaaacacctgagatgatggcagcccgcattgacagagatgtgcaaatcttaaaccacattttggatgacattgaattttttatcacaaaactccaaaaagcagcagaagcattttctgagctttctaaaaggaagaaaaacaagaaaggtaaaaggaaaggaccaggagagggtgttttaacgctgcgggcaaaacctccacctcctgatgaatttcttgactgtttccaaaagtttaaacacggatttaaccttctggccaaactgaagtctcatattcagaatcctagtgctgcagatttggttcactttttgtttactccattaaatatggtggtgcaggcaacaggaggtcctgaactagccagttcagtacttagtcccctattgaataaggacacaattgatttcttaaattatactgtcaatggtgatgaacggcagctgtggatgtcattgggaggaacttggatgaaagccagagcagagtggccaaaagaacagtttattccaccatatgttccacgattccgcaatggctgggagcccccaatgctgaactttatgggagccacaatggaacaagatctttatcaactggcagaatctgtggcaaatgtagcagatcatcagcgcaaacaggaaataaaaagattatccacagagcattccagtgtatcagagtatcatccagccgatggctatgcgttcagtagcaacatttacacaagaggatcccacctggaccaaggggaagctgctgttgcttttaagccaacttctaatcgccatatagatagaaattatg

SEQ ID NO: 114706 - DNA, 907 bp, Homo Sapiens
ttggttcggttgtcgcccgttggccgcgcggcgccgcgctcggcggccgccattgcagtgcgagggctggaggcctggcagaatgggtgctgatggagctacagggggagatcgaggctcgctacagcactggattagctggaaacctcctgggagacctacattacaccactgagggaatccctgtgctgatcgtggggcatcatatcctgtatgggaaaatcatccacctggagaaaccttttgcagtccttgtcaaacacactcctggggatcaggactgtgatgagcttggccgcgagactggcacccggtacctggtgacagcactcatcaaagacaagatccttttcaaaacccgccccaagcccattatcaccagcgtccccaagaaagtatgaaagaacctcggattttccctagagagcggccaactccttggactcgtgctccgctgccacctcgaggacggctcgacggttccctgggaccacaggggggtcctgttctgaacacaggccacccactgggtgtgaactcggatcccttccttatggcggccggttctcttggtggaaatctgaccccatttccaaggaacccatctccttttccagcttcatcaggctcattggcttcaaatccagcacctttcccggctggtgctcgtgacccaagtatggcttcttttccaagagggatgaatcccactggcacaggtgcagtttctttcccaaagcctggtggcctcttggggccaggcccaggcccaggccccaccctaaaccctaggacaggggctctgccaggcccagggcctctgtctaaccccaggttaggggtctcccaggaccaggtcctatgtccaacccaagggcagtggtctcctgggagcagtcctgacccc

SEQ ID NO: 114707 - DNA, 867 bp, Homo Sapiens
gggcatttcatgtactcgtcccacaccctcccgctcatcaaacacccggatcgccttcgatagcatccagacattttatctctcggtcggtggaagatacgggtgagcacccaccatgcggagcggcactgtgaggatgaggatgaaggggaaggccagggaggcagctgtggacatgacggcccagagcagggccaggcagagcagctgcagggccgtgaacaggtgcatacggagggtccggaccttcttgacgtaagtgacatctgggtggtgttttgggcggcatgagcagcagatgcagccgctcatagaactggatcccgttaagggaggtgactcccatgtacaggaaaattccaaagagcacggccagggggatctgccggagcagatccccgataactatggagaggcccacaagcagggcaaccagcagccccgtcacccgctgctccttgacttcctgaatcttgggcttgtccccaggtgccacagccttgctcatgacagtgagcgcgttggcgtgagtgacagagcggacagtggcagcagccaaccagggcaggccaaagagggcacagatgccgcccatggccacgatgagcagcaggtccaggtggaagccggagcccttctgcagcatgcgctccttcttggagatgatgagcgtggtgatctgtgtctccatgaagatgagaatgaagaccaggatggcgggcagcaggctggcaaccatcatccacacagggaaggggctcttctctcccagggggttgatgacccagcccctcttttctggggcagtcaccgagaatccactgggaacgcttaggcttctgggtatagccaacttttttgtacaaa

SEQ ID NO: 114708 - DNA, 763 bp, Homo Sapiens
tgccaccagcgctccagaagctgtggatacaactggctgaggggtgggctcgggcccgcagagtagacacagctccaggctcggcagcagagtcagggtcaggagccggtgtgggaccgtggggctcccgtgcggcaggtacaccgggtagtcgcgagcggtctgcggcggcagggaccccaccagccaggggagcagcacggcctcgggcgtccccagccgccaccaaccctctgttgctgccaccacccggccggacaccaccagactgacgaaggtcgtgcccgcggcctcagcgaacccggagagggcttcctgcaagagggacccctctggaggaatcacgcagtccacacactgggtcaggtccccgatgagctccgagtcccccaggaagctgtcgatgaggcaataactggccctcaagtccttcttcagtctctccacgttgcggatattggtcagttcttcaagtcccacaagaaggaccatggctccaaacaccatttggagtagtctctccagcctcagctcagagatgcccacctcagatgacagaacaatgagggtgatgctgtcatggaagcttttccacaccacagtcgtgttctcggtcctcgcagagctcagctgcacctccagattctgcccaaacatgtggactccattgagggaaccgatgacagagaacgggaggtggggactgtcagtgcgggtcttggagcatggcggtaatcagagtaactcggcctgtgctccccaa

SEQ ID NO: 114709 - DNA, 744 bp, Homo Sapiens
actttgtacaaaaaagttgggcctaaccggcctcatgactagccttgttgccgtcgagttggagaaagtggtgctgaaatccacctttaaccggctgggtggtctgcagtttgacaaggagctgaggtcgctcattgcctaccttaccacggtgaccacctggaccatccgagacaagtttgcccggctctcccagatggccaccatcctcaatctggagcgggtgaccgagatcctcgattactggggacccaattccggcccattgacgtggcgcctcacccctgctgaagtgcgccaggtgctggccctgcggatagacttccgcagtgaagatatcaagaggctgcgcctgtagctgcctggatgagcacacctggctcatcacacttgcaggcctgttccctaaggggccccagccaaggagctgagcgaggctgtctggcttgggggagatctgacagcccagacctttctacggctggcagcagagaaacaaagtctggacccactccatgctctgccctcagacctggccaggtgatgctctgggggcagcatctccccaccgagagaagcgggctcctaatgaggtgggaaagccacggcaggcagcgagcaaccctagcccagctttctgcatggatggtcagtctcttgccctcaacactacagcaaaacaagctaccccctgccagtcctagacaacttgggtacttctgggggacctaccagttaggcttg

SEQ ID NO: 114710 - DNA, 707 bp, Homo Sapiens
aactttgtacaaaaaagttggcgaggacatcatcgacaacctgccctgtcgcttcaagtaccgcacagtggtgccctgtgactttggcctcagcactgaggagatcctcgctgctgacgataaggagctgaaccggtggtgctccctaaagaagacctgcatgtacaggtcagagcaggaggagctgcgggacaagcgggcgtacagccagaaggcccagaactcatggaaaaagcggcaggtcttcaagtcactctgccgagaagaggcagagacacctgcggaagccacagggaagccacagagagatgaagccggcccacagaggcagctgccagcccttgatggcagcttgatggggccggagagtcccccagcacaggaagaggaagcccctgtatcaccccacaagaagccagccccccagaagcggaggagggccaagaaggcacggctgctgggccccactgtgatgcttggtggatgcgagttcagccgccagagactgcaggcctttggcctcaaccccaaacggctgcacttccgccagctgggccggcagcggaggaaacaacaggggcccaagaacagctcctgagcaccagggagcaggcaggggcctcaagctcctctcctcaaatcaagccctggacaggtctcgcacccacaagtactatctgctgcagagatcctctcatctgtggcca

SEQ ID NO: 114711 - DNA, 916 bp, Homo Sapiens
ttgggcagcggagacagaggcggaagctgcagccctagaggtcctggctgaggtggcaggcatcttggaacctgtaggcctgcaggaggaggcagaactgccagccaagatcctggttgagtttgtggtggactctcagaagaaagacaagctgctctgcagccagcttcaggtagcggatttcctgcagaacatcctggctcaggaggacactgctaagggtctcgaccccttggcttctgaagacacgagccgacagaaggcaattgcagctaaggaacaatggaaagagctgaaggccacctacagggagcacgtagaggccatcaaaattggcctcaccaaggccctgactcagatggaggaagcccagaggaaacggacacaactccgggaagcctttgagcagctccaggccaagaaacaaatggccatggagaaacgcagagcagtccagaaccagtggcagctacaacaggagaagcatctgcagcatctggcggaggtttctgcagaggtgagggagcgtaagacagggactcagcaggagcttgacagggtgtttcagaaacttggaaacctgaagcagcaggcagaacaggagcgggacaagctgcagaggtatcagaccttcctccagcttctgtataccctgcagggtaagctgttgttccctgaggctgaggctgaggcagagaatcttccagatgataaaccccagcagccgactcgaccccaggagcagagtacaggagacaccatggggagagaccctggtgtgtccttcaaggctgttggtctacaacctgctggagatgtaaatttgccatgacttcctggaggacagcagcatggagaaagatcctagaaaaggtcagacccaactcagccttggtgtccctggactgcaagtgtg

SEQ ID NO: 114712 - DNA, 903 bp, Homo Sapiens
actttgtacaaaaaagttggagaatccgtgaacatggcgaacgaggttatcaagtgcaaggctgcagttgcttgggaggctggaaagcctctctccatagaggagatagaggtggcacccccaaaggctcatgaagttcgaatcaagatcattgccactgcggtttgccacaccgatgcctataccctgagtggagctgatcctgagggttgttttccagtgatcttgggacatgaaggtgctggaattgtggaaagtgttggtgagggagttactaagctgaaggcgggtgacactgtcatcccactttacatcccacagtgtggagaatgcaaattttgtctaaatcctaaaactaacctttgccagaagataagagtcactcaagggaaaggattaatgccagatggtaccagcagatttacttgcaaaggaaagacaattttgcattacatgggaaccagcacattttctgaatacacagttgtggctgatatctctgttgctaaaatagatcctttagcacctttggataaagtctgccttctaggttgtggcatttcaaccggttatggtgctgctgtgaacactgccaagttggagcctggctctgtttgtgccgtctttggtctgggaggagtcggattggcagttatcatgggctgtaaagtggctggtgcttcccggatcattggtgtggacatcaataaagataaatttgcaagggccaaagagtttggagccactgaatgtattaaccctcaggattttagtaaacccatccaggaagtgctcattgagatgaccgatggaggagtggactattcctttgaatgtattggtaatgtgaagtcatgagagcagcacttgaaggcatgtcacaagggctggggcgtcagcgtc

SEQ ID NO: 114713 - DNA, 562 bp, Homo Sapiens
ccacctgctccgccatgccttctcggatcggatcggcacatccaggcttctcctcctcccgaggaaccgctggtgacgcctgagtccatgtgagtaggatcctgaatgaggctttatctctggctgttcgtcccatcctcctccgtggcagcacctccctcacccagcctggatgggaccaacgactgagagagccggaggcagaaaggtgagggtgaccatatcctgaactgtgaaacgaatgggactctgggcctgtagctgccaagcaggtggcaggtgctccaggctgtgatctgcaacctctgacccctgacattgacctcctaccctgacccctgcctgaccaacccatgtatgaacaggaggcacagcccccacggggccgggggctgcccccggacatgctggcaaagcaggtggagctgtggtggtcccagcagccggcttgctcggcgctctgctacatcgtgggcgtgggcctcgtggcaggctgtagggcgggcggcgtggcactactgtccacatccaacacccgctcacgtgaatggcggctagcaac

SEQ ID NO: 114714 - DNA, 928 bp, Homo Sapiens
caactttgtacaaaaaagttgggatggcggcggtggtcgcactctccttgaggcgccggttgccggccacaacccttggcggagcctgcctgcaggcctcccgaggagcccagacagctgcagccacagctccccgtatcaagaaatttgccatctatcgatgggacccagacaaggctggagacaaacctcatatgcagacttatgaagttgaccttaataaatgtggccccatggtattggatgctttaatcaagattaagaatgaagttgactctactttgaccttccgaagatcatgcagagaaggcatctgtggctcttgtgcaatgaacatcaatggaggcaacactctagcttgcacccgaaggattgacaccaacctcaataaggtctcaaaaatctaccctcttccacacatgtatgtgataaaggatcttgttcccgatttgagcaacttctatgcacagtacaaatccattgagccttatttgaagaagaaggatgaatctcaggaaggcaagcagcagtatctgcagtccatagaagagcgtgagaaactggacgggctctacgagtgcattctctgtgcctgctgtagcaccagctgccccagctactggtggaacggagacaaatatctggggcctgcagttcttatgcaggcctatcgctggatgattgactccagagatgacttcacagaggaacgcctggccaagctgcaggacccattctctctataccgctgccacaccatcatgaactgcacaaggacctgtcctaagggtctgaatccagggaaagctattgcagagatcaagaaaatgatggcaacctataaggagaaaaaagcttcagtttaactgtttcatgctaaacatgatttataaccagctcagagctgaacataatttatatctaaatt

SEQ ID NO: 114715 - DNA, 931 bp, Homo Sapiens
tacaaaaaagttggggaaccatggtgaaaagtctctaaacagagctggctgggcagcctcaagctggagccctggggaacagcctgaaggctgggagcactgacaggccgcttctgagccccaggtgatctgccctgagaggtcggtacatcctgtgctattgtctcatctgagaaatgaagcgacacgtccaagaggctactctttaaagacaggcattttacttgcagcaaaataataggaaggagattcgcttgctttgcacagaggctgagccacaggagaaagcaaagccaatgtgatttattgaatgaaagcactggacaattaccaacaacttgttcctctgctgcctcgaacagcataaactggaattgtcgtgtgaaaatgacgcaacaaatgcaaaatttacatctctgtcagtcaaaaaaacatagtgctccctcatctcccaacgcagccaaacgcctgtacaggaacctctctgagaaactgaaagggagccactcttccttcgatgaggcctattttaggacaagaactgatcggctgagtctcaggaagacctcggtgaatttccagggcaatgaagccatgtttgaggcagtcgaacagcaggacatggatgctgtgcagatcctcctgtatcagtacacaccagaagaacttgacctcaacacacctaacagcgagggcttgacacccctggatattgccatcatgaccaacaatgtgcccattgcaaggattcttctgagacaggggcccgagaaagtccacactttgtcagcctggaaagccgagcaatgcacctcaacacactggtccaggaagcccaggagagggtgagtgaactgtctgcccaggtggagaatgaagattcactctggacacacagagaaagagaagcagctgaaagcttgggagtgga

SEQ ID NO: 114716 - DNA, 889 bp, Homo Sapiens
gggagggaggtgacagactgtcccccctctattcctcccaccactcctctgcaaaaagctatttcccagagatgctcgccaacccttaaggatcagaggagccgtggcgacgcggccctgtgaaaacccgcagctcctccacttgcctcctcggggttgcgccctgcaccgccctgttccagggtcctgtggaggggcggggcgagacggccagacagccagccacctgctctgcctggactggcatgctggccctggcggagtggcaggagctgccctgagagtccccgagagaacggcaggaaaatgctgcgtgtcacggctcccttcatactgtaatgaggaggggcagggccagctcacacagcgcctgcaggggaagacagagatgcgagaggcagcccggccacccccctcactccagtgcaccccacggagcagataaaggcccatcttcccctctagggggcccaccacaaaatgcatccagagtagtccagttagggctggttttgaggcagaaaaagctgaagccctacggggatcggggaagtcctactccttcctctagaacgaggactggagtctggggaagaggaagaaaacccaaaatgaaacaggttatccggaacctctgtcccgataaccttcctcacagttttggttattaggtatttagctcaaggaaaatgctgactttctactttaaagcccaacaagaacttggattctgaaggaggaaaataacgtaagcgtccagtcagctctctcctctcctcggcgctccgcaggcacttgggatggaaaagcatccgcgggagatgccggactgcacgctgctgccgactgcgaccccggccagggcaggcccaacttttttgtacaaagt

SEQ ID NO: 114717 - DNA, 869 bp, Homo Sapiens
actttgtacaaaaaagttgggtcattgacagtgaccacctgggtcatcgggcctatgccccaggtggccctgcctaccagcctgtggtggaggcctttggaacaggtaataactggggaaggctgaaagtggcctggagtgaggagctagccaggcctctgtgctcagttgtctgtctgtgttgtccagatattctccataaagatggcatcatcaacaggaaggtcctaggcagccgggtgtttgggaataaggtaaacaataacttcctaagggctcctaagccgctactagacccaggggtcagggtccagtggacctctctggtctggcccagaatgccatttccattgatctgttcccaacaccaccttgctcgggctggctgcctcttctagagaaggtaacctctgccctctgttcccctccccagaagcagctgaagatactcacggacattatgtggccaattatcgcaaagctggcccgagaggagatggatcgggctgtggctgagggtgagtgggagggaggatggcaacagctaaggggacagttaagctgtttcttcccctgggagcttccctgcccaacgtgggactgtctgttcaccctgggactgtgttctgcctgggagaacgtcggcactgctggcggtgactggggtctccccacaggaaagcgtgtgtgtgtgattgatgccgctgtgttgcttgaagccggctggcagaacctggtccatgaggtgtggactgctgtcatcccagagactgaggctgtaagacgcattgtggagagggatggcctcagtgaaacccgcggctcaaagccggctgcaaagccagatgagcgggcagcaacttgtggaa

SEQ ID NO: 114718 - DNA, 1000 bp, Homo Sapiens
tgtggtctcttgcactctggctgcctcttgccctctctgtgtctctctttcttggtctctccctctctcctcctcagcctggtctttctctttggtgcacacttagttattgttgtgagcaatggaagttcaaaggaactccctctccagctcttctgaatcttgggacacagcctaaaaaggacaaaaagttagaagacagcatagcaactcagctcagggagctaccagagaaaaatagcaactgatgtgggtgcttttttttttttttaatttgaataaaaagaattagaagtgatgtccttttataaaatgccttctcccccttcccgcctacagtctcttcctctccccttagaggggggaaagtgtataaacctacagggttgtgagtctgaaaagaggatccccctcacccccaccctgggcagagcagtgggggttggggggtgggagagggggacacagatcctggcacactgtggatatttcttgcagattgcagtctcttgtggcccaaacaggttaggtagactatcgcctctggcaggtgccaccttttggtaccaacatgttctgaggtgttaggatttgggttgggttttttttgtttgtttttttttttccttttggtctttttttttttctccttttaaagaaaagctaaaggccgctgtgagtcctggtggcaggctctccatggatgtagcatatcgaagataatttttatactgcatttttatggattattttgtaatgtgtgattccgtctgctgaggaggtgggaggggctccagggaaagccacccaccttcagtgaggttgctccccagctgagcgcaccgggcatgggatgtggaggctggcgacacaccctgtgcctctccaaggctgggcgcgtggggcgtccagagtctctctgggtctcagatgtccatctgccacctcttgttaaggctctagccagaagggagggtgagggtagaagaaagttattctc

SEQ ID NO: 114719 - DNA, 1000 bp, Homo Sapiens
aaaaaccaccaactatttctggatattttggctgtacctactactaaagtcattagtctttaatacataatacatatttgaaaagtaaacatattatatagattatgtgagggacttaatcatgaaaccagtttcacagtccaagtaccaactcttctggtagcaggtgcacaagcttgggtgtttaaaaacaacctgtgtagggtatgcccagcaaatgaggacaaatgtgtagacagtacttactggatcttatttaacttttagctacattaactaactttcttatttaaaaacaagaaagggagactaaacatctgcttaacttgtacacattttcagaattctttttaaaagtctagttaaagatgtttcttagaagttggagactgttaacaacttccataaaatagatccaggtttttcagttccctgaagcagcattcagtagcatctatataaataaaggcaccttctgagaataaaactattttatggagtgtgtgaacacacttgttctgtcacctgggttcatcttgttgtgaagcacattaggtccaggtccttccctctgggagtctgactgtgaaactctttaacccaacaactcaattagcccctgtagataagacatgcttcccagagtgagatttttgaaatccccttttcatccagaactatatttacccacctattgtaactattcaaatagagcaaaattaggaggcttgataaatactaagaatttagtaccacagaaattatttattattttccctgtagtccacaattagtgataacgaatcctatttttgttaactgtgacataactttgatgtcatatgttgtcctatgtggttcttcctaagtaaactctgtactgattatatactgacttagcaatgtggccttggaatgctgagcaaaatgtggatgtactggttgtaaatgtttatatattgtacagtacctttatatatacacttgaggttctgattag

SEQ ID NO: 114720 - DNA, 1000 bp, Homo Sapiens
gcgtgttagggagctgtgattggattttgagcagggcagggatgggacagaagagtttggggaaggttcctcaggcatccgtcacggaagggacaagaagggagagagagtggatgccagggacacccagaagctgttattgtagtcaggatacgacaggggtgaggctacagacaggggacttgcaagcagggagggcagggtgagacattcagaggaaacgacgacaggaaatggtgacagatagggaacgaggatgaagggaagggagagccagtgacgactggcagtggagtggggagcaccgccacctctcctcctccacttgcccctcctgtggcactggacaagctagtgggcttttcgttgtccatgggctttttcggtggggatgtgaccagctttgaacccgtccccttaaacatgctcctcctgcacggaagagacaggggcaggggagagactctctccccaccacccagctcaggccccagcacagcccggcctctggcctcactggcgtctgtgcccagtgacgcaggcaggtgagctcctggcaaattagcattgcaggctgtgctctctcctcctgctctgctgcagctgggagtgtgcagagactggaggggatgacagtcaccctctgttttctgtggtggctctgttttctgtggtgctggatgcacctctgttttctgtggtggctccaagagagtgcacggtccctgctgattgaaagaaggatgaagggcagaagaggggcggggagctgtgtgccctaagatctcattgcctttttatgccgattaacatgcttttagcccctactgagcttatagttaacagaagtttccaggtctttcttcacctgaactgcgtctaaagcaagttccctccaccttctgtattcatacgcttgatttttaaaacctaaatgttgggcttcacatttgttccttgtaaatttcatcttggtgattgcagtctaccctctggccac

SEQ ID NO: 114721 - DNA, 1000 bp, Homo Sapiens
tgtgatgcgatgcctgcgcctgcagcggcagtgccctgggcactatggttttgagcttgtacccagcgctgcttttgccttgctctgtgaccccaggcaagctgcctcacctctctgggccagtttccccatcgtacagtggtgctgcacaccctggccctggccccgaggtggctgggaggtggctcctcaaacagccgctgtctcatcagtgcccggtgctgggtcagggatcgactgaggctctgagctaactgggaaacacagtggccttggagggctggggagtgtcatgggggtggggacagggagtcaccggtcgcatgtgactgaactcttcaccccagtctgtggctttcccgttgcagtgagagccacgagccaaggtgggcacttgatgtcggatctcttcaacaagctggtcatgaggcgcaagggtaggaggcagggccgctgcccgccctgggccagcaccttgtaattctgtcctgcctttttcttcctgtatttaagtctccgggggctgggggaaccagggtttcccaccaaccaccctcactcagccttttccctccaggcatctctgggaaaggacctggggctggtgaggggcccggaggagcctttgcccgcgtgtcagactccatccctcctctgccgccaccgcagcagccacaggcagaggaggacgaggacgactgggaatcgtagggggctccatgacaccttcccccccagacccagacttgggccgttgctctgacatggacacagccaggacaagctgctcagacctacttccttgggagggggtgacggaaccagcactgtgtggagaccagcttcaaggagcggaaggctggcttgaggccacacagctggggcggggacttctgtctgcctgtgctccatggggggacggctccacccagcctgcgccactgtgttcttaagaggcttccagagaaaacggcacaccaatcaataaagaactgagcag

SEQ ID NO: 114722 - DNA, 1000 bp, Homo Sapiens
agttttccacctaacacccacattcccttgtttctaactgccgtgtttttctggagcctgctgggatctttgcagtttgcaggtcatagaatcagacatgaaaaggcttctcttccgacgtcattggttcctggctcctttacagatgagaacacaggtccagaggtgagaaatgactctagcagggtcatagaatttgttagtgcagctcaagatgggacttaaactcaggcctcctgatcacccattcccaggctaggaaacaggtctctgctcggtgtggtggttcatacctgtaatcgcaacactttgggaggctgaggcaggagcattgcttgagcccaggagttcgagaccagtctgagcaacatagtgggaccctgtctctacaaaaacttttaaaattagctgggcatggtggcacacatctgtattcccagctactcaggaagctgagacaggaggatcgcttgagcccaggagttggaggttactgagctatgatcgcaccactgcactccagcttggtgacagtgagaccctcaaaaaaaaaaagaaaagaaagaggtctctacacaagcccgtgattcttcatggcaagggataacatcagaaatgtttcattttctgctattagtttccattcctttccccatccaggcataaagagaaacaaaagacaatgatggtattctctgtgtcctcagctttggcacttttgttgatgttgctaaggagcagtgaccttgctaaaaagactgaataatccacccactgaatagctaacctggggaggaaatgaaaatttcctttgtggatctccccaaatccattgttgtcaccaggccctcccagaacctcctcagttccttcacagtgcaaccctgtgtacttggcccgcaacccaatagtattgtgcctcacttcaccttccatgggcaactgccctcccttctggacataaaacctcatattttaaataaagttgaaatatgaaaag

SEQ ID NO: 114723 - DNA, 1000 bp, Homo Sapiens
agacagtttcaccagaggccccggggcagagggtcttctccagctcttccagggcggggctcatctgttcctgggccagaggtggacctgtctgcaggcttgtaagggtggggagacgccagcctggcccatgggctgtccacacccaccccccgcagaccgcgctgctgtctgcaggggatgccaccacttcctcctggcctcgggtgcacaggtgaaacatgaagaagctattggggcggaaaatggctctcaccaggctgctctcgggttaatgaaaactcgtcaaattctccatgcagcagcagccagccgggcacatgctgtcctgccctgcccgactgtgtgcagggaagcaggtcccctgggcctgggcggagggactgcgtgcctgtcagggaaggccgaggctccggacaggcgggaagcagccttctccttaatcaccccatgtggaaaccaattaaagattcgattctctcagacccggggcattttagccttggttgaatcctcctggaattcacagggaagtggctttgccctctgccctcgctgctggaaggcaaggggccgttctcgccttggttttctaggttgtgttgcggcaggagctgactgcccctaggcctagatctctgcacaacttcgctcagggacacctgcctgtgtgcatgtctcatggtgtgaatgtgtttcctgctcacaggtaccgttttgtgtcatgcagttactggaatgtacaaaagcagctgtgatctttgtgagagctgcacagagcaggagtctttatttggttcacttctggtctgcagcaaccacttgctactaaaagatggaaaagatgtacaaaaatgtcacagccctttagaaagcgacattatcagaaatgtatgaccttcagtcctccctccctctcctatgcccccaccagaccaggcggcgagaaggaacagggagtgaacatgtaacggaaaacaataaaactgaatttaactgg

SEQ ID NO: 114724 - DNA, 1000 bp, Homo Sapiens
tttgccattgctagctgactgtggcttcctagggcactgtttggagagaggtctgaagctgcctctggccatagtcaacaaataatgtctgtcatgagcatgggagggaatgtagcaggatgcccaagaagcattagccatctttgattataattggctttttgtttctgagcttatttctataaccttagaagttttgttcatttatagatattatacatataatatacatataaaagaaaaaatactgtgcttttttttcttggatcaacaaagaagtttaaacagtccagtgctcttaaatctgggaagccttaatgctaagcattgagtatataaatttatatcctaaataaaactttggccagaatactatattctgtactttcaaaaatacttttgtagttacgatttttcctactatcattaatagtagtagtaattgtagcattactagtaattgtaactctcttaaaacccaacttggtataattttggctggcatataacatcatcagtaaagtattttcacataatactcacaaaaatagagaactttatttttacaattcacacatgctaggtggctaagggctaaagaaataccatgaatgtttctggtttttaccaaagatcagttatatgttttgtataattgagggagtaacacaacccaaaagttagaatttgcatactttttgagaaattagtcaagaaaatagcaatgtgctgctctaagcattagaggttcccaagtctgcgcttcagaatgggattatctgggaaacctggtagagaagacagtttgtttttctttttaaaaagtgttgagctgtggtttagggtattaaataataaaaactcatctctattttccatatccacatatttataatattttactctttatgggcaaaaatttattctttcaaaccaccccctactatgcctcaacatgtctattacattaaaattatctcatatgtagagcaagaagagg

SEQ ID NO: 114725 - DNA, 1000 bp, Homo Sapiens
tcaactaagtttatgtaatattctaaatcctttgttgtcatttcaacaatgttcacagcatcttcaccaggtgtagattccatctcaagaaaccactttctttgcgcatccataagaaacaactcctcatctgttaaagttttatcatgagattgcagcaattcagttacatcttcaggctctacttctaattctagttcttttgctatttccaccacatctgcacttacttcctccactgaagtcttgaacccctcatagtcatcaatgagggtgggaatcaacttcttccaaactcctgttaatgttgacaatttgacctcctcccatgaatcacgaatgtttttaatggcatctaaaatggtgaatcctttccagaaggttttcaatttgctttgcccagatccatcagagacatcactatccatggcagctagagccttatgaaatgtatttctcaaataataagacttgaaggtcgaaattaccccttgatccatgggctgcagaatggatgttgtgttagcaggcatgaaaataacattaatctcctcgtatatctccatcagagctcttggatgactaggggcattgtcaatgagcagtaatattttgaaaggaatcttcttttctgagcagtaggtctcaacagtgggtttaaaatattcagtaaaccacgctgtaaacagatgtgctgtcatccgggctttgctgttccatttatatagcacgggtagagtagatttagtataattcttaagggccctaggattttcagaatggtaaataagcattggcttcaacttaaagtcaccagctgcattagcccctaacaagagagtcagcctgtcctttgaagctttgaagccaggcactgacttctcctctctagctatgaaagttctagatggcatcttcttccaatagaaggctgtttcatctacattgaaaatctgttgtttagtgtagccaccttcgtcaatgatcttagctaaagctt

SEQ ID NO: 114726 - DNA, 660 bp, Homo Sapiens
cccgcgcgcccgcgcggcggaggagaggtgttaagtgtgatgcttccataatacatttggatgctgtcagctaagttcacttctgaactaaggggttcctccaaatgttggctgaaattcatcccaaggctggtctgcaaagtctgcaattcataatggagctactgtactggctattggaaggaggagattctgaagataaggaggtaaaacctgtttagaaattaaaaatgagttacgatttaaagaaaattcagatgactcattgtgagtgctagttctcttgtagaatgccactggaaatgttgaaatgaaaaatattcagcccgttggtctttgaaatttcctgtgatgtgtttcaatctagatgcaaagaacatggaaaaatcaaagtgctcgagtggtttaaatatgttttgggtattcctgtttatagactataatacttttccaattaaaatcctcagttgtcacgcaaagaaggttaagctgtatttgattgccagttttactgaaaatgcttagtattttacagtatcaccaaatatattttggttagcccaggtattaggaaaaataaaataaattggataggttgacttttttctaaaatgtctttattggattgaatgaatgtttataccctgaaaaaaaggttcc

SEQ ID NO: 114727 - DNA, 1000 bp, Homo Sapiens
cttaatgaggtaggttagagtaatagagactatcctgaactccaaaactattaatagactatggaacttcgactcccatttatgtctcttactacttaatattagtgtctctgtttccttatatgtaaatatgcaaatgataaaaatagtgcctcatagcattgttgcatgcattaagtgagttaatgtaagtggaatacttaggactgcctggctgatagtaagtgatctatgagtcaatgatgctatttattagtagtagtactagtacagcacactgtatttttaaaggtaaataagaaataacaatttttttaaatgttcatatacattcacatgtcttcttttaatataaaatagcaatcaagatcaggataatggtagagatattttggagacacaaggcagaagctatttactaatagctaggggagcattttactagtttactaaccaatattactatacttatgtgtacttagcagaatatcacctagcaccaaaaagaaattaagaaagtgtaacttactgagaagtgaatatgcaccaactccataaacactatgtttatggaacacatctaactttagacttagctatactcatcgactcacatatcttctcatccaagtgggatgtgtttaatatttaccatatattcataagttcactgagtattgttctggtaactagaaaaaaaaaaggacaagcatatataagtaaaactcactgatttaaaacagagtattatcaactacaaaagaaaaaaaaaaccacttgaacctccactgatttctcaaatctcatttatttcccattatcttccctcatacctcttgcatttatttggttaaatttctttttgatccaaaaggaagcaatgtttacctgacaatttctactttatgccagaacaacaaatgtaccagcaattacaatatttccaagaaaagtattgtttgttttctcttcatgtctttggtgagtctctcggaattag

SEQ ID NO: 114728 - DNA, 1000 bp, Homo Sapiens
tgttttgtgtgagacaccattgcaagaaaattttatccctccagaagtattttattactaaagaacaaaagcaaaaaaagcttaaattgcactggttaaagtacagtttccaacagctgtccttcctcagtactctaatggccactccaccgcgagtggaagtcactgttgtgtgtacacaggtggtcccaatcaaaacttcatcttgtgagcccaattatgtccattttgttatagactaaatcaggggtttgttctacaagaacaatacatgttttaccctttcctttaactagaaggataactagtaatgcatcaacataatttctgtattaaccatcatgcgcacaagaaatacataggaaataaggaagaagaaaactcctggcatcggatcttaagctagatgattagaatgtgaaaaagattttacaaatgtaaaacttctatttctctgtagaaactttcttcactttgctgtgcaagaagacactgctttgctatattcaaaatggcttttcttacaagagatttatgtatttggtaaatgtttgtagtcaacagttcacacaagaagctgtacacggtttgatcatgtaaaaccgtttggcggcacaagctggactttgttgccatccttgagatgaaccttttaagaaaaataagttaatctcaatttttccctgaatgtgttgtttttcttcattatacaataaatataatagtgaactttttatcaaatggtgaagacaatgctaaaggttgttgcaaactgtttgtctcccgcactcactccagtaaagacggactggctcttcctgtgcgtcgagactctgtcacgtttgcctggggacacaaggcgctggctttgccaccaggcagccccttcccctaaagccctctcctttttcattcctttcacgaagaccttcttcacccgcaggcttctttctctgggttgagacagggccaaggaaaccgtcccaacgccccactgggc

SEQ ID NO: 114729 - DNA, 1000 bp, Homo Sapiens
tattattggaaatttcaaaaatgtacgaaagtagaaaaatgagtatagtaaatctttttggtttgtttgtttttgagagatggagtctcgctctgtcgcccaggctggagtgcagtggcatgatctcagctcactctaacctcctcctcctgggttcaagcgattctcctgcctcagcttcccaggtagctgggactgcaggcgtgcgccactacgcccagctaatttttgtatttttagtagagacggggtttcactatatgttggccagtctggtcttgaactcctgacctcaggtgatctgcctgcctcagactcccaaagtgctgggattacaggtgtgagccactgcgctcggccagtatagtaaatcttacattcacagctaccaacttcaacaattgaaggtatcaacttctgactaattttgtttatatccctcgcaatcctctcccattattattttatttctttttctttctttctttcttttttttttttttttgagacagaatctcgctctgtcaccaggctggagtgcagtggtgtgatctccacccactgcaacttccgcctcctggattcaagcgattcttctgcctcagccgctgggactacagttgtgcaccaccacgcccagctaatttttgtatttttagtagagatggggtttcatcatgttggccaggatggtcttgatctcttgaccttgtcatccgcccgcctcggcctcccaaagtgctgggattacaggcatgagccaccgcgcccggcctctttttttgagacccagtctcactctgtcgcccagaatggagtgcagtggcacgatcttggctcaccgcaacctccatctcccaggtttgagcgattctcctgcctcagcttcccaaatagctgggattacaggcatgcaccatcactcccagctattttttttttttttgtatttttggtaaatacagggttttgtcatgttggccaggctggtcttgaattc

SEQ ID NO: 114730 - DNA, 1000 bp, Homo Sapiens
gggaatctgggattgtcctggtcatagttcttatcttgcacccaacacccttagctgcccaggctttggacatggatagcccctacccaacccagccctgttctgcctacagtgatgggcatggagccagacactggggaggatttggccagtgagggctgcccctgctgtctgggtcacccctcctggctgccctcttggagctgaataacagaaggggaggggttagtaacccggacatagtattgaggccagacagacagagcattgatgggaacagaccccctttgtcatgccatctctccccagatggggggtacccagaataatgggcttttggggccctggggactcttctccctgtattcagggtatctccccctatctcagggagacacctcctactgtgcccagcatttgtgactcttctttgcaccccctgccttgggtccctggccctgggattgtttgggtggaggaggggcagtggctgctggcagaatggggtggaggggggagcggaagcagagggggcgggggagtggccggctttgaatatcctgttgaccccagtttcctctgcccccagcttatgtcctcttccctccctcctcttcaagcgttaactccttcctaactcggggggagaacggggccaggccgcccaggggcaagagctttagaatcagggtgacccccacccctactccccaagcacagtcacggcacacatacaaatgtgatggtttatcattgtatctttgtggttttgaaggtgggggtcctaggagtccagaggagtgatggggtgctggaggcttcattggcagcctcctgccctgagtctggctggggagtcccagttttcttaagacttgaatcctgccagcagtggtgaggctgggagaggctcttaggagggacggtgaggcagggtggagcttggtactaaggatggcgacctaggtctctaactgcccctcccctcttctctctctag

SEQ ID NO: 114731 - DNA, 1000 bp, Homo Sapiens
cgaggccggggaatcacctgaggtcaggagttcaagattagcctggccaacatggtgaaacctgtatctactaaaaacacaaaaattagctgggcatggtggctggctcctgtaatcccagctactcgaaaggctgaggtaggagaatcacttgaacccaggaggcggaggttgcagtagccgagatcacaccactgcactccagcctgggtaacagagtgagactccatctcaaaaaaagaaaaaaaaaagaaatgcacatccttgagccctgccctggagctactgatttagaaatgggggtggagccccaaacctgtatttaatttaatttatttatttatttattttttgagatggagtctcgctttgttgcccaggctggagtgcagtggtgtgatctcgattcacttcaacctccacctcccaggttcaagcaattatgtctcaacctcccgagtttagctgggactacaggtatgcaccaccatgtccagctaatttttgtatttttaataaagacagggtttcaccatattggtcaggctggtctcgaactcctgacctcaggtgatccacctacctcaacctcccaaagtgctgggattataggcatgagccaccgcacccagccaaacctgtattttcataaagttccagagcaaaggtccacaaatacatttgatgtttgtatttagcagacttataaactttctaattaatcctaacaatttatttgtatgaatttttttttttttttcttgagacagggtctcactatgtcacccaggctggagtgcagtggcgtactctcggctcactgcaacctctgtctcctgggcttaggtggtcctccgacctcagcctcctgaatagctggggccacaggcatgcaccaccacacgcagctaatttttgtttgtttgtttgtttgttttaagagacggaggtttaccatgttgcccaggttggcctcaaacttctggactcaagcagtctg

SEQ ID NO: 114732 - DNA, 1000 bp, Homo Sapiens
tatctccatctcctcattaaaaaatacgtacatttcgaggtaatggtatagggaagaatgtgtttatgtgtatttgaaactccttgatgttaatagtcttgtgtaacccaggcatctactggggcctgccttaagctctagctaggattgctcagaactccttccacaccctattaaaggccccatgacctccctaagatttctgcaggagatggaagtggcggcaggtttacatcacagcagcacgcatgacctcagctttgactcgcccaactctgagacgtccttcttgaaggcccttgccacagtttccctggccacgccaccccatcccacctctggtcatctccccagccctttatgccccgtcgccctccacccctacatcagctcctccaaaactgagctcccagttcattttgcatatcctaactcaaagtctcagctaatccaagggactttctttaccaggattcaaccctagtagagagctgttatggtttcaatagtcatatttatttcttgtaaaacagttgccaggtgctctccagcaataacgttttgtcagtcatgtttcatgttttaacttaggtgtattcatgtgtgacacttccatgttgacagcccggaaaggcctcatttttaactaaaagatgttttataaacccagtgtaattgtggtgttctaattggttcacattttctagaatgaagagcatgggacaaaaaaataagatatgatttcctattttcttttcgttgctccttctggtcattttacttatctgtggaagatctggaaatgttggatttttctttcaaactcttcctcatgaccccagggctccagccagggcctctgatgtgccctcgattcttggtcggacgcctgtgggagggcccgtctttctgcagcagcactcgagaagggttctacagcctttccatcaactgcacacctcgcaactaactcatttgacagaaccgtgagaattatgtt

SEQ ID NO: 114733 - DNA, 1000 bp, Homo Sapiens
ccatctcaaaaaaaaagcaaacaaacaaacaaaaacaatgaactgaacaacaaaatagatcaccttactgccctatggaggaaagggaaaaggctcatagaaggaggaaagtggaagcagagtgggctggtgcattaaggattttctggggtggaaaatttaaaaaataaaaaagataaataattaaatgtaaaaaaaaaaaagaagctactgcagccatcaaagcaacaagtgacagtgattcacgtgggggtagcggtaaaggaagggggaatcatggggtttcagcttgggtacatgggtgcagggtggtgcagtgtcccatcctccgtcagcaagaaattcaggtctgggtccaaatggaaaaacccacactgaatcataatcctaatgctatgaggtaggtatgactatccccatttataattttctaaaacagctttattgaggccaggcacggtggctcatgctgtgatcccagcacttcaggaagtcaaggcgggtggatcacctgaggtcaggagtttgagaccagcctgtccaacatggcaaatccccgtctccccactgctactaaaaatacaaaaattacccgggcatggtggcgggcacctgcaatcccagcaacttgggaggctggggtaggagaatgaattgaacccaggaggcagaggtttcagtgagccaagatcggccactgcattccatcctgggtaacagagactccatctcaatcaatcaatcaatcaatcaataaaacagttttattgagatgtaattgacatgcaatacggctacgggggggacggggataaccaattcaaataaaaaaataaagtgtacaacttgataagttttttaattttatttttttagaaatggagtctcgctatgttgtccaggctggagtgcaatggcaagccgaattctgcagatatccatcacactggcggccgctcgagcatgcatctagggcccaattcgccctatagtgagtcga

SEQ ID NO: 114734 - DNA, 1000 bp, Homo Sapiens
ggtttcgtgtgggcagcgagagcctagcaggcatgtggggtgcccagcaaagggtaacagtggacagttgttgcctcattccacagagttttgattttttttttttttttaatggtcactccatcaacatcccccatggccagagcctgagctggtccccagagacacaggcattcagctgacagcctcgccttcacgctgctgctgttctcatgggggacaggcctcaggtggcaatgcacaaatcattagttaagggcagttgtgacagttaccaaggagtgtagcccccgcccgagtgaaaacagccctaaccaggggtggggaccttggggctctgacccgaagggtaggagaagctggaaggacagcattcctgtctgcgaaggcaggagcaaagctgccaggctatgaaggaaatggctggagcctgaagtcatgcaagctggggctggcagggacagggccaacttccaggcctgggggccaccatgaggattcaggacgtgacccccagggcacatgaaggccttccatctgtatttaagaaaagactttatcagacgagtatggtgctcacgcctgtaatcttagcactttgggaggctgaggcaggtggatcacgaggtcaggagttcaagaccagcctggccaatatggtaaaccccatctctactaaactacaaaatagccaggcatggtggcgcacgcctgtagtcccagctactcgggaggctgaggcagaagaatcacttgaacccgggaggtggaggttacagtgagccaagatcgcgccactacactccagcctgggtgacagagtgagactccgtctcaaaaaaaccaaaagactttatcttatttcctatatgtttgtggtttcagtcctgatgtataatttgaccctagttagaatggttatctgaggaagtggcctgtacgatttctgcttttttaaatgtgtggctccctttcttcattgattaacgtatgattattt

SEQ ID NO: 114735 - DNA, 1000 bp, Homo Sapiens
ggtgttgtcattgttctttcccttcctgtaagtgtcgctagttgctgcctcgtatctcaggtttttctctgtttttgagaaatggacagttttttgaccaggatgtgacttcatgtttcctatggtgacttctaaaaccagcacagaatgatatgactcaacacagaccgacttggttatggggatgatgagccgcacagacctcactagttgtgcacaaataatgtgctatgatggggtgtaaagtgaaggcagaagagggtcagccgcattgttatgatactgggaaagtgctggtcaacgatttgagttagtttttagatatacattgaaatctttaatcagacattctcaagtttcacacagtagtttttgatgttatgtacacacacaccaaatgtgtaacagttcaccacttccagagtgtggtcatgcccaaaacatgtttaagaaaggaaagcagtagctccttgctaacgatgtttcaggaggtttgggggacttggttttaatgagcttctgtcatttagggcttctcttggccatggtccccttccttctggaactgtgatgtagtcacatcctacagcctttagtgctggttcactagtgtcagataatcagttcttggaatcgagactgccgtggcgaaggggtggcctcggaggcaggctctggagctgcttggatgtctttaggtggggtggtggctggctctcttcagcatgtaattggggaaaccctcgtttctactaggggtgatacagatggtgattttaaagagcaaaactagacttctatgtgagaagtgctggaaaatgatttaggacatgtgtaaagttagatggaaagactgtaaatgtttaatatgaatatagtgttcttttgaagtaaggccagctgttgaacggttaaactgtgcatttctcattttgatgtgtcatgtatgttaatgtatgaaatgattaaataaaatcaaaactggtacctgtttatacat

SEQ ID NO: 114736 - DNA, 1000 bp, Homo Sapiens
ccatgagcatgtcgtccagcatggtgccctcagcagtgacaggcgtcccgggctccagtctcaacagcctgaataacttgaacaacctgagtagcccgtcgctgaattccgcggtgccgacgcctgcctgtccttacgcgccgccgactcctccgtatgtttatagggacacgtgtaactcgagcctggccagcctgagactgaaagcaaagcagcactccagcttcggctacgccagcgtgcagaaaccggcctccaacctgagtgcttgccagtatgcagtggaccggcccgtgtgagccgcacccacagcgccgggatcctaggaccttgccggatggggcaactccgcccttgaaagactgggaattatgctagaaggtcgtgggcactaaagaaagggagagaaagagaagctatatagagaaaaggaaaccactgaatcaaagagagagctcctttgatttcaaagggatgtcctcagtgtctgacatctttcactacaagtatttctaacagttgcaaggacacatacacaaacaaatgttttgactggatatgacattttaacattactataagcttgttattttttaagtttagcattgttaacatttaaatgactgaaaggatgtatatatatcgaaatgtcaaattaattttataaaagcagttgttagtaatatcacaacagtgtttttaaaggttaggctttaaaataaagcatgttatacagaagcgattaggatttttcgcttgcgagcaagggagtgtatatactaaatgccacactgtatgtttctaacatattattattattataaaaaatgtgtgaatatcagttttagaatagtttgtgtggtggatgcaatgatgtttctgaaactgctatgtacaacctaccctgtgtataacatttcgtacaatattattgttttacttttcagcaaatatgaaacaaatgtgttttattttcatgggagtaaaatatactgcatac

SEQ ID NO: 114737 - DNA, 1000 bp, Homo Sapiens
tggggggcagtctttggtacctgtgttcgtcagggatgctctgacaaccaggtgtcgtccacgggcgggggcatgggcatggtgacagtggtcctgttatgtcaccgatgatgctgagcgcctccttcagcgcgtggtgcatgtgcagcatctcgtcgtgctgctgtgcctgctctgccaactcctccatcagtgtgttctggttcccacatgagtacatattggccagcagcaccgagatgatgaactccggggtctgagagtgggcaaacagggaagaaggttgggacctggtgcctgtgccgccctggctgccttgctgggcccttctgggactgtgcgctggacttggagccccttggagtatggcttttcacacgggcttctataccgcttcgactggaagatccacctccccactgccttttctcactcagatggggacaccgaggtccagaggaaaagacacctgtcaaatgtcacagatctgggaggggacttaagacttatcatgccaagaggacacctgtctactcagtttttttttggtggggcggggggcggtgatagggtctcgctctgtcaccaggctggagtacagtgatgactgctcactgcacctccacctcctgggctcaaagtgatcctccaacgtcagcctctcgaggagctaggactacaggcacatgccaccaccaagcccagctatttttaaaatttttgtgtggagacaaggtctcactatgtggcccaggctggtctcgaactcctgggctcaagtgatcctcctgcctcggcctccaggagtgggaggtggagttgatgcctggatacaggagctctgtgggtgggagtgagacaaaacacagggtcctgagctctggggaccaagcaatgtcctctggtgaaaaaaatcctggacttgctggcagaagatttgcctcttactcgccatgtgctctgaatacatttacctccctcaaaaaaaaaaaaaaaaaaa

SEQ ID NO: 114738 - DNA, 1000 bp, Homo Sapiens
tattcgcctacacaattctccgatccgtccctaacaaactaggaggcgtccttgccctattactatccatcctcatcctagcaataatccccatcctccatatatccaaacaacaaagcataatatttcgcccactaagccaatcactttattgactcctagccgcagacctcctcattctaacctgaatcggaggacaaccagtaagctacccttttaccatcattggacaagtagcatccgtactatacttcacaacaatcctaatcctaataccaactatctccctaattgaaaacaaaatactcaaatgggcctgtccttgtagtataaactaatacaccagtcttgtaaaccggagatgaaaacctttttccaaggacaaatcagagaaaaagtctttaactccaccattagcacccaaagctaagattctaatttaaactattctctgttctttcatggggaagcagatttgggtaccacccaagtattgactcacccatcaacaaccgctatgtatttcgtacattactgccagccaccatgaatattgtacggtaccataaatacttgaccacctgtagtacataaaaacccaatccacatcaaaatcccctccccatgcttacaagcaagtacagcaatcaaccttcaactatcacacatcaactgcaactccaaagtcacccctcacccactaggataccaacaaacctacccacccttaacagtacatagtacataaagccatttaccgtacatagcacattacagtcaaatcccttctcgtccccatggatgacccccctcagataggggtcccttgaccaccatcctccgtgaaatcaatatcccgcacaagagtgctactctcctcgctccgggcccataacacttgggggtagctaaagtgaactgtatccgacatctggttcctacttcagggccataaagcctaaatagcccacacgttccccttaaataagacatcacgatg

SEQ ID NO: 114739 - DNA, 1000 bp, Homo Sapiens
tattcgcctacacaattctccgatccgtccctaacaaactaggaggcgtccttgccctattactatccatcctcatcctagcaataatccccatcctccatatatccaaacaacaaagcataatatttcgcccactaagccaatcactttattgactcctagccgcagacctcctcattctaacctgaatcggaggacaaccagtaagctacccctttaccatcattggacaagtagcatccgtactatacttcacaacaatcctaatcctaataccaactatctccctaattgaaaacaaaatactcaaatgggcctgtccttgtagtataaactaatacaccagtcttgtaaaccggagatgaaaacctttttccaaggacaaatcagagaaaaagtctttaactccaccattagcacccaaagctaagattctaatttaaactattctctgttctttcatggggaagcagatttgggtaccacccaagtattgactcatccatcaacaaccgctatgtatttcgtacattactgccagccaccatgaatattgtacagtaccataaatacttaaccacctgtagtacataaaaacccaatccacatcaaaaccctccccccatgcttacaagcaagtacaacaatcaaccttcaactatcatacatcaactgcaactccaaagccacccctcccccactaggatatcaacaaagctacccatccttaacagtacatagcacataaagccatttaccgtacatagcacattacagtcaaatcccttcttgtccccatggatgacccccctcagataggggtcccttgaccaccatcctccgtgaaatcaatatcccgcacaagagtgctactctcctcgctccgggcccataacacttgggggtagctaaagtgaactgtatccgacatctggttcctacttcagggtcataaagtctaaatagcccacacgttccccttaaataagacatcacgatg

SEQ ID NO: 114740 - DNA, 1000 bp, Homo Sapiens
attcgcctacacaattctccgatccgtccctaacaaactaggaggcgtccttgccctattactatccatcctcatcctagcaataatccccatcctccatatatccaaacaacaaagcataatatttcgcccactaagccaatcactttattgactcctagccgcagacctcctcattctaacctgaatcggaggacaaccagtaagctacccttttaccatcattggacaagtagcatccgtactatacttcacaacaatcctaatcctaataccaactatctccctaattgaaaacaaaatactcaaatgggcctgtccttgtagtataaactaatacaccagtcttgtaaaccggagatgaaaacctttttccaaggacaaatcagagaaaaagtctttaactccaccattagcacccaaagctaagattctaatttaaactattctctgttctttcatggggaagcagatttgggtaccacccaagtattgactcacccatcaacaaccgctatgtatttcgtacattactgccagccaccatgaatattgtacggtaccataaatacttgaccacctgtagtacataaaaccccaacccacatcaaaacccccccccccatgcttacaagcaagcacagtaatcaaccttcaactgtcacacatcaactgcaactccaaagccacccctcacccactaggatatcaacaaacctacgcacccttaacagtacatagcacataaagccatttaccgtacatagcacattacagtcaaatcccttctcgtccccatggatgacccccctcagataggggtcccttgaccaccatcctccgtgaaatcaatatcccgcacaagagtgctactctcctcgctccgggcccataacacttgggggtagctaaagtgaactgtatccgacatctggttcctacttcagggccataaagcctaaatagcccacacgttccccttaaataagacatcacgatg

SEQ ID NO: 114741 - DNA, 1000 bp, Homo Sapiens
gtgagccactgtgcccggcccataatgaggtttttagagtgttttattgccaggggaatgatgagcctagactaacagaaaacaataactgttgaagacattaaatggctcttgggctttcaataatctatggtagagaatgctcaggctcttaacacacctaagagttgagaaggctgctcagcccccaaagaggtttatgcctcaagccccacatcagcagggacactaaaatgtgaagaacctctttgagggcagaagcaagggataaggagaacaacaggcaagggagctacttccagggacctgaatcagaaaataatgaataattcccgaccagactaggaggccctcaaaatatttgcccacttggatttcagaattgccatagccaatgactcctgtgtgcctcccattcttcccctttcctacgtggaatgtctttctctgttctataatctacctttcaaaatctttactcatcttttaaaagccacttcatttgtcaacacctctagaatttctccctgttattctggagaacacacctctctcttatccgtctcttgctctgcttcagggacacctgggagtctcctgaccctgcccccacacccccaaagagccatagatatggaagaagtaccaaacccctagtcatccttgactcttccctctgcttggaaggctctacctccaaaacttctcaaggtcagggttggctccaatcaccctttagatcttagctcgcacccctcctcagagagcttttcctaaccacacaatctgaagtggacccaggcactctctcacagccctgtttcatcgtcatcatagcacttactatgaggtatgtttatctttttcttcgtcttgtgttcttgctcactgtctgagtcacagagggtgtaagcttccctgagagcagaagtcttgcttggatcctggaacagtgcctgtagttgctcaataagtattacttgaatgtataactcagatc

SEQ ID NO: 114742 - DNA, 1000 bp, Homo Sapiens
tgtctgtttaccaagtatattactgttctttagaagagtcttactagtcagaaagagacagttacaagtacaaccccatccacaatttcactttccatggcttcaggtatccatggtcaaccacagtccaaaaatattaaatgaaaaattccagaaacaattcataggttttaaaatgtgcgctgttctgagtagatgatgaaatctcactccattctgcttgggatgtaaaaccttttgccagcatatccatgctgtctacattacccacccattagtcactgagtagcgagctcagttttcagattgactgtcatggtctcacagtgcttgtcatccagtaacctttatttagttcataatggccccaaagtgcaagggtaatgatgctgggatattgttaacattgttctgttttattattacctgttgttgttaatctcttactatgcctaatttgtaagttaaacttcattatgaggtatgtatgtataggaaaaaacatagtatatgcacagtactatctaaagtttcatgcatccactggaagtcttggaacatatcccccatagataagggaggaatactgtataccttaaaatttaaccattggcattttcttcattcgtttttttgggtagcagtaactaagggatttgtaagttatcagattttcacaggagatgatattattggggtaaattgtatgtagatagcatgcacccctggaaggagtgcccacactttgagtacacaaatgtgtgcatgcacatacacacacacacacatacacacacacacacacattcccctttttaattaaaatgaggaaaacacacttggagagccataatttcattttataagccaagaagctaggactaaattgtggtttttttcacccttctaagttgactttttttcctgcttctctcatgacatagtagtcattttttacttaacgaaaatctgatgtaatgaaatgacattttacaagctt

SEQ ID NO: 114743 - DNA, 1000 bp, Homo Sapiens
ccatcgctgtacagaacccaggtggggaggcccgggcctggccccctgtgggggaaggggtgggcagctggctggctcggttctggtaagcacgaaggtgcttgtgaacagctaagggcatgtgtgtggtggggtttggacctgtggacctgaggctggatatgctggttgaggagatctagggccccaacggtcagagcttggaagcgtttggggggggcatggaagaagacagtaagatgagggaaagtttggaacttcttagagacttgttcgatggttgtgaccaaaatgctgtaatgagttaagactgtgggggtgggcgtggtggctcacgcctgtaatcccagcactttgagaggccgaggcgggcagatcacctgaggtcaggagtttgagaccagcctggccaacatggcgaaaactcgtctctactaaaaatacaaaaaaaaaaaaaaaaaaaaaaattagccgggcatggtggcggacccctgtaatcccagctatttgggaggctgaggcaggagaatggcttgaacctgggaggcggaggttacagtgagctgagatggcaccattgtactccaccctgggcaacaagagtgaaactccatctaaaaaaaaaaagactttggggtactgttggaaaggcatgattgtattttgcaatgtgagaaggacatgagatttgcgtgagggggcaggggtggaattatatagtttggatattcatccctgtccacatctcatgttgaaatgtaatcaagccaggtgcagtggctcttgcctataattccagcactttgggaggctgaggagggaggatcactggagcccaggaattcgagaccagcctgggtaacatggaaaaaccctgtctctacacaaacaaacaaacaaacaaacaaacaaacaaacaaaaaaacccacacaaaaaattagctgggtgtggtggtgtagctgtagtcccagctactagggaggctgagatgggaggatc

SEQ ID NO: 114744 - DNA, 1000 bp, Homo Sapiens
cacctttcccccatcctatagctgagcccctgtttgcccaccccagcctggagtgtaaacctggggaaaggtttacacgaggagactgggttagcaagggcttctagggatggggcagggtcagaagctgactggatggaactgtagcccctagagtgcattcctgggtgtcagactctgcagaaggggccactgcacccctctggagccccaatttctttatctgcgatgtgggttggtctccgagccttgatggcatttctatgctgtgaggtgggcctggtgggtttgggctcagtttccaaggcaggataggctctcggtcccctctttctcttcagcacccagccccgggccagcaccttgggtggagcagtgtggggtgaaagacagcaacttcaggggggtggtcacctgacactgcaacccatttccccaccagacagggttgaggtgggccgggctgggatggtggctgcctgggagggcctggggacggtgaagtcctgtattctcctcttctcccatattaggtcatgggaaagcatagctggagggcccgcccaaatcacaggtgacgggcctcagagcagtggcacgcacacgcgtggcacccagcacgaggatttggagaaatgaggcaaattcctgatgatgggtggggagggggtccccagccacctgggagctggcaggtggcccgtggtgatgaaagcccaggggaagggaaacagaggagcctgttgtaatcgctacgcccacttggtggcctataaaggaagcctgtgaaccccggcagccctacactacttggggcccctcttctttccagcccttctcctgtgtgcctgcctcccgccgccgccaccatgaccacctccatccgccagttcacctcctccagctccatcaagggctcctctggcctggggggcggctcgtcccgcacctcctgccagctgtctggcggcctgggtgccggctcctgcaggccgggatc

SEQ ID NO: 114745 - DNA, 1000 bp, Homo Sapiens
cagaagaaatgaaaaaatattgtgttttgtacaacatatctatgtacgaatatctgttgtagaatttataaatagacaaatgacaggcaaaatgtatgcaaaatattctgggctgggtgcagtggtgcacgcttgtaatcccagcaatttgggagaccaaggcaggggaattgcttcagcccaggacttcgagcccaacctgggtaacatggtgaaaccctgtctcaacaataaatacaaaaaaattactcaggcgtgtgcctgtggcacatgcctgtagtcccagctgctggggggtgggggtcccaaggtgtgagaatccctcgatcctgggagggtgatgctgcagtgaggtgagatcacgccactgcactccagcctgggggacaaagtgagaccctgtaacaacaacaacaacacaaaataatttgaaaacagaatttctttctttttcatgttttttctcttgtatctggcatgcagctaatttcttttttattgtatgtattcatcgtgtacaacatgttttaaagtatgtgtacattgtggaatgattaaatctagctaatttacaaatgtattactgcacagttaccacttttgagtgataagaaaaagcgatttgagaacacctaatatccactcttggcactttttaagaatgtgtcataattaactattatagtccctatgctgtacaaaagatctcttgaaccaaaacttctttcaaaaaaggaaaactacaatggaatttagaactacaaacagacataactcattaacctttcagtttttatgttagatataacactacagggaagtcataatatttatcacaacatttaggaagcttgcttttttcttatttttaaattgcctttaatagtaagaatcatttgtttattctcagatcttagattcgaattctacatttcttttctttttttttttgagacagagtctggctctgtcgcccaggctggagtgcagtggcttgatc

SEQ ID NO: 114746 - DNA, 1000 bp, Homo Sapiens
aatagaatgaaagcctgtccaaaataagataaataaaataaaattcatgtggaaaagtaggaggtcccaaatagccaaacaatattgaaaaagaacaaaattcaaggacccatgtgtcttgatttcaaacattgctacaaaattacaataatcaaaacaatacaaacttttcatcagggaaatgcaaatcaaaaccacatcatctcagcacagttaaaatggctttgtatcaaaaagacaaaaaaaaatgaatgctggcaaggatatggagaaagggcaacctttgtacagtgctggtggaaatgtaaattagtatagctgctatggaacagagtatgaaggttcctcaaaaaactaaaaatagaactaccatatgatccagcaatcccactgctgggtatatatccaaaagaaaggaaatcaatatattgaagagatacccgcactcccatgtttactgcagccttgtgaaatactgcagtgttgtgaaatactgcagtgttgtgaaatactggttatttcacaatagacaaaattgggaatcaacctatgtgttcgtcagtggctgaatggataaacaagatgtgacatatgaatatacaacagaatagtatttatccatacaaaagaaatgcaatcctgacatttgcagcaaccctgaatggaactatcattaattggaactagagattaattaaaataagccagggacagaaaggcaaagatggcttgctttcactcatatgtgagagctataaacatggatctcaaggagatagagattagattgttggttaccagagctgggaagggtagaggaggataaagagaggttgattaatggatacaaaaatacagttaaatagaaggaataagatttagtgttcgatagttcagtaagatgactacagttaacaataatctactgaatatttcgaaatagccagaagagaagaattcagatgttcccagaataaagaaatatttgaggtgttggatc

SEQ ID NO: 114747 - DNA, 1000 bp, Homo Sapiens
tgagccaccacgcccagcgcatttattcttacagaaaaatggaggccatgcagaagaatggaaccagaaggagcagagaaatctcagccccggtgattccataggattgtgatgttccagaccacagttttaagtgctatttgtttcaagagtgacatcacagctggattttacttagaattcagaataagtggttaacgtctggaattttatttttggtagtagtatgtgtcagttttttgtcactgtatagtagttgaggagttcttttttgttgacatagagatacacagggtttgtattgcctttggacaatggacaggtctcatctgtctcttttgtctgcaagtgagaccctgccccttctgagtaaacaacactctgtgaatgactgtcccttttcactgtggacttcttgttattacacccttagatggactcagcagctatgagatcctcccatcataggtatggtattttgtaacaaaagtacagaaacacctccaaggtgcagtgaatgatctcaaggagagaaatggagtattataggatcatagagaggcctcgaggtctaaccagctgctctgcggaagtcagggtgatggtggtttcagtgttggggaggttacagagttagtgttgatatgcaaattttcttcctccaaatttggagtatgttatatatgttttaatgtatataactgtgaatatgaatataacattagaacatatataacataatttctgctggtggagtagagatcataaatttgaggtttgcagtttgctttctaaaacatcttttaagtttattcttttctggcacacaggacgttgtagggtaactttgctgtggagtctcacatcttatatagaatcattttttcaacatagtgtggataatcacatacgccttgaaggatcaatatatgttaacagatgattggatctttttgattttgcacttaatttctttacaaattctgcattataaccagac

SEQ ID NO: 114748 - DNA, 1000 bp, Homo Sapiens
ctctggtgaccctgcaggcaagaggagcccaggcaggggcttcccggagatgcagctttgggtgtggcggcagtgaggggcaggcaggtgctttagagagccctgcaggactgtcccacggccatgtatgcaagtgtgaaaagccccgcttcagagccacacaggtgtaaccttgttcccattgctccttccaaggcgtggtagggggacgtgggggatgaggttgaacaggtgggtgccctcgtgccaggaagcggttctcttgtccctgagaaaagtaactcagcccagaaggccttgggtatgaaagggccatatagggctctgcggacgcgtcctataagtgagaaccgccaggcgggcagggtggggctggagggagaagggaaggttcactggggttgcaagagctgccccctgacagcacgggagggagggcagggggtccccaaagggaggggtcaccctgcaggtcagaggagcagctgtgcccctggccatggaggggtgggcagggccatgagccccaccctgagaagccggagttgaggggctgggccaaggggtgccattgctggtgggcagaagtttccctccctgcaggaacagcctgcacccccagactgtgaagaagggattcttgccctgtggtcactgcgggccctagagagtctgggccatgccatgccatgccctctgcagctctgtggccttagggcaggctggggacaactgcccctccccagaggcttccttaacagtttcctcactgttccccctctggagggcaggcgtccccacacactaccctgctcaccctagcccaccagagcacagtgccctggctgtctcctcccaaagaccagatgccccaagtctgctgcctgggtctgagagggtcaagtccctcctccaccatcgactccacacacctgggacctgccccctccctcaccacacactgcacacatcacatgcacaatacattcacacatatgta

SEQ ID NO: 114749 - DNA, 1000 bp, Homo Sapiens
aagctcacggtgccaaacgtgaccccccataccaggcggcagcggctacaactgtgaggggcaggcagtggctgcctggacggggacgtgcttgtcctttgacgaggagtttgcgcctcattcaagtcccctacctgcatccctggcggggcatctgcagtccagcctggcagggaccctgagtttgggtctgtgggggtgtggcctctgggggagggcaaaccccggtgggcactggtcaccggtgagccggcgtcggggccacagccttcactcccagccgctgcaggtccccgtttccgtacgtcacccagcgccacgcttctgcacccacgcagagccaccccacctgtgcgttcatgctgacttattaccgactcttctcgagtgaggagttctctccaaacgccattaggctttcagcttccagatgaaatgaaatggctgatgaatcactatatttcaacatattaggaaagatggacctatttgcatccgatgagcaaaatgcacttttttattgattgaaaagttgatgaggcaaacaaatcagggaaaatggctcccttttcatttccctctgagcagcaaattaagcgacttaaaagagctttgaatgagtcaacaacaaaatgcccctaaatgtggaaatgtgaagtgcaaacgtttcagcctcactgtcagtgcccaccgaggacacagcctgcctcccgccctgggaagctgggggctgtggaggaccccggccacttggacatccagccacatcccaaagtctccaaggggagatggggtccccagcaagcctgtccggattagccaagatgaggggcttcaggagtcaacacagatggagctgccaggcgtggtggctcaagcctgccatcctaacactttgggaggccaaggcgagaggatcacttgagcccaagagttcaaggccagcctgggccacatagggagacctcccccatctctaaaaagatttttaaaaattagc

SEQ ID NO: 114750 - DNA, 1000 bp, Homo Sapiens
gttccagccccaccttgccagccgtctgcagcattgccaagtatctaaagttcagctcctaggctcaccccaagccagctcagaaccttccaattctatggaaaacacctggtaactgaagctcagcgtctcaaaggcagccttgaatcctcccttctcctccactgtcatcatcaggagccaggttctgtttttccttagcacctgcccttgtctctccacgtctgttgctgccaccctcctgcggctctggcagtgttgtcaggggatggagcagcacgctgcaggggctctcatctcccctgccccagcccatctcatgccctcagagggatgaatcttaccacatgacgcttctcagggctgcaccacagctttccctaggcggaaacctccaatgctatctatcacaggggcacaaattcttctgtaagttgctatatgtaaagggctttgtgggccagacagtatctgttgcaatgaaccaactctactctacttttatttattttattttatgtatttatgtatgtatttatttatttgtgttttgagacagggtcttgctctgtcacccaggctggagtccagtgatgtaatcacagctcactgcgacctgaaactcccaggttcaagtgatcctcccacgtcagcctcccgagtagctgggactacgggcgtgcccccaccacacccagctaatttactgtattttttgtagagacaggatctccctaggttccccaggctggtctcgaactcctgggctgaagcgatcctcccacctctgcctcccaaagtgctggtgttataggcgtgagccaccgcacccggccaggctttgttctttatggggcttatttacatggttaagggtttgctcagagcttgagaacctatttatattgttctcatatttcgcaaatgtttaaggaagcaagagaaaactgcgagtgcaaaagaccaatttcagtttttaaaattatcactctgagaaaag

SEQ ID NO: 114751 - DNA, 1000 bp, Homo Sapiens
tttaaccatttgtggaactgccagactgtttcccaaagcagccacaccattttacattcctactagcagtgtgtaagcgttttggtttcttcatgtccttgtcaatacttgttattatctgacttttttattctagccatcctagtgggaatgaagtcattttcaattgactttcgtgtgctgatttttcttacaaacagacttactaaaatatcttattcacaatccatggattacttataaaatattcagtcattatagtttgcacataataacagttttgcctcttctgaattcttttatttttaaaaatggtttcttactgtcctagctaggacctctaaatacaatattgaatagaagtagtgatggaaggcatcttggcctttttttctgatcttaaagaaaatgctttcaacatttcattattaaatgtgatgtttgctatagagttttattgttgtatctgtcatttatcaggttagagaagttacctactgttcctagttttctaacagttttatcatgaattgatgttgaattttatcaacccctttttctctattgagataatcctattttcttttaatctgctaattttcttatattgaatcaaccttacatccatgatgtaaacccaacctcctcatgattcatactttgcttggtccagtttgctagtatttgcatcctgtttttaaaatctctgtttataagagatattggcctatactttttcccttttagctgtccttgtctggttttggaatcaaagtcgtgcttgtctcataaagtacctgggaaaggtttcttttattttgttatttgaaagagtttatgtgagattagaattacctattccttgactatttgacaaagcttctttttgtggaaatgtttagctactgatgaaatatcctttaacatttgtttgtttttgattgtcttttgcaagttttattttttatgaatgtatccatttaattcattttcaaagctt

SEQ ID NO: 114752 - DNA, 1000 bp, Homo Sapiens
aaaataaaatcataacctcatagagatatctgcactcccatgttcattgcagcattactcacagagccaaagtatggaaacaactcaattgtccattggctgatgaacaaacaaagaaatggtgatacaaatatatgccatgggatattattcagccttaaaaaggagatactgcctgaagtgtaatttttagaattgctttagtgtatggtctgttggtggcaaactcgttttttggggtctgaaaatgtctttatttcatatttgcttttgaggttttttttgagatggagtttggctcttattgccccggctggagtgcgatggcgcgatctcggctcacggcaatctccgcccacgggaatctccgcctcccgggttcaggcgattttcctgcctcagcctcccaaataactggaattacaggcatgcaccaccacggccggctaattttgtatttttagtagagacggggtttctccatgtttatgctaggctttgaattctagattaactttattttatatcagaacattgacaatatcattccattgtcttcacgttcctcttttgctgctgagttcattctcagtctgtcactactttatttactatttatttatttatttatttttgagacaaagtctcactctgtcacccaggctggagttcagtggtgcaatctctctgctcactgcaaccttcacctcccaggctcaaacgattctcctgccttagccttccaagtagctgggattacaggcactggccaccacacctggctaatctttgtatttttggtagagacagggtttcaccatgttggccaggctggtcttgaactcgtgacctcaagcgatccacccaccttggcctcccaaaatgttgggattacaggcatgagccacagcgtccatcctattttttaaattttttaaaaaaatttacctttcctatggtgctgaagtctgtcaccactttaagaaatctctcttctata

SEQ ID NO: 114753 - DNA, 1000 bp, Homo Sapiens
ccacaccgttcctgtgccattttttctgcccaaacccttccctgcgctttgcttcaagttcttagtagaatccaagagagcttcaccccaagtctttccacctatacacctcaattcctagagccatttgtccctcctgtgacgccccccacccccttcctaaagccacccccggcagcagcccgccccgagcgcgccgcctgtttattcagccgggagtccggcaccgccaggcgcacgcactgcaacaacaaacccagctgaatggagagtttgcaaggagcgggagaaaggaacgggagggggggagaggagaggaggagggggagtttagggagtgggtgggaggaagaggtaagaggaggggggggagtgggggctgcagccgctcgctgcagcagcggggagtggggggcgaggcggggccagggctgcgcgtggggctgggtgtcccattgaaaaggcggacgcactccggcagcccagcactctctcacttctggccagggaacgtggaaggcgcaccgacagggatccggccagggagggcgagtgaaagaaggaaatcagaaaggaagggagttaacaaaataataaaaacagcctgagccacggctggagagaccgagacccggcgcaagagagcgcagccttagtaggagaggaacgcgagacgcggcagagcgcgttcagcactgacttttgctgctgcttctgcttttttttttcttagaaacaagaaggcgccagcggcagcctcacacgcgagcgccacgcgaggctcccgaagccaacccgcgaagggaggaggggagggaggaggaggcggcgtgcagggaggagaaaaagcattttcactttttttgctcccactctaagaagtctcccggggattttgtatatattttttaacttccgtcagggctcccgcttcatatttccttttctttccctctctgttcctgcacccaagttctctctgtgtccccctcgcgggccc

SEQ ID NO: 114754 - DNA, 1000 bp, Homo Sapiens
gacctttctggaggtcagttctcagggcatcctttggaaagttatttgtggaaaggagacacccgtacttatgtggagcagactacaccttttgaccaatagcgtctgattcactccttgaggctcttgacagtttccccatggcagccatccatctattagagcaaatgctcctggagtccttgatctctgaggggcccattggagtagtatgcagatttgagagctggtctctaaagcttaatggggcaaagtatgataatgaagcctgtttgcttttgggtggaattaaatttgtggggtaataataagtatttcctgctggttagaaattctgttacttaataaatgcagtttggttaatagtctttcaaaacatagggcttatggtggccatgaggtagggaaaaataaagaacccttgatggtgacaagcctaggaattactgctctaggccatgagtgtcccagctgtgttctgcaaaaccctcggcctcctcaacagtgacctggggtggggcaccttgcagcagcttcacttttattcattttatattatgagattttaatcaataatagcatttgaacaaaaaggttacattgctaaaacaaagcagaacaaaataacaaaaaccttatcacagtggccagtcctgtttaagctgtaatgtagaattcagcagacattttcatctttctctttaaaaaacaaataatgcaaacaacgtataagcttctcattgtgcctggtgagggatctcggtgttctccaccttcctctgtgaggattagacctagtaaggggagagtgcaggcatgtgtcctggtagcatgcgtgtgtatagatatgtttgtatctatattaggtccatggtatttagatgtatccaccaaaatgtaagaaacgtcatttgtatctcgaatatagtccggattttcttaaactcctgagtaattttgaagcatatctttttccattgtagcttctgaaagtacagag

SEQ ID NO: 114755 - DNA, 1000 bp, Homo Sapiens
  misc_feature (449)..(449): n is a, c, g, or t
  misc_feature (451)..(451): n is a, c, g, or t
  misc_feature (460)..(460): n is a, c, g, or t
  misc_feature (462)..(462): n is a, c, g, or t
  misc_feature (478)..(478): n is a, c, g, or t
  misc_feature (493)..(493): n is a, c, g, or t
tcctttttatttgcagttttttctgttgcaacagaaagtggcttggaagtcttaggtggtatgtaacaaattctttttaaaaattttaaagcagtatttaagtattcttaaatgtgtaaattcatttaatgttttacttctaatttcttgtatcttggctgtctggttttattgcatttttaaaaaaactgaactattatgtattgtaatgaatgatgtgaattctgaactgagacagataattgtattgctgtccaacaggggttgggaggggcattttgtagggtttgtataatttctagagttcgaaaggggtaatataaaaatgtgctcgtgtgtttagcctacgtttttctcatgcctccattaccagttgcaattgtgtatctaagacctccaagcttgtttttaaaacaaaacaaaaaacctttctctattatctcagaaananaaatactgnwnttttaatattaagaanttcaatataactttnaacacacactgtggaacattaamcgtataaaaatgtagttataactatttttaattccaaggtgttgtttgcttttttcttttaaatattttcttaatattttgtcagattaactagatgaataaataaatctagtattaaccgcattatgaattaaataattttgatttaatgaaagggataatatgatttccagtgtttactgtagtgtatcttgtacagataacatgtatttttaaaggaaaaaaaacggaattgaagctattttttcttgcatttctaattgacctgagggacattccgtttgaaatgtactgaagttacagtttctggttttttctccttatttttcttataatgcttgaaatgtctaactattaaaaaagacaattggaaaatgttatgcatggggtttttaagaaaacaaagtgttctttttatttgactgacaattcattttacactctatataataaaatctccacaaggcatcttgtgggcaaagtc

SEQ ID NO: 114756 - DNA, 1000 bp, Homo Sapiens
atggaagagcgctcactgtttgtagggtgtgtgtgtcgggcagggcggcccattcaacctgacgcctggcaggaagctgccctgaggtcccggaagaccatagtggaccccgaggggactggatcctccgtgctgtgggcagtggtgaagctgccctgaggtcccagaagactgcaggtgggccctgaggggactgactctgccgtgggcaatggtgcaccctggtttccaggaggagtgactctgcccaagcactggggatgcgtggcaggcgcctggcaggtcagggtggagacggcctcccctgcttaggggtctgccccaggacgcaggtgggtgcttacctcctccataggtctggcacaggtatgggaaccgccaaatgttccccagccccacggcaaacccgatgcagctcaggaggtactgggccttgttgtcccacttgggcctctcatccccgaggtcgctggcggccgggtctggttctggggcatgagccatggtgactgagtgccccaggcttcagggcgagggtggtgcctcactccacacccagcactagagagccgtctccagcctctgccgacgtttggaaaccacaagcagccccactgcagttgtatttattcatttctttaaaggaaaaccagtggagtgccattaatgggtaactcaggtccaggccctggctctgacgccggggtccttccctggcacccacgtcctctgctccttctcgcatgctctgtgttccaggcaaacgccgggcctggcaccacccccagcaccatgaggaccgtttgcaaggacagcctcaagtttttttgttgcagacaccaggattcccaagactgaggcatattttaatcgttttaaatttcttatgttttatttaaccatttgatcttgagatacttatagattgtcactctgtcactgtcagaaacaactcagatcagatcgcatgcacccgaagcccggattcccgcagggatcc

SEQ ID NO: 114757 - DNA, 1000 bp, Homo Sapiens
taacgactcaaattaagctttttgagcaccactcttgtggggacacacatacgctgatctaggaatgaaatcttcgtggtctcaattctagatctactatgccagtttctctctggctttagctttgagaacctgtataagaatacgtaagtaatccagagctgtgaagagtttaaaggccaacttctccagtgaactcaacctctgggcacttgcaaccagaaattggatacctcataatgatgcaggaaagacccgagttcatgatgagtttcaaaggccacgttcatttaggaaccaactctctctggatttacctcctgagttccagcagcgtgatgggctgacatcccacctacaagtatgacacctgtgtaacaccagctaggtacggctggagaaggctgaagagagaatgccattaaatggaagaatgtactgattgtagtgaccttctccacacacacacacacacacacacacacacctacagtaatacagcaagcgtggaataatcagccaatatataacactccatcagtatttattaaggaaataacctgaatgtggttgattttgacatagctgcaattacagttttcttctatttttcaagccacaataaggaaaataaactactcatggtctaaatactacacataaagtagattcatggcttggtaaggaaattttaagcattccttcaaagattgacgtgctaaaataagcattgatgttttgagtttttttacacctaggatttttagcttgggtgtgtaggtgaaggccaagactctctgcaggaaaaagcttattttcaaactcagaaaataaaatgtcaatcataaaaatctacttcaactttagcaaaaagaaaaaaaaatcaacaaaaagtatactctgtatgctgggatcccgaggttccaacacactgttacaaatctgtggggggtttctttcttctgataattctagagcctgttaccgtagaaaggcattt

SEQ ID NO: 114758 - DNA, 377 bp, Homo Sapiens
cgactccaagaagaatgagtatccacatttagatggcacattatgaggactttaatctttccttaaacacaataatgttttcttttttcttttattcacatgatttctaagtatatttttcatgcaggacagtttttcaaccttgatgtacagtgactgtgtaaaatttttctttcagtggcaacctctataatctttaaaatatggtgagcatcttgtctgttttgaaggggatatgacaataaatctatcagatgggaaaatcctgttacaaagtagaaaagctttagtaatttactcagtgtggtggttttatcctttttttctttttctcccttggtctataatgaaattgttacagcagtgcaaaaaaaaaa

SEQ ID NO: 114759 - DNA, 1000 bp, Homo Sapiens
tgaggaactgccagactgctttccgtggcagttgcgctattttacatcctcaccagagctgtctctgtgcccacgaaaacatgccgctcctccacacagtgctgagcacaggcaaatctctcagggcttggcgtcttcttgctggggggcgggaggggacaaggtagtgtctgcttcgatggtggggtcggcacctgggcagtgtccagtgtctgctttgatgacggggtcagcatctgggcagtgtccaggacacccttgctggtctggcacgaatgctgtggccacggcagcatctgaaggtggcatcctgcccagagtccccagcgggacctgctgcccacagcctcgggcccctcactgtgaactgtcacgttccctggttggcaggagtccccggggaagaacaattggtgtgaactccccgtgcggggtggggactgggcgcagggaagtctcatcatttctagggaatttcacagaggccgcccaatgggctgttccaaggccatgtgtgcccaaagcccactccagccagttggagaaggggcctcagacggccctttgtctttagtgtcttgtaatccagagagttccctttggagtggagaaattccccagaacaagaggagggggttctgggtcctgcccgtgagaacacagaagctcctaggggcaacaccccttagataaacacacagaggaggccacacagcctcacagccagacacgatgcacgggcttggtgcaaacatggatctgggggcagacagcccgtgaagcgccaaacatatctgccaattggagacctcaaggagtccaggcttcatgactttggcgaaccgatactgtctggaagctggagtccaacaccttaacgagtgctggaacctccacgggtcgatccagggcaggcacaaacaggtcgcgagctaaaggaccaacagtggaaatgaacgggcccgacataaattgtcctaattcgtggtgtcgctcgcaa

SEQ ID NO: 114760 - DNA, 1000 bp, Homo Sapiens
ggttccaggagccacctgtgggtgccacctgagccacaggctcccaggaaagcagcacagctctcctgcacccagagcttgctgggtggcggaggggaacacagatggttggggaaggcctgaggccagattgggggactctggactggggcagatgaggctcctcagaatcccacctttgaagggaactcagcttataaacacagaggagcaaagttggagggccgggcgtagtggctcacacctgtgatctcagcactttgggaggccaaggaaggtggatcacttgaggccaggagttcgagaccagcctgggcaacatagcaaggccccatctctacaaaaattattattttttaaaaaaattagccaggtgtggtggtgcttgcctatagtcccagctactcgggaggctaaggtgggaggatcgctggagcccaggaatttgaggctgcagtgagctgtgattacaccgttgcactccagcctgggtcacagatcaagaccctgtctcttaaaaataaaagttggagacaagagctggctcacctgaaaggagggattagtaggtaggagggtggatggaggatggatggatgtgtgggtggataggaagatggtattaagttggtgcaaaagtctttgatattactcttaatggctttaataaaaagcttgaaggaagaatgattggttggatagacagagataaatgcatactggaaacaaagataaagataaaacacaagttataccaggccagcaactctattttgttcactgcctttagtcccagcctggcacatagtaggcactcaataaagcctgatttgtagcatttgcttatttccatggtgtaatttcatgctcctgatttgagtctaaacacagagttgggaagagatatgcacaatctgccctcctggctggtatgagtgagtcccagctcaccgatggtagcccagagagaacatcaagagggtcatagctgtttcctgac

SEQ ID NO: 114761 - DNA, 1000 bp, Homo Sapiens
acaaaccctcacagtgctgcttacccgaaagaaatcccgtgtcattttgggggagtgatctgttatatttgtaatttgtataatattatctcttgatgttacagatgttttttgtatttattgatgctttttctccagagttgaaagatacagatggcagcgatagggttaaggatagagcgcagaactaatgacacatacttgactaacatcatcaagcagaagtacagctttgtgtgagggtgttttctagaacttctgaactctttagattactctgttagataaagccagtgtatcacgagtttctcatttgtagttgccaaaagaaagaaagagaaaagaaaccaattaaaattgggcttattggctgtgggtatgtttttaggttaggactgatgcaggcactcagctttgtaaccaggactgggtttgtaccatgtcttcagtgtgccttccatggtgtcaatttcaactcatagggtgctttaggctctctttcctatggtagccagatgaaagaagtgcttctagatcttatatcttcatggcacaccctccagataattttttcagaagcctagaacttgctcttattaggtcaaattggatcatgttccatcccaacttgtggccagtggaatcagacatgctgattgcctagagtcagttatggctggccccttatgtgggggatggggtcagctgcatatgatagctgcatggttgagaacaggacagaatgactttcccaaaggaacagttttgcttctgtttctggacaaagaagacggaggctgaagatgaccaacgaatgagcactagtgatgacaacatttcgtaaaagaccattgcagggttcatccacctcagtgggtagatgtcagtgtgtaatctttttatatgattatgatctttctatgatctgtttctttattactcttatctcaaatattccttttataaaaacaccttaaaacattttgtataggtagttgaa

SEQ ID NO: 114762 - DNA, 1000 bp, Homo Sapiens
gcgtagactcggccgtaccgctgctctaccatgctaataacgacctacctgtaagcgacatttttgacaaaatgtcctttaaacatcttttgtgctcagctctgtattcgtgggccctccaaagggggtacaggcaggtagaagcctccgtccctaccttataggttgtatatatctgaactggtcgactaaagatgcaaagcgaagtgctccagtgagtgtggtacaggttgttgagatgaaggagagatggcaatcagctgaagttactgaatacgtcaggaaggaggctggtttcagctggctgtgattgggaggatcaatgcgaggacattccgagtcggaaacagccaaggcgaagactcacaggtgggtgaagggagtaaacatggctttggaaatatttccagttttctctgaccaactcgtttatcacctagccgtcacatagatcacaccaagaagctgattgatttacggtcacatttctttcatgttgctttggaaaagatactgaagcctcgggcaacataatgagaccccgtctctacaaaaaaaaaaaaaaaaagaaagaaaagaaaaaattagctgggtctggtgacgcatgcctgtagtcccagctacttgggaggctgcggtaggaggatgccttgaccctgggagccgtgatcatgccactgtactctagcctgggtgacaaagtgagaccctaccctctcaaaaaaaaaaaatgaaagaaaaaagatattgaaagcttagaaatctgcaggagtgggcaagtaagatgaataggttagtaggtcccgacgtcctgggctgcgtgcagcccacaggccacaggttggacaagcttgatccaaaggaagatgccgcctctccatcacagccagttattgccaggcagcaatgccgccagtgcagccagaatgttgccttttcaagaaagccagaaatcgaggctgggtgcagtggctcacgcctgtaatcccagcactttggg

SEQ ID NO: 114763 - DNA, 567 bp, Homo Sapiens
cacggcaagtgctaggaaatataagcagggatagtgagggagttattttacctaagtttgaagggaaagccctctgataaggcgacatttgagcaaaggcccggaagaaatgagatacgtctcgcccagtcgcaccctgtctctacctgacaagtctccggcccgcggactgagtgggggacctgggcggccgccatcccccacttcctcattgttccacggccctggatcgccttcttttctcggtcctcccgaggaccggatgcttctcctctccctggcgtgtgtggaagagatggacgctacgctagagcacatcgcacgggcggtcccattaaaaatcagatgggggagagaagcgagcccaagtcaaccgaggggagcggggagcggaaagggaggagccgtcgggggcgggacagacaccctgcccaccggagggcgcgccaccgccgcccccgctccactccgccagggggcgctgtgtggctcccgagtaggctcagagcgaccgtggccgggcggaagcggctttctggcctaagctttaacaggcttcgcctgtgc

SEQ ID NO: 114764 - DNA, 1000 bp, Homo Sapiens
gccgctaggggagtatgctgtaaacctcttccagggagaaccaggtagtggtatttttgagtcctgtctctgtactaattctactaattcacagtgttaaagcacctgaaaaagtgcttgcacacacatataaaactgccactgttttcctgtggtctaaataaacttgtgtatgtctaattctctctaactcccagagttggtgaattaagagccaaactgttgggcatcttataattggggtgccatatgtaaggtcccaatcctctccacagggagaatctgagtgttagtgattccagttatatggtgaagtacctggaaggggtccatgctcaagtatgcctcagatttgtctacccatttgaagtgcatgtttgggtttttattttgcttttgatgtgtttttttttgtctttttttttgagacagagtctcattctgttgtaaaggctagagtgcagtggcacaatcttggctcactgcagcctctgcctccctggttcaagtgattctcctgcctcagcctcccgagtagctgtgactacagatgcgtaccaccattcccagctaatttttgtatttttggtagagacagggtttcatcatgttatccaggctggtctcaaactcctggactcaaataatccaccagccttggcctcccaaagtgctgggattaaaggcatgagccactgcgcccggccatgcatgttttctttcttgcctggtaggcaggaatctctcaacttatttctgactttctctcacagggaattaattgagatgttcattctgtgcatttgtgagtattgggagtgccaggagcttcctattctgccatgttgctgacatcagtctaaggaaaacagtttaaagaaagttcatcaaaaagtaacagtagacacatctgggtgtcttaaatatgaatacatttctttctttctttctttctttctttctttctttctttctttccttcttttctttcttcctttcc

SEQ ID NO: 114765 - DNA, 1000 bp, Homo Sapiens
ctgcacaagtcagatacttaaattccaagctttaaccgtggcccctgtgatctgtcatgtgcagaagaatcaaaactttcattaacttacagtgaaaatgtgtcgacaaagagcaagaaaaaattaaaagattaatccaaaatgatcaaagacattgggatccagagccaggcggtagtggagagaagcatagtgaagttcgttatgaatattactgaaggatgggagccaaatggaagcagtatggaaagaaatacaatgaaatgaaaatgagaaagacttgtggcagtaaatactaattagaaataaacacagatggaaaattattgctaaggtgagtaaatttagcagccaattctgagatttgtattttctatccctagaaggaaaaaagagccagagaaaacgttgaagtgcaggttttctaattttccaccacaaaaagaaaaaggacatgaaggaggacaaacctagttaagtcttggtagaaacgtcttagagaaagttttcaaataaattattttctaaacacatgccatagttcatcttcattaatactgaacacactttaagtattttctactatttcacttagattaggttttaacaaacatacctagtgtagagtctattaaagcttacatttaatacttatgtttatatactattaattataagtataattataatacatttagaatatgttgaaaagagaggcacaaaatcaatagagattaagaaaaaatttttttctaaagtttcaagaaaatgaaatatctgaatatcttctttcccaagtgctaactagagtaaaactgtctagtttgtgggtttatttccttagggacctattccaggatctaattagtttcactgtgaggaaataagtctgaatatacatactacacattatctagagaaactcaccagcaaggtaagagcttccctcatggttttagtccttcctaactgtcagcccagtgtcccctcatgagaattc

SEQ ID NO: 114766 - DNA, 1000 bp, Homo Sapiens
gtaaactagaaatataggggaacttcctcaacttgataaggaatgtctattaaaaaaactacagttaacatcatacttaatgacgataaactgtacagaagctttctcactaagatcagaaacaagccaaatatgtcatctctaataaacttcttttcaatgccatgctagaagccctcgctaatacaataaataagacaagtaaagaaaataacaggtatactgattggaaaggaagaaataaaaactgtctttgttcacagatgtcatgattgtctatgtagaaaatcaaaagaattaacaacaacaacaaccaaaaaaaaaactcctgaaactaataagtgagtatagtgaagttgcagggtacaaggctaatacacaaaagtcaagtgctttcctatgtaccaacaatgaacaagtaggatttgaatttaaacacataatgccatttacattagcaccacaagaatacacaacacttagatataaaaatctaacaacatatgtacaagatttatgtgaggaaaagtgcaaaactctaatgaaagaaattagagatgatctaaataaatggagagatattcaacattcatggataggaagactcaatattgtcaagatgtcagttcttcccaacttgatgtatatattcaatacaatactaatcaaaatcctacagagttattttgtggatattgacaaactagttctaaagtttatatgtagagacaaaagacccagaatagccaacgcagtactgaaggagaagaacaaagccagaggactggcactacttaacgtcaagacttaccgtaaagcgacagtaatcacgacagtgtggtatttgtgaaagaatagacctctaccaatagttcagtggaataaaatagagggcctagaaatagacccacataaatatagtcaactgacctttgacaaagcagaaaacaaaaggtactggaacaactggacaaccacatgcaaaaaaaaaaaaaaaaaa

SEQ ID NO: 114767 - DNA, 1000 bp, Homo Sapiens
agatgagaagaaatctgattgatgctggatggacctatcacaataggctgtggacttacttgccaccagcttgtgcatttagtgtgttccttttactttttgatactgtgttgtatgaaacccttttgtcctttgatttggtttttgtttttgtttttttaggggggagggggggtttccctcctttgcccagacttctctttgaacacaaatgcattagccttgtggctagaacaccctcttcctacctctgtctcccctcacttgtcatatgctctgacatgctaacatttcttttgttcatccctgttgcccccacagaaacatcccagaaaaaccggtcagtgttccttcctccctgatccttaggtttctgaaatagggttctgttacatcctcttcgatagcctgtttaaaatgtttagaaggtctggagctcaaaaatgcgttcttccacattgataatttagtaaactgagaacattgacatcactacagggcagcataagaggttgcttacatgtggtagcagctctggtttgattcaagttgctaccatgtacattgacagcacatataccataaccagcgtgttgggttgaattgcactttctacctttgtatgagatttacagactttccttctgggtttgtatcatgaccagaggggtactatagggttggtttatactgcaatatagaggatcagaagccatttgatttggtaggtgtgtcagaagggagaatgatggcagacgaactgctggaagaggtcagaagatagccatgctaaaatgcaattatatcctcatgtttatcccaaactaatcttggacttttccactcattagctttgttttgcccttgtttcccttgaaggtttaagttcaaccatattctgtcaactgttcagtttcagtggaatcttgtatttctggttcattataacaaattgttcgcttaaatccaaaaaaaaaaaaaaaaaaaaaaaaaaaaaaaa

SEQ ID NO: 114768 - DNA, 1000 bp, Homo Sapiens
cccaagctaggagagagtgtattattcacaaaagggaactctaggtaataaagttccccaaaatatccaagaggatagaatcagctttaaatacctgccaggcacagagttccgtgccaactcactacactatcagtctatgaagaactttcctggcgccctttcccctactcccgccccatgcaccaaccccagaggcttggcatgctggggaggagttggggcattgggcatagaaagggagaaaaagcctgccactcccgcttcctccagcgcagccttccccatgccaggggaagggagaggctccactttaaatcaagtttattattattataggaggctagacatgctaattactgaattgagaatgtactctgcagtttcaagacttttttcattgtgtaatagtgaccagaaaattcatgaggcctgtccaagttttcagccaataacaggtcaagaacaaaccccacagaatcattttaaaggaacagttgaagactggaatggaagttactttctggttttttcccacaagttgtgattgtttaacctaataattacattactcagatatagggcaagtcttcatgtagagccactcaaagtatgatttagggcagggtttttcaacctcagcactattgccatattgggctagacaattctttgctgtgagggagctgtcccatgcattacaaggacaatgacctctagaaaatccactccaagtttatgacagccagaagtgcctccagactgccaaatgtccactggcggactaaactgcccctagtcaagaagcactgatttaagggaagcagtgtctcttcttcctgcccttcctgcacccagtaattacctccctatcaagccccaaagcatctgaaattccaacattcaacacactctttgctcattccagaaatactgtttttaattcaacatcctctgagaaatgacattgagctgttatcattgataggttagtgtgaat

SEQ ID NO: 114769 - DNA, 1000 bp, Homo Sapiens
agggcagccaggcctcgcaggcgccgcccgtgcccggcccgccgcccggcgccccgcacacgccacagacgcccggccaagggggcccagccagcacgccagcccagacggcggccggtggccagggcggccctggcggcccgggtagcgacaagcagcagcagcagcaacacatcgagtgcgtggtgtgcggagacaagtcgagcggcaagcactacggccagttcacgtgcgagggctgcaagagcttcttcaagcgcagcgtgcggaggaacctgagctacacgtgccgcgccaaccggaactgtcccatcgaccagcaccatcgcaaccagtgccagtactgccgcctcaaaaagtgcctcaaagtgggcatgagacgggaagcggtgcagaggggcaggatgccgccgacccagccgacccacgggcagttcgcgctgaccaacggggatcccctcaactgccactcgtacctgtccggatatatttccctgctgttgcgcgcggagccctatcccacgtcgcgcttcggcagccaatgcatgcagcccaacaacatcatgggtatcgagaacatttgcgaactggccgcgaggatgctcttcagcgccgtcgagtgggcccggaacatccccttcttccccgacctgcagatcacggaccaggtggccctgcttcgcctcacctggagcgagctgtttgtgttgaatgcggcgcagtgctccatgcccctccacgtcgccccgctcctggccgccgccggcctgcatgcttcgcccatgtccgccgaccgggtggtcgcctttatggaccacatacggatcttccaagagcaagtggagaagctcaaggcgctgcacgttgactcagccgagtacagctgcctcaaggccatagtcctgttcacctcagatgcctgtggtctctctgatgtagcccatgtggaaagcttgcaggaaaagtctcagtgtgctttggaagaatacgttaggagcca

SEQ ID NO: 114770 - DNA, 1000 bp, Homo Sapiens
acagacagttgcggtgggtgtcatcaaagcagtggacaagaaggctgctggagctggcaaggtcaccaagtctgcccagaaagctcagaaggctaaatgaatattatccctaatacctgccaccccactcttaatcagtggtggaagaacggtctcagaactgtttgtttcaattggccatttaagtttagtagtaaaagactggttaatgataacaatgcatcgtaaaaccttcagaaggaaaggagaatgttttgtggaccactttggttttcttttttgcgtgtggcagttttaagttattagtttttaaaatcagtactttttaatggaaacaacttgaccaaaaatttgtcacagaattttgagacccattaaaaaagttaaatgagaaacctgtgtgttcctttggtcaacaccgagacatttaggtgaaagacatctaattctggttttacgaatctggaaacttcttgaaaatgtaattcttgagttaacacttctgggtggagaatagggttgttttccccccacataattggaaggggaaggaatatcatttaaagctatgggagggtttctttgattacaacactggagagaaatgcagcatgttgctgattgcctgtcactaaaacaggccaaaaactgagtccttgggttgcatagaaagcttcatgttgctaaaccaatgttaagtgaatctttggaaacaaaatgtttccaaattactgggatgtgcatgttgaaacgtgggttaaaatgactgggcagtgaaagttgactatttgccatgacataagaaataagtgtagtggctagtgtacaccctatgagtggaagggtccattttgaagtcagtggagtaagctttatgccattttgatggtttcacaagttctattgagtgctattcagaataggaacaaggttctaatagaaaaagatggcaatttgaagtagctataaaattagactaattacattgcttttctccgac

SEQ ID NO: 114771 - DNA, 1000 bp, Homo Sapiens
tttgactgttttagctcggcaggaaacccaaacgaggaatgctatctatcagaatagactggccttggactacttgctagcagctgaaggaggagtttgtggaaaatttaacttaaccaattactgcctacaaatagatgatcaaggacaggtggttgaaaacatagtcagggacatggcaaaggtggcacatgtgcctgtacaggtttggcacaagtttaatcctgagtctttatttggaaaatggtttccagctataggaggatttaaaaccctcattgtaggtgtattgctagtgataggaacttgcttgctgctcccctgtgtattacccttgctttttcaaatgataaaatattttgttgttactttagttcatcagaaaacttcagcacatgtgtattatacaaatcactatcgctctatctcacaaagagactaaaaaagtgaggacgagagtaagaactcccactaaaagtgaaaattctcaaagggggggaaatatggtatgaggtcgccacttctcctgttgtccttctcagtttctccccaacctccccttttccctagtttataagacaggagaaaagggagaaagcaaaaagttgaaaagaaacagaagtaagataaatagctggacgaccttggcaccaccacctggccctggtggctaaaataataataatattattaacccctgaccaaaactattggtgttatctgtaaattccagacactgtatgagaaaatactgtaaaactttttgttctgttagctgatgtatgtagcccccagtcatgtttctcacgcttacttgatctattatgactttttcatgtagaccccttagagttctaagcccttaaaagggcaagaatttctttttcggggagctcggctcttaagacacgagtctgccaatgatcccggccgaataaaaaacctcttccttctttaatctggcgtctgaggagttttgtctgcgactcatcctgctaca

SEQ ID NO: 114772 - DNA, 1000 bp, Homo Sapiens
acaggtgacacaattaagtttctacttaataaagagtaagatggtgatggtgtgagaaatacttgaagagggttaagaagactggagcctgggggaccagttaggaggccattgcagtaatccatgggagatacggcaggctggtggtatgggatggagaagtagggatagacatgagagctattgaggagacagttgttctgacaggactcagtaattgatgggtttgaaattgacatgtaggcatggtacttttttttctagtaaaaaaaaattggtagaaccttaattatgataaatgataaaacacatgtgcctttgtccttattcccccctttaacacctttttacaggtgtatacatcaaaggatgttgccatgacgaacgagagaacgcttaccaatgatttcccattgctgcttggaatgaaaacccaatgacacatttcaaaattttgcagtggtaaatcatgtaggtcatcttattgcactaccatgcaaacttcttgattttgccaaatcagtcagttgagaggaaaaaggaaaaaagtgttacctatatatactgtcatatactattgtaaacaaaaaacaatccgtatataggtttatatgattatacagtacaaaactatgtacacacatgaacaaacatacatatatgtatatacacactagaagcttaaacagctatgtgacacttgagatttttatatacagactttaccagggtatacaaaaaataacataaatttttacttaattttccctgtctttttaatggttccatttgggtgggggaggatccagaggattttttcctcactttaattacctcattgcatttccttcttttcgattttggtttttataagcgggaacactgtgttaatccattctaattaaaacccagccatgcaacccttcagttaaataaacaatttttgagtctgcctaggatatcatttagtcagaaattgtctctatggctttggaaatga

SEQ ID NO: 114773 - DNA, 1000 bp, Homo Sapiens
aagttctctatagtgattatctgtgtactgactgaatcagtgaatgagaacactagacataccagaaactcgtgcttgtcatctccaagccaatggacttaactgtttgtggcatttaagtccataaaacatacttcactgtcaaacacataggcttataggtttcgtcagttttccatgtgtaagataaatgtctgttcttagccatccagatattcagtcaaatttaaatacaacctaggagagagaaagtggaatttatttattttaaatgatgcatttgaaatctatagtattcctaaaagtcttctaaacagtattaaatgttctacccataaaggttcccagaaaatatttgagtaaatctatctgatggtctagacctgaaaataaataaagtttattttgctgggcgctgtggttcatgcctgtaatcgcagcactctgggaggccaaggcggatggatcacttgaggtcaggagttcgagactattctgcgcaacatagtgaaaccctgtatctacaagaaataaaaaaattagcccgccatggtggcctgtgccaccatgtctcagctactcggtaggctgaggtgggaggatcacctgagcctagggaggtcagggctccagtgagccaagatcacgccactgtactccagcctgggtgacacagtaagaccctatgtcaaaaaataagtttaaaaagttttggtttttttttttttcctcagaataagatgagagtaactagaattactatagtaaggggaccagaagaatggaagacctgggccaggaaaacttattttttttctttttgcttatataattttggtatatatccaatagtatcattaccggagaataagtgagccagagctagcaatcaataggatcttgatttttccatgtccccacagtcatacgaaatctgctattgttttttaaatcatagtattaaattgacatattttaaactcataacattcataaagct

SEQ ID NO: 114774 - DNA, 1000 bp, Homo Sapiens
acatccagcatttaatatttgtctagatctatttttatttaaatctttatttgcacccaatttagggaaaaaatttttgtgttcattgactgaattaacaaatgaggaaaatctcagcttctgtgttactatcatttggtatcataacaaaatatgtaattttggcattcattttgatcatttcaagaaaatgcgaataattaatatgtttggtaagcttgaaaataaaggcaacaggcctataagacttcaattgggaataactgtatataaggtaaactactctgtactttaaaaaattaacatttttcttttatagggatctgaaacaacattcatgtgtgaatatgctgatgagacagcaaccattgtagaatttctgaacagatggattaccttttgtcaaagcatcatctcaacactgacttgataattaagtgcttcccacttaaaacatatcaggccttctatttatttaaatatttaaattttatatttattgttgaatgtatggtttgctacctattgtaactattattcttaatcttaaaactataaatatggatcttttatgattctttttgtgccctaggggctctaaaatggtttcacttatttatcccaaaatatttattattatgttgaatgttaaatatagtgctatgtagattggttagtaaaactatttaataaatttgataaatataaacaagcctggatatttgttattttggaaacagcacagagtaagcatttaaatatttcttagttacttgtgtgaactgtaggatggttaaaatgcttacaaaagtcactctttctctgaagaaatatgtagaacagagatgtagacttctcaaaagcccttgctttgtcctttcaagggctgatcagacccttagttctggcatctcttagcagattatattttccttcttcttaaaatgccaaacacaaacactcttgaaactcttcatagatttggtgtggctatgaattc

SEQ ID NO: 114775 - DNA, 1000 bp, Homo Sapiens
gcatggggctgcttttggtccaccgcaaggtggatttcatcctccttattggcaaccaggacctccaggacctccagcacctccccagaatcgaagagaaaggccatcatcattcagggatcgtcagcgttcacctattgcacttcctgtgaagcaggagcctccacaaattgacgcagtaaaacgcaggactcttcccgcttggattcgcgaaggtcttgaaaaaatggaacgtgaaaagcagaagaaattggagaaagaaagaatggaacaacaacgttcacaattgtccaaaaaagaaaaaaaggccacagaagatgctgaaggaggggatggccctcgtttacctcagagaagtaaatttgatagtgatgaggaagaagaagacactgaaaatgttgaggctgcaagtagtgggaaagtcaccagaagtccatccccagttcctcaagaagagcacagtgaccctgagatgactgaagaggagaaagagtatcaaatgatgttgctgacaaaaatgcttctaacagaaattctgctggatgtcacagatgaagaaatttattacgtagccaaagatgcacaccgcaaagcaacgaaagctcctgcaaaacagctggcacagtccagtgcactggcttccctcactggactcggtggactgggtggttatggatcaggagacagtgaagatgagaggagtgacagaggatctgagtcatctgacactgatgatgaagaattacggcatcgaatccggcaaaaacaggaagctttttggagaaaagaaaaagaacagcagctattacatgataaacagatggaagaagaaaagcagcaaacagaaagggttacaaaagagatgaatgaatttatccataaagagcaaaatagtttatcactactagaagcaagagaagcagacggtgatgtggttaatgaaaagaagagaactccaaatgaaaccacatcagttttagaaccaaaaaaagagcataaa

SEQ ID NO: 114776 - DNA, 1000 bp, Homo Sapiens
gtctttatgcattccaaaaacaacacttttctctgtgtgtaatccccataatcaaattgatgcttgaatgacaaagcaagaaaaatgatataaaattggggaaattaagaatgatataatcgtgttactgcctctgtgccctatatatctaaatatgtatctatcaaaaaacctctccaacagaacatggtgacagagataaatttcagtttgacaaatgcaccaaacaaaaaatgaaatgtatcataaaccattgctctttctcaatccaaacagaaaaaaattcctaaagaaacctgcattctttataataactagggtaatgtatgatgtgttctctcaatttctgaaatactatgtaagtcacgaatctaaagccatgcaaaagttatacattcacaatatgcttgtagaagattcatgttaaatgtggctttgctcatagttttttaaaactggtagttttgactacaaatactaaaataaagtttattaaaattttttcacttttcaaacaatcatcttagtatagagacactgccttattcatttattcattcaatatattcagataattcactattttctataaaagaaaaatgcccatcttgattaatgagatcatctatgaagcaattgtgctaactttcctaagtttcatacctattaatttcaaaaaatttccactaatttctgcattataagatcgattgaatgggaacatctaatctgtctttacaaaaccctttattactgcaactataatctgtagattttaatactgttttctgatattttcatcaatactgcagaagttgtccatatctatcacaaaattcacgacctattttaagtagctaagttctcttaaattttactacaaagtaatcccaaattatctaaattgattattccatgagtcatgagcaccaaaacatggtatataaatgagtgtactgcttgatggagaacattgatcagctgactcctgttcaccctt

SEQ ID NO: 114777 - DNA, 1000 bp, Homo Sapiens
agacctaaacataagaccagaaactataaaacttctagaagagaaggagcaacagctcatggacattggccttgatgactttttggatatcacatgaaaaggtcaggccacaaaaacaaaaataaatgagactacatcaaactaaaaagcttctgtacagcaaagaaaacaatcaacaaaatgaaatgacagcctatagattgggaaaaaaaatactgcaaactatatatctgataaggagttaatatctaaaatgtataaagaattcatatattaatagtagaaaacaaataactcaattttaaaaagacctcaatagacattctccaaagaagacataaaaatggccaatagatagatgaaaagatactcaataccattagtcataagagaaatgaaaatcaaaaccaccatgatataccacttcacacccattagaatggttattatcaaaaagtcagaagacaaccaatgtgggcaaaggtatggaaaaagggaactcatacactattgatgggaatgcagactggtatagccattatggaaaagaatatggaggtttctaaagaaatcaaaaatagagctaccatatgacctaacaatccctcttctgggcatatacccaagggaaataaaatcaccactttgtaaagacatctgcactcccatgttcattgcagcattattcccaacagccaagacagggaaacaacctaagtgtcagctaatggacagatggcttaagaaaccgtggtacaaatatacaatggaatattgttcagtcttaaaaagaacaagattctacttgccacgacatggatgggactagagggctaagtgaaataaggcagacacgggggaaaaaaatcacatgacctcacatgtggaatctaaaaaatcagagatagagaacaaaacagtggttatggggtcagggtgggggaatgaagaaatgtatgtcagaggatacaaaatagcaggtatgtagaatgaagaagtc

SEQ ID NO: 114778 - DNA, 1000 bp, Homo Sapiens
cccagaggggacaaaggacttgtcatgggtccagctgtgagcctggctgccagtcttaaggcccagtgctcccccacaggatgctgtcacacacacttggccctgatgaggtcccctcttagctgggatccagccccatgaccagcaccccgaggctgcaaagggtgctgggctccagcaccccaagactccacattgaccccaagactccacattgaccactctgagcagaggagcccttgggtctttggggaggttagagagctggcacccccaccccagtctacccggccccggggttcctctctggatagggggccccagtgcagttcacacaggccctgcacgtgttccttcctcagggcatgcgtggctgaagcttgctcaacactaaacatcccagcccagtttattgaatgtgagggatacgcagggtctgagcagagcagccatcccctcctgcctcccctccttccagcgctagagccagagtgactccactgtcctgtgcccacccccagaccaaggagcctcaggaccactcttggggcagggagctcgaggctataggaagattgccccagagcaggatggctgagtgttcaggagtccagccatgtggtaaccgtgcactgcagtgtcacctgaacagggatgtcaccacgtgaaggcatcccagctgcatccttggctgacatatcctaactgtgcctgtacaaggggctccacacacacacacatccacacacacacacacacacacagtcacacttacatacccattcatgctcacacatttatccacacacattcatactcattcacacacacacacgcattcacacactcacacccactcacatgcactggccagagccagagtcgatagcgccctctagtggccactgttgtcccttctctagaaggtctctgtcttatcagtcacaacccccaggagtcttcatccggaaatcccaggatgcacaagtctggcaagatc

SEQ ID NO: 114779 - DNA, 1000 bp, Homo Sapiens
agatccttcagccctagtcaagacttcagatgactgcagcccttaacctcatgagagactttgagccaaaccacccagctaaactgctcccagatttgtgattcacagaaactgcaagattacaaatgtttattattttaagtcaccaaatgttggcataatttgttatatagcaactaatacaaaagctagaaaaatactttttgaaacaaaaaattttacttgtcttttcaaaatcagtttttatctccttgttttcaaatgatctcttccacattaatgagggaatttctgttgttttcaggacaactgagatctaaagcaacaatgaatatttgctcagtttaatataaagacttgcaagtgactttgtgctgtatatgtcttgctttgtgcttgcttcaaattttatagtttcattgaagagatttttctgataatgatataagtaggtaatacaagtaggaataacttatatatcactatttttaaaagagtaggaaaatgttgattgggttagtttaaatccagaaagaatacttgcaaagatgtccttaattaccccaaaatgccttagtttgggagtaccagctaaagagctatgttagggtactcatcaatattgaagagaccatgataacccctggttgctattctaagctatgtatttagaggtgctgcaggtctttcctttgggcttgctgacacaattacattttaataaaggtttaatgtacacaccctttggaaagcttactggttttttttttgtttttgagacggagtcttgctctgtcgcccaggctagagtgcagtggcgcgatctcggctcattgcaagctccgtctcctgggttcacaccattctcctgcctcagcctcccgagtagctgggactacaggtgcccgccaccacgcccgggtaattttttgtatttttagttagagatggggtttcaccgtgttagccaggatggtctcgatctcctgacctcgtgatc

SEQ ID NO: 114780 - DNA, 1000 bp, Homo Sapiens
gagagaggcagacttcggggaagccctgactgtgcagagctaaggacacagtggagattctctggcactctgaggtctctgtggcaggcctggtcaggctctccatgaggttagaaggccaggtagttgttccagcagggtggtggccaagccaaccccatgattgatgtgtacgattcactcctttgagtctttgaatggcaactcagccccctgacctgaagacagccagcctaggcctctaggtgacctagagccgccttcagatgtgacccgagtaactttcaactgatgaacaaatctgcaccctacttcagatttcagtgggcattcacatcacccccacaccactggctctgctttctcctttcattaatccattcacccagatatttcattaaaattatcacgtgccaggtcttaggatatgtcgtggggtgggcaaggtaatcagtgacagttgaagatttttttttcccagagcttatgtcttcatctgtgaaatgggaataagatacttgttgctgtcacagttattaccatccccccagctaccaaaattactaccagaactgttactatacacagaggctattgactgagcacctatcatttgccaagaaccttgacaagcacttctaatacagcatattatgtactattcaatcttcacacaatgtcacgggaccagtattgtttcctcattttttataaggacactgaagcttggaggagttaaatgttttgagtattattccagagagcaagtggcagaggctggatccaaacccatcttcctggacctgaagcttatgcttccagcctcccactcctgagctgaataaagatgatttaagcttaataaatcgtgaatgtgttcacatgagtttccatagctttggttccaagaaatatcacatttctgtatttttgtaaatcaaatgaactctgactctgagccccacttgcctgaagattggaaattcaatctcaggatgtg

SEQ ID NO: 114781 - DNA, 1000 bp, Homo Sapiens
taactggggggaatgtttttccaaagcactctgaatcccccagagttcaccacagtctgttccccggctggatagaggacatttaagacaattgtgcttctaaaaggaccggtttacatggaatttctcccagccccatctgtggtataaggtgaggtatatcacagcaagatttgcaattaattagtactttggaaatcgttagcatttttaggagtgcatttggtttcttctgccgaaatagtcagttccctgcagacaaggcaggagggggttgagcagagttgagttaggaggagtgggcacagtcctgggcaggaactgcagtccccaggagacttaagagactttggctctcacctgaatcccagattccccgctcccgcgggcttcattccctggcttttcacactgccggggagagaaaggggagactttccctcagtcccctcccagaccagtcccagccccaaaatggcagcattttaaccctggggcgagccgcttccgctccacctccgcggccatccagccccatctccgcggagccttggctccccgatcctgcgagtgaaaccagctgctctccttttccttcccgcggttggtgggagattcacgccagccactcaccccgggtttatgtccatttcctccgccgctcccaccgtggttgccggaggaggagccggtgctggatccctgcaggggaaagcaagatttcaaacgctgtcctaaaggacctaaaggggacccagtcgttcccagcggtgttacagatttgttggaaccccaatcagattccagtcctctttccaacctccagaccttccccctctttagcctgttggtcgctgcaggaagttattccgagcatggagaaggccaggtgtggccgagggtattcggaactacgcaatgatttggagaacctgagctgctgcccaccgcaggccgggggtgggaacccctggagcccggccgcgcagtagccgcgatc

SEQ ID NO: 114782 - DNA, 1000 bp, Homo Sapiens
agaatcagcgacccccagcctgtgttcaggagcaccccgtgtgcccgccgcacagccccgagggtcctgggacaccccagcctctctgcatctgtctcccgtttcattccccaagcgcaactccaaggaacctgggacccgccccctcgcaggggacttcctctctgcctgtggccaaagcacagccccaggacgcagagcttgagttgtctccctgttccggcccccactctccaggctcttgttccggatgtgggtccctctctctgccgctcctggcaggcctcgtggctgctgatgcggtggcatcgctgctcatcgtgggggcggtgttcctgtgcgcacgcccacgccgcagccccgcccaaggtgagggcggagatgggcggggcctggaaggtgtatagtgtccctagggagggggtcccagggagggggcccttggggaagccctggaggaggtgctggggaaaccctgggggaggtgcctgggggaacccctgaggaaacccctgaagcagggggtccccagggaagtggagatatgggtggtcaagcttcatgctttctctcccctatccccagaagatggcaaagtctacatcaacatgccaggcaggggctgaccctcctgcagcttggacctttgacttctgaccctctcatcctggatggtgtgtggtggcacaggaacccccgccccaacttttggattgtaataaaacaattgaaacacctgtagtcgtattctttctcaaagaaccccagagttcccaaagcctccctcccatgaactgtttctggatccaaggccccctcagaacccccacatgtccccatcccatcagcccaaggatctggcataatgtttttgtgcttcatgtttattttaggagagtattggggagcggtctggtctctcagggatggcactctgtgggtctgtatcgcggtaggagttggaatgaggtgcagggtgggcttcaggaatggctggatc

SEQ ID NO: 114783 - DNA, 1000 bp, Homo Sapiens
taagtgattacaatatcaattgagtgggtcatatccaaaaattcaaaaatgaaataagatagaaaataaagaaaaatactgttttgggaatgttgtttcagttatacacacttgcatatgtacgaatatcattctgcgtcatgacacaaaatgtatttctcactatgggttacagttaaaaaaggcggctatcactctaaccgcattagctcactttatcttcagtgatctaggaagtgggtagctattatcgcaccctctttgtaaaagaagcaacagtggcttagggcaatgatgggacctgacagagggtcacacagctaagtggcaaagctgggaatcaaactcaagctgttagaaacctatcctcttacccgctagtccagggtttctcaatgtctaatccataaaactagctgcaaaaccctctgggaggcctgttttgaaggcagattccttggcctgcccctacacttgctcaatgaaaacctttggggatggagccttatcagcattttttataggagttctgctactcagtgtgtgtatcccagaaggctgacaatgagctgtgcgcccctgctatgtaagatggaggacagctcttcaaaactctgcaccacaactttaaactctaggggattttgacacgggctgttattatctttctgaaaggagtcctgcagcggggcctggccctctcgctaccactgtgctatcttgccatggacaatgtcccagactcttgactgagcccttttttgaccccagtcagccaccaggtggccttaccaggtactggctgcacatccaggtttttgtctttctcagtgttgacgaccacagctcctctcatgagtggtgggaagaagggggcaataacagacgcatcaaatttggtgatagggatgctggcaggaaatgccacctgctcaatcacctctgtctccatcgtggcccaaaagtcctccacatttacctcattagagcccaggaattc

SEQ ID NO: 114784 - DNA, 1000 bp, Homo Sapiens
actctccaattttcctcttaaatctctatctcctttgttggctattcttcccttgtttcatcctttaagtgttagcattccttaggatgtggcctagactcttttgtgttcacttcatacccactccaaacctataaatgcagtctaaatctctccagtgagttccagacccatgtcttacttatttgacctctctcttaagtgtccaacaggtatctcaaaatgacatgcccaaaacttgtcacgcacaccaatcccagcataaactgaagatcatctggtgcaccaggggtcctcaagtcatagctggccaattggctgggttccagaattatgtgagtgccacacactttccaattatgaagtttccaactatgcagctatcatctatgcatggctttggtctgccttgtttagccctcccttttttatacctctcagtggccagttggccaccagaaatgaagactctttaaaaattaaatttaaggtccaaatttcctctagaggaaaacaaatgcttatatgttttggtataaaagatatgttcatgttgcaaaagataaattcaacagtattgactacagtaactgtggtactaagttttctctacaatcttgctactcagtgctatcagcaaacccacagcatcagcatcacctgggagcttcttagaaatgtagaatttcaggccccaccccagacctactgaatgagactttgaattttaacaagatctccaggtgattcgtgttcacaataaaattggaaaagctctgctatagtatgaaacattgaatgtgtactcaagagccctgtttccttttgaaatttttccatatcatgctcaaagggatttaaacacattcattgcaaagattatttttgtagctctggatgttgtcatcatgaggagatataaaagctccctctaattcactttatgaagaagttgatgccttgaacattatgttcacttatcctaggatgaacatctcct

SEQ ID NO: 114785 - DNA, 1000 bp, Homo Sapiens
gccagagcaagaaagggaccattgtgccctgtacccccttcttaggcaccaggtagactttccctctgtctcgttgaccaggacaaagccaaatatgtgtccctagtagggaatgtggtgagcctaatggcatgggcagcgacatccccttactggtgagagcccagttggggaactcacgccacagaaacagtttataatgagagaactctctttgcagcaaggtattcactgcagcatcatttgtaataggaaaaagctagaacacttcacataccctgactagggcctaattgagtaaatgaggttttatcaacttgatggaagataatttcgacactgaaaatacagtggaccctcataactcctggattctgtatttgcaagttcacctacttgctaagatgtatttgtaacccccaaattaatacacttggcactttcacagccattgacatgctcagagcagcgaaaaacttgagttgccagacatgaacacacattcccagctgaggtcaagcaaggtgacactctgccttcctttttgagttctcgtactataaggtgtcctttttgaggtccccttagtgctgcgtgttcagaaccaaactcccactcattttgggtgaacagaaccaaacccccaagggatgctacagtggtaggaacatgtgcacatctgtttgacagagctgtgactcatgaggcattttgcagagcaactgcctaatggggtctgaagcacagccccaggagaaaccttgtcttgttttttcccttttttttgagacagggtctctctctgtcacccatgctgaagtgcagtggcaaaatcaaggctgtctgcctcccgggctcaagtggtcctcccatctcagcctcccgagtagtggggactacaggcatgtgccaccatgtctgggtaatgtttgtatttttttagagacagggttttgccatgttgcccaggctgcttttgaacccttgggctcaagtgatc

SEQ ID NO: 114786 - DNA, 1000 bp, Homo Sapiens
ggcaattgcatatgttttaaaagcaatggtaaattaagttgtcttccaaaactgtgtacttgtctggtcagctgtgtatgatcagttatctacctcagagtctattttcttttgtgctgggacaggttgctggccctccctgtttccacagaccaaatcctcctagctcaggagctagggctaagcagttatttctttcaagtattttttagttcttaaattttatgcttgtatttgatgatagatgtcagtgacatttcatagtttcaaaagtccttgctgctctgagaagtgtagattctagtgaaaattacatagtcataagagaaatgtgtttttgtttttgtttttgtttcatttttttaaagttgtggtattattggttctatgctccctggaatattactgctttgtgaaagtccagactgaacgcagcaccctctgtgtacctagtacagttataaacctgggtctctcactacttgatatttttgcattagttaagacagaaatttgatagctcggttagaggggaggggaaatctgctgctagaaatgtctgaactaagtgccatactcgtctgggtaagatttgggaaacataacctctgtacataaaaaaaaaaaaatcagttaaacatcacatagtagacagccattaaattataaaaaaattaatttatgaagaaagaccttttgtacagattgaaaaaaaaagattttcatagagatatctatatgatcaagagagttaattttttatttttgttttactagtgccacagacttgccagtggtaacttatttgtccggttcaagataactctgtagttttctttcctaggacttgttgttaaacgccaaaagacatttttgaactgtacatttgatcagattgttagcttttctgttttatttcttttgagaacctttgaataaaaaacatctgaaattttaaaaaaaaaaaaaaaaaaaaaaaaaaaaaaaaaaaaaaaaaaaa

SEQ ID NO: 114787 - DNA, 1000 bp, Homo Sapiens
tatagatagttttgactaaagtactacattacatttagtatgttgacttttaaaataccaaagcaatttatattcaattaatgcttcttcatacaccaagaatctaccacaatacacagcacacaaaggccgttcaataaacattgaatgaatgaatggtttggctagggccagggtggggagttaaagtgagaggagggtatatgttatagagaacagtggtagaaggaactctccgtgcaagtaaattaagggaaagatgggacaccagaaaggcaaggtgatgggcctataagcatactggataatggaagaagtccatttctttctagctagtttgaagggcctaaaagcactgagatgtttttgtatcttccctacatttggagatgatattaggttgtcataacaaccacaaatatagaccattactaaattggtggatgtcctctttctcccattgttattgccttcctcttttgcctgctaaactaaaaattggatataagattgagaatgtattatataatttgcaagacatagaggatgtttatagaatatactaaagtatccctcagcaccaatatgggagtatcctggtctcaagtttataatttttgcacatataatctaaagaagagactttaaaaataaagtacacaaatatgaaccaaagagtagcttaaaaatactttcttctaggtctgaaattttcttttctttctttttttgttttggagacagagtctcactctgtcgcccagggtggagtacagtggcgcaatcccagctcactacaacctccgcctcccaggttcaagcaattctcctgcctcagcctcctgagtagctgggattacacgcatgccctaccacacccagcaaatttttgtatttttagtagagatgacatttcaccatattggccaggctggtctcgaactcctggtctcaggtgatcctccaccttggcctcccaaagtgctgggattacaggtgt

SEQ ID NO: 114788 - DNA, 1000 bp, Homo Sapiens
ggagatcattttggagctttaagttttgactgcccacctggatttcggacttgcatggggcctgtggccccttcattttggccaatttatcccatttggaatgggtatatttacccaatgcctgtacccccattctatctaggatataactaacttgcttttgattttataggtttgtaggcagaagggacttaccttgtctcagatgacactttggtcttggacttttgggttaatgctggaatgaattaagactttgggggacttttgggaaggcatgactggttttgaaatgtaaaagagacatgagattcggaaggggctaggagcagaatggtataattaggctttgtgtccccacccaaatctcatcttgaattgcagtccccacatgtcaagggagagaccaggtgcaggtaattgaatcatgggggcagtctcttccatgctattctcatgatagagagtgagttctcatgaaatctgacagttttataaggggctcttcccctttggcttggcacttcttcttgctgcgttgtgaagaaggtgccttgcttccccttcgccttccgccatgactgtaagtttcctgagacttccccagccatgctgaactgtgagtcaattaaacctctttcctttataaattacccagtctcgggcagttccttatagcagtatgaaaacagaataatataaggctgcatgccaggcagtcccatgcctaggagggtccatgtctcggggtccctcccaggaaggtccatgtccaggggtccctgcccaggagggttcatgcctaggaggacccatacccagtagagtcatgttcaggagggtctattcacagcagagttcatgcccaggagggtccatgaccaggaggggtctgtgcccaggaaggtccatgccaaccaaggaggatcaatgcccaggaggacccatgtctaggagggtctacgtccaggaggacccattcccaggagggcatacccag

SEQ ID NO: 114789 - DNA, 1000 bp, Homo Sapiens
gattctgtgtcatgctggttttcctttcagaattgcttgaaatcgagttctcttagccactggacacctagttttcaggagaatgtcccaagattgtttatatatacaaaatggcaaaagtactgtttttcgaattgataattcaagcaaaggcttctctttactgtcactgatttttttttgtttttattttgtttccttgtttctatttccttgaagctttgaagggaggagaagcagaaaattttgtttatgtttgttaaaaatcagaactacttaatgctttttgccacagcatatttccttgcctgttggagccgttaggaagattacctatgtcctaatcttcaacctgagaagatttttgactcttgtgtctactgttgattgtttgcttgagttctcaaagacctgtggccaggtattttaaaaagtcgtctatttctttctagttgcatcaacttgcacactggtgtctaactatatgtggtattcggaacttgtaattcttattgagcagccattgcctatattttctcagctcctcactgatttctttatatgagctcagctgacaagcaaatgcagctattttgtttaccctctcttcataccggaccatcaacaacagtgttctaactcatccctgatggtctgtgagatgtagactattacacaagattcaagttactcgtaagcaacttttagatagagttggtcctgttaggaggagactcttgatgtcaccttcagtatcttgaaagcgggtcccctccccgaggctcttaattctttgaaaacttgatgctgtttcagctgaaaaattagcaagactgttaaaaaaaaaaagttgaggggagctgtttaagaaactgaaaagtaattgcaaactacattggataattgtgactttcagttgttgttctgtatcagttgaatttttgtgctcttttccctgtgtacgtggtggttctatttttctccaataaaacttttattt

SEQ ID NO: 114790 - DNA, 1000 bp, Homo Sapiens
caaaaggtagatcctgagatgatttggtcagattgggataaggcccagcaatctgcattttaacaagcaccccagtcactaggatgcagatggaccacactttgagaaacaccacccatttctactttttgcaccttattttctctgttcctgagcccccacattctctaggagaaacttagaggaaaagggcacagacactacatatctaaagctttggacaagtccttgacctctataaacttcagagtcctcattataaaatgggaagactgagctggagttcagcagtgatgcttttagttttaaaagtctatgatctggacttcctataatacaaatacacaatcctccaagaatttgacttggaaaaaaatgtcaaaggaaaacaggttatctgcccatgtgcatatggacaaccttgactaccctggcctggcccgtggtggcagtccagggctatctgtactgtttacagaattactttgtagttgacaacacaaaacaaacaaaaaaggcataaaatgccagcggtttatagaaaaaacagcatggtattctccagttaggtatgccagagtccaattcttttaacagctgtgagaatttgctgcttcattccaacaaaattttatttaaaaaaaaaaaaaaaagactggagaaactagtcattagcttgataaagaatatttaacagctagtggtgctggtgtgtacctgaagctccagctacttgagagactgagacaggaagatcgcttgagcccaggagttcaagtccagcctaagcaacatagcaagaccctgtctcaaaaaaatgactatttaaaaagacaatgtggccaggcacggtggctcacacctgtaatcccaacactttgggaggctgaggccggtggatcacgaggtcaggagtttgagactagcctggccaacatggtgaaaccccatctctaataatataaaaattagctgggcgtagtagcaggtgcctgtaatc

SEQ ID NO: 114791 - DNA, 1000 bp, Homo Sapiens
agatttttcagagttactcaagttacaactaaaaatttgtactctttgaacaacatttccgtattttccaccctcaggcactaacaatcaccatcaatcaatgttaaagtttttttgttttgttttgttttgttttgtttttgagatggagtctcgctgtcacccaggctggagtgcagtggcgcgatatctactcactgcaaggtctgcttcccgggttcacgccattctcctgcctcagcctcccaagtagctgggactacaggtgcccgccaccacgcccggctaattttttgtatttttagtagagatggggtttcaccatgttagccaggatggtctctatctgacctcgtgatctgcccacctcggcctcccaaagtgctggggattacaggcgtgagccaccgtgcccagccaatcagtgttaaagttgtttaaggttacacttaagtttcaaaattgtgttttctattactgtgaaaaatgacactaaaattttcactttgaatatatagatcacttatgataatacggtactttgacagtattagttattctaatggaatatttttccatttatttgtgtctactgaaatttctgtcattaacatcttattgtatttagtgtatacatatttaatctcatcggttaaatttactatgattaaattttttatttttaaattgttgcaaatgaaaattgtttcttttttttttgtttgtttttggaaagtttgttgttactatttggaaatgcaacacatatttttatgttgggccagttccagtgactcatttctgtaatcccagcactttcagaggccaaggctgatagatcacttgagcataggagtttaagatgaacctgggcaacagagtattaactctgaaaatctgagacaggtctcagttaatgtagaaagtttattttgctggccaggcacagtggctcacgaccgtaatcccagtactttgggaggctaaggtcgggtggatc

SEQ ID NO: 114792 - DNA, 1000 bp, Homo Sapiens
gtaataatcccaattttgaaaggccactgtgaggataaaataagtaatataagtgaaattacatgctcagttcttcattattaattttttgaagagcacatagccaatagtcactccgcattccaaaagtatttggaataccacatacccattgttatgctagaaagagtcatcttcaccattgtattttgctgagactaatattaaacttagaattcccctgcatactgcaactgaaagagaacaggtattgggcagcggcagtgggggaaaccaagatggaatttagatgttcaaactttaatatttacattttttgaacagagagcttactatataattattcttttattcagatggcattcctctgaaataagcaattacccttatccctaggtctagttcctgtggagagaaaatgattatactttgagctatatggctccaataaacaaagatagatccctcaatttaaatttgatcctcagaaaactgagggtcagagaacccctcaggcatgacgggataatgtgacagttaatttggtatgtcaacttggctaggctgtggtacccagtgtttgagtcaaacaccagtctaaatattgctgtggaggtattttttagatatgattaacatttaagtcagtagacttgaaaaagcagattatcctcaataatatgggtggtcctcatccaagcagttgaagagcttaagagaaatgactgaggtccctcaaggaagaagaaattctgcttccagattgcctttggattcaagtcttgcaacaacaactcttccctgggtctccaatttgtcaacccccaccattttctgagacaattccttaaaataagtattttctctctttctctttctctctctctctctctctctctccctccctctctttctctcccccacatatgtgtgtgtagacatataatgtacgtatatataaaattgtatacacacacagagtcatgtgctggataacgat

SEQ ID NO: 114793 - DNA, 1000 bp, Homo Sapiens
tccattgcaattaaatccatgcacattgggttggcagcaccccaccagtagagagtaccaaagtcagcccctagtccaagagaactaggcagatgcttgggctagcctctggatccatcgctagagaggggctaccaaaccacgggcaggtagctgcaagggcaatcctgatgagcctcgaaatttgtaaccacccagtgggttcactttgcccactgcctagacagagtggatttatcaagacaggggaattgtaatagagaaagagtaatttacacagagctggctgtgtgggagactggagttttgttattgatcaaattagtctcctggagcatttgaggatcagagtttttaaggacaacttggtgagtcaggggaagccagtgagccaggagtgctgattggttaggcaagagataaaatcatgggacgatgaagctgtcctcttgaactgactgttcctgggtgggcgccacaagatcagatgaagcaattttatcgatctgggtggtaccaactgatccataaggtacagggtctgcaaaatatctcaagcactgatcttaagaacaatttagggagggtcagaatcttgtagcctccaactacacgactcctaaaccagaatttctaatcttgtggctaatttgttagtcctacaaacacagtctagtccccaaacaagaaagaagtttcttttgggaaagggctattattgtctttgttttaaactgtaaactataaactaatttcctcccaaagttagttcaacctatgcccaagaaggaacaaggacaacttaaagattgaaaccaaaatagagtcagttcgtttaagtctttttcactgtctcaatcataattttgcaaaggggatttcaggatcaactcaaacagaacaccaccaagacacattatataatcaaatttttgaaaggcaaagtcaaagacaatcctgagagctgcctgagagctgttacttgtcagtataagtgatc

SEQ ID NO: 114794 - DNA, 1000 bp, Homo Sapiens
gttgtggcctggacgttgggattttctttttacattacccaagtcatgctaacgtgcagccaagttggagaagcttgaaactcatcattctcggtagttggctaaatttaagtagtggcattctcaacatagcttccgccccatatatagcaacccaacagcacccaagatgaaaacagggctgcgaacatgacagacttcagccagcagacctacattccacccaagctttgtcatgaactctgatcttaagcaagtcacaaatctgagtttcaatttcttcacctaactaatgaggacaggaacccctaagataattgcaagaataaaatgagagaatatttgtgaaggtgctttggaaaatattgtatcttataagtcaacacatacataacccccatttttcactctgtctacactgcctaagagaaatatatttcacttttaccactaaaacatgttgaaacagatgtaaatgtggtagcacatacttagttcaatttctagcagagtgcataatgatgcagttccaggaatgcactgtcataagagtggaagcacctgtaacaatcgaaggattagtaaaggattacctgctccaggaagaagacaaaggactgccatttcccagggttgtcagcactgccttttgccattaacttcaaatatacttaatgaaaacaaggaggcaggttcacagctgtaagttaccaactcataaagagttcagcacagaggactgaagagaaaaaaaggattctgataccagcaaagaataaaaacagagccagaggcatatggaggagtggcatggagttctttaatttggaaggcaaaaggttacatttaatgaaaggcagaggctggattaataaatgtttgttagaaagttgttctgacacacagtgaactctgggcttttctcctgcataaaaagcagagctagcagtaagtgcaaatctgaagaaaatccatgtgtccaataagctgccatctccag

SEQ ID NO: 114795 - DNA, 693 bp, Homo Sapiens
cttggcagagagcgccctgggaaatgcggatatagaaggtcaggagaacatctctcctggttatacagcattccaggtgggctttcatgtggttgaggataatatcattagcaccaaaggtgaaaatccgtggaagctcatcttatttcagcagaagagtaggatgggccttgtggcacgagtaagccaaacaagggaaaggcattcaccatcaattgactcctcatctgtttttaagagggaaatctgagttttcaaggaaagccgaatacagttgccaagttgccagtcaaagaaacaatgtcaacacctgctcatagagatggaattcctaacccggaatattgcccttgaattacaacgagaaaaagcacctcttcaagtgagatggcagaccacctcaggatggaaatgtatttcttcatccccctctctacttccctgtgacctcctgcaaataagggagagacaaagagaagagcagaagaacagaagaatggagtggcaaagagaagagaaggagtgactgaacattgacaagactttggttggggatggtcagagaggagattagctgctagacggccacactgcggagaaagatcattttcccactccatcccccttccagctccccatccatctcaccaagagccagctccaccactcaataaaaccttacattcatctttc

SEQ ID NO: 114796 - DNA, 1000 bp, Homo Sapiens
ctttgtgagaaagggaagttccggttaattgtgtggtgctgatgaatttggttccttggaaatcagtgtaaaacagtgaattaaggatacaggattttaattttagcttaaggtttaactacttatgggagtgttcgttggtagaaatagtagctatggccggatgtggtggctcacgcctgtaatcccagcactttgggaggccaaggtgggcagatcacaaggtcaagagttcgagaccgtcctggccaacatggtgaaaccccatcactactaaaaatacaaaaattaggccaggtgtggtggctcacgcctgtaatcacggctctttgggaggctaaggcaggcggatcacaagatcaagagttcaagactagcctggccaacatggcgaaaccctgtttctactgaaaatacaaaaattagccaggcatggtggcgcatgcctgtagtcccagctactcaggaggctgaggcaggagaagcgcttgaacctgggaggtggaggtttcagtgagccgaaattgtgccactgcactccagcctgggcaacagagttagactctgtctcaaaacaaaacaaaaaaacaaaaaaaaatacaaaaattagctgggcttggtggtgcacacctgtaatcccagctactggggaggctgaggcaggagaatggcttgaacccagtaggcagagattgcagtgagctgagattgtgcaactgcactccagcctgggtgacagagcaagagtctgtctcaaaaaaaaaaaaaaaaaaagaaaaaaaaagaaagaaatgtagctatgattgtggtagatatttgagagtaaatctaaattgtcacttaagttttttcttcctttttgtttatatgttctgatttttttaataggaagaaggaccatggaaatctcagttatcttcaacaaaatctaaaaaggtggtagaagtatggattggaatgactattgaggaactggccagggcaatggaaaaaaacacag

SEQ ID NO: 114797 - DNA, 1000 bp, Homo Sapiens
agcatttagctctctcaaagatgctgtcacttttttaccctaatacgtaacaaagttgaatggactcctttcctccactgttgtataaatttaatctacattacaagataccacactactattcaagatctatttgagtgtttaggcatttcttaccaaaataatctgatacctactttttaaagaagtcaactggtcatgtcagtgaaaatggcttaattttggcatatagttagtaaaggctaaattgcaagtccaatctatttttctgatcttatgtgttcacctgaaagcaaaataatgagttcagatattcttgcatggaaacatactcattgtgatcagaatgaaggaagttattgctaatgcacttacaaatatgtttatccctgcgagctaatgtgtctcaattcctgaaagtcattattaccttgctcctttctagtattttaaaagatgaaaaagtgataaatttcaaaataataaaacatcattatttttgacattgaggatgtcattttgtaaattaacctatgacatttttactttttggttaatccttcagatttactcttcattgcttttaactatgaattaaagtaatgagttgaattaggtaaatgtctaacataattaccatgtcctcagtaaaagatgattgttaatgtgtctgatgatggctggttgactagaaattatcttcagttccacattttcaaaatgaatgcaccgtgggtggaatggaaaataataatttaaggcacattaaccattaatatagatctagggtgaccaattgcccctgtttgcccaggacagggaactttgggttttaaaactgataccaaggggtacctgggatgctgaatgttcagtgctaaaaccaggaaagtccaggcaagtgctgagtggatcaggctacatagattactgcacaattaattatagtaaattgattctgtatgcaacttaaataaacccagtttattgaggcatgatc

SEQ ID NO: 114798 - DNA, 1000 bp, Homo Sapiens
gcgatggtgctgatgtttcaagaattgtgtttttataaaacagaggtctcagcatagtcactcttcacatagtgccttacccatgggtatcgtcatatccgggtcccagttcagtttgtctgcacagcagccaccctgcctggcaacagagaccccaagacctacacagtgaaccctactgccccaaaggcgttctccaggtgacttgtgaaaacagacctccggggaagtgatttattgggggtgtacactgggggcaatatggtttagcactgaattcaatttgtccttaggtctatgagtgagtccgatcttttcttgtgaaaggttttgggcatcgtacaacccactctgcctagaaggtgtggaggactcaccacgggcagggtcgccctggcccacagcacgtgagcctgcactcactgcggcctttgtaacaaaaccagttgtggtcctcagcatttgaagcagctgcatacttcagagtaaactatttttcattatttagttttgtcacaagaaatcgaccattgtactactctcacttacagcagttaaacagcatagaactaaaaacctgtctgcatttccattttttctttctgtatggttgtgggttttaggacatagggggttaggagaaggggtttcttgatcatgtcatgaattctcctttgtcctgtttctcctgtttcatttctcctccgcctgctgtatattacctgagctggtgttgtatcttcaagtccatatgcgtatttgcagacctttcctgttcccactcttgttggctcttctgatttatgcacagatggttcccagcatgtgtccagtgcttcatggatgggaccatcccagcaactaatcagacttcctgccagtgtcctaacccccagggcaccctgttcaaccatatttaaaaattggaatttgtataaagttgcttccaagttttataatgcatcattttacatcttttgtaattaaaagcatcacaatg

SEQ ID NO: 114799 - DNA, 1000 bp, Homo Sapiens
tcatgcaatgaaatgaatcccccccttccatcacattgcaacagatgttgggcccttcgtgagaattggcttcctgaagataaagggaaagataaaggggaaatctctgagaaagccaaactggaaaactcaacacaagctgaagagggctttgatgttcctgattgtaaaaaaactatagtgaatgattccagagagtcatgtgttgaggaaaatgatgataaaattacacaagcttcacaatcacaagaaagtgaagactattctcagccatcaacttctagtagcattatttatagcagccaagaagatgtgaaagagtttgaaagggaagaaacccaagacaaagaagagagtgtggaatctagtttgccccttaatgccattgaaccttgtgtgatttgtcaaggtcgacctaaaaatggttgcattgtccatggcaaaacaggacatcttatggcctgctttacatgtgcaaagaagctaaagaaaaggaataagccctgcccagtatgtagacaaccaattcaaatgattgtgctaacttatttcccctagttgacctgtctataagagaattatatatttctaactatataaccctaggaatttagacaacctgaaatttattcacatatatcaaagtgagaaaatgcctcaattcacatagatttcttctctttagtataattgacctactttggtagtggaatagtgaatacttactataatttgacttgaatatgtagctcatcctttacaccaactcctaattttaaataatttctactctgtcttaaatgagaagtacttggtttttttttttcttaaatatgtatatgacatttaaatgtaacttattattttttttgagaccgagtcttgctctgttacccaggctggagtgcagtggcgtgatcttggctcactgcaagctctgcctcccgggttcgcaccattctcctgcctcagcctcccaattagcttggcctacagtcat

SEQ ID NO: 114800 - DNA, 1000 bp, Homo Sapiens
agatgacactttaaacccctgaggtaacaagggattgtgtattttctgtgtctttatctttccctcctagtttttccacaattcttgccacttccctactctaaaattcttccaacccgaaacgtgaaagatggtttcttgtagcttaggtaagaatgtcctcctttccaaaagtagatcccgaagtgtattcattcactcaatatatctgatgctggaagtgtcccaaagagaaaccactacccaccaatatgctccctattcccatctgaaaactaagaatccagaaataggcttaatctgtaactctagggcctcgagttaccttgagccaacattgtagatgttgtactgcaaggtcaggtctcgtccctccacggcgtatctgttcagcagtgatttggaagccaaaagcctggctccttcctctgcttgagtgacagcaaatagagccaacaccacaaatgacagcagcctcatctttagagaaaaaagcaaagtgagttatcaaaccaagtacgtcaaattcaccaaaatcctcttgacagcgctcccgtagaaagctccttcgatgctaccagaacagcagccccttccacagagtagtccataagccaccagagcagacccgttctccagactctcctaccatcttcaccctgcagccctcgaaaaaccggtacaagcaccaatatatctactgccctcttcctgtcagaagccccgggatgcccaccggctggtggagtcttctgaggggacaccatgtggccagagcagggcttccttggggtgcctgatttcggccgatctcggacctgcaggagcctgtagctttccctcacacaggagtgcccacagccttcccgctgctcccctcctccttggccacagctctattgggatcccaccgcggactcgcggggtcctcctcacatccctgtaccccactctccagtccagcccctgagatcccattcgtcctcgcctgtcacatccc

SEQ ID NO: 114801 - DNA, 1000 bp, Homo Sapiens
acgcagggtactaaagatcttacaggagcttcaactggagcaggaggagctttttatgcttatgttgaatcaagtcagatacaaaaagcaattgtccctctttgcccaagcctttccaattctgtgtgtcttgttgtgtcagtgtccacttgtgtatccttctgcaggaagacccgccaaatagaagagatgggacaaaaataggaatggtgtgtgacgacaaagggctactggaagaacaaaagggatacaggccttcttgattatctttggctttgtacctgaggcaggagagaagagatgtccaaccagtgagatctttaagagaaaagtttgtattttaaatgtcaatgtgcctgagaaatgtcagcttcaccacgctcttgcttcctaatgctctatacaaagagggctgactatatttcttgaagtggtgtaaaaacttagagattttataagagaaccaggggctcccttcacctctcctggtccctcaggtcacatatgaaagcatttttacaagataggaactggaattcctcatttctcccatgttcctgcttgttcttaaacttcatgaagctatttttccagcctatggggtagttcttgctccagtaagaggaatcttagttgtcataatcccttggagcctgggtttttggagaaagagatctccgtgccctacagaccttttctcaacgaatgtgggaaggacctggctttaaaacacgcacacaaacacacaaataaacagacataagatgtcatcacgaaactgcccacggatctttaggctttctgcattgacataaatacattttctaagggggggggggaagaaattaaaaaacacctgttaattttaaacacattttttaagaaaaaaataattaaaaaagaaacagtgctcatgtcataagctatgttgacagttgccagtggaaatgttgggttggttcaaaaaaaaaataaaagctatactatatctctctacata

SEQ ID NO: 114802 - DNA, 1000 bp, Homo Sapiens
ataaaagatattaactacaaaccagataggaggtgcaaaattgtacctacataaatcagatggaaaaagttgaaagcagataagataaaataggtaagcatgacatttaaaaggtattcatgggacgtggttacaaaaccaactcacaactaaaaagtcttaggacctctcgctgacttaggagcctgatcccaactctgagaatgactcagtgtgttaccctgtggctagtgtagaccaatgatcctgtctcagagtcactagccaacagcccatatcaagtacttgaaactttgactcagaaacctcagtgtcagaacctttgacctaggaaccacctgtagtggttaactgcaatttgcaccccttagttcagggctttacaacaccgggggcggggagggggaaggcatagagctgatgacctaaaggaaacccattgcagcaacgcttttgtgttaagtttacaaataagtgttgttttagaatcctccaggtaatgcctttgttatttaatgtgtctgagacaattctgcacattaaagaatataaaatattaccttgtaattccaatttgaaatgtgtaattgacattagacttctattttaatttgaaatgtctaaaacaatgtggttaagtttgtaaaaggtgtgtgaattttgagtctgatttactacatttttttttaattttctttttttttggagttttagggattgcttagatggctagaaagattttattcatcagatttttaagtctgccttggcaggcacttgcagtgtttgaaagaatcagatatatcaaatttgtagtttaaaatatttaagggaactcaattaactatgctagaaaagagagttaagtatttaggaggatttaatatggtgttaaagttgtgaaaatcaaaatggagacactaatgttaagaaaaccctgataaatggagccagggaaggccatgaagaaagagttctcacacttgtatccctgatcatg

SEQ ID NO: 114803 - DNA, 1000 bp, Homo Sapiens
ctcacataatgtaagtttcaagtagacagagatttttatcgttttttttctctgtagcatgcccagcgccaacaactgtgtctggcattcaataaataaatggtgaattgaatgaatgaatgaatgaatgaatgagggtgtataccaggccgaacccccaagccttgcagtccccactcttctgctgcagtgggcaacgagatgagtcagactttgtagatggccccttggcccccgagatgggggacgagctagcgcggagcacttgggagacattccccgaaagcctgggcggtggccgcactgggagagggtctgtcgccatttggcgattactccatgcgggctgctgtgggcgccgagcgagggtcggcggcgagcgcaagcgcgcgggtcttttgcgacggtgcccggcggcactggccccgcctcccgcgcgtgcgccccgcctccgcccccgccgctgcgcccgctcggggccgctctggcccccgcccgcttcatgtggcccggcccgcgacggccggcggctgggagcggcgaggcggcggcggcggcgagtggcggcccgcgaggcccgggaggcggtggccgaggcccaggcggtggcggcggcggcccaggaggcggcggacggggagctgcgggagcaggcccggcctggctctctagcggccgcctggctgcagcatgcgcgcccgccgggggctgctgcggctgccgcgccgctcgctgctcgccgcgctcttcttcttttctctctcgtcctcgctgctgtacttcgtctatgtggcgcccggcataggtaggaagggggcttgggaccgcggcggctgccgctctggccttgagggacccggggaatccccgcccctccctaaggggccccggccgggaggcggccctgagcctggtcctccgaagactccggagtcctggcccggctctcggggacgccaggacattcctgccctccgcaccccaacaggcgcccgggatc

SEQ ID NO: 114804 - DNA, 1000 bp, Homo Sapiens
tgatgagtaaaattttaggcatgtaatttgagctactagaaggacactcaattgcagatgtacaatggggagatgataacctatctggaactcagaaaaataactgtatatagatatgaaagacatcagtaggtatgtagtagataaaatcctaaaagtgatgtcaaagggagaagagaagtatatggtgaacactgttgtttgtccatgcaattgccatctcttcttcttccttactgacagaaccctgatttcactgagaagtcaacatgcccttccccaattgatgaatccaattggtttaagattatgttcattctattcttacatgactaagtcacgttgacttaatcctatcaaatgagatgtcgatctggaaacaacttctggaaaagattttctaccttgataaaataaagagccatatagatggtcctttatcttccttcttccttgaatgagatatgttctatgaggaagtgaagcttagaactgtggtcagcaacttgcaacgactgggaagtcagagccacacaatgaagaatgcagagtggaaggagaaaaagagccagcatctctgacaacattgttacaccgagaacctacctccagattttaagaaaacaagaaatgctactgttattaagccatttcactgggtttgctatgacttgcagtcaaatctagcttaactgatacagagcaccacagagaactggtctctcatttgtctcatcctgttctttctagcagccacgactttcctagggtttccttagcccaagtctggctagagcaagactaagtaagacttgattccttaatgtccttttgttttaagaaatattaaagaattatttttatattaatatattttaagaaataaggaaatacaaaacactgagcaagcaacacaaattcaagaaatcttaaaaagtataatagctgctcagtctctgattaacagtgaaatatggaatcattgtagaaatggccttgg

SEQ ID NO: 114805 - DNA, 1000 bp, Homo Sapiens
tatgggttcttcccccacttcccctccaagaccctgtgttcatttggtgttcctggaagcaggtgctacaacatgtgaggcattcggggaagctgcacatgtgccacacagtgacttggccccagacgcatagactgaggtataaagacaagtatgaatattactctcaaaatctttgtataaataaatatttttggggcatcctggatgatttcatcttctggaatattgtttctagaacagtaaaagccttattctaaggtgtatgtctgactcgataaatatccttcaattacccttaattccatgtccgcatctactaatcagaggtaaccagaatctggggcagagaatctgtcaatcaccaaacacattgcttagcgcaactccccttacacagggggcacaccgtgctgacttccgcctgctaagaagactgcactattgcttgtgcgtctttccttcttgcagagtatattattctcagagacacagaggcagtggctcagattggcagaaagcacatacgaatttgacctccagatacctgtgggcaggatcccctggtgtgaatccttgcatatggaaacatggtttatttactaactataaattaccaacatcactgttttcgaaaatctccccccacccgtatcagttgagaatgagagaaaatgtgtatggcaaatggcctaaaaatatgaggctaattctgttctcaggctaagcctaaaagagctaaccaggaaccccttttcagattgtggccctcttgtcagggatctgggaaccatagctctcttttgagtgaggccgtggatcccactgtggtatggacatccacgtggggcagccgtccacagtgagcgggcacagagcgacaggccatctagcagctcctgagaaacacattcttctagtgagatcactttgcctctagtaaaagaaaagtctatctgaagctaaagtatgcaggctgaaggatgtgtctgatgtgttc

SEQ ID NO: 114806 - DNA, 1000 bp, Homo Sapiens
cacgtggaggatgcggcggaagatccccgagtctgcgaagagaagggagtggtgctgacaggcacggggcaccctcctttgctggacccctgggatgtgccagctgaggagcccaggcctgatctaattcctcacccagtgactccagggcccccaagacagaacctgagcgtctcccgtgcgtccgggttcccaaggccccccagacccctcccccaggccctgccccgggcgtgcccttacccagtttccaccggcccatgtaatagagctgcgtgctgaggagcagggtggcgatgatgtgaatgatggagaagacgatccagaacgccgtgttccctttgccaaagacctgtcgggaggccaccaagggcagcggtgagggtggagagggaagtggctcggatggcccacccttcctggggctggctgctcagccaggctgggactctgagaggggcccaggaaggcatctcagggaaggagcaggaatctctcatgcaggaggtggcggagggtgtgcactacgtgtctgaacgcacgtgcacctttcctatcatacaggctgagcagagcaggtcaggccctcaccacgcccagcacagagaagaagatgacaatggccaggcaggcgtaggcactgtaggcgctggcgttgatgtccgggtgccgcttctggtagagcttcagcatgcagagtccggcgatcatgtacatgaacgatgtgtctaggatgagggacacggaagggagctgcagaaatggccaccaagccccagcagagaactcctggccccaacaatcccagaggaagagagagccctggtgccccaccacggccatggtgtgagctggtggcagggtggcacttgaacttcagttccttagttgtacctgccacaccacactgccaccccactggctgtcacccagagtctgacatctcctgaagacagggacaacttggtctgtgtcttagtctgtgagcaccctgagatcc

SEQ ID NO: 114807 - DNA, 1000 bp, Homo Sapiens
atcagaataatcctatacataaaaacttgtattctttttttttttgctcaacattttaccataagcattttcctatgttattaagcagcagcaatagctgcaataacagtgtaaatgacaactaacattttagtgttgttgtcaggagtatgggttttgaaatcaaactttctgtgtttgagtcccagttcaccacttactagccatgtggcattgcacaagtgactcatcctctctctgattccatgtcctcagtagtaaaaacctacatcctggggttattgtgagttaccatttacttttttttttttttttttttgagacagagtttcgctttcgtcgcccaggctggagtacaatggtgcaatctcggctcactgcaacctccgcctgccaggttcaagcgattctcctgtctcagcctccccagtagctgggattacaggcgctcaccaccacacgcagctaatttttgtctttttagtagagatggggtttcaccatgttggccaggctggtctcgaactcctgacctcaagtgatccacccgcctcagcctcccaaagtactgggattacaggcgtgagccactgcgcccccagccttgtgagttcctgtttactaagctatctgctgggcactgtgctaaacacatgaataatgctatttaaaaaaaaaaaaaaccagtgggttagaaactgctcttggtcctatttttatagatgagaaaagtggggcttaggaagactcttaggtgatttgcccaaaatcatatggccagtgatggagctttgacttgaattcagatctatccccaaaacctatgctttcgattgttgtgctacactgttcttccatatcattttattttattttattttattttattttattttattttattttatttatttatttagagacggagtctctctctgtcatccaggctggagtgcagtggcacgatctcggctcactacaacctccgcctctcgggatc

SEQ ID NO: 114808 - DNA, 1000 bp, Homo Sapiens
cgttataggaaagggaaactgaacagtaatgagtagctttgaaattggggaaaacacactagctgggttaggtacagctatcctaatggagaagagtgagctaaatgcgttaattcatgtaaagtgcttagaacactggtacataataggtgcataacacatcttaaagttgtttaataatagataagaaccaagaggaaaaagaaataagaaaagatgggggaaaggaaggagaaaataggaaatgaaaggattaggacttgggcatttatattaatacaaaatggtgtaaacggcctgaatatcactgtagtagtatcatacgggggaaagtgtgatggaaaataggtttaaaaatcttaatttttaaaactttagtaagctttatttatattttttaggattttctgaacatagcatgaagggtttagattcatttttctgaaaaacgattaaaaaaactaccaattttttttttgagtgcccacacttgccgttgtgctgtatacatgattttaccttaatcctctataaggtaggtgctaattgtctccattttatagatgaggaaaggctcagagaaattcagaaacttggctaatttaacacagctgtgacagagctcgaatttgaccacgtctgattctgaagcccatactctttcagggaggctctattgctgcctcattaaacaactcttgtagaatttcagctcttaatggagtctatggattatatttttcctataagacagctgtgtttagaattttgagtgtctttcctccccccaataaatttccttactactctttcttcataaagcagttgttttgtcactttgactatattaagacacatcagtgtagcacatgctcttaactggctgtggcattttaattttataaaagaatggtttttatctgaagaactagatagaaaccccagtttttgtgccgttcagtcacccagatccttaaacttaactatggtacataatatc

SEQ ID NO: 114809 - DNA, 1000 bp, Homo Sapiens
ggaggttgcagtgagctgagatcgtgccaccacactccaccctgggtgacagagtgagattccctttcaaaaaaaaaagaatgtgcgttccacagctgtgggcttagtgctcacactaagcatcttccttggatgtctgttatgcttattttctttttttttagagatggggttttgctgtttcgtcccagctgaagtgcagtggcatgattatggctcactgcagcctcgaactcctggctcaagggatcctcctgcctcagcctcccaagtaggtgggactcagaggtgagccaccacaccaggttccattatgctagttttcttaattggcattggagaaaaccataaaattaggggaaaagggtagatactaaaagagtgctattggagtatgattggaggtggagtgagaaaaggaaatagaccttgctttcatggggctgttgaggagtccaaatgagcagtatagaggcctggcttggttggatgagatggagaaattcaagacctatttttgagatagtaagcccggacatttaattaattaaaaataattgtatcaattactgagagtaagaatactaataaaagcagtaacagcagtggcaaaagtaaccacacaagcagaaatacgaaaaccaagatgataagaccatacagtccgccagtgtcttactaacagggttgtgggcgtcccactccttctcttcatcctcctccagctcctcctccacgtcttcctccagctcctgctcctctttcttttccagtacctcctcagccccttctcctctgccagcccctcctcccacctccgctcccagcccctcctcctttcccagcccctcaccatccagcccctcctcctccatctcctcctcctctctcagctcctcctcctcccccagctcctcctcctgctcctccttctcctccactcctccttctggctcctccttctcgttcagctcctcctctcccagcccctcctcctcct

SEQ ID NO: 114810 - DNA, 1000 bp, Homo Sapiens
gggctccttgagtttatctggattccaacagcacttggaaagtaccgccctccactacctcaaatgcaaacacaatctctgccagtagacattggaattagacttagtgaaaaccaggaaaaaaaaaaaaaactaaaatataactcagccttagtttgcagactcaactgtcaacactttgaaaccctactccatattcaagagagtcaacaggccctatgtcacattgtaggctaagaaacctcagctatgactactatttcactcaaagtaagaccatgtacatcctggattttgatatgcctgcattttggaaaaaaaaattgaggatttagcccagtcgctttcccttgatatagccttgttctgaattaaaatggaaaaaatatttcaattattttcatcttgttctcaactggatgttagtcaatgtggtctctttttgaatatgtatcaaatattaatgatccataatattagggagataattttaaatgaagtgatacgtgtctaacttacttaaagaataagtttttggtttttgcttttaaagacaaccaaatctgatattgttcatcctgataaaaataacaacttttagtgcttaaagcattaattaagcaagtggctaggtatgataaagaacttctgcttgctccccaagaggcaaactattagaagaactggagcgggagtcctttggacccatcgtggatctctttaagccactgctacccaaaaacattcaggacaagcaaacatttagagcaagaatctccaaataattcttcaggatttgtaatgaaatgatgttcagttccattttgctctttacatagggtggagaattgtcatgtcttctctaatttttccaagtaaagtggtagcaaaatgttttaaaaagcaatcttatattagaaaacaaaaatgttgtcacttgaaataccaaaacaacatttctgagcgttgttgagggactggcaaagcaatcagctactat

SEQ ID NO: 114811 - DNA, 1000 bp, Homo Sapiens
tgatgatcagttcaagaaggctactcactcacagtgctgtgtcagagccagcttttacctgcttggaaggatctgttgcaaaacgttcaggaattttttgagctggttgtcaaacagggacattatgaaacattaaattacataatcataagattaaataaatgatatcaaaacaaaaataataaatactcaaaatgcatcgctttctaagtattcaactacattttactgttatccatgtttttgaggttactgatatctcttgtgtctttatggtagaaatactacataatgccatgctactgtgcatctctctccccagctccacaagcagtgatatctcactgctagcttgaacttggccatggtgggagtatttatttcatggaaattggcagaacaactcaggcttccccatgcgattctctctacctagagctggttgtgaaacatttaccagctcactactgcaaagttgtgtgtattatataaacaggaaaaccatggagttcaatacggtcccactaataaacagaggatgccaccacataaatcacagcacctgcaatttgtcagaatcagaataatatttgcaattcttcctattggcccatatcctgacatgtcaaagccagactaaaatactttattctgttgagtcaggtacccaaatgctggaacctcttgctgttggaacagatgtctgttactaaatagatttttttctaattggctaaaaaccccaaaccctcacagtttcagtaaaacaacagagagaggagaaaattagtggctattgggggtatgaggagagatcctgggaaattagaatcacacaggatctcttttgcttggtcttagccaaaaggctgagaagcaatcaagatctcttttaacatacacatgtccatttcttcttcctggaaattattttaagcccttaatcttgggtaatgttggatccttgagaactagggacgtttaaaactttactgtttct

SEQ ID NO: 114812 - DNA, 1000 bp, Homo Sapiens
tgacttcctgtgatgctcaacaatacatctcttgctagactcagcctcttcttctcactcaacaagtatctgttctttgctttagcattttcttccagtggatttgtgatagcagctagccattcccaaatcagattctttcagagcctccaaatggttgaggcagtttctatcttggccaaagtcacttatctcctttttgcttcattttcttcacctgttaaatgggataaaagtagtattcatatcatagtgttgctttggatgaagattaaatgatttatttaataatatactgcatataacattatgtggcacatggtaagtactatacagaaagtacaacctgttgttcctcttcttatcactgtcatcatcatcagtaataatagtaacattggtattaggattgatgaccctaaaccttaaactgagaacatttaccttacattacttggaatttgtttctttgtatgacaaagttcagatgtatgctcttatttctaattgcacaataaaatctcccaacatcattaccaaaaatggagttagagacagctgcaaagattccatgtgctctagggagagaaacatgacccctcaaaactttaaaaatagttcagactctttgcccaagtccctgaataacttaggtgtaatataaagataactgccttccaaaagcaaacacagaattttactctcttggctacaggaaagatactgggcaattctgaggtcctttcccaattgacataggcaaaagtcccttgtgaaatgtcctagggccacagaccaggaacattcaggttacatataatcggtatgtttttattattattaacaggttgttgcaaaggacagttaacatgtgagatctttaactttctgttataattaaacctagtaaaatttgaggatagaagaccaaagttatcaaagactgaatgggaatgtgataccacaaatggtaattctcaaaggaagggatggggtgaac

SEQ ID NO: 114813 - DNA, 1000 bp, Homo Sapiens
gtgtgaatgccctagtgccaacaaactgtacatttaaaaatggttatgatggtgcattttatgttatgtataatttactgcaataacaaatacaaaatgttggagctcctgtgaaatataatgattcaatctggacatttatatcaatgagtagagcagagtggattacatatctgtccattgtccagctaccttgtctttcttgtctgatgcgggaactatctctttgtgttcttaactgtcaaatattgagtgctgggctaattttgtatctcctaccagtaaaaaaagttagcaaccctcctattaccctccttgttaggcctgtgtttgtacttgaacaatatagatggccttttccctgtggtttcttgacatcattgtttcaatgctgggtatatcatccctcatcacttggcattgtccatcctgctgcctgtgacctctgagtttcaaggactcttctcttcgatcatgatcacaatccaatccaaagtatatagcaaaatgtgaacactaattctttgtctggttatgttaagtttacatttaactttttcaacttttagagtgtgaacacagaacaattttccaatcaggtgctctgtggaaatctgtaacccataattgctgtatgtagaggatgttcctcttcccatgttgacgatgcctctgctggccacacacctgatccccagcaggaaggataaacatggagtttgcgtgtggagctggaacaatcccatttatgcagagtatggcaatccatcattgagcctggcagatgaccactcagcaaacatgatatcaccccattggttgaggttagacaggagaattggaaaggcccattagcattgtggactaatcatctcaaaagctcttgaaacagagaggtgcagccacccagatctgcctcacatagagtacagagccagcagaaagactgggtgaccaccccaggggcaaggacacacagggtaaggaaggttgctgtcac

SEQ ID NO: 114814 - DNA, 1000 bp, Homo Sapiens
ctcattgttcaattcccacctatgagtgagaacatgaggtgtttgtttttttgtccttgcgatagtttgctgaaaatgatggtttccagcttcatccatgtccctacaaaggatatgaactcatccctttttgtggctgcatagtattccatggtgtatatgtgccacattttcttaatccagtctattattgttggacatttggcttggttccaagtctttgctattgtgaatagtgccacaataaacatacatgtgcatgtgtctttatagcagcatgatttataatcctttggatttatacccagtaatgggatggctgggtcaaatggtatttctcgttctagatccctgaggaatcgccacactgacttccacaatggttgaactagtttacagtcccaccaatagtgtaaaagtgttcctatttctccacatcctctccagcacctgttgtttcctaactttttaatgatcaccattctaactggtgtgagatggtatctcattgtggttttgatttgcatttctctgatggccagcgatgatgagcattttttcatgtgtctgttggctgcataaatatcttcttttgagaggtgtctgttcatatcctttgcccactttttgatggggttgtttttttcttgtaaatttgtttgagttctttgtagattctggatattagccctttgtcagatgagtaggttgcaaaaattttctcccattctgtaggttgcctgttcactctgatggtagtttattttgctgtgcagaagttctttagtttaattagatcccatttgtcaattttggcttttgttgccattgcttttggtgttttagacatgaagtccttgcccatgcctatgtcctgaatggtattgcctaggttttcttctagtgtttttatggttttaagtctaacatttaagtctttaatccatcttgaattaatttttgtgtaaggtgtaagaaagggatccccgggtaccgagct

SEQ ID NO: 114815 - DNA, 1000 bp, Homo Sapiens
ccaggattaccctgacactaaactcaacaaagacatcacaagaaaagaaaaccacagaccaaaatcccttatgaatatagatgtagaaatccccagcaaaacacagtggactcttgaaccacacaggtttactaatacatagatatttttcaaccaaatgtcgatcaaaaatacagtatttggctaggcccagtggctcacaccggtaatcccatcactttgggaggctgaggcgagaggatcacttgaacccaggagtctgaggctgcagtgagctatgatcctgtcactgcacttcagcctaggtggcaaagcaagaccctgtctccaaaactactaaataaataaattaaaataagtggtgggtgcctgtaatcgcagctacttgggaggctgaggcaggagaatcgcttgaacccgggaggcagaggttgcaatgagctgagatggcgccattgcactccagcgtgggtgacagagcaagactctgtctcaaaaaaaaataaaaaacaaaaaacaaaaaattcatatggaaatgcaagggatccagaatagccaaaatacttgggtattttgcctgggtaacatagggagacctcacctctacggaaaggtaaaaaaattatatgggcatggtggcatgtgcctgtggtctcagctactgggagtcgggggtggtgttgaggtggaaggatttcttgagcctgggaggttgaggttgcagtgaggcatgtttgtgccactgcactccagcttgggtgatagtcagaccctgtctcaaaaaaaaaagaaaaaagtaaagaaagaaattaaaggcaacataaataaatggaaagacatcccatgttcatagactgtaagactttaaatataaaatggcagtattccccaaactggtctacagattcaggggttgcatagattgagtgcaattcctattgaaatcccaactacctgttttgcaaaaatcatcaaaattcatgtggaaatgcaagggatc

SEQ ID NO: 114816 - DNA, 1000 bp, Homo Sapiens
ctcgcgccttccccgtcgccccggcctcgcccgtggtctctcgtcttctcccggcccgctcttccgaaccgggtcggcgcgtcccccgggtgcgcctcgcttcccgggcctgccgcggcccttccccgaggcgtccgtcccgggcgtcggcgtcggggagagcccgtcctccccgcgtggcgtcgccccgttcggcgcgcgcgtgcgcccgagcgcggcccggtggtccctcccggacaggcgttcgtgcgacgtgtggcgtgggtcgacctccgccttgccggtcgctcgccctctccccgggtcggggggtggggcccgggccggggcctcggccccggtcgctgcctcccgtcccgggcgggggcgggcgcgccggccggcctcggtcgccctcccttggccgtcgtgtggcgtgtgccacccctgcgccggcgcccgccggcggggctcggagccgggcttcggccgggccccgggccctcgaccggaccggctgcgcgggcgctgcggccgcacggcgcgactgtccccgggccgggcaccgcggtccgcctctcgctcgccgcccggacgtcggggccgccccgcggggcgggcggagcgccgtccccgcctcgccgccgcccgcgggcgccggccgcgcgcgcgcgcgcgtggccgccggtccctcccggccgccgggcgcgggtcgggccgtccgcctcctcgcgggcgggcgcgacgaagaagcgtcgcgggtctgtggcgcggggcccccggtggtcgtgtcgcgtggggggcgggtggttggggcgtccggttcgccgcgccccgccccggccccaccggtcccggccgccgcccccgcgcccgctcgctccctcccgtccgcccgtccgcggcccgtccgtccgtccgtccgtcgtcctcctcgcttgcggggcgccgggcccgtcctcgcgaggccccccggccggccgtccggccgcgtcgggggctcgccgcgctctaccttacc

SEQ ID NO: 114817 - DNA, 1000 bp, Homo Sapiens
gaagggttagagggagagtttccttgtcactaagttttctcatagctctcacccagtgcagtggcgcgatcgcagctcactacagcctccatctcctgggctcaagccaccctctcagcttggaatggggggtagctggaaccacaggtgccaccacgtgggtccaccacgtctggctaatatatatatatacacacacacatacatatattataaataataaatatatattttatttaaataaaatatataatatttataattattttataattataataatatttatataattataaatatcatttataattataatatttattattttataaaataataaatataaaatatataaaaatatttttataaaataataaaaatatatatatacacacatatatatatattttttgagacaagtctcgctctgtcgcccaggctggagcgcagtggcacaatctcagctcactgcaacctccgcctcccaggttcaagcgattctcctgcctcagcctcccaggtagctgggactacaggcgcccgccaccacgcctggctaatttttggtattgttagtagagacggggtttaaccatgttagccaggatggtcttgatctcctgaccttttgattggcccacctcagcctcccaaaatgctgggattataggcgtgagccaccgcacctggcaatttttttttattatttttgtagacatggggctttgccacattgcccaggctggtcttgaatgcctggcctcaagtgatcctcctgcctcgccctcccaaagtgctgggcttacaagcatgagccaccgcgcccggctgtagtttttttgttaactgagcacctactgcttcctgcactcaagccacatccagggacaacctccaacgccctgagccttggtgacggctcccactctacagatggggaaaccgaggcttgccttggggagcagagtgtggggtgggtatcctgccctgcaggatc

SEQ ID NO: 114818 - DNA, 1000 bp, Homo Sapiens
atgcttcccagtatagtcctgcttagcaagtttaaaattcttcagttttcttggtcatggatacgtatttttgtgtacgtctgttgttaaatggaggcactgatttggaacaaaatagacctcacctcaagtccataagaatcatccaaaatggtatctaatgacattcctgggacctcagccaatattattattgacatagaatgcagtcactgggtcctgaggatttcatcggatgttggttgctgaaactgaactttatcgggtcttttccccttccactgtggttttccacatttcaacatgtcacctaactgtcctcaaactttacttaaatcttttcaactaaatggaatctttattacccctgctcctctgctttttgaagcaaccgttttcctcctgtgataacactccctgtggccccttttgtggccccttttgtggtcacagggtttgtaaacattcagactttttgcaactacatatacttttattcttatttttcactcttctcgcagttgttgctttttcttttaactctttgagggagttaattagccccctcttcaacttttgtgatgcacctattcatatttgagcctctgggtttttgctcaaattgcttttcaatttactcactgttgaagaaagccattatttggggattgtaaggtgtatcaagcttttcttttctttttttttttttttttttgagacagcgtctggctctgtcgcccaggctggagtgcagtggcgcgatctcggctcactgcaagctccgcctcctgggttcacgccattctcctgcctcagcctctcaagtagctgggactacaggagcccgccaccgctcccggctaatttttttgtatttttagtagagacggggtttcactgtgttagccaggatggtctcgatctcctgacctcatgatccacccgtctcagcctcccaaagtgctgggattacaggtgtgagccaccacgcccggcctat

SEQ ID NO: 114819 - DNA, 1000 bp, Homo Sapiens
aaaaaacccacaaaatgctgattcagttcaaaattaatgcaaatgtttcaaaactgggtttctgatatttgtaaatgtgtttctttattagataagagtgtattaccattaaagtcattagtataatattgctttcaaaaagaaatggtagacaaaactataatccagcatcttttattgcattggaaagactggcaaagtcttttggatgggttgggagatgtggctggaaagtactttggaaaatatacaatcaagatatctcatggcatattaaaagaaaaatcttaatagcagtgttggcttttatttggattttttcatctcagttttttctgtggaatctccttcattggcattgttatttaatcataaacggggcagatgtctacttgttcagtttttcaaatctgttttcctgagtataaataagagtatttaaagaaataatttggattgcttttgttttttgtttcctttttttttaaccatctgatactaagaagatgaatttgcacagatttctctgcataatttctcaatatctttagcacagtatggtgatgatgacttttaagcatttacatcacgtactcataacctattatgaaaataaatgaaactggctgggtatggtggctcatgcctataatcccagcactttgggaggccgaggtgggcagatcacttgaggccaggagattgagaccagcctgaccgtcatggcgaaaccccgtctatactaaaaatacaaaaaatagccaggcatggtggcgcacgcctgtggtcccagctacttgggaggctgaggcatgagaattgcttgaacccgggaagtgaaggttgccgtgagctgagatcacaccactgccataaacatgacaggcttttggactttgtattacctgtatgttttataatggatcatgcataatttctcaggagaataaaatgagaattcatatatacgttcatctttcaagtcagagcaatgagttgg

SEQ ID NO: 114820 - DNA, 1000 bp, Homo Sapiens
cgtctgggtgcgagctttctttgtttttagcccttcccgccattttggaaagggtaacttgcagtctctccgcgaagtttccaacttctgtagtctttgagaaccttacgaacgcttcaagcttaaactgaaggaggaaggcccacgggaattataaactgtcacaatccagcttactcactgatatctagtgttaaaatgccacaagaaagctaaacatattcaacataccaacttccctcaagcagaaaacagtggctttaagtactttatgcccaaatcctaaacatgcgagattaagcacgagtaattaaacgttacctgcaaatctacacatgtgcacagtaactacttctcagcaaaaatctggaacaaagcaggataacaagatgtctgctcttttatgaaaaaagtgggcggccctgaaaagggcctttggttgaaaatgaaaataagagtgcagcaagcaggagccttagccaccgaagccgtaaagagtgcgtccctgtcgcttcagcgcgtagaccacatccattgctgtcacggtcttgcgtttggcgtgctctgtgtaagtgacagcgtcacgaatcacgttctccaggaacaccttcagaacaccacgagtctcctcatagataaggccagaaattcgcttgacaccgccgcgacgagcaaggcgccggatagctggcttagtgatgccctggatgttatcgcgcaaaaccttgcgatgacgcttagctcctcccttacccaaaccttttccacctttaccacggccagacatgactaagcaacttctaaaaccaacttaagaaacctaaacgccaaggcaaagcaacgcccttatatgccgggaattcggacctaattgaagactgaaagcgcgcataccggaactttggtcctgcttcttggccccaccccgcatagcccagccctggatgacgtcaccaacgactccagcctttggcatctgagcgccggctccgcggaggcg

SEQ ID NO: 114821 - DNA, 1000 bp, Homo Sapiens
ggggtcaggtggccagtggatagaagggccaaggtgaacactcccttcctgcatgcctcctcgctccttttacaaggctgaaggcaggctggaagtgtggggcaagaaggaaaaatcaatgatcctgcttggggcctggaaggagagagggctgagagcgcttccctcccacgctaggaaagagccgtcctcactgtctgtcctctgcccccaggttggctggagatggagtgggagccgtgaatatctgtaagtccttggctgcggcccatgggaagcatcccttgtgctgtttagatggggctgggtctagagaatggcagactggcccagggccctgctggaggggccaggagactccttcctttctacagggattgacaggtcccctggagcacatactgccaggctcaatggcctgggaagcactacaagagggcagggtggggccaggagcacctggggagcagccctacccctgtcagatgctccttctgggttggcccatggaggggggcaggggtgagggagaggggcagctggggcaggagggtggggtgcagtgaagggatggggtccctggtagggagcctcacgctgaagagagccctcctcttttctctcccagctgtgatgaattccactggtggcagtagcagtggcggtggcattgggctgaccctcgggggaaccatgggcagcaatgccctgagcttctccagcagtgcgggtcctgggctcctgaaggcttattccatccggaccgcatccgccagtcgcaggagtgcccgcgactgagccgcctcccaccactccactcctccagccaccacccacaatcacaagaagattcccacccctgcctcccatgcctggtcccaagacagtgagacagtctggaaagtgatgtcagaatagcttccaataaagcagcctcattctgaggcctgagtgatccacgtgcctggtatcctggcttcatgaggctgggcaggggaaa

SEQ ID NO: 114822 - DNA, 1000 bp, Homo Sapiens
aattgggggagatcatcttgtcatgtactgggtagtaggagggagcctagactttaaacttgattgttgataacttatggaatatgtaggtaagttgctactgaaaaatataggcagcttgataaaacacagtggctcataatcaagtgctggctaatgtcagcatctagaacagcttcttacctatgacagatgttgaactgatgttgagtttaatgtccgtagttaaagtcaagcagttagcaaataaataaaagcaatcagcctttattctcaaagtttggtttagatacaggcttctttctaaattataacaatgcataaattatctgaattttatgtcttgttcttcaaattagggagctgtgttaccctttaatgtgccaagattatttaaagcaaaggtcttccttagacaattatttagccgtaaatatagaaagctaaaaagttaagtacatacatattctccgttttgtgcttgcattttgcatcgggtcataagggtaaaagcagttagttgtattgtggagttttgcatgggtgcagttaacaatggatgtttcatcagctgagtttaatttagtattctctcttcattctatttatttggtcttgaaataaattcttttgcattcatttaaatattaggattgatcaggaaatagtgtttgtaatctacacgtttatttgagccttactttaaaaatatttctgaacagagatttaagctctgtcagtattttcatttactgatagcatttatattttaaatatggcattgtatatttcattattatccttcataacagaattataatgagaatatgaatttgttatttttcttgttggtagatgtgaaatggtgcttcaaaaaatatatagtctttctgtatgtctctgtgtgtgtgtctgtgtgtgtgcttgggacgggtggggaggtcacctttgggtgtgcggtgtgcccccaggacctgtaagtaataaaatctttatttcc

SEQ ID NO: 114823 - DNA, 1000 bp, Homo Sapiens
tggccgggtgctgtggctcacgcctgtaatcccagcaatttgggaggccgaggcgggcggatcacctgaggtcaggaattccagactggcctgaccaacatggtgaaaccctgtccctactaaaaatacaaaaaaattagccgggcgtggtggcacgcgcctgtaaagccaactactcgggaggcggagttcaagaatcgcttgaactccgggaggcggaggttgcagtgggccgagatcacgccattgcactcaaggctgggcgacaagagcgagactcctccaaaaacaaaaaaaaacccaccatcctcctgggcagcaagtcataccctcccgccgcgccccctgccccccacccctgacccctctcatccaggcctataattgccccagcctgtaagcagtgaggggttctggcactaagctagttctccccatcacaggtctcgtgctggacataaaacctgcattgctgtagagctgccaactctgcctttctttaaccctcgccttcccttcaaaacctaacagttattattaatagatttctgtaattttcatttcacaagtattttcacagataatttcaactccctgtaaaatgataactcacttctcaggaaggagataagatcatgaaagttcacagtttttattggggataatacgttccctgtgtacatatactccaactatggaatggcacaaaatgtcctgtcaggaaatggcatgtatcagtcactctcattttcagacaggattgagacttttaaaataaatgtaaaatatttcagacatgaagtaataagtattattagaataaaagcattgcactcttggtaggaacacaatcactgactctacagacagtaatgatgttttcttctggatccagaggcacagcgtcaccctttcaatctacgtcggtatctcctgtcttcttttgtgcaaattcccagccatgtagtctttctttgttctcttggaccaaccatattga

SEQ ID NO: 114824 - DNA, 1000 bp, Homo Sapiens
gtccctgcagagacagggccactgggagccctcgttctacttttgtgtctgccccaccatgagaacggcccctcgccaagcctgagcactgtcctgggagatctttcttgctctttcttgtctattctctgtcatttgctgagaaatcagagttgatgctagaaacacaggggcgaggaggatactgcttgcatatcagtggtaacccagaccacgatggcagaaaacagccacccggcaaggggactggtggccacggggctcacacaagccgatgcccatcacctggcgatggtgtccaggacattgtcacgaaggtccctggcatgtgtggccccaggcacacctcacatcctcctcatctcaaaatggaagacccttttgggggaaattactcttagctggcatcaggttaaactctgcctcccctcagcagtcacctgggaggtagcaagcagccagcgacaccgtgtctcaggaattcttcctgttagagtcaagccagcaaatacagagatggtttccaccgtgagacccaggggagcctcgcttctctggggaaggtgaaggaggcttttctgctccctgggctggtgtcatattcctcactgggtgatttggggaaggagagccggaaccaggggtccacgaggtcacctcatcctagaagaagttccacgggccccccaacccctgcccatccctcaagggtccctgaaaggccccaggaaggatggtaagtaaatgcttttgctgggtgctgtggctcacgcctgtaatcccagcactttgggaggctgaggtgggcagatcacttgaggtcaggggtttgagaccagcctggtcaacatggtgaaatcctgtctctactaaaaatacaaaaattagctgggcgtgggggtgtgcacctgtagtcccagctacttgggagactgagacatgagaattggcatgagaattgcttgaatctgggagggggagggtgcagtgagtcaagatc

SEQ ID NO: 114825 - DNA, 1000 bp, Homo Sapiens
gtgctggcaagggtacaaggaaatagacactaataaatttcaatgagtatagactggtacaaactttctggaaagcaatttggtaatatatgggaatgcatttaaaatgtatatatgctttaggccgggcacggtggctcacgcctgtaatcccagcactttgggagatcgaggcaggtggatcacctgaggtcaagagttagaggtcagcctggccaacatggcgaaaccccatctctactaaaattataaaattagccaggcatgatggtgggcgccggtaatcccagctactcaggaggctgaggcaggagaatcgcttgaatctgggaggcagaggttgctgagcggagctgagagcacatgactgcactataacctgggcaacagagagagactccgtctcaaaaaataaaataaaataaaataaataaaatagaatgtatacatgctttagtccaaccattctattttaataatttatcataagaaggaaagtcaaggtaggtacaaatatttgctacaagcatattctttttagcaatccttataatagcaaaaataaaaacaaatttaatccaacaaaaggtgactggcttaagaaattatgacacatctgtataatgggtatcatgcaaccatttaaaattataattgcagatgacaagatatattagtcacataaacacagcctcataatatatgtaatgaaaaaagtcatacaatagcacttattatattgtctatttgtgtaaaatatatatacctagataggagtatgatatgctccagttgttaacagtatttgtatctggatggtggaatcattggtggtgaatagttttgcctttttatcttttacaccacaggtattttgtgtttataataagaaagaaagcttatttttttctcatttataccagtttcagaagcttacaagtgcacaaaaatgtttcctgccgcccccaccaagatggaacagggacaagaagaactgatc

SEQ ID NO: 114826 - DNA, 1000 bp, Homo Sapiens
ccactgggtgcgctcggcatgtggctgcagcttgacctgggtttcctggtccctggcaaggtggagcatctcttcatgtgcttttttgctgtgtgtggatcttgcggggaagggtctgttcctgttttttgcccatctttcaaagattgggttgccagttttcttgctgttgagtttggaaagctctgcatacgttcagggcacaggtcctttaccaggctctgccccaggtctttcggagagcaggtgtctttcgcattcctgactctggggaacctctagccctgccacatggggtttgttatggggcaggggcacctgtgcctttcccaccacggggcttggggatttggtgctgccattgccctccctcgtaggtggccctaggggggtccctccgcctccgtttcctcatccagaaaccggcagtgaccatcaccaccattgttgtcacctagctccagctcaaggtccctgctgaaggtcggagagcttggcatggccccgtttgtccatgctagggctgggaagaccaaggctcaggtgaggcctctgcccagtgcctggcactccttcttgccccatttttccacccagggtggctcccgactacttctggtagcctcggggacagttgaggtggacaggctggcgtcacccccatttccggctgtccctcccaccccctcctggcccagctgttctgccctattaaaagtcacatgggccctcgggtccttcctggtgttggcccaggctctttcaggccctgcaggccaggaccagccttccctgcaaccctcggcagaggcctggggccggggcttgtctaggggcagcctccccatacggccctggagtctgaacagaagccccttcccagagcacagcaagaagctgcaacgtggcctgaagtcccaccattagcaggtttggggtttaggctgagctttgccatcactacctttctgttaggacggtatgcccattagatgggatc

SEQ ID NO: 114827 - DNA, 1000 bp, Homo Sapiens
attagggcgcaaatggatagttacagtaaagtcttcagcaagcagctgcctgtattctaagcactgggattttctgtttcgtgcaaatatttatctcattattgttgtgatctagttcaataacctagaatttgaattgtcaccacatagctttcaatctgtgccaacaactatacaattcatcaagtgtgatttttttttttttttttgagatgaagtctcaccctgttgcccaagctggagtgcagtggtgtgatctcggctcactgtaaactctacctcctggattcaagcgattgtcctgcctcagtctcccaagtagctgagattacaggcacatgccaccatgcccggctaatttttgtatttttagtagagacggggtttcactatgttggccaggctggtcttgaactcctgacctcgtgatctgcccacctcggcctctcaaagtgctgggattacaggtgtgagtcactgcgtctggccatggaaaatatttattgagcacaattatgtgagagcatcatgctgagctttgaagatacagtggtgagcaagcatatatcctggcttcatgaagattatactctagttaacatgagcaacaaaataaaataatcacacaaaatatataggttcaagctgaaatgaggggctgcaccaaattctatgagataagaaaggaagaaggacatttttcaccaagttcaaagcctgggatccaaaggaatttgtcctgccaaaggcaaaacaaaaacaacaccaaacaaaaaacccaaaagagcaaaatgacagtagaacatagcgggggcagaccccccccccagacaggttcccaaaagaataaaatgacggtaggacatgacggggccagatccaaaatgctgacaggttcaaacaaaattggaattgaaaatcagagtgcgttcaagagtatcaaacaatactatcttgttacttgcttattaccttagtagactggaagcaacacttcaca

SEQ ID NO: 114828 - DNA, 1000 bp, Homo Sapiens
tgaatgtagtctcaaatcctcaaagagctgtgtttatttcattgacaaatagattatttgtattcaattctgatgtgctttaaggatgaagtttctcattttacaattagcacacacttcgtatatgttgtcacctgttctccttacacaaatgttgttccccattttgaaggattccctttggtaccagttttgcctgtccacataaagtatttcatttaaaaagctcagcataaaatatagactgcatctgaaaagatattgaatataatatacatagcagaacacacacgttccacatttcaaaagcctcgataacaaaaaagaaagatcaaagcccttattagtcgctgtaaagccatttataaagctcctgctgatcctgttaagcatggatataattgacctttcttttaaattaaaatgtaagcttttccccaagacaactcaaagtgccaagactgaatgggaactgtccatgtttctaactcttggccacgggcaccatcagaactgaacttaacaaatatatgaaaaatatctcttcatttttaaaatcctaagacccagaaatcataatccatgggatttgtttagtaaagaagaaaatctgtggctctaggtgtccactaaaggagagccaaaaatgtcccgaataatctcaggaccacagcatcattttatgaataacagaaccaagacctcagattgtacaacagattggttcttattgctggaatggggcataaaccatgcctggaaccccagatgctacagagaaggtagatgggagagacttctgacctgttcatgttgcaaaggcgtgcggagaccaaggtgagcagaggacacgaatgctcacattctgtggcccaggaacctgtgattcaatctcctcattaacaggattcccaaattttcatcctccctgcaatttttcaaatgctcggttatgggcttagtcccttgactgatcagatttgatgaacatttctgcaca

SEQ ID NO: 114829 - DNA, 1000 bp, Homo Sapiens
gccccttcggctggctctaggcagaagcaggagggcgcagcagatgcccacacagccagcacacttgagagaggcaccagccgaggagcaggggacttagacagcaaccctggagaagacaccactgagattgtcaccatatctgagaatgaagccaccaatccagaggaccgcagtgatagctccgagggctggagtgacgcccacttggatcctaatgagctgcccttcatcccccctggggcctcggaggagctgatgccactgatgccaatggccatgctgatcccactcatgcccctgatgcccccgccctcagagctgggccatgtccatgcccaggcccaggcccacgagactggcctgccctgggcgggactccacaagaggaagggtttgaaagtaagaaagagcatgtcgacccaggctcccttgtgaactggaggcactgggacacacgcctctcaaagggctggtggaacattgcagagcaaagccatgcatggcaacaagaaatcagggcatcaaagagatttcatatctacccaaggagtctctctgtttgtcgggagtgcaagagagcagcaaccacataataagagtgtgcagggctcgaagggtccttaggagtgggcaccacccccaaataatgaaggggggaaactgaggctccaagagggcctatgacttgcacaagttcaagcggcaaggtcgggatttgcatccagggctcactgggcagctactcccctctgcctgcttgcccaaccccttcccaatccagagtggcagcttcttagcctggcacacagcccccatcccatccctgccacccaccctaggctcattgcccatcttctctccatgctcaggtcaaacagaactccttgtcctccccacccgctctctctgcatatgctgttccctccagctgggatgcccttccctctccagacagaaacactccagcctggctccctgactcactagaagattccga

SEQ ID NO: 114830 - DNA, 1000 bp, Homo Sapiens
gtaaggggtggggagcaggcgcccacacttcggcctcagggagtcggggcagagctctttcagctctacctctggccagctcccagggcctctccttactttcttcgtaagtctctctttctggttctttctctctgtttttccccgtgtgtgattttattaccagttttctctttccttccttctttggaatgtacccggtattatctatttcaactctggtagttcacagaggcccagagaactggaatagccaaggtcacatagcaagggaatgaccagaagtggagccctaccctggtcttctgacttgtgttcttgctgtgactcaaccctgcctttttcagttgcagatccctgggaccccctcctgcttcctgatttttttctggtgttcctttgtgccttcattcctcacctccattctctctttttctccttacctgctcctctccccacctctcctcttcctccctgctccctcctcttcctagcttctctacccttccaatgccaggcctagctaactggatactcatgggggtttgtgcataagtaaacatccagatgtctacaactatgatcacccacactgttatataacatgtgtctgcatccatcagtgtccaaatgcccaaatgtgcacaaacttgcagacagaagcattcatgtaatacaaacatcacagctaaatataatgtgtatgaatagcctcatatgcattgaatatcactgggataaatgtccagtattatttaggaacagacggacatgctcaaagaaaacaggcaaagagacagatactctatcatcagttttattattaataagaataacagtataacagcagtaagtctttatggagcagcaggactttattaggcaccccctccaggcactcttcttctgcctcccccatacttatcggggagacactcaaatatgacaccctgataaacaaacctacacaaacaaacacacgtacattcatcttggaaca

SEQ ID NO: 114831 - DNA, 1000 bp, Homo Sapiens
agtagtttgctacatattgtattggatttatttcatgctaaaataattattttcttttttgtttacattgtccatgggaaaatgctaagtcacagatgaatacagcaagattaaatattgcagacctagggatccaaatgaagaactagatgttttagattttatgagattatatcagactatctaaaaagctacatttataaaaagtactggaatacagtaggcataaaacaaacttggtttctattgcatttattacaaattttagaacaaaaccatgtcctttgcagcaacatggatgcagctagaggtcatcctaagcaaattaatgcaggaacagaaaaccaaatattgcatgtcctcacttataagtgggagctaaacattgaatacacatagacaaaaatgggaacaacagacactggggaccactagacagaagggagaatgaggctatgggctgaaaaactaactgttgggtactatgctcatcacttgggtgacaggaccatccatatcccaaacctcagcatcatgcagtatacccaggtaacaactctacacctgtactctttcactaccccctcaaaaaacactggggagtacaatttgctggatcatatggtagaagtatgtttaattttgaaggaaactgccaaattattccaagtggctatactgctttgcatttgcaccaagcagtgaatgagagctcctattactccacatcctggccagcatttggtggtgtcagtattttggattatactattatgaagtggtatctcattttgatttccaattacctgatgacataaaatgttgaacattattatgcttgtttgctatctgtatgtcttctctgataaggtgcctgtttataccattggcccattttaaaaatcttccttttgttgttgttttgttttcttattaagttttaagagtgctttgaatatttggaataacaatcttttgttaggtatgtctcttgcaaata

SEQ ID NO: 114832 - DNA, 1000 bp, Homo Sapiens
tgtttgctttattttattttaatgtcagaaggcagtttgcgctaatgcttgaactctttttctgtgaaactcattaaggtatgaccaaatcctgcctcattaattcaagcagaaaatatcctggcagggaatctggcttaaacatgaaatgctgtaataaaatttctatgttattgtctccgtctgtgtcaacccacacgtgattatcatgaaggtaatcttaattttcccttcctgatccttaccagcagtagactagtaaatgaggcttttatgagcttgaataccaaaagtaaacagttgttgagggttttttgtttttttgtttttttcctgagatggagtttcactctgtcgctcaggccggagtgcagtgttttgatctcagctcactgcaaccttcacctcccaggttcaagcaattctcctgcctaagcctcctgagtagctgggattacaggctcccgccactgcgcccggttaatttttttgtattttcagtagagatggggtttcaccatgttggccaggctggttgcgaactgctgacctcaaatgatccacccgcctcggcctctcaaagtgctggaattataagcttgagccactgcacccagccagttgttgagtttttaagtgtataagggttagacctcctatcagacctttccagctaaatgttttccaaacacttgcttttacaattgatttttttttccaattgacagataaaattgtatgtatttaccatgtacaacatactgttttgaagcatatatacattatagaatgactaaatctagctaactgacatatgcctcacatggttaccattttgtggtaagaacactttacatccattctcttatttttcaaaattaatagtaatcttgtaattgtaactatagttactatgttgtgcaataggtctcttgcactaattccccctttttaactgaaattttgtatcctttgaccaatgtttctccaacaaccctag

SEQ ID NO: 114833 - DNA, 1000 bp, Homo Sapiens
caaatattttgttccaatctgtaggctgtctattcactctaataattgtttccttttctgtgcagaagcttttcagtttgatgtaatctcatttgtctatttttcttgcgttgcctgagcttttgcagttaaagccaaaaagtcagtgatcagactaatgtaaatttccccatgttttttctctagtagttttacagtttcatgtcttatgtttcataattctttcattgatttcgagttgacttttgtatatggtatgagatgagggtccaaattcatttttctggaggtgaatatccagtttttccaacacactttgttgaagagactgccttttttccattgcatgtttttggcatcattgctgtacatcaatagaccataaatgcatgggctaacatttgggttctctattctcttccattcatcgatgtgtctattttatgctagtaccaggctgtcctaattactatagctttgtaatgtagtttgaaatcaggtaatgtgatgcctctagctttgttctttttgcttaagtttgccttggatatttgtgtgtgtgtgtttgtggttccacataaattttagggttgtttattctatttctgtgaaaaatgacattaaaattttgatagggattgcattgaacctgtagattgtttttggcagtatagagatttaaaacatattattttgttcaatccatgaacagggaatatctttccattcatttgtgtctgcaattttcttcatcaatgttttatagttttcagtgtacagatctttcaccatgttggctaaatttattcctaagtattttaggttttgtaactattataaatgggattgttttcttgattgtttttaatgcatagtccatttttgtttatagaaatgctattgatttttgtatattgattttgtgtcctgcaactttgctgtatttattagttctaacaggtttttgttacagtctttaggattttgtatatattagatc

SEQ ID NO: 114834 - DNA, 1000 bp, Homo Sapiens
gaagttggtagaagggtaaggtagttgttagagagggaattaggggtggagggtatttgttgtgttttgtttaagacgggagagattttcttgaatgtaaataaatgtcataatttctctagtgggtggccagtcactctgtttctttttatatttaggacagttttcattttatactttcaaatgtttttaaaagtatgtttgagtgcttatacaaacttaagttgaataactgttctctaagcatatgtttgtggaatggtggttttcaaaactttgcttatcttgggaatagattcttgggcccctcttagattcagagtcagacactctgggggaagctgttagaatctatgcttttaaaaaattccccaggtgggccgggcgcggtggctgacgcctgtaatcccagcactttgggaggccgaggtgggcggatcacgaggtcagaagattgagaccatcctggctaacacagtgaaaccccgtctctactaaaaatacaaaaaattagccaggcgtggtggctggtgcctgtagtcccagctaccaggaggctgaggcaggagaatggcatgaacccaggaggcggagcttgcagtgagccaagatcgcaccactgcactccagcctgggcgacagagcgaggctctgtcttaaaaaaaaaaaaaaaaaaaaaaaaacaactccccaggtgattctgaaacctcttgtgtacacaggcctgcaaaagccttctatcatgaagctggcatatattataaatggaagtctaataagataatagttctgtaattgtgggagaaaagagtcaccctttttttaaatgggagagagtattcactagattctctataaagttgaaaaagaaagcaagttgttaggtatttgagccccaccattcatgagagtctgaataattctgagggtgacttatttagcttaaggtttttatttgtctttaaggcagttttactggaacataatcacaacatgatcc

SEQ ID NO: 114835 - DNA, 1000 bp, Homo Sapiens
gtgaatttgtgcacaacctgcttcacccttttgtttagcccagctctaaggatagacaattatcttcttgatgatgatcaaataagccccttggaacaaactgaacagaagtgtcctgattggattgctgtgaaaggcacttcagtgagagaatgataaagtgtgaattagggcttgggaaaaggaaatagttattatctgggaagaaagctagggaaaattgaaacaaaaataaagcccagattagtgaaaggaagaggacaaatgaaacaaacaaaaaaaaagtcgatctatcactgactgcaaatcaacagtgaaaaggaagatagaaaagtgtgccttgaaacctatctttatggcttttctcctgcagttttttatattgttatcattgttcttttaaacttccttggtatggctccccgctatgacaataatttcccaggaattgacaaactgagttttgtatatttttaacatatcaggaggcaagttgctgagaagaataaagtttatttgtaatattaaaataataattcatgatgctgtttcaaagctgccacaagttgaataggatgactgcaaaggaagcacttttcgccaattttaagcctctctttgccgtgcttgcctattgttaaatagcttcttggcatttgctcactcgaggcccaggtagtgtttctgtaatgggccaggaatggaatttgatctctgaaaatggatgtagatttaagtcattgaccaccatggatacacagaatgttctgacatgctcccggtaatcatgcttattagatagtccccatttcagtagacagcatctaccatctttagctcttccatctccactatcctacctatttagagaattatcaagttctgactagtaaactggataataaattcactttccgtttggtccccaaggtaagtgtgtattatattttagtacatagcatattttgctgtgatactttccatgtccatctctttaata

SEQ ID NO: 114836 - DNA, 1000 bp, Homo Sapiens
tgcggccaaggcgagcagcgccgtggccacccccaggacccccactgcagtggggtttccagcactccccatgcttccggctatgggacactagggcccctctcggggtcaggagggcgcctgagggagcagacaggaaatgctaagacactcctgaggagcctctcactggagcagccatggttggcagggtttcgtggtttgttcttcaccctgtcctgcctggtgtctaagtggtgggacaaggtgctaggacagaaatgggagctaggacagaaatgggagctagtccaggggatgggaggaagccgagttttctgttgaagtggagaagttacgaatggggtcttgacagggaagccagagaagaagggaccttggtgagcctggcagagtgaatccacccaaaatgctgggaagtcaaaaccgagcctggccttacgctgcccagaggacggcggatgcactggaggatttgcacagtgggagcaaatgtgaggaatgttctccttattcaacaaggaatccaaaatttttttgctttccaaggaagaagagaaacagttccccgtgcttctcccctcgcctttttcttcctctgtttccagcccaggaccacctcccccagcccgggggctcgggtgctaaagttcttccctctgccaaatgttgggaaatccgtagattttgtcgaaaaatcctaagtcattaatcatcgctaagccattttacaaccaaagaacaaaaattaagatacagtaagtacataacatgtcttcaagcctcctcctaaaatccagttccacaattggtttataccatgggtccaaatcacacccctcaagcccaaactggtaatggagagctcatagcaaaggccttccctcccgctcctgtcatggtgtcttactgcacttgctgttctgggcagggaatttgttcacccaggacttttggttgcaagcaacagaaacgtgcactgaatgctgaaagtaaaggg

SEQ ID NO: 114837 - DNA, 1000 bp, Homo Sapiens
gtatcaggaatagaagaggttgcaccactacaaattctacaagtatgaaaataatattttgaaaaatttgagtacttaaataaaacagaaaaactccttgaaagacacaaaccatcaaagctcactctagagatagatggatggatggagtgacaaacagatggacggacagacagatgtatatataactagtatagccctccatctaccatggaaatcaaacttgtagttagatgctgtcctacaaaacacacttcagggccagagtgacagacagacaacacacacacagacagatgtacatataacttgtacagccctctatctaccacagaaatcaaacttatagttagaaactttcctacaaaacaaactccaggcccagacagcttccttggtgaattctaccaaacatttaaggaagaaataataccaattattcacaaactcttccagagagctgaagagcaggaatacttcccaacttactctataaagctggcattatgctgataccaaagccaaacctgggcaagatataaaattacaaagaaaaaaaagcaagcaagcaagaaagaaagttagggacaaatatcactcgtgaacattggtgcaaaacttgttacaaaaaaacaaaacaaaacaaaacaaaatagcaaatcaaattcaacaatatactaaatgactaatacatcatgaccaaatgggaattattacagaaatgcaaggttggcttaacatttaaaaaaatcagtcaatgtaattcatattaaacaactaaaacagaaaaagaaaaaaaccatataggattatggtcaccagagtccaagaaaacgccccacaaatccctattttcacctttgtgtagttctcttccacttttaaccaggattagctagggttacttatgaaatatagcagaaatgacggctcatcactttcagtttaaggtaatgacagatactgtggctttgttcttgtgtgagttctctcctggatc

SEQ ID NO: 114838 - DNA, 1000 bp, Homo Sapiens
ttcctgcttactagaaactaaaactacgaacatggctcgcattatatttttattgggcagggctgctcagcccttttggtgcccagatggttacaggctgaggggaaagcattctgttgtagactctaccccatcccccagccttctgagtggggtcacaggaatcccaggacccctagaacatggccttgacctacagggggagaacagtgggagagaaacagggaataagtgagggaaatgaggccaaaaaggatgattctggttcttgagtctacctggttggttagtggcagaatctaaagcactattgtagaaactatggggctaaagggatgagggaaatacagccgctcgtcttctgggggctcacagtcaagtgaaagtgggtgaaactgaggcatcttaaatgagcatctgtaggaagtgatcaaaaagcactgccatacagcctgggggtcctcattgatgaagaagcctctcaacctgaaggcagcgtctggagagagccaggatgctggaatcagagggaaagaagagaagagggactcaacatttgttcagagccccttttattcatttaagcctcagaagataatcatgtttggtgctactgcccccaattgtggatgaggaaaactgaggcttagacagccaaagtaccttgttcagggtcaagagccactacctcccagaagatgagctgtttgaggggctctgctacttgctaactgtgtggctttaggaaacgtgcaggacttctctgagcctgtctccacttctcaacaggctattatgaagactagatgagatgataattgggaaatgcttcataaatgggaactgtaatgccttcgtatccagctcacaggagatgctcaacatgctgactattcccaaatgtagatctctagcctgcacattttcacttggatgtttaacaggcatcttcttaaactcaatgcacccagaattaaactcctgatattcccctccaaat

SEQ ID NO: 114839 - DNA, 1000 bp, Homo Sapiens
catctgcctgggtaactgtgtcacttaggttgggtcaccagaataattctcctccatttttgctgcctttccaatttataaacaacacagaacatcagtggttctcccataatcaaatatatttggctctattaatattaaaatttgatcttgagtagaaagattctaagggctaaaaaataaaagatgtaaaatgtatgttgataggttagtgtagaagccacccatggggttgcccccactcccactctttcatattttttttaagaaacaacactcaagttacaaagtcgattctttttttgttttgttttatttgagactgagtctcactctgtcaccacccaggctggagtgcagtggtgcgatcttggctcactgcaacctctgcctccccggttcaagcgatttttcctgcctcagcctcccaagtagctgggattacaggtgcccgccaccacacccagctaatttttgtatttttagtagagatagagacagggtttcactatgtttcaccatgttgaccaggctggtcttgaactcctgacctcaggtgatccacccgcctcagcctcccaaagtgttgggattacaggcgtgagccaacgcccctggccacaaaagtcaattcttaacttaaaacataaaagttccatttcttttatggtctacttagtcatgtctggagtcagtgagctcagtcaagtagtttgcagaatgacagttgtgatacctattcatttacccaccagattattttctgctctccatggcactttatagaaaacagtttattcggtcattacaacagctctaggagggggtttcattaaacccactttctaggaaagcgaactaaggcttagaaaaatcaagtaatttgctaaagactacccagctggcaatgatatgacaggacatgaacttaggacaataactcaaggtcttggtccctgtaaatatgggtttccaggttatgtatgcaggcagagggctt

SEQ ID NO: 114840 - DNA, 1000 bp, Homo Sapiens
gtaatcccagctactcaggaggctgaggcaagagaatcatttgaacctgggaggcagaggtttcagtgagccgagatcacgccactgcactccagcctgggcaacagagtgagactttgtttcaaaaacaagaaattggggtgtgtgagtgtgtatatatatgcacatacttatatgtgtgtatatatgtatgtgtatatgtatgtatacatgtgtgtatacatatatgcatataggtatatatatgtatgtatatgtggatacatatgtgtgtgtgtgcatatatatacacaataaaatattactgagccttaaaaaaggagactctgccatttgccacaacatggatgaaactggaggacattacgctaagtgaaataagccagacgcagaatgaaaaatattgcatgatctcatttatatgtggactctaaacaaaaaaaagtcaaggctgggcgcagtggctcatgcctgtaatcccagcactttgggaggctgaggcgggtggatcacctgagatcaggagttcgagaccagtctggccaacatggtgaaaccccatctctactaaaaatacaaaaattagccaggcatgttggtgggcacctgtaatccccagctacttggtaggctgagtcaggagaatcgcttgaacctgggaggcagaggttgaagtgagccgagattacgccactgcaccctagcctgggtgacagcatgagactcagtctcaaaaaaaaaaaaaaagaaagaaagaaagtcaaatatacagagatagagaataaaacagtggttaccagggcagagggggtgagggggaaagggagcagggagatggaggtcagaggatagcaagtagcagatatggagaatgagcaagtctagagccctaaggtacaacatcaggactccagggactctaattgtactgtatttggggctaggcgcagtggctcatgcctgtaatcacaacacttcgggaggccaagatgggtggatc

SEQ ID NO: 114841 - DNA, 1000 bp, Homo Sapiens
actactgtatgtcctgcttggggtgtcctaacaactgtaaactcattgtttccaggggtactgtgtgtgccctctgggcttatatttcttttgtgggtaccctgactatcatgacactgtctcagccctacaaggcattcggattaactttaacttactggtcagagatgtgctgtgcctgagttgatgccttgggccagattaaaagaaaaaaaaaggttaatataaaaactaaaggagaaagacacctggctttctaagatagacctttatggttaatgggattttttgttttgttttgttttttgagacagagtttcactcttgttgcccaggctggagtgcaatggcacaatcttggctcactgcaacctctgcctcctgggttcaagcaattctcctgcctcagcctcccgagtagccgggattacaggcatgtgccaccacacccggctaattttttgtatttagtagagacggggtttcaccatgttggtcaggctagtcttgaactcctgacctcaggtgatccactcaccttggcctcccaaagtgctgggattacaggcgtgaaccactgtgcctgttcccaggatttgttttaattggccaaatctagaagccatggaggacataactgaggccaataatgtaggctgatctcaccctgccatgtgggatcctattgataataatctttttgtaaaaaatgccttggacaatgaccaagtgggtagaagaaaagagttaatataacagacctgagactactaagccgtcgaaggccctgcttacaaggtaggcccttggcttgcatttgggacttggattctgagattgtctgcatcatttcataactgataaaagtggtttgctgtgcctaaactgtatatacaaacaacgtggcttatgctgaacacctgctttccttcggggaatctgggattttgctacctactaggcagaagaggcccacatgaccagtccccaataaaaaccc

SEQ ID NO: 114842 - DNA, 1000 bp, Homo Sapiens
ttattttattccaactaatatccacagcaatatagttggtcttcagtaaaccattaatctctatgcactttagtttctcccaccataaaatgtaactatttgtttattcttcatatttgctagaatggtgctatgttgttatttgccaatatatacaaaatattcccatgaattttcacctaatttcctttctcatgccactatataatacaaaggtgattttaaattatttaatgaatcactttgggtatctctttaaagtgtgcattcagttaagaataaataagaatccaatggattcatttaattcaaattggaagaactagtcctcaatgatctaagcaaagagagctctataacaccactgattatttcaaattgtattttactgcctttttcccccaaaaggttgctgtactaatttattctggcatagctagtgatctcaagtgatgactaatgtatctaattctatagcccatattaaaatacctaatcttttaagtgattgtgattaaagcagaatatatacttatccatttatggtggcagtaagaatatttcaaatatattaacttttgatttctctaaattttgacctttttttctctcttttctagaatcccattccattctaaacctatattctgctatttaaatagaatagtccagcaaatcttctttaagagatatttgaacagggtcctcagtaaaatttagggagtgaattgtttaaatacctggggtctgataaataatacttagaaaatatttttgttggtttcttatttatttactcttataaattgtgatgctctaaatagttaccatttgtcagtgtcctgaatagaatcatcttggtctgcatttcctctgtgttttagtcccggagttcaattgccattctattttattattctcctacacaggggccatccttaacctatacaatccttaaaaagttttctacatcactttcaccaaattacaagcctctcat

SEQ ID NO: 114843 - DNA, 1000 bp, Homo Sapiens
ggaggctgaggcacgagagtcgcttgaacccaaaaggcagagtttgcagtgagccaagatcatgccactgcactccagcctgggtgacagagtgagactctgtctcaaaaataaataaatagtttctagcactcatcccctagatatcccccaagtgtctctcttcccctttggtcaaggttataactgggataatgattatgacagactggctgggtgtcagaggtacagatttaaggtagatggactcagggtaaggatagctacagctgtgtggggctgaaggtctgtggcactgagctactggggaaggagggctctgttttcattttgacacactgagttaataaagcacttactgagggagccagagcccaaactctaaatgtgctgtagaaaaagggccaagtcattgactgcaccactccttcagccagaggtagaaaggatttactcttcagccatctggtagagccccaagaacaagttacatgtggacaaagggagggagaggtatcatggtgattaataaattcaaacaaagctgaatgataagaccccaggatggaatacagtctgagaaaggcctgggcaaagggaggcagagggactgaaggaagcaggtcaaggaagatacacccatggtagcctaggaaattggcagtagttggtgggtggggaaaaggagggtttggctgtatgcctagctttcacaaggtaggggatgaggaagatgatcatgatattgcacagaggacccaacactgaattgtgggagctagaggttgcttgaggcaaagtaaaaaggcttcggacactttcaaaaggaggctggccaaaggcgtgattagggactccagtaatggacatactagaggccctcgggcacctcaagccctgaatgggtcagcagctccccatcccagagagcaaaggcaggcaccactggaccccggaaatctgtctgtagcgtgtgaaccacagagacctggctcacatc

SEQ ID NO: 114844 - DNA, 1000 bp, Homo Sapiens
tgctctgtcagtcacccaggctggaataccgtgacacgatcgtggctcgctacagcctccatgtcccaggctcgagcagttctcccacctcagcctcctgagtagccggaaccacagaaccacaggtaaatgccaccacatcctcagccccctgagtagctggggctaccatgcacaccagcaccacactaagtttttttggctatttatttatttattttttaaataaagattgggtcttatctcactctgttgcccaggctgatcttgaactcctgggctcaagcagtcctcccacctcagcctcccaaagtgctgggattacaggcatgtgccgtcacacccagccctgcttgttttaaaaggggacttttttttttcttaatggaaaaaaatgaaacagagagccaaaagcttttaactgttgtttttttcttttcttcaatgaaagcctctcattttgaaaagacatgtttttcttcaagcaacaaaggtggtagaggaaattcctcaactttctcaacgagtcatgtaacgttacactggcctccataaagcaccgattaagaaagctaaagaataagatgttgtatttcttttaaaataatttaaaatatattaaattttcctaaggcaggttttgtttgaatgaggtgtcttgattagataactacatgccactgaaggagaacagtacttttaaggagctatttttgtttcgcagtagagttgaaaccagctgattaatccaatgaagttaaacagcagagacagatctcgtacataagagtatcagctaaagtcatgactacaccaattctttacacaattaagacatctttgcaactgttcaatttaagtactatggtttttagataatcgagaaaaacacagttgtaccttaacatctgttgagaaaatacaaataaatatgatgctaataaatggccactgataactcagtagccatctgaatagtcatgcggtttaagaatacatc

SEQ ID NO: 114845 - DNA, 1000 bp, Homo Sapiens
actgattccattagtttttgcataggcacagagaagactgtttaataaacttgagcaccaaatctcctttggaaagccatattgtggggacaagatagtgatgaaggagaagaatgcaagtgtggcattctttgattgtgaaagaatccctctcattgattgtgaaagggatcactgttgtctgccctcacaatagctgaagaagggttcagattgtgcatttggattctgtagcagacactgcaaatttccaagagcaaccacaccctgctgcctcagtggaggtgaatatgacctctgagagtactttaatggcacctccgagtggtgccacacagatatatacaaggaagatggtatcccttgcaaagaacaaggttattgttaccagggccagtgcagaagcctagagaatcagtgcattaaaatctctggaaagggcaaatgagctgcttggaaaaattatcattaccaagggggataggtttggaaactggcagtgagtctaaaggattgtttaaagtcttcaggaactacaaggccaaatatgtaagatgtgagagactgctatgtgaaaacatctaaagatcccataaactgaaaaacatcaaacacccattttcccatgcaggacatgtagtgttggagtataaacagggctgacgagggggaggtaaaagatagtccatatggtccacaaaagatctgtatcaatcattcctgcttagataccactgtactccactatgactgcaacctggacaagtgtcatgggagggttgtttgcaacaattttaagaactagcacttgtctacaactatgcccctcctacatgagaatttaagggttaggaggtagtctaacagtggcccagctccacatatcccctctgactctcagtatgacaaaaagctgataatcctaattcaagtcttatctagccgcttattatttctcattcctactatctttttgtttgcttacatccacgcatgatcc

SEQ ID NO: 114846 - DNA, 1000 bp, Homo Sapiens
gcctccgaggttcaaacaattctcctgccttggcctcctgagcagctgggattacaggtgcccaccaccatgctcagctaatttttggatttaattattaaattatagaacaattcaggccggactcggtggctcatgcctgtaatcccagcactttgagaggccaaggcaggtggatcatgaggtcaagagatggagaccatcctggccaacatggtgaaaccccgtctctacttaaaatgcaaaaaatcacctgggtgtggtggcatgtgcctgtagtcccagctactcgggaggctgaggcaggagaatcgcttgaacctgggaggtggaggttgcagtaagccaagattgtgccattgcatccagcctggtgacagagtgagactccgtctcaaataaataaattaattaattaaatttaaaaaattgttgaatgaatgaatgatcctagggggtttcagaaatacagacgtgatgagataaattaaaattttatattagtctttttatgtagcattcatacataatctttatagatttgatatattacggatttgaaatccttatgacaacttctcatattagtgtccaacgggaaatttatgattctaatttaaaatgtaaagttgaatcaattaagttaaacttgtgattttagattgaaatctcactagctgtataaatattattaggatatttaagataacttgaggttcaacatattataagttttttagccaggtgtagtggcgtgtgcctatagtcctagctgcttgggaagctgagatgggaggactaattgagcccaggaggtcaaggctacagtcaacagtgattgcaccactgcactccagcccaggcaacagagcaagaccctgtctcaaaaataaaaaataaaatactacaagcttagtttattagatttattagatatatttgaactgggtgcagtagttcacgcctgtaatcccagcactttgggaggctgaggtgggcg

SEQ ID NO: 114847 - DNA, 1000 bp, Homo Sapiens
tggtttggctgtgtccccgcccagatctcatcttgaattgttgcccccataattgccacgtgttgtgggagggacctggtgggagataataaaatcttgggggcggtttcccccatactgttctcgcggtagtgaataagtctcacgagacctgttggttttataaggtgtttccccgtttgtttggctctcattttctctcttgcctgccgacatgtaagatgtgccttttgccttccatcatgattgtgaggactccctagccacgtgcaactgtgagtccattaagcctctttttaaaaaataaattacccactctcgggtatgtctttatcagcagcgtgagaacagactaatacaggcgctctttatttctttctcttgcctaattgctccggctagaactttcaatactaagttgaatttaagcagtgaaagtgagcattcttttcttgttacaaatcttagagaaaaagcgtccaactttttcctattcagtatgatattagctttcggtttatcatatgcggcctttattttgttgaggtatgttttttacctctttgcccactttgctgggagtttctatcatgaagggatgttgacattttttgaatgcttctcagcatctatcgaaatgagcatatggattttgtcctttgttctgttgatgtgaggcatcacttttattacattgcacatatattgaaccaaccttgcatccctgggatgaatcccacttgatcatgatggatgatgtttttaatgtgttgctggtgtttggttgagggttttcgcatccatgcttactagggatattggtctttagctttgttgttttgtcgtgtcctcgtctggctttggaattacagtaatgctggcctcgtaaaatgtgtttgaagctattccctcctcttcatttatttgcttgtttgtttgtttgtttgtttgtttttaagcctttgagaagaattggtaccagttctttacatgtttggta

SEQ ID NO: 114848 - DNA, 1000 bp, Homo Sapiens
tagagataccctctgagacagagagccaagctaatgtggtagtgaaaatcgaggaagcacctctcagcccctcagagaatgatcaccctgaattcattgtctcagtgaaggaagaacctgtagaagatgacctcgttccggagctgggtatctcaaatctgctttcatccagccactgcccaaagccatcttcctgcctactggatgcttacagtgactgtggatacgggggttccctttcccattcagtgacatgtcctctctgcttggtgtaaaccattcttgggaggacacttttgccaatgaactctttccccagctgattagtgtctaaggaatgatccaatactgttgcccttttggttgactattacactgcctggaggatagcagagaagcctgtctgtacttcattcaaaaagccaaaatagagagtatacagtcctagagaattcctctatttgttcagatctcatagatgacccccaggtattgtcttttgacatccagcagtccaaggtattgagacatattactggaagtaagaaatattactataattgagaactacagcttttaagattgtacttttatcttaaaagggtggtagttttccctaaaatacttattatgtaagggtcattagacaaatgtcttgaagtagacatggaatttatgaatggttctttatcatttctcttccccctttttggcatcctggcttgcctccagttttaggtcctttagtttgcttctgtaagcaacgggaacacctgctgagggggctctttccctcatgtatacttcaagtaagatcaagaatcttttgtgaaattatagaaatttactatgtaaatgcttgatggaattttttcctgctagtgtagcttctgaaaggtgctttctccatttatttaaaactacccatgcaattaaaaggtacaatgcatccttgtttgatttcttctagggccgtaagtcttgtttctctccagatgtt

SEQ ID NO: 114849 - DNA, 1000 bp, Homo Sapiens
tgtgaaggcagaagctgtatatgtttgaagtgttattcatacctctatattttaagattgtttaacaaattggacttgtctctacctttctgcttcacatgaatttcgtcattatttgaaaggcatgtacttcatctgaaatacctgctggttcaatatttgtaacacttccttaatatcatatatagaggaaattctcctcctgccttattgcctgatgttttcccctccatggaactcatttccaagtaaatagcctaagaagtggttttatgagcattaaacaagtaattctttggtacattaattttgaaagcatgggatgacaacaagtatggagaaagaacaaatctcaaggttgacatttctattctagggaaaagaaggcatctgtagattctctaaagcaggaaaatacattcatttaataataatataaataaaaatataaagattattgaatgtcagtatattatgcaaaggacataaatgttctcacttttaaacaacagcctcataaagattttatcattacaattaaacatctcaactaataaatcccacaggctagagcctgagtctaaaaatcatcccactccccaacattacatcacttactgccctgatttttaaaaatagttactaaataccaatctaaaaactgattttttaattaaagatttttaaatagagattgggtctttctgtgttgctcaggctgatctcaaactcctggcttcaagtaatcctcccacctcagcctcccaaagtgctgagattacaggcgtgagccactatgaccagcgtactaaatatcaatttttatatgaggtaccttatagggcactagaatttaaaaaaaaaaacttagttctgagagatttgatctattatctcactatgttatagtagacttttgccttacaatgatttggttttattttcctgtttctgaaatctgggtagaaattgtaaaaaatggccactattggtcttgatc

SEQ ID NO: 114850 - DNA, 1000 bp, Homo Sapiens
ctgggggccccagtgtgggacctatgggctctacacacgggtaaagaactatgttgactggataatgaagactatgcaggaaaatagcaccccccgtgaggactaatccagatacatcccaccagcctctccaagggtggtgaccaatgcattaccttctgttccttatgatattctcattatttcatcatgactgaaagaagacacgagcgaatgatttaaatagaacttgattgttgagacgccttgctagaggtagagtttgatcatagaattgtgctggtcatacatttgtggtctgactccttggggtcctttccccggagtacctattgtagataacactatgggtggggcactcctttcttgcactattccacagggataccttaattctttgtttcctctttacctgttcaaaattccatttacttgatcattctcagtatccactgtctatgtacaataaaggatgtttataagcaaattttgtgtgacttacctcattccacaccaaaccctcagaattatagaaggggaatgggatgagaaggctgttatgtcactgaaattgggcatccagcaactaatatttaatttaattgtcacgaaaacagggaattcagcttttcttctctcttccaaatgagatttactgaatattgtgggttagtatgaagatcgccagtgtaaggcatcacattctgcttttgaaactcattaatatttacctggccaaaaaaaaaaaaaaaaaaaaaagaagaaaagaaaaataagaaaaaaaagaagctcattaaatgtcatgtggtgcgtggctcacacctgtgatcccaacactttgggaggcaggggtgggaggattgcttgagcccagggattcaagaccagtgtgagcaacatagggagaccctgtctctacaaaaataaaaaataaaaattagctaggcatgatggtgcgtgccttagtcccagctactcaggaggctgagttgggaggatc

SEQ ID NO: 114851 - DNA, 1000 bp, Homo Sapiens
ggtctgagttccttgctggctgttgacgggagtactccctgggccccttgccgcatagggtgcttcacagcatggcagctctgccacctgtcttacaggagaagatgagcaagagggatagcaggtccttttgcaacctaatttcagaagtgacttcctgtgtcttttgccaaattttgtgagttggaagtgagtcgttaggtgcatcccacactcaaggggtggggactccacaagggggtgactgcaggagctggggatcagtgagggtcatcctagaggctgcctgccacagccagggagtggaggaagctgaagaaggctacagccggaagcgggagtgaggagcctgacaactcaagaggtggcacagggggagagaactgggacacaaaagagtctgagaagcagggaacagtgtgtaggttccgtgaacaacacaaacaaaagtcattgctttcagttttgcaaacttaattctcatctaagccctctcagacacgtgttagaattcccatctttcaaatgaggaaaccgaggctgggcgagggctgtagggatggaaagagttggatgggttcagaaagtgctcattcaggatggattgcagggaagggtggttgaggaagtgagcaggatcatggcagacatggatttggtggtttctgtggagatgggaaatgccatgaggtctccttattgttctgtcaggggtgactcagtccctgtgcattaggttcagctcccatgaggcctgggacttgagtggggcctccgtggtggcttggaagctgctccccaccacatgccattttctcttctcttgcagctttggatacctcccgcctttggctgtcgacctgagtatgacaatggattggaggagattgtctttggctttgaaccctggataattgtggtcaacctggccatgcctttttctattttctatcgaatgcacgcagctgcctccctctttgaggtctattgtaagatatag

SEQ ID NO: 114852 - DNA, 1000 bp, Homo Sapiens
tttattgacgcacagtgagtaagtgtatgaagtgtgctataatgcagcaatggcacagaagctgcagaactgcattgaaggattgtataagattaaatgagatattgagagaacacatgtgaaaacattctgtaaactatgatatgtgacacaaattttaggtactatattgtccatagactatataccttaagtgagttataatataattctattatcttattttgtgtttaatgcgtgttcactaattgattgctattatgaatactttttcatgggtgaggaaataggtacaaagagataaaagaagtgttcagaaatcagagaatcagtaagtggagaagcaacaaaacaaatatatatgtatgtatgtatgcacatgcacacatatattcagattccaagcttggctcaaaatttaattgaggtaacacactttaaaacttaggtatattctcctattaacctttctaagaatcagaaatttcgggggttttggaataggtagttcaactaggtaatttctagagtagcttgcagtcaccaaattaggtggttcaaagtttccatttagtcataaataaaatataatatgtaagcttgtgttatttgccatgtatactttaaacatagatattagacatggaatgtccatcattaatatcataaaaacgtaactttattctgtaaactaaagatattcagattcagttttcatgaacattattgaacatttactatgtactatctattggaaattttttttggtctttaacttaaaaaccaaaacttaagtatgaagaaaattgctaaccacagagtatggattccttctctcaatcgttctaaaagacagaagaattagtgatggcaaaatctatagttatctattccagtgttgtctctcagtttatgtaagtaaaagactgaagggaagtgggaagagattcatgggtgcctttggcttttgggtgagttgcaatccttgttgtgagagatc

SEQ ID NO: 114853 - DNA, 1000 bp, Homo Sapiens
ccctccttctacctgtgtatttcattctctcccacccccagtctttggaaaaaaagataataaaactctagaagatatttttactctgagattagcagtgtgaaggaccttccagaaccttctctctctgcctttctctgaattaaaacgctcgcttgtctgagaccggctgtctccattgcatctgagtgataagagaaagattcattgaaacaggcaggttttatttttggtctgtccagcactaaatgattttcttttggctgacttatttttttttaactctaaacagactttgcagcttagtaagaatttatttcaatttagaaatatgggtgttctaaactttttttaaattaaaaaaatttattttttcctgagacaaagtcttgctctatcacccatgctggagtgcagtggcacaatcatagttcacttcagccttgacctcgtggggacaagtgatcttcctgcctcagcctccaaagtagctggaaccacaggcgtgcaccaccacccctggctaattatttttattttttgtggagatgggggtctcgccatgttgctcaggctggtctcaacccctggcctcaagtgatcctccctccttggcctcccaaggtgctgggattacaggcatgagccactgcgcccagccagaaacttgggtttaaaatggactttgcattataatgagatgggtaattcacccaggatgaatccagccttcagcttttgctttctttttttatttttatatatttattgatttttgagacacagtctcactctgtcgcccaggccggagtgcaatggagcaatctgggctcacttcaacctctgcctcccgggttcaagtgattctcatgcctcagcctcccaagtagctgggattacaggcacgccaccacacttggctaattttttgtatttttagtagagatagggttttgtgatgttggccaggctggtctcaaacgcctggcctcaagggatc

SEQ ID NO: 114854 - DNA, 1000 bp, Homo Sapiens
aatcggaatgtgcagggtctgcaggtcaggaggagttgagattgagttgtcacgtggtgggaactcactgccacttactttccttctctcctcttgcctcagcctcagggatatgacacatgcccatgatgagaagcagaatgtggtgacctttcacgaacatgggcatggctgcagaccctcgtcatcaggtgtatagcaagtgaaagcaagtgttcacaacagtgaaaagttgagcatcatttttcttagtgtgccaagagttcgatgttagcgtttccattgtattttcttacagtgtgccattctgttagatattatccttttcattgatgagcaagacatacttaatgcatttttggtttgtgtatccatgcacctacttagaaaagaagtattgtcaggtattctctccatagaacagcactaccttcctctctccccagatgtgactactgagggcagatctgagtgtttaatttcagattttctcctctgcatttacacaccacacacacacacacacacacacacacaccaagtaccagtataagcatctcccatctgcttttccccattgccatgcatcctggtcaagccccccctcaatttgtttcctgttcagcatgtactcccctcctctgattccccatatcagtcactgacagttaatacacctttgcaaacgttccccagttgtttgctcctctcattaatgtgcgcacaggtctctgcacgtgtgtgaatatttctttaggaaagattcttagaagttgaattgctgtgtcaaaggagtcatttattcaacaaaacactaatgagtgtgttctcgtgctgagcgctgttctaggtgctggagagacatcagcgaacaaggcaggctgatgttcctgaccaccattccggaggagggtgtttccagttgtttgtttgtttgtttgtttgtttgtttcttctggagatagggtcttgctctgtccaggctggagtgcagtggcat

SEQ ID NO: 114855 - DNA, 1000 bp, Homo Sapiens
tggaataattcttaagccaaagggacatattttgggacagcatattctggtttcctaccattatattttggggtggcatattttggtcttatacactgtgttccacaggcaacgaaaagagttcttgtttttcctgcagcaatttgtcattttttaaagagcttagcagttctaagagctatagagtagctgtgctatctcattgtggttttcaattctctagtatgttgagcgtctttttgcacgtttacttgccatagatctttttctgcgccccgcgccggcgcggggcgcctttgcgagggcggagctgcgttctcctctgcacagccttttggggtaccacggaggcgaagcagcattctcctcagcacagacgcgggcggtcgggtgggacggcggctccgcgagggcggagcggcgttctgctcaccacagacccaggagacaccacgaaggcagagcaccgttctcctcagcacagaccttgggggcactgcctcgctttgacacgactcggggcttcattgatggtgaatacaatcctttctgtttgcagcgctgaatattcagggtcagagaacagttagaagggttcagtgtggaaaacgggaaaccaaaagcccgtctgaatcctgtgcaccgagattctccccagccaaggtgaggcggcagcagtgggagatccacaccgtagcgtgggaacacaaatgcagcattacaaatgcagacatgacaccgaaaatataacacaccccattgctcatgtaacaagcacctgtaatgctaatgcactgcctcaaaacaaaatattaatataagatcggcattccccacactgccatgcagtgctaagacagcaatgagaacagtcaacataataaccctaacagtgttagggttaggggttaggggttagggttagggttagggttagggttagggttagggttagggttagggttagggttagggtttagggttagggttagggttaggg

SEQ ID NO: 114856 - DNA, 250 bp, Homo Sapiens
ttcagacacttttctctgaagcatgcccatgtccaccagccaacgtgcccccgtgttcccccccatcagccaagtgattggggctgaaccagactttaaaagagaggaaaaaaaaaaaaaaaggaaacatgaataaattggaatccagtggtgttggggcttttgtttttattttgtaaaggtgatgacttcttataaactcaatttttcagatgactggttagttctttctgttttttcttggctgcag

SEQ ID NO: 114857 - DNA, 1000 bp, Homo Sapiens
gttcattaacatatcaggtgtatcatcttcccagtaatgagccttatagcttagttgattcataacagtgctcccttcctgcaaatttagggtaacacgtgctcaactgtgtccctgggttttttacagcacttacaatctggcttcccagatccatgtgttctttttgtttctaaatatatgatcttgcacaaaagctctccatcctattttcctctcttttattatttctgctcagttaaatgtcttccccacatttgatggacatatttttaattccttcttctggattattatcttcagtgatcccagcaatgaccccagccagacacaggagtcaatacagtgtccccaagttgtggcttcacttttgagtcagtcactctttagctatctgactctcaaccttattggagttagagtgtgatgtaatttgattgattctaccacccctccagaaatatgaacgtatagtcagattctcaaaactgtcaaaatagttagttggaatgtacgctttaaattttaaaaagaacaaaattgttccaatactctatataactgtaaatgtcttatattttttctaacaagatttcaaagatagtgctgtaacctcacctcacagggagaaaaggagataactccaggaatttcatgcccatgccagagggagctgcagggaccagcaatcactggtaatgtccaggtggacatctggagccacctctccctcttgcttggtccaggccagcatcaacactgaagcaggtaggggttccaggagcattgtgtcctggcagtggcagcacacagtgtctggcagctgacaacgtggaactttacagggtagattgtccagcatgatcaggaagccagccaggcggccagcttgagggaaggcaggcctcctccaagctggggaagagatcagcacagctgaactgcatttccaagtgagactcatccccagctgggttactgagatattggaggaaacgtt

SEQ ID NO: 114858 - DNA, 1000 bp, Homo Sapiens
tgaaacgacctgctgccactctccttagtctcctgtagaataattttcttaataaattcccaggaagagtatagtgggccagagaacccttttataattaccagcatcactaatactttaaatctcaattttgaacattttgagtttgctttaataaggcaaatgactgtggcataaccttttctagtttcttttttcctatatggctttctctgattaacaagaatgacttctttttgaacctttcaatttggcattttctacatggaatgtccctaaatcaagtaattttcacaaagcaaagttttcaaaaatcaaggcagtagttgagacaaaatattgtatttgctatgaagtgcaagaagaaacctcttttgttggtaaatcgaggcctaaatgctgattccctgtgtcagctgaagaattgtgaggttcatatatttggaaaggagagctttatttctcataacaggtggccatcctgcaggctgggaagggtagcctccagcgcacgcagagacaaagcacttcgagggaagggtagagggagcaggaatgggaatgtagagggagctgagtcgggggatgaatatgcatattcaataagctattggaggagtcatgaatatttatgaaaggaaagacatgtgtacatgtgcaactgagcttcgtgccccttcatgggtctcatgttcaaaaaatggtggtggtggcatgatccgagggtagacattttggccctctgatgtcaaaaggtgaagcagaggacatgaagcccctcagtgtgcgtcctctgagattcagccaaaaccagaccagaaatggtggtcagttatcaggaagaggtgcattgtgaaactggtgggctgtcatgctgagactaaagagggagggggagtctgatcctgccctcagatgattggctaaaggcgataaaggaataagttgtccacttcctgttttccagtgctggattctgcttcctcctcagagagaattc

SEQ ID NO: 114859 - DNA, 1000 bp, Homo Sapiens
gtgatttgtgaagtagcccagtattgccttaaataaaatcacatttcatttcttgttttatacatgtgatcttataaagattttttgttttgttttgttttccattttctgagatttatagattggtgtatagctttaaactgtataaagttttgtggaaagatttttttaaacatttttataaatcttaaaattgatatcatcaaagtgagcccatcttgtgtttataaaatacaagagtccttaacatttataattacatagataaaacactttctataaggaagttggatgttttgattttactgtttatagatgttagattgtacagatttgtctgtatttctcaccatatctaatgatacttttttcattagattggtcttcaagaacagtattagttataattattttggttattcagtatatagttagctcttacagtttagctttattcaccatatttatactgtggattcacagcgagaggtagaggttattccaggagagttgatgaccttcatttaaagtccaactaaaatcagtagtagaaacataagaaaacatctttgcaatatttacttttgtttctgtttgccgtaaatagtaacattgtttttttttattttgtgtttgttataaaacagttgcattcacaatattattggcctgagatattgatgatattgtgatggtatgaaaatgtgtacattccctgtgcaacatcagatttgcaggaaaaatgaagcacttactgaaatcgctggtactctgaataaataagcatggtcaaggagtgaactattttcttttggaaatttctttttaatttttattattaaagtattttatttttagggccttttgggttttattgaatagttcatttcacctgtttaagacttactaccaataagcataaaacctgacacgttaaaatccctgccctttggtgagcccactgttatttattaaaataaaagttattttatgggtgatt

SEQ ID NO: 114860 - DNA, 1000 bp, Homo Sapiens
cattttcaaagaaacagccagttttaaacccctttagtgctgtgcatgtggtgtcattttggcatttgaaaacacaacctatttaaatagagcaaaagagcacttctgtttgcatgaataacatttaagctggttccatctgaggatacatactctgggtttccatttcacccacactgccacagcagcacataaaagcggtcagtctaatcatgccaggaagcagcacagacacagcatagcaggagtcctccccattcaaagaactcagtctgataatctgcctccaccagccaatggcaaccaagaccaaagccagctagccctcaggaaggtgatgtctgatggaccagtcaagccagaaggaggtgagcagaaaggccctgttcaaagcacacagcaagaacatccccaaatttaaagctctcatctttaatttttagagattgtctgataaaatatgtttatccactttttaatgtgcttttgtgggcatggcatttcaggacttcatcatcaccatgtaagtcccaagatcagtcccgtaatatattgactacagtgatttgtatttttctatgcactgggcatcttttgacttttgttgggaaatagattaacaatattcatattgcagaatggaatgcatgctactaacctaatctgttcaagcatgactataaatatgtttcattgtgataaaagtttaaattgctcacagttcaagttagcctaccagttggaatgtggatcagtgttttttgcctattatttcaagtgtaacttttaaaaatttagtggattttgaaaattcttagaggaaagtaaaggaaaaattgttaatgcactcatttacctttacatggtgaaagttctctcttgatcctacaaacagacattttccactcgtgtttccatagttgttaagtgtatcagatgtgttgggcatgtgaatctccaagtgcctgtgtaataaataaagtatctttatttcattcat

SEQ ID NO: 114861 - DNA, 1000 bp, Homo Sapiens
agcaaaaggtacagagatttcccacatgcccccaacattctaacatacatagccttccccattatcaacatcccccatcagagtagtacatttgttaaattgacaaacccacattgacgcatcataaccacccaaagtccgtagtttacattagggttcgttatgagtattgtaggtttacagtaacattctgtgggtttggacaaatgtaaggtgacatgtatctgccattacagaatcatacagggtagtttcactgccccccgagccccctgtgcttcacctattgatttcttcctcccccacaactcctggcaaccactcatcttttcattatctccatagttttgccttttccagacgtcatgtagttggaatcatagaatatgcagccttttcagatcggcttctttacttagtgatacgcatctatggctcctccgtgtcttttcatgacttgatagatgtgtctttttagtgctaaataatatcccattgtccagatgtaccacagtttgcttatccattcacttactgaaggacatcttggttgcttccaagttttggcaattatgaataaaactgctataaacatttgcgtgcaggtttttacatggacataattttcaacatgtcttttcaaaaggcaatgtcttttgaagcaaccctcgtacacttgctgtacaattgctagatcatagggtaaaagtacgtttagttttataagacactgccaaactgtcttccaaagtggatgtgccattttgcattctcaccggcaatgaatgagaggtcgttttgttccacatcctcagcagcatttggtattgtcagtgttctggactgtgtagtagtagctcattgttgttttaatttgcattttcctgacgactatgaagtggagcatctttttatgtgcttatttgtcatctgtatatctcattaaatcaggttttttttttgtttttgttgaattttaggagttctttgtatatttcag

SEQ ID NO: 114862 - DNA, 1000 bp, Homo Sapiens
tgcatatgtgtatgtgtgttttatatgttgtacatatttctagccatcttagttctgctgggtgcacttttctgcatttacctagtgttgcttcccagcaaaatcatgcataagctcatgcaaaattggccttatgctcaaacagttccctaatatatcatattggaacaaattcccattctcagaacaagcgttacagcagaactgactgtacttttttttaaaggtatgattttacttatagtaaaatgcgcaggaaactaaaaacactaatgctgaagtttgaggattacataggtcccttgtttctcctcttctttccttcaaccacttactttcaattgttgcttattaatgcctccacatcaatgtaggcacaggtggaaagaggtgacaaaacacaaatcagtcaagtctctacttttggaagccaggaagaaagcctgaagttgaaagtagtagctaagatcagacattttttggagttttagtaggtctaagttccctagcccacttacaggtccctgaggaactgtccgtaattaactacctttaggcaccatgcaaattctaaaataatccataacttatttgaccaagtaattacccaagaatacattacttgatgcagaaacaattttctcccacttgaacagggaacattaaaaagtttggtttagggctaacagaaaaaaaatttctttttcagagtgctaaaaagttaaaatggaaaaaatttattttgtcaattatacctcaatacattttagagaaagaaaaagtaagtctaatctattaaattctacaatgaatgttgagttttcccgtcatgctacttttatgtgctcactgataggagaagtttttttttaaaagacacagtggaaggtgaaaacctattctgaaggtcatatatttatttcaaatattaaaattggtaatagcagttagtgcccaataattagcactactttaaattattaatatgatttaatgctta

SEQ ID NO: 114863 - DNA, 1000 bp, Homo Sapiens
ttcattatatattacaatgtaattgtaatagaaataaagtacacagtaaatgtaatgcatttgaatcatcctcaaaccatcctccaccccctagttcatggaaaaattgtcttctatgaaaccagtccctggtgtcaaaaaggttggggactactggtatagcaaatacataaaccagtaacatagtcatttattatcattatggagttttatgtggtatatgtaattgtatgtgctatacttttataccactgaaacagaggtttcttaataccagcatcaccacacacatgagtaatgtattgtgctacagtattatgattgctatgatgtcactagatgataggaatttttcagctccattgcaatctttttttttttttttttttgaaacagagtgtagctctgttgcccaggctagagtgcagtggtgcaatctctgcctccaagttcaagcgattcttgtgcctcagcctcctgaggagctgggattacaggcacgtgccaccacacatgactatttttggaatttttagtagagacgagctttcaccatttggccaagctggtctcgaactcctgacctcaggtcatccgcctgcctcaccctcccaaagtgctgagattactggcatgagccacggcgcctggccgcattgcaatcttatgggaccaccaccatatatgcagtccatcattgatcaaaacatcattatgcagtgcatggttgtattcagatacaacagatttatttataactttgccagtctacctatttatatagttaaagagcaaagttaaacatttaaaagttatcttactgcccaagcaagccaaaggttcttctatcagaagttatagagattgtggaaattaaattcctgaaattgaatagctaccttaactgcctgtcagctggtatattatcagaaactaattacttgataaagtacttctgtactttgagtatcaaatatactaatttgtttgttgatatagt

SEQ ID NO: 114864 - DNA, 1000 bp, Homo Sapiens
tctttttccccttctttctggtcaagacagggttgtctctctgggtggaaaaaggcagtgtgttcgtggagtgcagctgcatttcaaaggtactttgttggcgagttatgaatttgcctttgctactgtggggaaacaggcagattctttgcctcccgccctccccaaattgaaattgatgttatttctctgccagtggtacccaaggaaatgttttgttccatttcctcccctttcaggctgagccctatttatgttgggagctggggccctgccactgagaatcattgtcattaccaccagcgtctgaggctggccaaattcagcagctgtggtttcatgcctaccctcaccaaggtttattcccttgacaacatgttcttgtttggaccaactttcttagcctttctctcgttgttccccccacaaccctacccccgcccttcctgaaatcacccttacagttgcatggagcttaaaattacaaaggaaaaagtgcaggtgcgtgtgcatgcgcgcgtctgtgtgcatatgtgtgtgcgtgtgtgcatgtgtgtgagcatacatgaatgtgtatgtgtgtgcatgtgtgtgcatatgggtgtgtgcgtgtgtgtgcatgtgtgcgtgtgtgtgagagagtgtatgtgtgtgtatgggtgtgtgcatgtgtgtgcgtgtgtgtgtgtgtgtgtgtgtgtgtgtgtgtgtgtgttggaggcaatgagcaggggattggagctggaaaggagataaagaccctgggagttagaataaggatacagggaggccagcgaatggggtgaagggtgggaagtttccccataagtaacgggatcaaattaattattattttggtggccgcctctcttctccaccccaagccaggcaagactcaccctcggccctgcccgccccagcatttcaaatggaatacctaggtggcccagggggacccctgacccctatatcctgtttctttctgcctgctttgctactt

SEQ ID NO: 114865 - DNA, 1000 bp, Homo Sapiens
tttagtatggcattgagttgtgatatagttttactttgatgtgcattttgaatttcagctacacctagatagacgtaaaatgataattaaaatgctgtaaccaacttatctaataaaattggcaaccagccactattttgttgactatgagaaagttaaaagtttatgttaatttttagggtctgatagaatatttcatgtgtattacagtggtattcatatgctatgtctctaaactttattttcaaaagcttaaggcccaaatacaaacttctctggaataaacgtggtgttttattttctgggttataaagtgaacaaatacttagatactattatttctttacccaatgcttttgatttttaagcacttttattttaaaaatgtgaattatacagtccccccctacacacacacacacacacacacacacacacacacacacacacacacacacacacacacacacacacacacacacacacacacacacacacacacacacccctataagcacattaaatactactttgccgtgacagctcagtgtacttcacaattcttaacactattctatgtggaatacaaaatgcctttttatctgaattaacatgcatttaaaaagttttagtatatgtgaaaataaaggaattataaatcagtaggaaagatattaaggtagaagcatcaccaatcaactagctcagtagatgttgtctgtatttattttctacctttatgaaacaagaacctgctaacaggtaaatcgtaaagtaacatatttttgccctgatgccattagtcacaatgccatggggtaactgctatgtgatttcccatttgcaaggaagcatattaattcagtttctgctcaatatacaattaggttgtagggatatagatatctcatttgagttatctgagtttttcatctttatatctaaaaatctaatctgaaaatagtaaaacacatttaaaaccttagatgctactgtagta

SEQ ID NO: 114866 - DNA, 1000 bp, Homo Sapiens
cactgtgcctggcctaaatgttttaggagttagtgacagacaagagagaaaactggattgtgttcacgatcaaaactctcataattattatgaaatactgatttacatataacacttacttttaatccctaaatttatggaagaatgattttggcttgccacaaatctttctaataatcaccaatactgtatatgaaaattctactatctatgcttaaagtaataaaaaacttggtgataatatgaatatgagtgatcatttaaaacttagtaaatcaggtaacttcagcactctctgaaatgtgtatggaaaataatatctttctacctcttccatttcacatatgagacatggtttttttttttttttttttttttgagaccgagtcttgctctcctgcccaggctggagtgcagtggcgtgatctccactcactacaaactccgcctcccgggttcataccattctcctgcctcagcctcctgagtagctgggactacaggcacatgccaccacgcctggctaatttttttttatttttagtagagacagggtttcaccgtgttagccaggacggtctcgatctcctgacctcatgatctgcctgccttggccttccaaagtgctgggattataggcgtaagccaccgcacctggccgagacaaggtcttttctgaaacatggctactttctggaaacttgcattattgtggtattcggaatacattgggttactttcacaacatgtaagactattaagtttgttctgtcttcctaataccttttacactaccaccctgaggaactaaaaactcttttgcagtaattcttttaaaaatattttttaaagtaaggtagtgtaatgcctccagctttattcttttggtcaagatggcttttgctattcagagtcttttgtggttccatatgatttttaggattatttttctatttctgtgaataatgccactggcattttgatagggattgaattgagt

SEQ ID NO: 114867 - DNA, 1000 bp, Homo Sapiens
ccagcttacaagtttttgatatattttgtttctgtgtcttaaacacaatggacaaatacctcatataaagttttatatttttaattgtcatatatttcattatatggatatatcttttttggagacagagtcttgctcttttgctcaggctggagtgcaatagcacgatcgtagctcactgcagcctccaattcctgggctcaagcgatccttccacctcagcctcccaagtagctggaactacaggcatgtgctcccatacctagctaatgttttggtcttatttttgttacttatttatttatttttaaacactttgttgcttaggctagtgtcaaactcctgggctcaaggaatcctcccaaactttggctacccaaagtgctgggattacagatgtgaaccaccatgcctggctggatgtttcataatttacctaactgttcctatgctattgaacagttaagattatttaagtttttaattgttaaaaataaagtcatggtgaatgcctttggacatatatctttgtattttggattattttcttatggcagatttgcaggagttttgttattgggtaaaatggaaagaacatttttcctttattttttaagagaaagggtctggccaggcgctgtggctcacacctgtaatcccagcactttgggaggccgaggcgggcagatcacctgaggtcaggagttcaaaaccagcctggccaacatggcgaaaccccgtctctactaaaaatacaaaaattagccaggcgtggtggtgggtgcctgtaatcccagcgacttgggaggctgacaggagaattacttgaacctgggaggcggagattgcagtgagccgatatcacaccactgcactccagcctgggagacagagcaagagtgtctcaaaaaaaacaaaaaacaaaaaacagacagggtctttcactcaggctgcaatgcagtggtgcaatcatggttctctgcagcctccaactcctagg

SEQ ID NO: 114868 - DNA, 1000 bp, Homo Sapiens
tcacatcttacatggtggcaggcaagagagcatgtgcaggggaactccccttaataaaaccatcagatctcctaagacttattcactatcacaagaacaacatgggaaagacctgccccatgattcaactacctcccaccagattcctcccacaacacgtgggaattatgggagctacaattcaagatgagatttggatgaggacacagctaaaccatatcattggctctgaatggagagacctcaaacttctgtatggattatcaaggtcgagtgatcaatggagttttaactcaggtccatcttccactgggttgagtaggcctcttaatccatcctgtggttattccccgagttccagaattcactggaatggattctgccagctggcagctgacagaatcctcacaatgcctccctgaacatgttgagtgagaactattatggtaggaaaggctgagagccattagaatgttctctacctagaaaaataataaatcaaaggcaatactgctttcctggagggattgcagagattagtgccaccatgaaggacttgaaagatgcaggggtagtgattcccactatatctccattcaactttcctatttggcctgtgcagaagacagatcatagagaatgacagtggattatgatacacttaaccagatagcggccatttacccaagtgacctaaaaagttgctagctttgagtgggacctagaaaaagaaaacactgcactagatcccagctgctgtgcctgctgctctgctactcaggccatatgatccagcagatccaatggcatttgaagtgtcagtggcagatggggatgctgtttggagtttttggcaggcccttgtaggcaaattacagcacagggctttaaaattttggagcaaggccctgccattatctgaaggtaattactctccttttgagagacagctcttggcctgctactgggtcttaatagagactgaccatgtaaccacagg

SEQ ID NO: 114869 - DNA, 1000 bp, Homo Sapiens
tatttaattgtagatccattaaatggggtctcccactgcttttcattaggcttcagttgtgaaaaagctttgtggatagcaaagtgctaaaactggaaggctttttaaactctgatcttactactatctttacaggattggtaattaaagttttaagaaggagatataggtaaaggatgctaattttcctggaaaaggacatgatcgttgaaaaaataagagaagatttagagcagttcagaagatgtggtggttaattgcgtgtgtcaaactggccccggtgtgtgcagactgagcattatctctggaagtacctgtgcgggtgtttctggatgagatcagcatttgaattggtggactctacaaggtagactgcccttcccaatgtgggtgggcatcatctaatctgctgggggcctgaagagaacaaaaggcaggagaacaaaaggggggagtctgcccccttttcctgcccgcctgcctgagctgggacagctcatctcatcttctcccaccctcgggctgggatttataccaccagctgccgtggttctcaggcctttggactagccagtctcaagtctccagcctgcagatggcagactgtgggacttctcagcctccataattatgtaagccacatcctcatgataaatttctttatatatctatatacacatctaccgctatgtctatcctattggttctgtttccctggagaaccctgattgatgcagaagactactgaatattcttcaatacccatttccctttgatcattaccttctgttcacactggcttcctgtgttagcacaccacagtctgtctgccagaggcccttgtgccaaccatttcctctgcctggaccttaccagagaggtccagaccacccccttctgagctgagtttaaaaatcatatcctcagagcggccctccagggcccatcagcacctcccattattgtttaccacagcccccatgtgcttaattccagcagc

SEQ ID NO: 114870 - DNA, 1000 bp, Homo Sapiens
tatttgatttcttatttctgtatctctcaataaagcaggaagaagtcaagttcaaccatgagctataaggctggcatgggcgaggaatatgtaacctgtggcaatgcttttgtgcctcctctgtatgttctgttaactccctgggaatccagttctgcctccaggaaccctgtggagattataagagaagagaaggcttccttgtccccactcaactggtctcaggagtgttctaatacaggaaacttggggctaagccaggcagggcttcataggttcccctgtccttgcaccttaagtattattctggtctaggtctactaccctcactggattaaacaaaactgcccaaaccaaaacaagctagatcctgggacaggagggaagcagtctcagcagatgaggcctcttcagacttttactctcatggaaaaaaaaaaaatggccaaatcgagttgctcaaataaaaatccagaatagggtcctggctgacatcctcaggaagcgcaaagggggaaaaagagacaaaaatatttaacagatgaaaatcctgaaaattcacaaagaaggtggggaaaacatacattcacactaacaggtgcacacacagaatccaagtgctcctgccaagtctgggagaacagcagcgaggtgtaagcaaaagcagcggtggtgggggtggggggcagggagtgggcggactcagtacagagtgaacagtaagggcggccaccctgcggatgataaattactcattatgggattttaacaaaggacaggacactggaggctccagttgacgctgtttgcagcaattctgctgctagacctttaggtataaagggtctcaaaaatgctcttataaaagacaagcaatatcaaagaggactgatgcccccaaggaaagataagctcagggaaaaacgaaagcaaggctttgttactacatatcaaacaatagctcttaagcttggtctgccccgaagactgtcttccgatc

SEQ ID NO: 114871 - DNA, 1000 bp, Homo Sapiens
tttggtaggttaggtatgttcaatgcatttttgacttatatatatatatatatatatatatatatatatatatatatatatatttttttttttgagacagagtttcgctcttgttgccaaggctggagtacagtggctcaatctcagcccactgcaacttctgcctcccaggttcaagcgattctcctgcctcagcctcccaagtagctgggattacaggcatgcaccacaacgcctagctaattttgtattttcagtagagacggggcttcaccttgttggccaggctgacctctcaaactcctgacctcaggtgatccccctgcctcggcctcccaaagtgctgggattataagaatgagccaccacgccaggtctgacttatgacattttcaatgtatgaccccattatcagcctcagaacatctgtacctatcatttcttggtggtgagaacataaaattgactctgagtttctctggtatacaatgcattgttattaactatagtcactatgctgtacaatagatctcttgaattatgcctcccatctaattgaaattttgtattctttgatcaatatctccctaacacccacctcccgcccccagcccctggtaaccaccattctactctgcttctatgagattggccattttaaattccacatataagtgagaccatgtggtatctgtctttctgtacctggctattttatgtaacagaatgtccttcagtttcatctatatggttgcaaatgatagaatttcctcttttttccatggctgaataaatagtattccattgtatattcctaccacattttctttatccattcatcggtttttaacacaaaactgatgttaaagattacatattgttggtggaaggatgaaggggaaggagggttgaggggggaggaaagaaaagagggagatggccaggcgcggtgcctcatgcctgtaatcccagcaccttgggagtccaaggcgggtagatc

SEQ ID NO: 114872 - DNA, 1000 bp, Homo Sapiens
caccatggctgtcccccaggaccttattctaaacacagttcagtatttcccaagcattcttgaatgccaggaactaggctgggacaatagtagtgtgcagaacagactagacatctattcagcaatcttgcttctgggtatacacacaaaagaatataaatccgggtctcgaagagatgtttgtacacccgtattcatagcaccattattcctagtagccaagcggtggaagcaacccaatgttcactgatggatgcgtggatgagcaaaatgtgctctatacgtacaatgaaatattgttcagtcctgaaaagaaaaggaaattctgacacttgctacaacatgaatgaaacttatttttttttttttgagatggagtctcgctgtgtcgcccaggctggagtgcagtggtgccatctcggctcactccaacctctgcttcccgggttcaagtgactctctcacctctgcctcccaagtagctgggacctcaggcatgcaccatcatgcccagctaatttttgtatttttagtagagatggggtttaccatgttggccgggctggtctcgaactcctgacctcaagtgatccgcctgccttggcctcccaaagtgctgggattataggtgtgagccaccgcacccggtcttgaatgaaacttttgaaaatattatgctaagtgaaataagccagtcacaaaaagacaaatactgtatgattttacttatatactgtacttagagtagtccaactcataaagacagaaagtaaagtggtgattgccagggactgagggaagtggtgagtggggagttaatgagggcagtttcagttttgcaagatgaaaagagctctggaggcagatggtgatgatggttgcacaacaaggtgaatatatttaacactgctatctgtacggtaaaaatggttaagattggctgggtgtggtggctcatgcctgtaatcccagcactttgggaggccgaggcgggtggatc

SEQ ID NO: 114873 - DNA, 1000 bp, Homo Sapiens
tccatggtcagccccctaggaacctgaaggcaggctcatctttatttcacttttatcttcccagcacacaggaggtgaacccttagtgaccatacccacattgtcatcctggggcttccagctcaatctcaaagctctggaaaagcaaaacagttcacactctcacatggataatgtggagaccaccagactcagtcactcgctcaggcaacaggtcctaacatgccttgccctaggactcagcggttgacatggcattctcccgagtgattaggcaatacatggggtgaatactgtggaggagaagggcagggctgctctggccatggacggggagagggatctgcactgacccgagggacaggcggcatctctgaagaagggacagagaatgagaccagaggcgggggaagagtgtgtgcgcttctgtggtgggggtcaggcaggcagtggcaagagaaggcatgcctggcatagataacaggagacaacatcttcaaagttttccgttgaaaagattaaaaactgctgctccctctccattttcatactgacctgtggccaaaaagcaggagccaccattcaccacgttaagagttagctgaaggtcaaggaaaaggaaaagaatttcgcttattgtttccaatccaaaggcggctacataatcgaacttgatgtcctacttttgtatctacttccaacagaaaccctatatcatgttcccagtgtagaagaaaaggatgaagcaaggttagacaatgctgtagttcccaaactgagtgcccaggtgccttggggatgtcatggtaaactcagatggcattgcaggaactatcagcacaaggcaattgatcatttcaacaccagattgcactatattcaacagtgtcacagcctgcaacacttgatcagcaagttgctgtaataaaacaaagattgtccaggcacagtggctcacgcctgtaatcccagcactttgggaggccatggcaggtggatc

SEQ ID NO: 114874 - DNA, 1000 bp, Homo Sapiens
gccggtgacttgggggaccagcagcagagatgaagacttggaaaactgctctcaccacctatgaaactcggggaaaccagcccagctaagtccggagtgaaggagcctctctgctttagctaaagacgactgagaagaggtgcaaggaagcgggctccaggagcaagctcaccaggcctctcagaagtcccagcaggatctcacggactgccgggtcggcgcctcctgcgcgagggagcaggttctccgcattcccatgggcaccacctgcctgcctgtcgtgccttggacccagggcccagcttcccaggagagaccaaaggcttctgagcaggatttttatttcattacagtgtgagctgcctggaatacatgtggtaatgaaataaaaaccctgccccgaatcttccgtccctcatcctaacttgcagttcacagagaaaagtgacatacccaaagctctctgtcaattacaaggcttctcctggcgtggtcaattacaagagacgtctacagggaagacaccagcgtttgggcttctaaccaccctgtctccagctgctctgcacacatggacagggacctgggaaaggtgggagagatgctgagcccagcgaatcctctccattgaaggattcaggaagaagaaaactcaactcagtgccattttacgaatatatgcgtttatatttatacttccttgtctattatatctatacattatatattatttgtattttgacattgtaccttgtataaacaaaataaaacatctattttcaatatttttaaaatgcattaagagaatcaccaaggagaaatgttccacataaaggaggagaaagagtaggaaggcagagtccaaggtgactgagttcaggtgttctttccagaaggagaaaaagccttgcctaaagctggctccggtcacagttttggggaatttcccacaattccatgtgaggagaagcagcattatctaatccacacagtggcaagt

SEQ ID NO: 114875 - DNA, 1000 bp, Homo Sapiens
aggcgtggtggtgcacacctgtaatcccagctatttgggaggctgagacaggagaatcacttgaacccaggaggtggaggctgcaatgagccaagatcgtgccactgcactccagcctgggtgacagagcgagactccatctctaaataaataaataaataataaaataaaaaattatttttgaaattgaattttaagatcttgttacacttttttaaagaaaaaagaagttattatccagggcacagtacagagaaacaaaagaatggaaaatatgagtggttaggatacaagcctgaaaaatcaagctgcaagcgtagataagcaagctggaagcttgcacaggtgaatgcggcagctgtgccaatagaaaagggatacctggaagccaagtacatccaatatggaggttcctcctcccttctctttgtcgtcatgtgtgcaggtgtcatggtgctggccaggtagagaccccatctgcagaataaaagattagggtgggatggccagcctctttgtgggctatgtaaatggcacagctggcccaaccaatccactatgccctatataaatcaaacactgcctcttcaagctcatctgtaaaaccaaccgtatcttgccccaaacccggaaacccactcggacccactcgcaccccctccctctgcacaaggaagctctctcttctttctttcaactattgaacttccactgttaaacccagtttttgtgtgtccatgtcttcgatttcctgtgtctgtgacttcaatttccttagcataagacaatgaatcttgggtatttccccagacaaaggatgccacttcaccaggaagtgactaagggaagaacacctgtgggaaaatgtccaagaattctgggaccagaaggggtttcagcagagcatctgtgggccaccaatcagacattctagcagaaaacatatgtccagttggtttgaaagattccctgaggggaagacagtgtaagccatcctcac

SEQ ID NO: 114876 - DNA, 1000 bp, Homo Sapiens
ttgccacaagtccagctgggaagccctttttatcagtttgaggaagtggctgtccctgtggccccatccaaccactgtacacacccgcctgacaccgtgggtcattacaaaaaaacacgtggagatggaaatttttacctttatctttcacctttctagggacatgaaatttacaaagggccatcgttcatccaaggctgttaccattttaacgctgcctaattttgccaaaatcctgaactttctccctcatcggcccggcgctgattcctcgtgtccggaggcatgggtgagcatggcagctggttgctccatttgagagacacgctggcgacacactccgtccatccgactgcccctgctgtgctgctcaaggccacaggcacacaggtctcattgcttctgactagattattatttgggggaactggacacaataggtctttctctcagtgaaggtggggagaagctgaaccggcttccctgccctgcctccccagccccctgcccaacccccaagaatctggtggccatgggccccgaagcagcctggcggacaggcttggagtcaaggggccccatgcctgcttctctcccagccccagctcccccgcccgcccccaaggacacagatgggaaggggtttccagggactcagccccactgttgatgcaggtttgcaaggaaagaaattcaaacaccacaacagcagtaagaagaaaagcagtcaatggattcaagcattctaagctttgttgacattttctctgttcctaggacttcttcatgggtcttacagttctatgttagaccatgaaacatttgcatacacatcgtctttaatgtcacttttataacttttttacggttcagatattcatctatacgtctgtacagaaaaaaaaaagctgctattttttttgttcttgatctttgtggatttaatctatgaaaaccttcaggtccaccctctcccctttctgctcactccaagaaactt

SEQ ID NO: 114877 - DNA, 1000 bp, Homo Sapiens
ccctgtctctactaaaaatacaaaaattagctgggtgtggtggcatgcgcctgtagtcccagctactcaggagggtgaggcagcagagtcgcttgaacccgggaggcagaggttgcagtgagccgatattgtgccattgcattccattccagcctgggtgacagagcgagactccatctccagacaaacaaacagcaacaaccaaaaacccacaaagtcataagccaagaaatagctatcagatttttggacaaatttcatcagcattttacccatgaagacagtagtattatccacttgctcaatttatatcaactttattttatttattattattattattattgaaatggagtctcactatgttacccaggctggagtgcaatggcacaatgcacagtgcaatgtgcgggatgcggtacgggggtggaagtgggtggggggatggaagtggcggggaggtggtgggccgaggcaggtgaaaagcttttgaagtaagcttgcatctgcaacttgttaacaatgctgggagggtctgcttaaaattttagcctatgtgtgacttctaaatagcttatactaaatgttaactattacctatgttatgcttattattttaaattttattacttaatttaattttccttccccactgatgcctgacaaggagactctccaactctccattattttgtgattaaaaaggtggctgataccctgaaggaacactgggaaaccatggtgcctgtgccctaccaattctcagaactgaatcagggcaggatgtggctgaagccttgctgtggggtgttcccattttgtctgtgtgacaaggaaggggaactctctcagccctggggtcctaacgagtagaggtaattactatcaggctgccaaaggccactaactttggtgctttcaagtttccaaggaatgcatttaagatccaataaatttatctaccattccagattattaaaggcccactggttactccact

SEQ ID NO: 114878 - DNA, 1000 bp, Homo Sapiens
attaacttaatgtacttgaatgaatagaacttgctactttttttttttttttttttgagacagagttttgctctcattgcccaggctggagtgcggtggtgctatttcagctcaccacaacctctgcctcctgggttcaagcgattctcctgccttagcctcccgaatagctggaattacaggcacgcaccaccatgcctgactaattttgtatttttagtagacatggggtttctccatgttggtcaggctggtctcaaactcccaccttcaggtgatccgcccacctcggcctcctgaggtgctgagattacaggcgtgagccactgtgccagcttgctaattttcacagaagttgatggcaattcttcacatgtaaacagtgccagtgcacagaacctttatatattttttgaagccagtactgtgctctgcatataacaaagctgcttcaaggatgagacctttttctaaaagcatgtaatgtgagaagccggcctgccttattttcttttttcttttttaatgattaaaaatagtttgtggcaaggcacggtggctcaggcctgtaattctagcactttgggaggccgaggcaggaggattacttgagcctacaagtttgaggccagcatgcacagcatagcaagactgcatctctacagagagtaaaaaaaattacccgagtgtggtgatgtgcatctgtaatctcagctacttgggaggctgaggtgagaggatcacttgagcttgggtgaggtgaggctgcagtgagtcctgatcatgctgctgcactcaatcttggacaacagagcaagaccctgtctcaaaaaaaaaaatatatatatatatatatatatattatttttatgaggtgaagtgcatcaaacttgggaaagatttgaggaggctgggaacctcctggaaaaccactccttgaagaaagatatgagagacatttagaagtgattcctgctttcagaaggaggtggattcaaat

SEQ ID NO: 114879 - DNA, 1000 bp, Homo Sapiens
accaagcagctcctcaccaacagaacaggatctgggagcgagagcctgccccactgctctcagcacagtacgagaccctgtcggatagtgatgactgaactgcacaaagtgaggggaacagggtgcaggagagggatctctagtttttgtggtttaatttttagtagcaggtcaaaaacctgccctcctgtgacttattccctgagacttttcaggagagccagcccacagatgatgaagaaatgatggaagttcatttggagagtcaaatgggaaaaaaacaaacaaaaaactgcctttgatacaggcaattcagtggactataataatagtggagggttgagatgtagagtttttaaaaagtgaacagttgctgttcttacatctgtaaagaaaaccataatgtctttaaatcactcttctgtaaatagatgacctttttgcagtgtatatccccttgctgtagtatctggtgtacttatgttcaaatcagcgcatcaactttgggggtgatttttaaaaatctttttgtctatctatctttttaaccctagccttctaaacaacctcatacagcccagttacataatgttggctgtcacgggcattgtacttttatctgatattgtttcctctaaattcagctttccagtgatgtttaaaatcttgtgaaaatgtttagatttttaacacagaccctgtcataaaatctgtacattagggtcaaaaggtaaaagtaacaaattctgccatattgtaaatttccagtgcaggctttaatttttttttttcattagtagcactgaaaaaatattactgcatgggtatgttctagttcagtttataaagttttaaaggcttatttgaggcatacctcactgttacgcacactggtaatttaaccatgcccctaagtattccttttctcctgcatttgatgcagcccaacaaagcttttgttttgaaataaatttgactaccctgtccataaaaaaaaaaa

SEQ ID NO: 114880 - DNA, 1000 bp, Homo Sapiens
acatttcttgtttctgacttttagattagggatactcaccccgtaccaatatttggagtccttagacattagattatatgaaaatgattgattgataggtaagaaaggttaaagagaaatgactttttaggaactagacttgaacgtataattaatatgtggaactagtttgcttttataattcattgtatcaagaaggagtcatgttttaaatccaaggcattgagactatctagaagcaaaaaagttggttttaaaaattctttttattagaagtgtgtttaaaaacatgtctttttttcccttgagcgacagtggcctcactacattgcccaggctagtcttgaactcctgggttcaagcagtcttcctgccttggcctcctaagtagcagggattacaggcatgcacccacatgccaatttttattgcttaaaatggcgagttctatggatattatctagccccaagcccatatctgtacacttttgttcattttataataccagaaagaatgttctatcagtaaaagaaggttttaagtatgaatctccatttttgtggagtttttctaccctgtaaaaattaactttgtggttcccagtaattacagtaaggagtttttctatattttcacagttggatttatctaaggatatttctcagcatattaaggaatccttttctacatttgagcaaatactgaggttcatgttgtaccaaataataataaattgcttttgtgtttaatatgtaacacgtaagaacaattgaaattttcttctaagatttaatactagtcttttagtataaaggaatgtaactggagaaaaaaattaatgctacagccatttatcctgtgttatgtgttatataatctgaaatttgtcacaatgttacaatcaggaagttttttttctggtttcttcttccaaaggaaaataatagcctacttgtattttgaagtaactgaaataaaactctctccaagcctttttgc

SEQ ID NO: 114881 - DNA, 1000 bp, Homo Sapiens
tggatcttctcccactttttttttcagctttaggacctggggagatcctgtgagtcaaggcagacacccaatcctgcccccacactcggggtcctccaagaggttggggggcagagtcccagagcagccctttaccccaggtccaggccctggaatcctgagactcgcgtttccttggccagtggtaacacaggacgtgtgtgcgcatgtgcaagtgtggatgtatgtgtgtgcgtgtgttttgctcatttctttagggaacttgggagtcggggttggaggtgctgggcaatggaacttcaaattcaatgtcgcccagcagtgaggggagtcgggaggtgaggcctgtaggccaaccaattggtggagtctcagcgatagcccaggtgagaagtggttcacccagaggggcagggtgggggcctcgggcagatctgtccctcttggcccctctgtcctcaaatgtccaaaatgttggaggacctctgttcatatcccacgcctgggctcttgccagcagtggagttactgtagagggatgtcccaagcttgttttccaatcagtgttaagctgtttgaaactctcctgtgtctgtgttttgtttgtgcgtgtgtgtgagagcacatcagtgtgtgcaggctgtgtttccccatttctctcctcccttcagacccatcattgagaacaaatgtaagaaatcccttcccaccaccctccctgcctcccaggccctctgcgggggaaacaagatcacccagcatccttccccaccccagctgtgtatttatatagatggaaatatactttatattttgtatcatcgtgcctatagccgctgccaccgtgtataaatcctggtgtctgctccttatcctggacatgaatgtattgtacactgacgcgtccccactcctgtacagctgctttgtttctttgcaatgcattgtatggctttataaatgataaagttaaagaaaactcaaaaaaaaaaaaaaaaaa

SEQ ID NO: 114882 - DNA, 1000 bp, Homo Sapiens
tattcgcctacacaattctccgatccgtccctaacaaactaggaggcgtccttgccctattactatccatcctcatcctagcaataatccccatcctccatatatccaaacaacaaagcataatatttcgcccactaagccaatcactttattgactcctagccgcagacctcctcattctaacctgaatcggaggacaaccagtaagctacccttttaccatcattggacaagtagcatccgtactatacttcacaacaatcctaatcctaataccaactatctccctaattgaaaacaaaatactcaaatgggcctgtccttgtagtataaactaatacaccagtcttgtaaaccggagatgaaaacctttttccaaggacaaatcagagaaaaagtctttaactccaccattagcacccaaagctaagattctaatttaaactattctctgttctttcatggggaagcagatttgggtaccacccaagtattgactcacccatcaacaaccgccatgtatttcgtacattactgccagccaccatgaatattgtacagtaccataaatacttgaccacctgtagtacataaaaacctaacccacatcaaaaccccccccccatgcttacaagcaagtacagcaatcaaccctcaactatcacacatcaactgcaactccaaagccacccctcacccactaggataccaacaaacctacccatccttaacagtacatagtacataaagccatttaccgtacatagcacattacagtcaaatcccttctcgtccccatggatgacccccctcagataggggtcccttgaccaccatcctccgtgaaatcaatatcccgcacaagagtgctactctcctcgctccgggcccataacacttgggggtagctaaagtgaactgtatccgacatctggttcctacttcagggtcataaagcctaaatagcccacacgttccccttaaataagacatcacgatg

SEQ ID NO: 114883 - DNA, 704 bp, Homo Sapiens
gggtggaatctttaaggtcccttaagaaacttttcaaaacgtcttttgcacacatttcctataaatgatagagtaaccaaattgtcattttcatcttattaaagctggcccagagcagacattcataaaattctactttagaaacttgcttgatagtcaccagttgacactgttggaaatgctggggggtttttgttggttgggttttggtgcattgttgcagtgatttgtttagcaatctgtttctctctcctcagtgcaagaactatatcagccagtattctgaaattgctatccagatgatgatgcacatggtaggtggcacggaggccccttgttagcatttttctttgtttttcaggtttcgtcatttctaggaattttgaaaattatatggtttagtttcccttttttaccttagagtgctgaattgggctaaatcgacccctctggctaggagactctccacttgcaatctcagtacctcccctgttacgggagaggcaggctgaagcatcttgatcccaggactgccctggtggcttcctggcaatttgtttgcctctgcccgttcaggccagccatcaggtttctaggtctggctttaaccctgggatctgtagaagtcaagtgctctctaactaagccaggcctgagaatggctgtgttgccacctgagtcgggggaatactgcctcccggagt

SEQ ID NO: 114884 - DNA, 1000 bp, Homo Sapiens
tttgaaggtgggccaggtgggagtttgctatgaattttgatgtccttatttagagtagattgataaaaccttatagtgtgtcatttttcttggctcgtaggaaggagaaataaatagggtaaatgaagaaactcagaacaggaatagatgttctgataacggcacagcttagattcattgactgacctaggagcccaactgggctgactttaatctgattttgaccagctggctttattatccacttgatttccatcagctctttcacgagggggaattaaaaacaatatgctgctgccctggcttcacttaaacagtatctctggagaggacctctagcttgaatacagcctgcccctcccctctgtgattgtaatgtgcagccaggggtgagcaccactggccaaaggagagcccatgcgcacgtcagcaggggaatacatgggagggtgagaatggggtgatgctgaaaatgaagggactacagtgttcttttgatttggatgcactttgaagggacagccagagagccacgtcccactcacttcccccttcctcgctggactaacagtggagaggacctggggtctcactgcctggccggctgtcccctcagtggctgttgtcttcggactcccctcatgggtaggcccacagcatctccgcaggtgcttatcagaagtcaccgctaggtgtcactgttggaccacgaaagaaagctgaggcctgctgaagcgcagtcagaaccagaatcagcaaggaagattgggtgtgcagtaggggggttgtgaatgaatgaataatgatgaaacttggggtgatcatcctgtttgcccctggatatctgcaggaccctcccatcttcttcaccttcttcttcaaatactgcacgatgtcacttatctgtggagtccaaaaaaataaaaccagtgtcatagaaacagagtagaaaggtggctgctagagggaggggtggggacaggatggggaaagagatgtt

SEQ ID NO: 114885 - DNA, 1000 bp, Homo Sapiens
aagctgttccttttttttttttttccagtagccaagaaactgtgctgaatcctaaaacgaaattataatgcaatagggccagaggacagaactctacagtgctttttccaacttttataagagttacattctgtggaaagagtagatcatttacaactctttctcaaaatgtgagaaatacagtggctaataaaagctgctatttggtgtgctttggatatcaagtacagacttagtcctatttcttactctccttcagttcacatccatctcccaaaatcaatattggtgacaaaaatgagtcaaaaacattttcaagcaagctgcctgaaatagcaagcaataatttcaaatgtagatttctaataagaaatcaaaccataaaataaaacttattcaaggaatttcttttctgaaatatatttagtgggaagtcactaatcaatcaaaagcaccgcatttttgtatctatgcagtactgttgcagatttcaagcctttccaaaagcaaagagaggcatgtattcacgtaagcacgtaatgggtgagggggtatatacacatgtgtacatgtgtgtgttgtggggaagggtgcagtgcaaaaatgaagacataaaaaatgtacataatctaatcttgaggctatggtaattttaaaattctgacttaaagaattttatccatatatcttattcagaactgaacaaaatgagtagagttaataccaaaataagaggaaataagtgagcaggtaatcagcccgtgttatttacactttcagtacagtgaaggagaactgtgaaggttagactttatagttttggtttcttgaaaattaaaattctatgactatagaataggaaaaaataataccttcagaggacagtatcaagtctaccactaaccccaaaactttaaaacttagtaaaaaatttatggaagtactctaatacttctcagccttcaagatcataaaaaaaaaaaaattattcttaaggatc

SEQ ID NO: 114886 - DNA, 1000 bp, Homo Sapiens
gggtttcactatgttggccaggctgctctcgaactcctgacctcgtgatctacccgcctcggcctctcaaagtgctgggattacaggcgtgagccaccacacttggccagactgtagttgttattggaggctgtggtgaggctttgctgaggatggggatgccaggaagtcttgtccttcagcatcagtggtagcggtggtggaccaggtgtgtcaatactagggactgtgggcagtgtttgtgggcactgatgatagcctgtctgcgtgggccaatccctgggcctccaggtggctcctttggttgctggcagtggcagcactgggccaagtgggcaggtgcaccactgggctcctgggtggtgtgcgtggcaggctgatctctagttctccaggtgacatatgcaggttctggtggtgggtaggcaggcatttcctcaggcctctcagtagtaagtgtgagcactagctctggaggcagatgagtcaatctccaggcccccagatggtacattcaggcaccagcatattcctatgcatttctagataaaagtatttttcagaaaacctgagtgtatgtcctattaatacaactaaccctcatcagctctgcatgagaagaagggggaattccctcagtagaacagtcagaatggaatcacagacttgtttttagccagtcactggtaaggggggttaggctaaaatgataagctcagaatctaaaccttagactagggaatggcaaactttttccataaagatgcaaacggtaatattttaggcttttggtctagataacctctgtcgtagtgacacagtggtgccatcgtagcctaaaagcttatgtagacaatggataaatcaatggacctggttttattccagtaaaacttaatttatacagtcagagggccagatttggcccttggtctatagttggccaaccctgtttagagcagtcaaaatttattccctggggctgggccaactttttctt

SEQ ID NO: 114887 - DNA, 1000 bp, Homo Sapiens
gcacattttcaccctgatttatttttttgtttcttacctttgatgttttcaaaccaaggattgtgattttaggttagaattacatattagaagcattaagactatgtctttggatcagaatgctttagtgattaacctactttgaagacatactcttaagcaatctggatcttaaatttatgtgaatacatttttagaaaatgataaagaaaaatggaattacttcaaagtgtttcttgagtcattgattcttttagcatctcaaatgttaattagaataattggaatcactttttagacttttcaagttacctttcttgggaagtttgtgtagtgttaacagtttagtttagctcctcttatagggcaatggtttgctagtttaaaactgtaaccaaatgaactggtcagacaactcatatctaaaacacttaaaatgttagaacgtttgggaatgttataacctaagcgtttttgctgataactttttgttatttatagacatttgtgtatttaacatacttacttctggaaatatatgcctttcctaaaacttaaccacacatccactaccatggcctatgtatagaattgaatattttggaccatgttatctgtggcacagtcagtgctgtgtttgaggtaaatgcagtaacggttagttttctactttgccttataaaaggtagaaaccatgtgtatgttatgtttgtctataaaagaaaaatactaatattaaattatttcttatgactgtgagtcactcacttatttttccaataattgatattgtacattcttagtgccattaggtatgtatgtatgtaacttttacagtttttcagctgaaagttgtattttttttaatcagggctctttaatctcattttaatttcctttgtttgaatgaactgtagttattttctgtattcctatattaaccatctaaaccaactgtaatgacacgtacactaataaagaattgaacatttgtatttgt

SEQ ID NO: 114888 - DNA, 1000 bp, Homo Sapiens
tgcggctatgagggggtgggcccaccaccgcccagccctccttggtggacgtggggacaggtaggagcctagggaaaggggtgggcgggctctggtgtgacggcgtgagcgctagccaggaaggtggggccagggctgggcatggcacctcacctgtgggggaactcggcggagcttcctggcggcatctccccctcttgccttggtcctttctatctttgttttaggccaatttctaaaaagactgaggcctccttcaaggttgaacagatttctagagccttgtttttgctgtgacaagtccctagtccctgttcacaactctgaaaccaagaaacctgagaaccaagagaactgaaatgaagcccgttggtctcagcctggcttgagccaacatgaggctctctgctgccttttgttttcttaggttttgctgagaaacgggagtgcgttctgtgtcggtgtttgtgacgccctgagaccctgcttggcctagctaaagtccagaaggcctgggccccacagggcttggatgagggctcatgggcctgtacttcaggaggcctgagaggcccggtcagtcccatgaggctactcggcttggcccgcaggtcctccgaggcacagggcagagggacaccccagggacccatcagactcacgacacagagaaactcaagtggggtgccagggccggccacagaggccacgggcttcctgcctgtgacgagccgccctgtttgtctgagccctttggagatttaggttgagtcatgagaaccggtcattggaacatacactttattatgttacaaaaacaaaaatccccactgaaacacagctaaaaaaataacacattttcccaagattacattaccaaaaacagttgttatgtcattggagggcgtccattaatactgctcggagaagcacgatcttacacgaaaaacacggatgggatttcgttttcaccttaaagcattaaagtgctttaactggt

SEQ ID NO: 114889 - DNA, 1000 bp, Homo Sapiens
gttttcttattgtgaaaggaactaccttctcttagagggtaggaagaatgtggtgtgtgtgtgttctcataaagcaactggacattataggtgcccaggtcatctataaaaacgatccttgggctgtgtaaaaatgaagtggcttttcagtatcctctttcacacttgctgcttcgggagactatgcaatgatgggaaggtgattgcccctttatttcattcagtgccatggtccctgttgttgtagtaatttatttgtttagttcatttttttttttcttaacagtcaaggggaagagtgattcctcacactgctttcaagctggactgagccagtctcattctgggaaagaaacgctgtgtccagaactcagcagctccatctattttttccagtcgaaagaaactgatctttaggcagtttttacttggccagaaagcagtgctgaatacttgaaactgtgtgctctgttctacttaatgttctgtcagaatgttcttttgtaggcagtatgtcatgatgtaatcatctatctccttgtctgtttccaagttacactgtgaagtctgcgacccttttgaggtggtcatcaaagacacagattccttgtttaaccaagtgtcccaaagcatgtacctgaagttatatcattttttattctaaaaagctatgcagcttatattctgaaaactattaaaacatataccactgttgttgatgtaatttgtgactcttcttaatggaagatgacaggattgtaaaaggtatgctaggggactgatcttctctgctggatcagtcagtcagctgttactagttgatgctgtgctaacatgatcccctcctacttccatgttgctcttactacaaaggttatcatttgcatttatgtccatggtaggctgagctataatatgctggctttgcagcagaatgaaaaggatgagttggtgtagccttataaggaggcttataaaaataaattatcctccataaatg

SEQ ID NO: 114890 - DNA, 1000 bp, Homo Sapiens
tgaaatttattttcaggatctgctataaggttgaaatttagcccagctctaggcattttacaaattatttttcaagcagtcattcttgattgtttgacttttttttttaaattaaagattgggaatgtatgtgagagtatgcatatgtatgggtgtgtgtgtgtgcgcgcaatcaaactgtggtgtaaatagattctcagtgaattctggtattcagactctattccactagtgaaagaaccattttttaaacttcccttgccttttttatttatttaattttcttggtttggagatgtcagtcccaaacaccagagtctgtacttttctataacacagctcagattaaggtagggcatatgccaaggaggttctcacctccctaaagaagggacttgaattttagggactttaattcacccctccttcaatacaactttcccccttcttgtttgcacatgccaagataactgcttttatgcaggctgtacccccttgaaaaatcctttctacagtgctgctcacaaaagagcccaagttcgcctcctacctgcattgctgacttgaattcacagtcgccgagtctacctagctttcttggaagcagtctagcaaaatttctatttgtacgttcactaattatctacaagaacaaaatcagttgtatttacaaaactctacttcagtgtttgttttagtttttttttttactgaaacttgtttttgtgaatactctgtgcttagaattaaatatcactttcttatgaacaacataacttcttcagattgtgtatatgaaaacattagcaagtcttgttttttctatgaagcaaacacaattggtgacaaaggttgtcaatcatttcttcaaaattataatgcagttctaatggtcagcatattttgatattaaatttaaagatcacctctctgcatttgtttttaaattatgctaatacaccacacattatgttggtatgttttgttctgtactttcttt

SEQ ID NO: 114891 - DNA, 1000 bp, Homo Sapiens
ttgttggacactgtcactttgggccttgccaggtctcacagaatcacatcgctgtatttattgtataatattgtgaatattggaagttttgagtgagtgctgtctagaaggttttggagtgtggatgctggtccaagaaagaagatgtgccctggcctgctggaaagattgtgaattctagagatagagccgttagcatccatctcctccctgtaactcttaggaaatgcatcaaggaccattatagaaaggatcccctgacctaaggatgaaatcgacctagggttaatcatgacagctgcatcagttgtattggatgcaagtcaactctggaggtgagtgcccgcaagcagttcccctgctttgaaagaagatggtcagcccgctgcctccccagcggccacagctcctttgagtgtggggggtcacagccaggatgtattcctgacaataaggatccttttattttcatttctgcataatgaaagagcctttcgatttattagaagtggtttttcctccctacatctttaaattcttggttctctttagtcctcatcccttgaatggacttgtcagctacctccccaggaggagttcagaagcttctgttggccatcacttgagtagatgacaagctgtaaggtatctgctgctaacgtggctgcttctccgagagcacattgaggtccagacagatccaaaccttggccctaaaaaatgtgtgctgtaaagttacttgatgtatatttattataattatttatggttgcatttaacaaacttttcattcaatctgatgctatttacaccatgctgtgtaaaggaagctcactaaaggaaaaaagtcacaccaataaataaccttcatctaattttgatttaccttaagagttgtgtgatcatctactcttgctgagcaagttcaaaggctggcatgcttggatggctctgatatttaagtgctgccaagtggctaggaattaaagtgtttctaatt

SEQ ID NO: 114892 - DNA, 1000 bp, Homo Sapiens
tttagtagagacagggtttcaccgtgttagccaggatggtctcgatctcctgaccttgtgatccacccacctcggcctcccaaagtgctgggattacaggcgtgagccactgcgcccggccacattcagttcttatcaaagaaataacccagacttaatcttgaatgatacgattatgcccaatattaagtaaaaaatataagaaaaggttatcttaaatagatcttaggcaaaataccagctgatgaaggcatctgatgccttcatctgttcagtcatctccaaaaacagtaaaaataaccactttttgttgggcaatatgaaatttttaaaggagtagaataccaaatgatagaaacagactgcctgaattgagaattttgattttttaaagtgtgtttctttctaaattgctgttccttaatttgattaatttaattcatgtattatgattaaatctgaggcagatgagcttacaagtattgaaataattactaattaatcacaaatgtgaagttatgcatgatgtaaaaaatacaaacattctaattaaaggctttgcaacacatgccttgtctgtttttatttagactcctatagtgtctctgaagaaaagaatacagatatttgaaaaaatatgatttggtgctcttaatatctcttatatcgtcacttacctcacttaaatagtcagatattgctggagaaaaattcacaagcatgctgacaggtctcactttaaattcataaccataaatctcaaatgagccctcaagtctgcctgaccattttagttacttctctacaatccttccatttttatgtccctagtctccaaaatgactgttactattttacttttcctcttctctcttcaaagcctcaagacacacattcagcctcctcctctgcccccttatcctccaccctcctctgctctcagcagataaactggcctcatattacacttctaaaacaaaagcaacttcataccaagctt

SEQ ID NO: 114893 - DNA, 1000 bp, Homo Sapiens
tagggcatgctaggcagtcacagcttaattataaaatgactcttaatcattaactcaagaaatctttgctgggcactaaatatgtttaggccttatttccaggactgaagagacacagatgaataacattgtccctgctctcaagaagcttttagttcactggaaaagatctgagtttgtgccatactggccttgagggttatcatgcagttggatcataagaatgcagactccaataccaaattccagccccatcctgctctggctgtgtggtctcaggccagttacatgccttccctgggcatccattgccttatgtgtgagttgggtgcactaaccacatcccacgtcctagggctgtggtggggattaaatgaggtgatatatgcacagcacagttgagctcctattgagtgctcagggacgctagttatgattcccattcctccaggggactctgagactcagtgattgacaaggggatgggagcagatcaagatctctgagggagagtcatctatgtcttagcaattcatgattacaatttttttcttttttttctgatacagggtctcactcggttgcccaggctgcagtgcagtggcaccacctcagcttactgcaacctccacctcaagggctcaagcgactcccccgacctcagcttcctgagtagctggaactacaggaacatgcctgcatggccagtgcaccatgcctggctaatttttttttttttttttttttttttgtagagacagggtttctctgtgttacccaggctggtcttgaacatctgggttcaggtgatctgcccacctcagcctctcaaagtggtgggattacaggcatgaaccaccatgcccagcttacaaaatctttaaataataagatatatttaacaaaaaacctggtgttgtttttagcctaaatgttagagtttatttcctgaagtgtttttttcattgttacaatcaattttcacatataaattgggtta

SEQ ID NO: 114894 - DNA, 1000 bp, Homo Sapiens
ggtgaacataacagacttggccaagctagcatcttagcggaagctgatctccaatgctcttcagtagggtcatgaaggtttttcttttcctgagaaaacaacacgtattgttttctcaggttttgctttttggcctttttctagcttaaaaaaaaaaaaagcaaaagatgctggtggttggcactcctggtttccaggacggggttcaaatccctgcggtgtctttgctttgactactaatctgtcttcaggactctttctgtatttctccttttctctgcaggtgctagttcttggagttttggggaggtgggaggtaacagcacaatatctttgaactatatacatccttgatgtataatttgtcaggagcttgacttgattgtatattcatatttacacgagaacctaatataactgccttgtctttttcaggtaatagcctgcagctggtgttttgagaagccctactgctgaaaacttaacaattttgtgtaataaaaatggagaagctctaaattgttgtggttcttttggaataaaaaaatcttgattgggaaaaaagatgggtgttctgtgggcttgttctgttaaatctgtggtctataaacacagcacccataattacagcataatcttcaagtagggtacggactttgggggattggtgcgagggtagtgggtgagtggcctactaaaaagcccagtaacccccacaggaaaatagggaacttctttttaagtagcctcctttccactatttagtaattggctgtgagctgggctgggggagaaatggggcggggtgtgtgtgtcattggaaagctctcttttttgtttttttgagacagtctcactttgtcccccaggctggagtgtagtggcatgatctctgcaaactgcaacctccacttgtggggtccaagtggttgtcctgcttcaccctccctgtagctgggactacaggtgcacaccaccacgcctggctaatttttgtatt

SEQ ID NO: 114895 - DNA, 460 bp, Homo Sapiens
  misc_feature (11)..(11): n is a, c, g, or t
  misc_feature (14)..(14): n is a, c, g, or t
  misc_feature (30)..(31): n is a, c, g, or t
gctatatatanyanatcacatatyacatanntactatacagttatatataattccaaatagttatatataacagaatataaaacatatagaatacatatcataaaatatatattgtataccatatatattagaatcatatattgtatgttatatatcatatactgtatatcatatatcatatattatatgttatatatatcacattccacatattgtatattataaattatacataatatattgcattctttattttacatgtaataaattatacattataggtaacatagtatatattgtatgtaccggtatattctatgtaaaatatataatatataacacatgtgacatgtaattaataacatagtcatataatatatatttaatataggtattatacatacaactattatatataatatataatatatattcatatgtataaatataatatatatt

SEQ ID NO: 114896 - DNA, 1000 bp, Homo Sapiens
gagagaagtcattgtctgatgttatcggcaggaatagcagaggtcactggggaaaattgcaaaatgtcaggagaccacttaacctcccagtttccttagattctagctgttggtggtggcgttttcattgttgggcaaaatttacatttaaaaattggccttttttgatcaggcatggcggctcaagcctataatcccagcactttggaaggccaaggtgggagcattgcttgagcccaggagtttgcgatcagcctgggcaacacagggagaccccgtctctacaaaaataataaaaaaaaaaatctactgggacatggtggcgtgtgtctgtggtctcagctactcaggaggctggggcaggaggattgcctgagcaagggagattgaggctgcagtgagctatgatcccaccactgcactccagcctgggtgacagagggagactctgtttaaaaaaaaaaaaaaaatcaccttttaaccattttaaagtgaacaattcagtggcatttggtacattcacagtgttggacaaccgtcacccccacaaagaagacccccatttcccatcctatccccatgccctgttaaccacaaatgtaccctctgtctctatggatgtgtctcttcttagaatttcatatacaagtaatcatataaagtatttattttctcaggctgccgtgacaaaggtccacagactggttggcttagataacatcagcttattctctcacagtcctggaggctggaagttcaagatcaaagtgtgggcagggctggttcctcctgaggcctctctcctgtccttgtagatgccgtcttctccctgtgtcttcacagggtcgtccctctgtgtgggtctgtgtcctcatctcttcttcttatgaggtgtcttagtctatttcaggctgctataaaagaataccatagactgggtggcttagaaacaacagacattgattctcccacagtcctggaggctggaagtctgagatcc

SEQ ID NO: 114897 - DNA, 1000 bp, Homo Sapiens
cttgcatcagcatgacctggatgtgagacatgaagtcaaaggagataatgttggagctttaggatttgaatgccccgccggatttcagacttgcatggggtctgtagccctttgttttggccaatttctcccattttgaatggctgtatttacccaatgtctgtacttccatttccatctaggaaataactaacttgcttttgattttacaggcttataggcagaaagaacttgcttgtctcagatgagactttggactgtggacttttgagttaatgctgaattgagttaagacattgggggactgttgggaagacatgattggttttgaaatgtgaggatatgagatttggcaggagccaggggcagaatgatgtagtttggccctgtgtcccctcccaaatctcatcttgaattgtactcccataattctcatgtgttgtgggagggacctagtgggagataatcgaatcgtgggggcggtttcccccatactgttctcgtggtagtgagtaagtctcacgagatctgatagttttatcaagggtttctgcttttgtgtttccctcattttctctggccactgccatgtaagaagtgccttttgcctcctgccatgattctgaggcctccccagccatgtggacctgcaagtccaattaaacctctttttctcagtctcaggtatgtctttattagtagcgtgaaaatggactaatacagggtccaacgtcatcattttgctgtggatatccagttttccgcagaatttgttgaaaaacacttgtcctttcccatttaatggtcttggcatccttgtcaaaaatcatctcactgtatattaagggtttatttctgggctctccatgtcttttactgatctatatgtctgtctatgtaattttgacctcaaggttccttgagatgaatttaagaatggatttttctctttctgaaaaaaaattgagattttgataggattgctttgaatcaacggatc

SEQ ID NO: 114898 - DNA, 1000 bp, Homo Sapiens
tgagcactggccccctgggcaggaatcccccacgtccccgacaggtgtgtgcacagactccaggcctcctccccaaactcttgtcccacctgttcttccagagccaggggccgttacatctcaggggttcaaatcccatgacccctgacttccccacaaccaagagagtcacggggttggctcagggaggagacactggtcactttggacatggccaggtcctgcccctgcccaccccctgggattccaaggtatgtggctgtaggttggcggggcaggtagctccaggccagctcccaggactgagcctgtgccctgtaatgtggctgcctctccagatgcctggtcaggacaggtctcccccatgggggtgggaggccacttggctccagcctctctctctctgctcaccatccatggagccaggcccccctttctgaagcgtttgctggcatcaaatgtctcttaagtgggcacgggggttggatgtggtcaccaagttggcatgctcctatataaggaaggaagaggctctgcctggttgtgaaccggcctccctggagctacctgattattcacctgtgtgctagccagcggagagctgcctcctggagggcctgctgtcctgcggggatgagggggtggtaagagggcttttggtgtgggtgaattcttgccctcatttctagcccctatgggagggatctgggtgaggcttggggcagcaggggctggaggggaaggagggtgagggcgccgggtctgctctttcattctggctcatcctcccctgggcctcggcttttccccatctgtgacactgggaggccttgtagacggctgtggcccctccctgtgagttctgatggaggttgttcagaacctggccggactgtttctgtgtcttttgtgaaaagcagacaaagcaattgatgccacccctcagatccataacatgcagacccatgggatacattataatttcattctcagtctggtt

SEQ ID NO: 114899 - DNA, 1000 bp, Homo Sapiens
  misc_feature (737)..(737): n is a, c, g, or t
  misc_feature (775)..(775): n is a, c, g, or t
  misc_feature (786)..(786): n is a, c, g, or t
tatagctttcctagaagattctattcaaatccaaacatttgtctagaaaagagacatcatagaatattaaaaagtacttaaatcagaggtttaaagattcaagctcaagttctgctacttggtggtgtgactatgggccagtaatttatattctctgagcctcggcttcccatcattacagaagcagaaagtattccttgcaccagtagcctaaaccttaactaggcagctaaaaattatcattcaaactaggacactttaagagcaaaggggagcacgattaataattaaggcgggacaatacaggtaaaataggacagttctttgtgtttcacccacctgtattttgatatctacactataattgtgcttcttgaatatgtggaatgttcttataattgtgcttggtttatactaagcacccactcatgttactattaactgagatatttatcttacagaatcgctgtaaagattaaatatggtgatgttcatgaaagagtttgatacctaataagatgttatataatagttcattattattatatttactgtggggagtccatataatatatatataaataatgaatatgtaatattcattattattatatttactatggggagtcccatgctaaagaagattggaaaactctttagcatgggactccccatagtacatataataataatgaaaatgatagtcaatgtcttaagcctgaatgatatcactaggnagagattggtgtagtcaagacaaaatagtactggaggnccaaacattgnagaaatactacattttaggaaaaggagaaggaaagggagtcatttaagaagaaatgtacatatccttcagagaattaggaagagaaccagaagaatgtctgttatatatatatttgtctgctaaagattatttattttctccatgtcaaggaatataaccaactaaattttaattctaagcaactctgtggggcttggaatgtgatggatgctg

SEQ ID NO: 114900 - DNA, 1000 bp, Homo Sapiens
caaattttaagtgtacaatgtggcgctatgtcgtacagaagatctctagaacctatttttattgcgtaactgaaacttgatacctgtttcccctcccccatctccgcagcccctggaaaccactgctctgctcactgcttctgtgagtttattttagatacctcatgtaagcagcagttatttcacttagcatattgtcctccagattcatttctgttattgcacactgcagaatttccttcttttataaggctgaataatattccattgcatgtatatgccatattttcttgatccattcatccatttatggatatttagggtttttttccaaatcttggatattgtgaataatgctaaaatgaacatgggtgtgcagatatctctttgtgatcctgatttcaattcttttttttttccatatacccagaagtagagttgctagaatatacagtagttctatttttaatgtttttgagaaacctctatacttttctatagtggctgtaccattttacatttcttccaacagtgtacaagagttccagtttctccatatccttgccaacacttaccttttattttatttttataatagtcatcctaggaagtgtgaggtgatatttcattgtggtttcaatttgcattcccctgataattagtaatgttgaacatgttttcatatacctattggccatttatgtgtcttctttggaaaaacatataatcaaatacttggcctatattttttttctttaaagacggagtctcactctgtcacccaggctggagtgcagtggcacgatcttggctcacctcagcctttgcctcctgggtttaggtgattcttgtgtcttagcctactgagtagctgggatttcaggcacatgccaccatgcctggctttttattttttatttttattttttggatttttagtagagacagagtttcaccatgttggccaagctggtcttgaactcctgacctgaagtgatcc

SEQ ID NO: 114901 - DNA, 1000 bp, Homo Sapiens
agtgagaaaaatgaaaataaaaatcattcatagttttactagtagctaatcacagtcaacctcttttgtgtatcccaccagacttttttatattcatttgtttttaggtaaaatataaaagtctcgtatattcccatttttctgcattgcattaccagaaggtagtggcgcctattaaatatgtgatatgttgttgtccagccatggcttctgcatttgcatgcttttgtgtgtgcatctgcaataccctgtgaatatcctgtgtgatggagtggcaagtacgcacagacacgtctgctgcatgcctaggtacgaggctgtctccaggagaagcacttgtttgattatttgagttgccaattgaatttgctgctttttttcatggcttgccattttcactgaaaagaatgactaatgaaaaacgatgattggttattagatttggatgtttggcagacattttctcaaaattgaactaagttggcctcttcacggaaaacaactggtatttgttgtgccaatgataaaattggagatttctagcaaaatgtataattttggaaaagttgtgttcctccactggaagcttgacagctttccttaacataaagacttctctttctcttcgctttcactactactactactaattcttcttctgattcttcttcttctccttcttccttcttccttccttcctcctcctcctccttcttcttcctcttcctcttcttctttctctctttccttccttcccttcccttccccttccttccttccttccttccttcctccctccctccctccctccctccctccctcctttctttttctttctctttctttctttctttctctctctctctctctttctttctttttctttctctttttctttctttcaagcagtcctcccgcctcagtcccccaaaatagtgggattacaggtgtgagccaccatgcacagccttacataaagccttttctaatgagatggata

SEQ ID NO: 114902 - DNA, 1000 bp, Homo Sapiens
aaaatcctcacaacctttgttttagctgagttgagctcagtctaagttctggcccttctctcctattgcacaagtcatgcattaaacaagtctgtttaattttgcctagtgcaatttctgctttgtggattgtaagtaactgattggctctggcctctgagaataggagcatgttcaggaggatgtgtaggcacagccatgtggtggcatggcgggagactagcactgggggtggtagaaaccaacaaagctccagagataaagaaagaggaaacagaaaacatggaatattctgtctggtttgttattacacagaccatgtgagccaattctgctgtcactaccactgtggcgatggaaaatgacctctgagtgaccactctggccttgagtcatgtggggttaattagttctttcataacacaatcctttttgtgtttccaccccaaattttgtgttctctgtgacttacacttaatacatatcataaattaagtgcaaaacaaataaacccatctcatcagagtactatgatcctgctggaatgaagtgcattaaatgtggtttcgtgaaagaaaaaaagtttaccaaaacgtggtgttttttgataaattgagtttgggtctcatatttttaggagcgcacacagggaggcagactagtgatgtggtttgaaatgtggcctctaaagccaaattgcctgagtttgaattttatgtcttccaattactatttttataaaccttaactccttcatgtctgtctctcacctttaaaaaggaataataaaaatagtaacctcatagggttgctgtgaggattaaatggactcaatacatgcaaagcaagctcatgtgaagggccacttgagtgttagctcttatcgtgatgtgtgaaaactgaataaacagaatggctatgtgatgaattaattccatttgtaacagaatctgagcattatcatgctaatgttggcactaaatggatggttttatgatcc

SEQ ID NO: 114903 - DNA, 1000 bp, Homo Sapiens
cccggctaatgtttttgtatttttagtagagatggaatttcaccatgttagccaggatggtctcaacctcctgacctcgtgatccgcccaccttggcctcccaaagagctgggattacaggcgtgagccgccgcgcccggccgggctgtctttattttttaattttttagattttttatttttttgagatggaatcttgctctgtaacctaggctggagtgcagcgatgcgatctcagctcactgcaacctccgcctcccgggttcaagtgattctcctgcctcagcctcccgagtagctgggatcacaggcatatgccaccatgcccagctaatttttttttttgtatttttagtagagacaagttttcaccatgttggccaggctggtcttaaactcacctgacctcaggtgatcttcccacctcggcctcccagagtgctgggattacaggcatgagccactatgcctggctgagaccctgtctttaaaaaaaagttttgagtggccgggcgcggtggctcacgcctgtaatcccaacactttgggaggccaaggtgggcagatcacgaggtcaggagatcgagaccatcctggctaacacggtgaaaccccgtctctactaaaaatacaaaaaattagctgggcgtggtggtgggcgcctgtagtcccagctacttgggaggctgaggcaggagaatggcttgaacccgggaggcggagcttgcagtgagctgagactgcgccactgcactccacctgggcaacagagcgagactccgtctcaaaaaaaaaaaaaaagaaagttttgagtgtagcagagtccagccaggggcagaggccacctgagacagggttctgtgagagaagtttggcttccagaggaggggctgggctgaaatgactctccctctcgtctccccagttatgaagggggccaaatcgggaaaaggtgcagtgaccagcgaggccctcaaggaccccgacgtatgcacagatc

SEQ ID NO: 114904 - DNA, 1000 bp, Homo Sapiens
gcataagccactgcgcccagactattttttaaatctttttgcagagatgagatcttgccatgctgcacaggctggtcttgaactcctgggctcaagtgatcctcccaccttggcctcccaaattgctgggattacaggcgttagccactgcactcagccaacctttttttttttttgagatggagtcttgctctatcgcccaggctggagtgcagtggcgtgatctcagctcactgcaatctccacctcctgggttcaagcgagtctcctgcttcagcctcccgaatagctgggactacaagcatgcaccaccacacccggctaatttttttgtatttttagcagagacggggtttcaccatgttggtcaggctggtcttgaactcctgacctcaaatgatccgcctaccttagcctcccaaagtgctgggattacaggcatgagccaccgcacccggcctggccaactattattattgttagtattattcccagctgggcaggatacccataccctggagatagcaggtgctcccctgaacaagtgcctggacaagcctgctccctcgtagagcagaaagtccatgctacttcctgtaagccagcggggtgactccgatggctcctgtggaacctgccaggccctgcagccacagcccgggtgtccctatccatcaggccctcactatccctgtctttctctccctgcacagaccccgtgcctgtgtttgaggcggcacgcagcctagacgacagactgcagccccccagctttgaccccagtgggcagccccggcgagacctccacacttcgtggaagaggaaccccgagctcctcagccccaaaggtactgataaggccttctcggagcgtctacaataaacaaccaggctgcagatcttcagagccaaactcagccagccttgttgcggggtggctggggcagggaactgggcaggtgaaggcctttggtaaccatctagttcctgggtatatatt

SEQ ID NO: 114905 - DNA, 1000 bp, Homo Sapiens
actgagaatggccctgcataaaatgaactctgaaaactttaccatctagagtgctcatgcaattaaaacaaaacaaacacaaacaaggaggcactaagcctattctgacaccactggtctgtagtaccagaattgttttgttaatggaaagtttaagtaaattatattgtaataaaaaggtagataaaccattgtacaacagtattctaggccgccaacaaaagtgtgacagacacactaaaagccctccaactttaacttgtaacgtagcttcattctcaaagctgactccttttttttctttttccttttcctgagtgtagtacagttaaaatttcaaacagctccttgacactgcttttcatgttcaaaccagccattttgttgtactttgggtaaagggacctcttccccttccttcccttacacatacagatacacccacacacagactgactctctttctctcataccccaaggtcatgagtgaatgatgcttagttccttgtaaagaaaatcttgggatggggaaaggggtaggcagcaagaggattcaacaaacgaaaaacataaaaactttgtatatgacttttaaaacaagaggacaacacagtatttttcaaaattgtatatagcgcatatgcatggacaaagcaagcgtggcacgtgtttgcataatgtttaattacaaaaaaatatttattctttaaaaatcttcaagattatgtctatttgctgtgcattttctttcagtttgcttatctttcccgggttggggttgggataaaggtgtgtcggtttagcacctctggaagacctatctagagctctttcactttcctgaggttattttgccctttctggtgttggtatgtctgttgccggccatgggcctcatgccttgaattcctgctcttgatcagggacaagggaggtcaagctctgactaatgccatgacctgattaaggggtacagcagggagttttgttgctacagctc

SEQ ID NO: 114906 - DNA, 1000 bp, Homo Sapiens
ttaaacaaactttcatggtaaaatttcattagagaatttgtgcaggctttggggaaaatcatgtattcattggtttggcatctctgtctttaaaaagccacttgagtgtcacactttaataggagatttgaatacattcctacctgtaattgataaatcaagcagtcaaatgaatcagtaaacatatagactatttgaacaatgtgagaagcttgatctaacagatttatgtattttactggaagttttttaaagcacacatggaaaacttaggaaattttgccatatattatgccaaatactacagctcagaaattactcatcgattgtatgcactgcacagaccatgttttgtggccactgtgctaaattagaagaataaaagtataaccagaaaatgtatctttagaaacaacatttcaaataaaacatcatggatttaaaaacaagtgataattaaaatttgagaatatgtcttaccaaaaatgaagactttatgtaaaagcacatagggtgtagctgaagtggtacttgtgggcaaatgtaaactgctaaaatgcttacagtagaaaagatttttaaaagaggtggtaattcatgagctacttacccatttttatagtaagaaaagagcaatgtttcaaacaggaaaagaaataaatataaaggcaaaaaataagaaaatagttaatatgtatgaaaaaagaatcaacaagtcaaaagatgttctttaaaaagcaaagttccagcaggattattaagaaaaagtgagagaagacgccagtactcataaataggaatgaaaatggcaacagttacagacaacagacaatgaaaggacactgagcacccttatgccaaatgcattaaacattagataaaatggatgaacacctagaaaactaaaggaaaccagaactgggtcaggcaggaaaagaggctggatgtgatgctgcatgcttgtagtcctagctactgggaaggctgaggcgggaggatc

SEQ ID NO: 114907 - DNA, 1000 bp, Homo Sapiens
aaactttgaaggtctgtcataggactctggacagccacacaccttagctattcccaggggaccccaggggggcaactgccattgctctaagatgtccttttgatgtgacttgagatataaatgagagtgagggcctgtacgtgtggctatttcctgtctggtatgtcagaggaacagtcctggtcagaagggggctcttctgagcagaaattgctaataaactttgtgctgatctggaaaaaaaaaaattttttttttgacagcatagtatcaaattactttagcatactcatgagtgaaaaacattagcacattactgaactggagttttgagtgctgtgagaggaacctgaaaagcctcttgagaataatagcagcatcttcctatcactttagacttgctttttctgagtatacaagcaggtaaatcaaatagttgtttcagaaatggtagtatctgtatcattctgtaatacagctgataaatctagtcctaatagttgaaatagactcctcaatgacttgttttaccacttgttgaaagaaagaataacgtacagggattatagaatacatttttaaaaattgagaaacagtttctgttctgttctgatatttctgttgtatttaaagaaaaatccaaaaaagtctgcttaatagtttcttgccttttaatacagtccaaaatatttacctaatttgtctgaaataatcacattttaaaaatagtattttgttagtaaactttatgaaacatctgtgagacatacacacacacatacacacactcctgttaaggcagatgaggtggattttatcattcccatttttcatgagaggaaattgaagttcagagatgttagtgacttacttatggttatagtgttagtaaggcattgatttctgctccattattcttcaatgctgtgtaactgtgccttgaagcttgtatctgttaatcttcctgcttaacagtagcagaatttacgtccattttttt

SEQ ID NO: 114908 - DNA, 1000 bp, Homo Sapiens
  misc_feature (681)..(681): n is a, c, g, or t
  misc_feature (845)..(845): n is a, c, g, or t
tctttcttgtattccaaaatacagttttagccacacaaaaacattttttaataaaaaatcagtcctaagctgaacacaccttttgtgctcaaactgatcaaagataacagagaaagataaaacatagggccaaattctttccctaaaaggcaaatatacatataacatttaaaataccttgttgaggacaggttttgttgacaggacatcatacatggtttcaaatgagatattctaaaacacaagaaaatagttttgttcagtaagttaaatacagaagccaacagccttatctacacacatgggccaccagaaaccaagacattctttaatcaacctcccctccatccccgcagtggagtttctgtgggagtcactgttagaaatacaggtaacagttttaatggattactttcctctctctccttcccctttttaaattcttgcctgtttgttattcaacttcagagtggtatccagcattagaaccagaaaaggaaagtacagcacaattttgctctttaagtttagaaaacgaaacaaaaaaatcagtggagagtggctagagatactatgaaaaataggacgtttataaattacttgaaggccaaagaaaaatgccagaaccaagggaatctttaatggcaacagtttctttctatagatgaccctgcaaaggtncctcttggctggtgcggttcaaacacatctttgcaggcgttctgcgatcatcaaggaagaagggatgtttccaacggtcataatttgtttgtaccacataccatctaccctgcttagcatcgagtctagatacaaaaggagagattccttcttaggtacatgcnttaaaactcaaagtatatcagtgtatgcttttgtttctacttcttttgctttaacaaacctacttactcatatacatccaatgattcctttctgtctcgtgtaatcacacaaccttccccagactggttgcctcccaggataaagtaggctgggg

SEQ ID NO: 114909 - DNA, 1000 bp, Homo Sapiens
gatgttaatttgtccatattatttttgattttctgtctagttgttctatcaattattgaaaaaggtgtgttgaagtctccaactatgaatgtacagttatttaattctccatcagtttttgtttcatatatttttcaactctgttatttgatgcatacacacttaggtctggtatatcatcttgatagattgaccctttttcattgtgtaatgctgttttctgtctctgatgattttctttgctctgaagtctattttatcttacattaacatagctatttttgttttccttcaataaaaattcacatgatatattgttttcatctttctacttttaacctgcctgtattttgccattagtttaatggcaaaaaccacaattacttttgcataaacccctaatatttggagttttttatatatagcaaatgactgggtcatattttttaaagcaactctgccaatatttgtattttaattgttgtacttaaataatttacatttgatgtaatattgctgttagaccttaagtctgctacttgatttgatttgatcttttggtttcgcttgtaatgtttttcatttttccaatttctttccccagccttcccatgggttactgaacatttcttagaattacaatttgatatacctttaatatttttaagagtgtatctttggtggttcctctaggtaatatattaaatcatttatacagaagttattgcagtctactgttgccatcattttactaggtggagtaaggtataaaaagcttacctctctttatgctgctttaaaatctttgtcagctgatactaacatctctgttatcttagttttattatttattgtctttttttgttctgtttgagatcatcctaatccttgacatgatgagtggttttaaattaaacaaggagattgttttgtaaaaatctggatcttatttaaacctaccatttaaataaaactggttttctctgacattgtcctgcca

SEQ ID NO: 114910 - DNA, 1000 bp, Homo Sapiens
tttataactttaataattcagtacttggaaagattagggattgaggcttcattctcttacagtatcatagtatgcaacctttcatgtaaaaataaggtggcataaatcaatatgcatgtatatgtacatttgttcaaaaagaaatacaggaaggtaaaccagacactaacaagatggattgcctgcagagagtgggtaggaaagaataagggaatggaaattggttggaaggaataaaggatgagtggtacctccttgagtatatgtctttgtaaagctttgacttttgaaagagtgatagtatatcacataccaaataaataaataccaaccaatcaaatagacagacaaaatcaacggagaattgggaaggaggtaaactttaagcagaatacaaacattaacaaatgaactaactctacaaaaaatagatgaaatcattttactgaagggagtgggaaagttaaggactaacctaagtaatactggaaaacaggatttcgactacaaattgcaaagctaacaacaaaaataactgtacatggaattttactctagttaataagtttgttttccataacgttagtaatcctggaatgactttaaatgcattctaagatagcaaataaataaacttgctatcaaatcatggataatgaaagccagttttctcatttttgaagaaaggaatcataattaaaggttgaaggctagaatgaactgtgtaatgttggatttgaatcagaggtattacaataaattaatatatgtatgtgtgtatatatttatatatgtatatattatatgcattatatacaatatatgtatatattaatatatgtatgtgtgtatatatttatatacacacattcatatgcacacacacataaatcacatttgtgtatatatacggttaaattgatgtagatgtgtgtgtgtgcatacttatttttttttcatttttgtctgctgagagggcctagaagtaataatactgtag

SEQ ID NO: 114911 - DNA, 1000 bp, Homo Sapiens
gtccaggttccttcagccagtccatgccggagctgtactaggacaccctcctctctgtgcccagagcgatggccacaacacccctttctgtctgcttgaaaacccctcttcattcttgctgatctgtactcatctttcagtctctgcctctttagcaaccagagcctacgaagaggtgaccaggctctggtcaccccccagagcagagaaactgggggtgtaggggtgggaactgaaggggaggggcatggcaggggctgagaatgcggctgttctggcctgggggctgagccaggctgcctacagaggagccagtatgcccagacattagagctttgtgagttgaagagcttggtgtggggatggttgttttgttgagctgacattgtttcaggttgactgaatgtcagtgtcttagtgtccaggagccagctctttagaaccagccagggtcttggggagaatgtggctggggcatcctagtctggatcaaggaggggagggggctgtccgtgccccgtgagtgctgagcagttccctgtggagaaaactgcagaggaggagtgagtcctagcgtggataccaagagagacgagaggagcaggcgcccttgcaccttggggccagagcagaagggcctggccagagtggaggatggacagaggcaggacagggacctctggaggctggtgccttcctgccaggcactggagccctgaggacagagcgatcaaaccttcatccacaaaggaagagtcaggagaaccatggggacccaggagggccccgagaggccttgggggctggccaggcgggtggggtgggccagactcacagctgtccagatgtgggtaagagataactctgtttactgggcacccagtgggagcggggtggggggtgtgggaaggggctcccagggccagtggggcgggcagattaggaggcgggggcatgagtcaggggtttgcgagctgcccctggggcgctggtgctgtca

SEQ ID NO: 114912 - DNA, 346 bp, Homo Sapiens
gtctgcctgtctgtctgcctgcctgtctgtctgtctgtctggttgcttgtgcatgtgtcccccagccacaggtcccctccgctcaggtgatggacttcctgtttgagaagtggaagctctacggtgaccagtgtcaccacaacctgagcctgctgccccctcccacgggtgagccccccacccagagcctttcagcctgtgcctggcctcagcacttcctgagttctcttcatgggaaggttcctgggtgcttatgcagcctttgaggaccccgccaaggggccctgtcattcctcaggccccaccaccgtgggcaggtgaggtaacgaggtaactgagccacaga

SEQ ID NO: 114913 - DNA, 1000 bp, Homo Sapiens
tcccagcactttggcaaggccaaggcaaaaggatcgctcaagaccaggctacgtcacaaagcgagacctccatctctacaaaagatttaaaaaattagctgagtgtgatggtgtaagcctgtggtcccagctactagggaggctgagatgggaggatcacttgagccctggaggtcaagggtgcagtaaacggtgattgtgccactgcactccatcctgggtgagagcagaccctgtctaaaacaaacaaacgaaaaaacccccacagaatgacagaacataaaagatgcacattttgtcttccaactttttactcttctaaaagcatcttttttaaattttttaaattttttttttttgagacagagtttcactctgtcacccaggctggagtgcagtggcgtgacctcggctcactacaacctctgccttccgggttcacgccattctcctgcctcagcctcctgagtagctgggactacaggcacccaccaccacacccagctaactttttatatttttagtagagacggggtttcaccctgttagccaggatggtcttgatctcctgacctcatgatccacccacctcagcctctcaaagtgcagggattacaggtgtgagccacggcgcctggcctaaaagcatctttttctttaatgcagaggttatgttgtattattagcataaatgttttttttctgggaatgcttatttcacacagcacaatactgaatcttctctggaatgtggatcgatttcagatggatgactattaaaatgtgtatatttgcagattatccttaaagggccacctcatgccttctaatttatgtcttacggataaaaaatcaaaatgaagcataaagtaaaaactgtgtccagctttacaagtggacgcttagtaatggctgaggcaatatgtttaatgtagcaaattttacttatttgtcatgatcagttttcacagtgcttgtaagtgctggtaatagaagatgg

SEQ ID NO: 114914 - DNA, 1000 bp, Homo Sapiens
ttagactctggctaaagtcttggaggctactgccttgaagatgacctctagggaccagcccagacccaagggccccccgaaaagcacttcggtgaggagggcatgtggtgggatcagccctcaagggaaacccgggcccaatgtggttctgccccttttccacctgtgacctgggctggccccgcccaggcctcgcagctgaagacaatactggtcgctgctacactcaagacaggtgccaaggagccgtgttttttaaaaaaaattaagtgtaggctggacactgtggctcacaactgtaatctcaacatttttggaggccgaggcaggaggaccacttgagcccaggagtttgaaaccagcctggacaacgtagtgagaccctgtctctgtaaaaaataaaactagaagaatcagctgggcctagtgacgtgggcctgtagttgcagctacttgggaggctgaggcagagggttggcttgagcccaaggagtttgaggctgcagtgaactatgatggtgccactgcactccatccttggtgacagtgagatcccatctaaaaaaaaatgtagcatctaatcacatatgtgataaaaacacaggaacacatcatgtatttggttgatgttttacaagcaatccccgctccctgcactttgcgtcccagagatgaccatttgtaaatttaggctctcagggctgagcagacgtttttttttgtaaaggagtcagatgagggatattttgttttgagactttatgattttattatgtttgagacggagtctcacactcacctcggctggaatgcaatggcgcaatctcagctcactgcaacctctgcctcccgggttcaagtgattctcctgcctcgcctcccgagtagctgggactacaagcacctgccaccatgaccaccaaatttttcttgtatttttagtagagactgggtttcaccatgttggccaggctggtctcgagctcctgacctcgtgatc

SEQ ID NO: 114915 - DNA, 1000 bp, Homo Sapiens
gtcatggtgatttttacatatatattcaaaatctcttaaaagtcagcttaagtatatgggctgggcgcggtggctcatgcctgtaatcccagcactttgggcggccgaggcaggcggatcactaggtcaggagttcaagaccaaccagttcgagactagcctggccaacatggtgaaaccccgtctccactaaaaatacaaaaatttgctggacatggtggcatgtgtggatagtcccagctactcaggaggctgaggcaggagaatcacttgaacccaggaggcgggggttgcagtgagccaagatcacaccactgaattccagcctgggcaacagagtaacactccaccttgggggtagtggggagagactcagtttaagtatgaagaggacattttaaggaaaaaaagggctttaaaaaaatggagaataataataatttcctttgtgtgaactctggtgggtctgatacaggtagcaatgtaatttgaaatcagttgaatttcctgtttttctctcataggttcaactactcaatttcatgctggcatgagaagataatcctttgaaacatcattaattgaagtgattttaaatagatttccttttgtaaatcaatggttcttttgtgcttttgtattgtgaatattcaatgggaccaatatgaacacagcttatgattgtatacaaatcccttgccagcacatgaaaacaaactggaatttgtatatataagcattgtgtatgtattcatgcacaataattattgaattacctgtatatttgtggaatgctaatttaaaacattaaattataaaccttgtgtatttatcaaatgggtgaaaagattaaacttttacgcattacaatactgctgaatgtgtagctcgaggtgtcctgcacttttcttattaatagcagtggattcctcggacggagggtgggggtcaggccaggagcctctggcacactccgtctctcctacccctcagctcggcc

SEQ ID NO: 114916 - DNA, 1000 bp, Homo Sapiens
aacagttcaacataaaatctgacatgttttacttttgatattttttaagtgcttggatgggactgaaacaaacaatgcaagatacaaacctaaaaggaaaaatcatgtctgtaatcttctacaagaggtcctcattgtaaaatatgttaggcataaacacacacacacacacacacgcacacacactttaaagaattcctgttagaactgtcttgctgtttttataacttaaaattcttacaggacaacttttctggtactgacatatttatcatggttgccataggtgtaaaagaaaatgaagtaggattttgacatttcagcatgttgtctttctcaatacataaacaacaagtacctctgacaaatgcattatctttttaagggatcacttttattttcaccagttgtttataagtggtttatttttacgccagtggtccccaaatttgtctgcatattgaaatcacctggggagtgtcaaaattcctgatcctcatgtcccacccacagagattgtggtttcattgatccaagatgtgtcctgggttttggaatgcttacacaagatctccaggtgattccaacctgaagacaagacggagaaacacttgcttaaaatttttatacttttctcaaataaaccaaaaataatgaactttttaatattggttctaaatttttattagggtttctttttaataacaagacgaaagtacttaaccttttgtttccttaccaaaccaatgaaatgaactttgttttgacctccacaaaacatatgaaaaatacattttatttgatgactgccaagccacatcttcctgttatatctccctataaaggtggagatggatagctcctcaaaaacttgtttgcagaatatctcacaacttcccccacaccccccaccgctttttaaatcctactcatttggcccattaatgtgctttagaattaatttaggtgggatccaaaaaacctgtctttccctattgac

SEQ ID NO: 114917 - DNA, 1000 bp, Homo Sapiens
gagaccagcctcccagctggcaggaactgtgcaggaggagttgatactcaggatctgaatgtgagggccgaggagggcgaagagtgtgggtggggaggggatgttgctttggggtctcatggtccccagagggcactagggagtcacttttggctccgctggtgcatgaagtcacctgtggccaccatccgttccgcctaaaacactctggagagaatcccacctttcttacaatttgctgggccattgaggtttgagggcctgtgtttggatccttgcaactgtgtggtctcacctctgtgcgtgcattctcattgccagaattggtctattttcacggctggtctttggggaggggggcgggatccagcctttgttttgttgtgttggggtgggggtgttgtttttctaaaagctacctcttatgtttgtccagttgttcttttgttcctttcccgcctcccattctgctgctcttcctccctcttttccccaacctcccccgaccctcctgaattttggaaagcacatttgcaatattcgtgtttgctttgggacggaccctccgtttcatctcatgctttatgtgtaagagttttttattattattttttctttcctttctctctctgagaaagttgtggctgcgttttgatcttaggttttacaaagtggtttagggaagcggttttggggagaaggatcacgaggaatgtagggaagccggagggatgggtgctgctgcgacgacccccccgtccctcggccccagccctcctgccctccccttcaatctcatccaccaaatctgaaggccttaaaattgtgtgttgggaggatgtgaattgggaggacggtgtcactagactgtggattagggatggtaaagtagggaggatgctattttgcaactatagtaacgacttagtgttttggaaaggaaaaggagttaaacttgaaatacgtgactagaacagttgtcatgtttataatgtgaaaa

SEQ ID NO: 114918 - DNA, 1000 bp, Homo Sapiens
tcactcacattatccagggactcacatctgcttaatttagctttgcaagatgttgcatttatatttccttgtatatctttccattgacttagttaatacatgaatttcgaggtactctctacctttggagtgtttaaaagtcatggtaaaatgtctagagttcattaattaaaaagcaatttaacattatgggtaaacattatttttaatatctataagaagcaacacttcttatagatatttagcttgggattaaatacccgtttttcctgctatgccttgtacttgtatacacagagaaaacatgttgaatataacttagacaaaaacataaaattatacaggcatgagccaaactgggaaaactgattcctaaagatttttatttaaaattgcttattccaactttattacttatttttactgctaatctttataatatgtaactttggagaataatcttttatttaagctattttcccatcatcttgaatttaaccatcacaaattttttatgtttaaaactcttgtaaataattcataatcttgtaatattatcatttttgaagtaaaattgaccagccaaatttataggtagtctgcacaattttgtatccttttttaataatgaaaaattactatgaagaaatactgaacaaatttttatgtgcaatattttatagacctatgtatctgaagcatgtttacactggcgtttttttttttaattaatttcctaaatgttaagtatgatagaacaagctgacccaaatccttaagtttacaaagctgttggaaaactttgtgtcctgatttcaacaatcacgctttgtttgaaagatgagccaagctcacagacactaaattttatgtcatgccataagctggagaggagccatttggctacagctgcggaacttcattgaggagcaaatgaaaggcacatggacgagcacgctggtgcagttcatgttcttcctgcctgtgaattgaatactgt

SEQ ID NO: 114919 - DNA, 1000 bp, Homo Sapiens
tctctaaattttttagtttgcatgcatagagatgtgcatagtagtctctgaggatgtttactatttatgtgaaattagttgtgatatcacaactctaacatttaaatagatgcagaataaaagcttgacaaaatttggctgggtgcagtggctcacacctgtaatcccagcactttgggaggtcgaggcgggtgggtcacctgaggtcaggagttcgagaccagcctggccaacgtggggaaaccctgtctctactaaaaatacaaaaattaactgggcgtggtggctcacgtttgtaatcccagctactcaggaggctgaggcaggagaattgcttgaacctgggaggcagaggttgcagtgagccgagatcgtgccagtgcactccagcctggatgacaagagtgaaactccagccaaaaaaaaaaaacaaaagtttgacaaaattcaacattccctcatgataatctctaaaaaataattagtataggacaaatgcatctcaagccaataaatgccatgtatagaaaaaaatgtccagctaacaacatattaaacagtgaaatgtaagctcttactctaagacctagaacaagacagggatgccctctttcttccttttcctttcttccttccttcctttccttctctccttttcttgcttctctttctttctctctcctttcttcctttccttctctccttttctttcttctttctttctctcactccttccttccttttttttctttcttgttctttcttcttttttttttttgacggagtctcactcttgtcacccagactggagtgcaatggcacaatcacagctcactgcaacctctgtctcccaggttcaagcgattcacctccctctgcctcccaagtagctgggattacatgcacctgccaccatatccagttaatttttgtatttttagttagactgggtttcaccatgttggccaagctggtctcgaactcctgacctcaggtgatc

SEQ ID NO: 114920 - DNA, 1000 bp, Homo Sapiens
ttcctagggcttccaggtctggagccaggcttattcctgggagggggttgtaacggggaattgaagtgcagaggggctagtgaccccagcagaacacctggggtcctggttcccagggctacagaactgtcctagatactgtgccaaatgcactgcagaatattcttgcagtcttatcaagtggggggtttgtacccatgttataggagaaaaaactgagtttcagatgaccagtcagttggcagagctgagttgtaaaagaatcctggactcttgaggcccaggctcttctgcgtggatgggaattgcccttttcccatctcctgggttcacgccattctgcctcagcctccccagcagctgggactacaggcacacgccgccatgcccggctaatttttgtatttttagtagagacggggtttcactgtgttagccaggatggttttgatctcctgaccttctgatccgcccgcctcagcctcccaaagtgttgggattacaggcgtgagccaccgcgcccagctggcaattgcacttttttaaaattctgcactctaggaggcagaggtgggcagatcacttgaggtcaagagtttgagaccttggcctggagtggtggctcacacctgtaatcccaacccttggagaggccgaggcaggtggatcacctgaggtcagaagttcgagaccagcctggccaacatgatggaaccctgtctctactaaaaaatacaaaaattagctggacgtggaggcaggagaatcacctctttgctgtaggaagtgggggtccctgtctgggtttctagctcaggagggagacaaccccagacggccaatatgcagagcaacagagggggctgggctgggtcgaagacaggggccaacaggctggaatcctcttcctccagcaggagctacaggcagaaggaaggggcaggatcaggtcacacctgtttttccttctagcaaccccctctttttacctgaatccaat

SEQ ID NO: 114921 - DNA, 1000 bp, Homo Sapiens
aagtaaacaacatgtagttcagtacgaaagtcttcaaacaaaagtggggcggtggggatgttctcataacaatcaccgtgctgcagccaccccttattaacagtaattcccagtgtcgccatttcacacctaacacatatgacactttgatggactcttaaacctcctaatcgaacatggcctcccccacagcctcttttctccagggtattgacttgaatgacaggcaaaggagggtggaggggtgtcggcctagacacttggaaattgtattccatccaaaagaaaaaaaaatctcaggccgggcacggaggctcacgcctgtaatcccagcactttgggaggccgaggcgggcagatcacgaggttaggagttcgaggccagcctgaccaacatggtgaaacaccatctctactaaaaaactatatatacatatacatatgtgtgtatgtgtatttatatgtatgtatgtatgtgtgtgtgtatatatatatatatatgtatatgtgtatatatatatatatgtgtatatatatatatatatacacacactaatcagccgggcacggtggtgtgggcctgtaatcgcagctactcaggaagctgaggcaggagaatcacttgaacccgagaggcggaggttgcagtgagccgagatcatgtcactgcactccagcctgggtgacagagtgagactccgtctcaaaagaaaaaaaattctcccttggccgggcttggtggcttatgcctgtaatcccagcactttggaaggccgaggcgggtgggtcacctgaggtcaggagtttgagaccagcctggccagcatggcgaaacctcgtctctactaaaaatacaaaaattgtccgggtgtggtggcgggcgcctgtagtcccagctactggggaggctgaggcaggggaattgcttgaacccgggaggcagaggttatcgtgagctgacattgcgccactgcactccagcgcggaagacagagtgagc

SEQ ID NO: 114922 - DNA, 1000 bp, Homo Sapiens
atcactctgcagctggtgggccttctgagcatgcctgaggcccagctgctccgggtcgcaggtgggctggggcaggggctgcctgtagtgcacatcactggccagctgctggctcctcttggcctgaaggaggccgggctggtctgtgctgctgtgaaactgggaccgactcttggcaaagtccttcttgtactcattgtcactctggagcctgccaacgttgaggaaatgcttcatccttgggtcatcgtcgacactgcggtacccgatctgcaggcctcggtcccgcaggaaagcctctttgtaccggaactgcaagtcagaggagcagaggcagatcatgggtgcctacctcccccaggaccagcctcacatatggggccatcccagggcattctcagcaggaggctcaagagtgggttagaggcacaggctttggattcaaatagacctatctgtgtggccatgggcctgttactgagtttctccatgagcctcagtttccccatctgataaaattggagaatgatctacaccccataggaggttgcgaggattcaaccagataaggactgagcttcatgtctggcatcagctctggcccactgagtggtggctactggtattgtcactattgtaattaatactccaacaggaagataaatgtgcccattctcacataggccactctgcctttgattctttccagcttttagggacctagtccagtgctcctcaaaccatctacagtgaagggccagtcccattttgatttgctttttacatttccaatgcatcaaagacccatgtatggtcctattgcatgtggctagtatgtagcagtaccacttgtatttggtaacacccaacctggccttcacccttttcaatgagatgagtccagtgatcacatgcttggatgttacaacgtctaattgctaaaaaatatttcaaaaatcccatgctcttaatttctgtacttatccaattgtggaccagc

SEQ ID NO: 114923 - DNA, 1000 bp, Homo Sapiens
agtaactcactttaaatataaacacacatatagattaaaagtaaatagacggaaaaatatatgccatgctaacagtgatcttaaattttaacaagtgggagtggctacataaatttcagtcagagcaggacttcagagcaaagaaagttttcagagataaagaggaacattacatgatgataaatggtgaattccccaagaagacacaacaatcctcatgagtgtgtgcctaacaatgagcatcaaaaatgtgaggtaaagcctgaaacaactgcaaggagaaatagatgaatctactattgtagttgaagactttcacaaatctctgtcagaaatggacagatctcacaggtagaaaattagttaagacacagttgaatgcaaccagggcattaatcaactgtataccatgaacatatacaattacttcatccaacagcagcagaatacacattcttctcaagctcacgtggaacattcagtaagactgatcatattctgggccagaaaacacatcttaacaagttcttcaaaaatagaaatcatacaatgtctgctctcagacctcaccagaattaaactagaaatcaatagcagaaaaatatctggaaaatcccccaaatacctggagattaaacaacacttctaaataacatacagatcattgaagaaatgtaaagataaatttaaaaatatgtttaactaaaaagtgaaacacaacttaaaatttacgcaattcagtaaaagaagtgcttagatggaaatttatagcattgaaggcatatattaaaaaagaagaaagatctaaaatcaataatttaagttttccattaaggaactagataaaagaagagaaaattaaatttaagcagaagaaaaataataaaaattggaacaaaaatcaatgaaattgaaaacagaaaatcaatagagaaaatcaatgaaaccaaaagctggttcttgaaaagatcaatagattcagtaagactctagacagcct

SEQ ID NO: 114924 - DNA, 1000 bp, Homo Sapiens
cctaacctactttttgggataaaattctctgttttgttacaggcaaaattctggtatggcgtgaatgccatgggtcattctgaatatatttttttctgtaattttatcattacacgatgtttgcaatacgtgctttgttttttaatttgaaagcaaacttttctactgttgaaagacattttttgacaacttgacccttcctagtattgagttctaagttgaggactgcatcttctcgttttttacagtatagagaacaaaatgacattagtttgaaaaatacatatcacttggtattgctgtcttggttgcagtggtgatacagaattggtttcattaattcctacatggttgagaatcactgatcaagaaagtggggggaaaaaaaacaaacgttaaaacctcaatcctcagtaggaaggtagattacattaggtgaaattataggtaatctatgtatgtgctaatggggttggaaagaaccttacagagcatattacctgataaactggagtgggtttgggagaacaaactaataggattattgtgtctcctagttggtacctgggagcaattgacatgcccccttcagaaccttaactgttagtagcagtggctgtaacaacacaaaccagtgaccagagataacagcttttaggccaagctggcctgacggtatggctgcaggaagtgactgagcagtagcggtactcagccagaccaagacggagagggaagagtccacagctttctggaagctaaggcattctggtggtagaaaagtgtgccccaagccttcatggacgagttataggtcttaagattagtctcctcttgtttggattccatacttgctaaataacctgataataacctggttttccatgtaactgcctctaggaagaaaatgtactgttcatgctgacacagatatttcagtctgcatggtaaaagttctaaatcttactacaaaataataaactggctggtttataatgtg

SEQ ID NO: 114925 - DNA, 1000 bp, Homo Sapiens
tgactgctggctggtccatctcttaattggcgagtgcgcgtgacaaggctcagccctggctccacagggagccaccaagctgactcaactgatacaaatgttcccacctctgccccacccccaagtccccatggttccacaatcacctgattttcatttggacctctttaacagctaaagtagatataaatggctaaacacagatccccaatcccccaccaggggggacacggccgattctataatgtcgcagccagaaggctgtgggcgtacaggcagccaaggggagaaacagaaccgacaccggcctaggcccatctgcaagaaaaagcggagaaggagtgacccggatgcttccgaagcacgcgagcgtgattttggatggaggcgggccggtgactgcctagctgctgccggttcctgtaagggacattttttctgagtaaatggcgattcctcttccatgtggcatctgcttggatcacgatgctaattgtaactggaaaggggtgttttggggagtgtattcaggaaaggaagaaagaaaaaacttaaaaaaaaaaaaaacctagattgctcaaagtttctgcctcttttgtaggaatggtaaatcaactatgagcaagtattttaattcaacattaagggaaaaaaaaggactttggaaagcatacagaaaaaaaggtagttaacgttggatcatgtgtaaaacggaacctcagggagtctaaacaaaaatgcaccttcggtcaacttttgcttttttaaattcctcgtttgacttcccgtcccagtgcacatggaaatgacagctgccgcgagaggtgtggagtcggaggagtctccgggagcatcagagggttcgggggttgtattctggcagtttcttgatcttctctttctcagtctcactttcatctcttgctatcaccaaggagtgtgagtagcccatggcgacctgtgctatcaccaaggagtgtgagtagcccatggcgacctg

SEQ ID NO: 114926 - DNA, 1000 bp, Homo Sapiens
aggctttcttaggaatgccctcccaggcagccttgggcctcagcttctgaccaaacacaccagacctggtactacccagtcccggtggccaggtgcaagagtgtaaggaccattgtttttggctctgcccagggccacagctctgggatcacacactcccaagcttggggactattcttggtccctgttgtacaggcccaggtggggtacaggtcaggcctgctgaggacctctgcaccgtggggcccctctccctgtaactcatcccaccggctggttccacagcagctcccaggaagctgccacacattccagcagctgccctaagccactctgagcctgcattcttggggttctcccactgctccatgatggtagcctggccagacctaggagactccctgccactggatgtggcccagacatttctgggcagggcccccaagtccagtttggggcagataccaagtctcccttccggctgggcttagagctcttccctgcagcatgcccccttcatcagctgctctcttctgcttctagctttatgtcaaatgtcaaaaatgtgttaattcaaagtgcctagaacaaggctaaaaacagtgagctctcagtggctatgttagatggctctagacacccccattccgaggtgcctggcaggggccagcactgactcccaggccacacagcccctggaggaggaaggttacccagagtgcccccagcaggggctggcacaggtgctggttgtgagcaccattctgggcaggctgccaggccagcagggtgggtacaggctctgtagggagctgcgctgggactggcagaggagccaggacgaggggctagagccaagctgtggtactccaggcaaccagctgccagcacctcctcccatggcaaccctactgttgaccggcgtgtcctgcattcacccctgttcctgccccacccaccattggaaagggcctggtcggggattctacagacctctgtg

SEQ ID NO: 114927 - DNA, 1000 bp, Homo Sapiens
tctgttcacgccctttgcccattttttaatggggttgtttttttcttgtaaatttgtttaaattccctacagatgctggatattaaacctttgtcacacaatttggaaaaattatctcccattctgtagggtgtctgtttactctcttggtagtttcttttgctgtccagaatctctatagtttaattagatcccatttgtcattgtttgtttttgttgcaacagcttttggcgtctttgtcatgaaatccttgcccgcgcccatggtattgcctaggttgtcttccagggtttttatagttttgggttttacatttaagtctttaatccattttgagttgatttttgtatatggtgtaaggaaagagtccagttttaatcttctgcatatggctaggcagttatcccaggaccatttattgaataaggaatcctttcccccattgcttgtttttgtcaggttggtggaagagcagatagttgtaggtgtacagccttatttctgggttctctattctgttcctttgctctgtgtgtctgctttactaccactaccatgctgttttggttactgtagtcctgtagtatagtttgaagttgggtagcataatgcctccagctttgttctttttgcttaggatttccttggctatttgggctcttttttggttccatatgacaaattcaatttctttaatagataaaggcctgctcacttttctattccttcttgagccagttttaataaattgtatttttcaaagactttgtctattaaatttattggtataagtttgctcaaaatattgtcttatctttttacgtgtctttagaaactggagtgataacccctctctcgttccaggtattggcaattcatgtgccttcctgtttcccttgatccatttggtagggacctatcaatttttttttaattctttaaagaacccggttatgaattttgtgaattttctgttgattctctgtcttctatgtgttt

SEQ ID NO: 114928 - DNA, 1000 bp, Homo Sapiens
gcagctgcctccacccgcctagtcccgcccaagggttcaatgagcgcctactgtgtacttttggggcaggagctggggtctccttttgtggcccagggcacaagttcagcagctggccaagggccgccggcatgcattcttgctgctacccttgatgcattcattccagccagggcagggctcgcgtgtctttgggacctattaggcagatgccctagaggctgagcgacttgctcaccgctccagcgacatgggccacccgccacccctcagctgaagccggaagtcagcacctattaggtgccgcctctattcagtcggacttggaaagggttcacgtggatcccttgctcagctcagaggcaaggtctccaggtgaagtgacaagaaatgagcatgggccaaggccggaggcggtggctcatgcctgtaatcccaacactttggaagtctgaggcaggcagatcacgaggtcaggagttcgagaccattctggcctacatggagaaaccctgtctctactaaaaatacaaaaattagctgggtgtggtggcatgtgcctataatcccagctactcaggaggctgaggcaggacaattgcttgaaccagggagtcgggtgttgcagtgagccgagatcgtgccgcagcacaccagcctagcgacagtgagactccatctcaaaaaaaaaaaaaaaagtctcaaagtcaagattccacctggcaagttctggaaggcgtgcaagatgaattgcgtatcacagccccctttctacaagactaccaagtggggttgagagaagtggggaactgcccagggctacacctgcctcccacgccttcctaatccacagacaggcaatctatacctgcgggggcccctgaagaagtccaatgcaccgcttgtcaatgtgaccctctactatgaagcactgtgcggtggctgccgagccttcctgatccgggagctcttcccaacatggctgttggtcatggagatc

SEQ ID NO: 114929 - DNA, 1000 bp, Homo Sapiens
gagcacctggtaccagtttggcactgaggcgtagctcacacctgtaatcccagcactttgggaggcccaggcaggcggatcacaaggtcaggagatcgagaccatcctggctaacacggtgaaaccccgtttctactaaaaatacaaaaaattagctgggtgtggtggcgggcgcctgtagtcccagctactcaggaggctgaggcaggagaatggcgtgaacccgggaggcggagcttgcagtgagccgagattgcgccactgcactccagcctgggcgacagagccagactccgtctcaaaaaaaaaaaaaagtgggctgggtgtgatgactcatgcttgtaatcccagcaccttgggaggctgaagcgggcacttgaggtcaggatgagaccagcctggccaacatagtgacaccttgtctctactaaaaatacaaaaaattagttgggcatagtgacaggcgcctataatccctgctactcgggaggcaaaggcaggagaatcgcttgaacctgggaggtggaggttgcagtgagctgagattgtgccactgcactctagactgggctacagagggagactccatctcaaaaaaataaataattaaacataaaaattgaaagtgaaggctgtgggtggtgactcatgccttaatcccagcactttggggggccagggcagaaggatcgcttgagccttggagatcaagaccagcctgggaaacaaagtgagaccacatctctaaaataattttttaaattggctgagcatggtggcatgagcctgtagttccagctactcggggaggctgagacaggagaatccgctgggcccaggagtgtgaggctgcagtgagctatgatcatgccactgcactccagcctgggcaacagaggtgggccctgtctctaagtaaataaatgaatgaaacacttgtggattacttagggaatgaacgctaattttccagaggaggaaactgacgtccaacgggatc

SEQ ID NO: 114930 - DNA, 593 bp, Homo Sapiens
gtcggtttaggactttctgcctccactattgctctcggtactggaatagcaggcatttcaacctctgtcatgaccttccgtagcctgtctaatgacttctctgctagcatcacagatatgtcacaaactttatcagtcctccaggcccaagttgactctttagctgcagttgtcctccaaaaccaccgaggccttgcttactcactgttgaaaaaagaggactctgcatattcttaaatgaagagtgttgtttttacctaaatcaatctggcctgatgtatgacaacataaaaaaactcaagcatagagcccaaaaacttgccaaccaagcaagtaattacgctgaacccccttacgcactctctaattagatgtcctaggtcctcccaattcttagtcctttaatacccatttttctccttcttttattcagaccttgtatcttccgtttagtttctcaattcatccaaaactgtatccaggtcatcaccaatcattctatacgacaaacatttcttctaacatccccacaatatcactccttaccacaagatctcccctcagcttaatctctcccgctctaggttcccaca

SEQ ID NO: 114931 - DNA, 1000 bp, Homo Sapiens
aaactctatacccattaaacaaactcccctttaccctctaccccagccacttgcaaccaccattctactctctaagagtttgacttttgatgccatatattagtggaatcatgcagtatttgtctttttgtagctggtttctttcacttagtgtaatatcctcaaggtttgtctatgtcgtagcatggatacagtattttctttcttattaaggttaaataatatttcattgtatgcctataccacattttctttatccattcatctgctgatggacatttaagttgctttcacttcttagctattgtgaataatgctgcaataagcatgggcatatgcaatatccctttgagatactgttttcatttttattggataatcagaagtgggactactggattatatggtaattcaagttttaactttttgaagaacttccacactgttttccatagtggctacaacattttacattgccactaacagtgcacaagggttccaatttctccatgtccttgctaacacttgttattttctgtttgttgtttgcttgttttttttaagacagggtctcactctgttgtgcaggctgcagtgcagtggtgcaatcatagctcactgcagccttgatctggactcaagcagtcctcccacctcagcctcccaagtagctgggaccacaccaggtgcacagcaggtgcacaccaccacagttgggctaatttttgtttcgtttcgttttctcagcagaycaggcgtccttcgccttttgyagtcctsggtactcagttctccaaactctttggagctccaagctmatccttcccaycttcagccttcccttgaataatgctgggatgagaggagtgagccaccttgcctgttgtacaattcatggtgtacatagtgatgtttcaatacataaaatgtatagtgattaaattagggtaattagcccatccatcatctcaaatatttatcattytttgtgtgtgttggg

SEQ ID NO: 114932 - DNA, 1000 bp, Homo Sapiens
tctttagaatcattcctcagtatacatcaatttattgagaactgcctaatactcaagaaattaaatcctgagttcagtaggctgtgttccaagcaggaattattttcacttaccaaaatatctcctattacctcaaggtatccttgttgaggaatgctgaaaactaaattttaagtatcaagtctagaccatagagtgctttggtgggagtattttgattacctcctacccatcagaagcaggcagctaatattgtgaactgagtatttttgtcaaaagtcacagggaagagactacagaagaatgagaagggtcaaaaggacctagtgtggcttactacatggatcttgtctcttggaggtctgtcgtagaagaagaaacaaatagaggtgatgaagacacagaacaggctcagtcagcatcctcacccagagatggcaacatctattaagaccaatgcaataccttttcatcttcagcaaatgttgtttcatctgtttttgatccttggcattgtcaaaaacttaactgcaggtccagtgtatatttttccttatttttcccttttagctatctgctaaagcgagtaaatgccacaactgtacttttccaaagaaaaagaactattgacaacttatagcctgtcatgcaggtcatgtttcaaatcaaggctgaaattttcaacagctgtgggaaaaactaaaacacagaaatactgtacagtattagtgtttttttaaagaaattgttagtgcattattgagtatactaaatatctgtgattaaataaattagttctaacttttgattttgggagcccaaaataaagggagtgttgttttcatggttatgccttgtttgtggagtcaagtgttgatatacttgaggcatgttatgtgtcttctaattaatatttttatcaccttgaatttgtgtctcttccaagcattaaagatactatggatcttaaattccttattaaaaaaatgcaagtgtgaat

SEQ ID NO: 114933 - DNA, 1000 bp, Homo Sapiens
tttttcagaggacgtgcagacaggctggcattctagattacttttcttactctgaaacatggcctgtttgggagtgcgggattcaaaggtggtcccacggctgcccctactgcaaatggcagttttaatcttatcttttggcttctgcagatggttgcaattgatccttaaccaataatggtcagtcctcatctctgtcgtgcttcataggtgccaccttgtgtgtttaaagaagggaagctttgtacctttagagtgtaggtgaaatgaatgaatggcttggagtgcactgagaacagcatatgatttcttgctttggggaaaaagaatgatgctatgaaattggtgggtggtgtatttgagaagataatcattgcttatgtcaaatggagctgaatttgataaaaacccaaaatacagctatgaagtgctgggcaagtttactttttttctgatgtttcctacaactaaaaataaattaataaatttatataaattctatttaagtgttttcactggtgtcgcatttatttcttgttaagttgcattttctaattacaaaagtaatgcatgattatgacagaaagtttggaaaatatagaggttcacacacacacgccttcattgcgtgtgcatgcataaatgcatgagaaaagaaaaataaccagtaatcacatcgcccagaaataaccccagttacaattgtggcaaatacacatacttataaatattgcagatatattaagtatacctagtatttgctaacactctttcttctactctgtcatgaagattctcccaaggtgtttttgtataatatttaattcattttcagtggccaagcagtattctacttcatggatataccaggatttatttaaccataacttctggttggattcactcttattattttgtttaattaaaaaaaaaagacctcggctgggcacagtggctcatgcctgtaatcccagcactttgggaggccgaggtgggtgga

SEQ ID NO: 114934 - DNA, 1000 bp, Homo Sapiens
aatgagcaaatacacgcaaattacccagcacggtgcctggcataaaatcggcgctcaatgagtacgaagcgtgaagggtcgccggccccgcgtccccgccttgcaggagcccggacccgccgagcaggctcccggtccggcccggcccggcccggaggccgatgcttcgcggtagtgccctcgcgggtcctgcggactcggcgcccgcggggcccacagcgctgcccagcctgtggacgtggagcccgggccgcaccgccgcacacgccccgggcatctctgcgctacgtcgcgcgcccccacggctccgccccgtggcgtaacccggggcggggccgccacctccgattggccggcgcgctgtcaccacgtcgcgggaagctggcagggtgtgtgtctgtgtgcgtgtggggtttgctttgtcattcgtacccccggtgcgcgctgacgcggtcggcctggccgagctctccagcatccgcagaagggtccccggcgctgttcctgggatgctcccttacataatgacgcgactggctgaagcgcacgtcagcgcagacaccgcacatgccgcaaacccgggccttccgatttcatacattgctagacgagagcctacaatgccatgccgtacggtatgctctagtagggattacaatacaatgaaacgcaacccaataataataaagcataccttcgcaacaaggcgtaatataggatgttatatttatagggcctatttataagcctctatttaaatcttttctgataggctcagccggggacccagacactataatgattggcgcattcttccgtccttcaaaggggcgggttctagagtcagttttgcctcagcgggccctgggattggccgacagcggtttaccggtggcttctattggcctcccgggccgtccgtcggagccgaggaggcggggcaggcggctggctggtgctgggcgggcgggccccggaattgtcatttctttgtttccga

SEQ ID NO: 114935 - DNA, 1000 bp, Homo Sapiens
cacaccaagaggggagtccagctggctctcagggtgctcactaccctcatctgggggcctggaggacgtcaattcctgagaacgccacgttctagtgagtagaatgaactgagagatacacagcaaagctccacatacttttccttttctttgtgcccgcagtgttcttcatcagtgtgctctcgcttttcagctactactgttggctggctggaaaaaatagaacaatagtaaaaattagagaccagtctttggtgatgaagagaaatattggctacttccagtattttctagctttggttatggttgcagttttccagctcaccttgtggggatgaattcagaaaaaagttacaaattgaaatgaacatgccagaagtattggctcaaatcaacgttgtcctattaagccacttagtgaatcaaaagaccgcttgttggactgttaatctcggtggccagagaaaggagctgaagaaggtgttgccagatcaggaacaaataattacagcggcaatagaaaatggaagaccacttgttcataaccatttgaataagggcaaggtgtatggaaacacattatgaactgatattttcagttttgtttgcaagaaaatgattaataaggtgaaataattgaagtatcacggaagatacattaaaaaaaaaaaaagcctttgtacagtttgctggagccacagatgtcctactccagagcagaacaatgcctgaatcttcagggtccatttctgccgcattcactagcaaccacaaatgtgacttaattttactttggaaataatgcttacccattgtgagatgctgtaatatgaaccatcattacatgttaacatggcacatggaattttgagtgtctaagttacatttttagagttgtttcttagtagccatgtgagtttccactccaaaaacacaagctaaaaacttgttttgagtgaaggacatctagggcaaatggtggctgaaagtgaatgagatc

SEQ ID NO: 114936 - DNA, 1000 bp, Homo Sapiens
  misc_feature (624)..(624): n is a, c, g, or t
  misc_feature (919)..(919): n is a, c, g, or t
  misc_feature (954)..(954): n is a, c, g, or t
  misc_feature (993)..(993): n is a, c, g, or t
tttggacccagcattaacattgtaatactgtgtcattttcccaatagttaatatgatcctctgttgaagcaagaagacaaactgtatggtggagaaagaagtgggaaggatctgcgcgggtgagtaaatgacaggcaggccacagtttttcagtcagcattgagtcctctgaagtgcttcaaaggatgttttcttccaggctgtagacatatagagtattgcttggtatgagatttttagattcctgaatgacgcttccagtcatcatttttgtgtgtttcattattcttcttctttcaccagattctagaggggccaggcgcccctcctgttgctgttctgaagtcagccttcctgcttcgtctgtgccgccactgtggtggctgttctccttcatccacataccttttcctgttctcacacattgtcctttatactttgttaaaacttacatattgtctgatattcaggttcctttttgttactaccttctctcatcctttctagtggctgaatgctcagaattatattttacacctgttctcacacttcccgttgtcttctcactcatctctgccatcgtagatccatggactcttctgcctacctttcttctgctcccangtacctctgtcataagttgtcgacctagaaatcagtttttccctactgcaacttttaggtgtgggggtctaaatgcatggcacaattacagctcactgtggcctcagcttcccggcctgaagtggtcctcccgcctcagactcccgaaaaaatctcctcttaattcttgactcttagtcctgcagtttttcctgcaaagttgtggtcacgtttacgcgtgtcacgtgtatccttcctgaggtaacctaggaataagccagtatattatatctatgctgcaaatatatatacatanaagccctaattcttccttttcatataaatggtggnatatcatctattcctattatgcacataagttttcttctnagaattc

SEQ ID NO: 114937 - DNA, 1000 bp, Homo Sapiens
gaaacagcaagcagccagcaaggaggagctggaagtggtaaagggtaagatgatggcatgcaaacactgcagtgacattttcagcaaggagggtgctttgaaactagcagccacaggcagagaggaccagggaattgaaacagatgatgagaaggactcacttaagaagcagctgagagagatggaactggaactggcacaaaccaaactgcagttggtggaggccaagtgtaaaattcaggaacttgaacatcagagaggagcccttatgaatgaaatccaagctgcgaaaaactcttggtttagcaaaaccctgaactctatcaaaacggccacgggcacccagccattgcagccagcaccggtcacccagccacccaaggagagcacatagttccagccttacccaagcacaagagcacaatgttcaaaccaatggaaatctgggaggattcttcctggtgtccctttgaaggaaagtcaaggaggccagaaaacaagccagaatttttcagtagctctcactctttcttgtatgacacttttcaaagggatgctatttaaactgacctgttctatgttgaatacctattttccagcttctggaaggccatgttcagatccatcatagtattacacattattttgtttgcctgatgtttagttggaaataagtaattcagaactaaatgcttttttatttagaattattcataattatttttatcttacataaaaatggagacatctgttattccaaggttgaagtgataagaagatctttgtcacagaaaaaaaaaaattgaaacctaaacatcttaagttttcaggatttattcagataaagcacactgtggggccaggcatgaccactctcaggtttcctcctgaagcctgattcccaggggaagtgttaatcctgtccaaagggaaaagaaccaaatcagcgatcattgggttttactttccattttctgttccgggtacatcctgggaaaat

SEQ ID NO: 114938 - DNA, 1000 bp, Homo Sapiens
taccaaaaaactctgttccaagtttggcatttgacattaatgtgaagcagtgggaccatgctgcctgctaaactactgtatgaatcgtaaatgttctgaagacgagcagctggaggctggaggatggcattccatacagcaaaggagaagcacccaccacttcatctgggaaaaggaaggaaattgcaggaggcctggagccatcatttgtaaaggggatgttgcggggtgtgatgctgttgaggagattcaccttcaattgcactgctccacagagccctcatataaggccaatcctaatgggctacctcggctttaaaagttaatttcagtaagtcctgtttcaaaagtttgtctttttttgcttctaccttcagtgccactattttccactgcagtgttttgacttcacaaactgcctcctccagagagaacaatgtattgctgaaaatgggcagtagaagcaaatgctgttgttacatttgacctataaagtattcagagtgactgctaggtagaaattaaaacttagctttcccaaatagctccttattttgcaccttataaaaagtatactaattgttaattagatgttgcttttgtttatacaagcattcccaaagaactagatttggattttgttttgagtttttggatttttaaaaattatcttatttagattgactaacagcatacttacaattttaaaagaagctgttgttcagttcatcttaccagatgtgtctggcgaagtattcagggtttgatggactgctttactttcgtttggaagtgatagctaagtttattatactctatattaaacaactttgttcatttcactgaggaccttatcttccttatatttcagaacaaagaagcaacaagcgtgaataaaaagacaaatgtatttgactccctcataatccccatctgtatgtgctacccttccttcaaatatataaatgtgcatcttttttttaaaaaaaaaaaaaaaaaa

SEQ ID NO: 114939 - DNA, 1000 bp, Homo Sapiens
ccccagctatggacctttcagatgttaccagccctagacgtggatcttccagatgattccaattccctagtccttccagccaccttcggctttttgagtcttcctagctgaggtcccagaaacctaagaatagagaagtcatccctgcttgtgctctgtctgaattcctgacccacagaaccagtgagaacaataagacggctgctgtttcactcccagtcggtttggtgtgacttgtcatgtagcaacagataacctgggagaaattcaacaggggggccaggagactgaaaaccctgaaagcaagggttttggtcattctcagcaaacagcatcaaaatgctggcaaatgcattctgccacatacatcatccaagtgcaagagtctctcacattataatttttggctgagaactcaatatacacatgactgggttattgttaactgagtattgttcattctgggctgggaaacctttactgacaacagtggaacatttggatgtggaattctctgccatggaaaatagaaaaacatttctttagtgaaaacactgatcatctggaaaacgctttatcggtaccttactgatgtttttcatttcttatgaagccacaacagttttctcttaggtctcgattatattcagaacttttaggtaaatagccccctttatacagatagcagtgcagagatgagaaactgtccaaatagtggaaaagattggtctataagagtgtaagcaaagaaacatgcatagcttgctcatcatggagacctacattttggagatgagaccagagagttcttgtttgtttagcatgtatctgtgtattatatgtcacaggtggtttgtgtgtgtgtgtgtgtgtgtgtgtgtgtgtgtgtgtgtatttgtggttgtgaatgaacttctagctgctaggtctcttggttctgtcggtaaggacctaagtgtgagattttgtgagagcctcatttgtatcatgtgtcagatca

SEQ ID NO: 114940 - DNA, 1000 bp, Homo Sapiens
  misc_feature (83)..(83): n is a, c, g, or t
ggtcttaccttgcatcccaataaatgagcatttcatttaaattgtgtttaaaatcgtggcttgctggatgatggctgaaccgngtcagctggtgtcggtggtagatacattgtggtaaaagctttttccttcctcccgaccccacctccaatccttgcagtttactgttacacaccctagacttgacttgggaagtaaacagcgccagcttaaggaagcacgtggcctattgataaaggattgggctgaatgtttagagccaaatgcacccttcggttaaagtgctgaaggattcaatgcgcaccttcgggtgcttagcacagagctgctgagaaggaataaagtagggtcggattaggaataaaaagtttaaagtatgatcctttccccacgcggcttacacacaggctgtgggtatcggtcatcaccgcaaagcagccagagtcccacagagtgtgcggccgagtactgagtgacagagaaattcctgtgggcaagagagtcacagagtggctagagcttgagctgggtggagtttagttacatacgtcacctacacgtagcccttggcagtctccaagtactttcaggccgttggtcgtcccaggaggacctgaagaggaagctgcggggggcaccaccgcccagtctagttaaacgatggcttttagtaagcgttggatttgggcagaaggtctcagtctttgggttacaccaggctgctgctcaggtcagtggagaagcacaggcaagggcactgtggtggggaaaccaccctcggggatcgtgtgaccttgttttggggaagaaggaagtggagcagcacagttcatgccgacacgtgtcttctcagagggccctgtctcaatatgaatacgctgagggtcgaagggaaacatcaaaattgtgctgttagaagtgaacagaaaaatggaagaatttgtgcaacttgctgtctatctatagagttaggggagactttaaatataaatctctgcaa

SEQ ID NO: 114941 - DNA, 1000 bp, Homo Sapiens
ttcctatcgcagaatagaccctatttccaacctggccccaaatatacccctacaccccccgcccaaaaaattgtgtttttgctcctgcttaagcaaaaacaaaccatagacactgcttccaggggctgctccctagagcgagggaaccgggcagcaggaggagcattgccaagaccagccacagagaaggggtctgtgccatggggcctcggggctgatttccaatgaataagtgtccataccacattaggaagcacctactacatgccaggcactgcgtggcactgcgtaaaccggtaatgagcaaaagcagccgctgaccgatagccacaccagtgagaatacagccgcacacggagatcaggcttcaatgaaaagaaactcctttgctccgagaccttgatcggtctaggagatgtgatcaaagaaacctgtgaggaagtgaggctggaaggatgaatggaggccagcaggcagaggccaggggtaaggagcgtgctgtgttgagagctagaatcaggcagccttggctgaggacggtgtgaggcaggtgagccggggaggggttgaggaaggtcccctcacaaagggcttgagatcttagggaggattctgtccactctgacagcatcacctgagcccaaggcacacaatcaggccacagtaagcaaaacgtcaggtgctccagttcaatcccaagcctggggatcttgtctaatgcgggtgacagtgagtttctctctgatcccgggagtgccttcacagcagaccctggaagccagggctacagaacggtctctaggcaagatgtccatgatgctacaacaccgtccaaatgccccaacatcagtcccacactagctacagaaagaagtgactgcagaaactcatgaccctctgaaattagaccatcctgggcccagggcactgtccttattaacttctttcgccaaaccgtcaatacagacacctaccaccacttctgctctgggtccatagt

SEQ ID NO: 114942 - DNA, 1000 bp, Homo Sapiens
ctagaggagcctggactagagtgaaaagaaaacagctcagaaattcacacaggaagctgtaaggcagtactgtttcaatgctttattaacagttggaaacaaaaccaacaaactggaggtgatgacatcccagaagcctatgaggcaagggaaataggtttgcattttgtccctcacacctctctctctctctctttttttttattaaatgcatcttagcaaaagtagattaaaaaagaaagggtcaaagccccagatgtcagcgagcagggaggaggtgacccaggggagcaacagacgccctgcatcagagtcctcccaggaatagtccaaaggagctgctcttgcccctttatacacaagcgccagcaaccaaaaccctccctcctggcaataaggcctcactatagttgccctcatgcttcctaagctctctcttgctctaataactctaattctgggccaagcccaagagtgccattctttcttcctagctggggatggaaagctgagaggggcacaaggagggcaaaagtatcaccctaagccagagaattgcagcttcctgtggttggggccaccaaacagttcagtgtgcccacccacttctcttttagaagagagctggggtacagtgtatgaaggcactcctggtgcccagttccccagaatgtccagttagcatctgcacatttggcttgatacatttatacatttataaaaaactctgtggtcttagagttcctgctactcttaggcctggcccagctcaaccagagaaggggttcctcctgtgtcggattccctgggagagaggatctgccttggactcaagggtccagaaggtccaggggcacattcaggattgggcctgtgagaagaaatcccagaactctgtaacctgccaccaaagcttcttacattatggaggggaaagggggaaggaacagttttctttaaaaaaattttttttttcatacaaaaatagatccatttgcaa

SEQ ID NO: 114943 - DNA, 1000 bp, Homo Sapiens
aatgaaggacagatttctcaccttgatgattgtagtgatggggatctgaccccagtaatcacaggtcaggggaaggtccctgctgaggacagaccttaggagggcagttggtccaggacccacatctgctttccttgtttttcctgatcctgcccttggtttgcagtcacacatttctggaaacttctcaaggttccaagactaggaggttcctctaggacctcatggccctgctaccttcctggcctctcacaggacgttttcttcccgcagatagaaaaggagggagctactctcaggctgcaagtaagtatgaaggaggctgatccctgagatccttgggatattgtggttgggagcccatgggggagctcacccaccccacaattcctcctctagccacatctcctgtgggatctgaccaggttctgtttttgttctaccccaggcagccaaagtgcccagggctctgatgtgtctctcacggcttgtaaaggtgagaccctggggaggctgatgtgtgtgggttgttggggtaacagtggatatagctgtgctatggggtttctttgacttggatgtattcagcacatgatgggctgttgaaggtgtgacccctcactgtgagtgatatgaatttgttcatgaatattttttctatagtgtgagacagctgccttgtgtgggactgagaggcaagatttgttcatgccttccctttgtgacttcaagaaccctgacttctctttctgcaaaggcatctgaatgtgtctgtgtccctataggcataatgtgaggtggtggggagaccagcccacacccgtgtccaccatgaccctgttccccacactgacctacattccttccccgatcacctttcctgttccagagaagtggtgctgggatgtctccatctctgtctcaacttcatggtgcactgagctgtaacttcttacttccctattaaaattagaatctgagtataaatttacttttttca

SEQ ID NO: 114944 - DNA, 1000 bp, Homo Sapiens
acacacatcatctctttctcatcatagtaacttgacacaatattttcaacacaataaccatttttaacctgattgattgattataattggatacagccatattaacaaatggttattcaacatgaatgcctaaaactagctcacactcagcctgtctctggttctgttttctgcaggaaagctcctcctttgtaactgtcctcagagtctgtagcttaactgccttttagtgaggtccatttgctgtttcactaactcatcggggagggtgctgaaatttggaactattttaccaagaaattttcttgtaaggatcttcctgtgttccataattttccctcctttttagatgattggctattaataaagttttgtctctcagatcacagaaaaaaaaaatttaagtatggctgaagaaacagtttcattctttaggatgttttcatttacctgaaaaggagccagaagctcagagacatcaaataacttcattaaacatttccttaatgtttaatgaattaagtgaaacattaatatttgttaaagttgtttaacattgttttctctcatttttctcactttctactcaagcttttccctagatgaatcaatcatgtaataatcaattctatatggacacaacatagtgtctttgaggaaggacaataaatttggaaaaaacataaaaatgtgaagagagcagttttaaagatatgaagaattcttagaggaggtggccctcatcttgccaatggagcaggccacccagagagcttgtggactccgttcaaccccactgactgtcatgggttataccctcagtctcagatgatgcaccctacctgccatcaagtgtgccaccctgatcacctaaacatcttttccggatcttacattagttaagtcttgtagctgtgtagtcgatcttttcatctactctcttttattttcataacagttggagtacaggaatattccttaaggcccatcaaataagctt

SEQ ID NO: 114945 - DNA, 1000 bp, Homo Sapiens
tctcaggtctgagttgttaccccaagcgccctggcccccacatggtgatgttgacatcactggcatggtggttgggacccagtggcagggcacagggcctggcccatgtatggccaggaagtagcacaggctgagtgcaggcccaccctgcttggcccagggggcttcctgaggggagacagagcaacccctggaccccagcctcaaatccaggaccctgccaggcacaggcagggcaggaccagcccacgctgactacagggccaccggcaataaaagcccaggagcccatttggagggcctgggcctggctccctcactctcaggaaatgctgacccatgggcaggagactgtggagactgctcctgagcccccagcttccagcaggagggacagtctcaccatttccccagggcacgtggttgagtggggggaacgcccacttccctgggttagactgccagctcttcctagctggagaggagccctgcctctccgcccctgagcccactgtgcgtggggctcccgcctccaacccctcgcccagtcccagcagccagccaaacacacagaaggggactgccacctccccttgccagctgctgagccgcagagaagtgacggttcctacacaggacaggggttccttctgggcattacatcgcatagaaatcaataatttgtggtgatttggatctgtgttttaatgagtttcacagtgtgattttgattattaattgtgcaagcttttcctaataaacgtggagaatcacaggctgggctgggcactgctctcaccttggttcctggggcatccatggggtctctcacagacaggacccctgcagttcccctggaagcagtgcccaggtggctgtggaataggaacgctatgtccgtgtactgaggagtaggtcagggttcagaggggctgcaagatgccatcgaaggctctagcttaaggacgtcgctcctgttctgggccctggggctggccct

SEQ ID NO: 114946 - DNA, 1000 bp, Homo Sapiens
aattttcttttttaattaaatttttattgtggagatggagtcttgctatgttgcccaggcttgtctcaaactcctggcctcaaatgatgttcccacctcagcctcccaaagtattgggattacaggcataagccaccatgcctggcacagcacaggttcattaaaggctactatacagtagtatagtatagtgtcaggcactaggggaaaatggggtggtccagatagaggtgggccctacatcatggagcttaatggctggtgggaaagacagatagtaaacaagtaaattaacaaataccataattatgagtggtgagttattctatgaggaaaacaaggttcagacagaaaaaaaaagaaagaataaatgtaggatggctcagagaaagcttttctagggagattagatttctgatgggccctaaaggttaagaaggggctacccaggtaaagagaaggatgagaaccttctagggggaggaaacaatgagtctggggttcctaaggcaggaaatagctttgtggctggagcttagtgagctatggggagagtggcacagatgagtttagaaagctaagcagatacaaattctgatagatttgtaaaagttcttctaaggttttatttcctagtgcccaacagttgtcaatgctgctgccctcatggttgggcatgtagtaatgatagtggaccagatgccactctttaccaacctggagagctgggtaagacaaggattgctggcctctacccccagagtttctgatgtgtagttctggggtggggtctaaaaatgtgcatctagtttcacctagtttcctaggtaatgttgaccacactttgagagccactagtctggaacagtgtttctaacatttaatgtacatatgaatcacatggggattcttattagaggatgatctgggattttgcctttctacaacatcccagtgatgctcgatgttcctagatcttgaagcacactttgaatgacaa

SEQ ID NO: 114947 - DNA, 1000 bp, Homo Sapiens
gactcagacaataggctgtacccctcgttaccatttgatgtaagcacgggaacccttgtatggtgttcgtatttgtgtgcgatggaagggtgcagcaatttgggcttaaatttagaatcttcctctatactcattccagatctgttagagaaaaacatcttacttgtgattggtcttgtttttttttttttccctcagcagtgataacgatttaggtcctgggaattgagtgctactttatcttcacaagccttaggtaggtagttttggcaactgtcagaaacgggggaaagtggaatagaaagaagagagtctgtttggcggcattatctctctgtaataggctaacgcaatttatgtggtttgaaaattatttagagttgataatacttgaattatgttggtaagatgttgtttgtgaagggtagtcttaaggtatttggttatactatggggctttcaggtaattcgaactactttgaaaattatgggagtatgaagtctcttaagatttttggatttttaaagtagttttaaaaatttggaaaacatctttacacctcaagttttcgaagtccgcgataccgttggagaataaatacttatgcagttcagtctatgggtatatggtgccagttagcggggtctagttctgtaacatttgaaattactggctttagtacaatatattggagcgttttgtgaatacaatctatagattttcaaataatttttaatttcttaatgaactatttacattataacagatgacagtttcaactagagactagcaaagttgatgcaagcttgtaacaattgcggctttaaaaatagttgcactctgaaactaaggctttcactctgtgcatctggtaggattcagttttatcaaatgtatgcctcttactggcttcctgattactggtcattctaaatgaacattgcatattttgagatttgcaagcttatgtgattttcatatttgtaatatgaatttaac

SEQ ID NO: 114948 - DNA, 1000 bp, Homo Sapiens
actctctatctgaactgataacaggatgaaaaaactgggcagtccgaattttgtcttctgacaaacccccttagaatgcagtcttcatttgaatgttttgcattttattgtggagatggcctttaggaggctttctgaggagatagaggcctgcacgggtgagaacagcagtgtttgaagacccagtattcaaaagcttttccatttccggtattgttcaggaactggcaagttttagagatttgccctcatatacttatctgcttttctgtatgaaaagataacatactttatttagctgctgtgaaaataaatcatttggattacattgaaggtcttagttcctgttaaagtatcttctgacacttctttgggaagtagccattggctgaatctattggtttactgagccctgaagccggagcccagttcctggacttacaaatgtcagaggacactgacctcaagaatatccactttaacagatgtaatcatcttgaggattcattcatgggctgctctgcatatttcaagtaacctgccctgccgatgcatcaacctgaccagttgatcaggtgtaaacatattgcttatttagcatcatgaaaattcaggctgtaataagtaaatgtgccactggaaaagaaaacatggaaacattcataagccctcttatcattttcttctggattctaaatttgtgcggctttctctgttttggtgtcggttaatagtcatcccatccttctaggtgccctagtgctaagctgaggtacttctcttgcttctcatgcccacttgtcctctggatcaaagctccaaggtcagattgatcttgcatgcacgatgtcaccaacatttattactttccaccttcactgtcactttactgatctagaccaccattattgctcctctgaactacaacaaccttctaatgggactcttgttcagcttctagctgctcctaaagcctattactcatagtgaggcatgatcc

SEQ ID NO: 114949 - DNA, 1000 bp, Homo Sapiens
tgatgttttgacaactttcagtcatatcaaaaccataactttatccatattttaagttttgatattatgaagatatatttgcctaagattttagaacatattttatctaccaatttttttcacttgacttatattgtatattgatacaaatatactcaatttgtacttcccagtaactcacacatgttaggagcagtcattgctagtacatctcagtgtttagctggagtaaccattctttacgaaaccccaatttcacaacttactggaaggccaatgcctgcccatactttctttgaatgctcagaggtttatattctcatacttgcctcttgctcctgctgcattagttgagtttctagactgcttcaagtccaaaacatacgtccccattcatgtgttcaccttggtgtggagactgcattttttctgcttccaatttctcacatgtggcatccatcagactttactacaagtttgaaaagatgatttgcatgttggtcgtccctgccctaggttattgtagccacactgccttgaaaagtagttcctttgtggcacctaatggattgcaaaggcttttccctgtttcaagctccttttccttcctatctttcttcccatctcgttctcactcatttctctgccatatccgccctcactcttatgggctctgaattcttcccatactataatacagagcagagctctctctagtccctactccaaaactccgttccaggcccatagtggttgcaccaaaatccattaaggtgaagtcaacattgcagcagaaaagaccagcagagtccccaagactatttttaacaagatccgtcccccagtcccctttagaaggcagctgctgttttaaatagcagtattcacttttttttctcggtttcaccagaaatggtttcataatcacaagaatataggcttgtgacccatcaggacctaagcataacagcatggctgctgctagtgggtgttgtattca

SEQ ID NO: 114950 - DNA, 1000 bp, Homo Sapiens
gaaataaggatgctaaaataaattccccatacagcacttccctttattatgttgacttatgtcagacaaaaggaggtttttactgaaaattttgtgggagtcaagggaattcaaagggtctctcctagatgatccagtgttatgtcctccacagaacctctggtattggcccctcttcctcatatgtgaggatgtattcagtggcctccccattatctcctttcttttctttctgaagcacaatctttataaagcctgtatccctgtagcgtatgtaggttctctgacaaaagttatacttactgctctttctttcttatggggaaaaatccctggaactgaagctgagatctttagtacttggcgtcaccctacaggcaaataatacctatggggtgttctttggtgcctaaagaacttaaggcatcctctgaaaacccggcccaggttagtgtttattatgaatctcttttaacctttgtatattaccttcgcctacatgctctaactagactccacaagaagagattcagtcaatgtaggaaaaattatatgaaattctatttttgttaagtcaaaaatagtcaaatatcagaaatttgctaagattcaaacgatatactctgagtggagttaccgagacaatgtggacattgttcacatctcatagggctgaaagtcaatgagcaagtcctgggaactcattctcttactcgggtcttgtcctaaatttcataggttcacccatcatgctctcggcttttcttatttagccatttctgcttacctcttcctccagtttctctctgtttttccccagctatgttgtcattatttcctgaaatccttaaagcttgcacagacccagagaactatgaggtttatcacaagagataatttcttctttttttgagacagagcctggctctgtcacccaggctgtagtgcagtagtgtgatagaggctcactgcaacctctgccaccaaagctcaagtgatc

SEQ ID NO: 114951 - DNA, 1000 bp, Homo Sapiens
tcattcaattcattgaacactcataataacccaaggaggtagttatttttattcatttctccaaccaactttgccttttgcttttacaggcaagtattctggagcttggagagactgagggacctggctatagttacaaaggcaccaccttgtttgacaggggctctcaggcaaaattagaacaggtaaacttgattagtatttgctttaggtaagtcttgaacattttctcagttaactgaagattttttttaatgtttatgtattttttaatgaatacattataattgtacataatatttacggggtacaatttgatgtttcaatacatatccgtgttgtgtaatgatccaatcagggtagttagtatatccatcacctcatgcacttatttggtgaaaaccttcaatagcctcttttctagttattttgtaataaacaatattttactgttaatcatagtcaccctaccatgcaataaaataccagaatgtatttctcctatctggctgttgattgtagttttaattcttttcttaaatatgaagcttctgtaacttcaactggtctgtgaaaatattatgccaaatagaaagcactttttgtaaataaagggcgtgtgatgcactatgaacacctcccaaatgatttggaggaaaaaaacatcaattccagtgatattgtttcagattatcccaatggtctaggtttattccaaagactttgacctaaatccctcagtattccccttcaactaactctcaacccatttgaaatcttattcatatgttctcactgttagattgtccacctacaatttttttttgtcctttgaattactttctactgaaaataatacacagacctcggtgttattggaaattgcattgtgaatacacaaggttttttgtctaaattttaggtagttttctctttctgttgctacctcaaagagataacagattctgcagtcacattatatgtaaattatgtacaagct

SEQ ID NO: 114952 - DNA, 1000 bp, Homo Sapiens
gaagccggcatgtcctacgtggctggagcaagaggaagagagagagcaggtggaagtgctacacactttcaaacaaccagatcttgtgagaactcactcactatcacaagaacagcaaaggggaaatccactcacatgattcagttacctcccaccagatccctcctccaacgctgaggaattacaattccacacaagatttgcctcgggacacagagccaaaccatatcaccgctgcgctccagcctgggttacagaatgagattcttgtctctaaacatatatacaacttttatttcctaagccactaagattttctatttgattaatgctgcataatatagtttgtcaagataatcactagtttatcatgactaatttgggaggaaagtttatgtaggcaggagtcttgcaagtagctttacacaggcagaagcaagctctacacaggcagaagtagtacctccctcttgccagaggagcacaaactatgcttgcatggagaattgataaagacctcatttgagacaaaaacctcacaagatagtgcttgccctcatcccagattgatcttccctctgctcattattttcaggcaaatgactaagatcaggtctcagcatagttcagatcctagctatggtaggaaatataggttactaaccaaaagaattataggacctgggcattaagtatcatcagaaatcaaggaaacacatatgggagtaaatctgaaaggcatcagattaagttgggggatgtaaggctgaagagagaagaatttattgacatcgatacacacattcttgacttgggaatcaatttcctagaaaggaaaccaggagcttgtctaatactctgctgacatggattctcaaatcttggacacaatgatgtcctgtggcatatgaggtggagatgccagaatttctgtggcatgattttgaggaagaagtcagaagacacagagagatttgaaccttaaaatgaatctattaca

SEQ ID NO: 114953 - DNA, 1000 bp, Homo Sapiens
cgcgtctgaaagcctctgcctgttgcccagcacccctccctggtcgcgggagtgtctctgtgattcacagccccacggtgcctctcattgctggagctgtttattgtctgtctgcccccagaacccaaggtccagtagggcagagacagactggatttcccctgtcctgtccccaggtgtgacctggtatgttgcagacacccagcagatactgcatgcacgaatggatgaatatcaacgtcaaattacttttcataaaagttcccttttcggctgggcatggcggctcacacctgtaatcccagcactttgggaggccaaggcaggtggatcacctgaggtcagaagttcaagaccagcctggtcaacatagtgaaaccctgtctctactaaaaatacaaaaattagccgggcatggtgggggttgcctgtaatcccagctactcgcaaggctgaggcaggagaatcgcttgaacctatgaggcggaggttgcagtgggctgagattgtgccattgtgctccagcctgggcaacaagagcaaaactttgtctcaaaaaaaaaaaaaaatcccttttcttgtccctgttttgcttgtgcctaagggtgtgtgtaggatactgtttgttgggcaatccaggatttcctacacgggcttcacttcaattttgctgttacatttcaataccaagtgggtttgtttgtttgtttgtttgttttagagatggggtctttctctgtcacccaggctggagtgcagtggcatgatcatggctcactgcagccacgaactcctgggctcaagtgatcctcctgcctcggcctcctgagtagttgggaccacaggtgtgcaccaccgtgcccagtttccaactgtgtgtgtgagaaataagaactcataggtgccctaatacctggattctgacatgtttgaaaagacaggtataaaatgcttcaatcactgctgtccttcagccttgcatattgctgtggagaagctt

SEQ ID NO: 114954 - DNA, 1000 bp, Homo Sapiens
ttttttgaactacaaaaaaaccttttttttactctctctctgaaatgcatgagttttcctgcctagacaaacgacaaagtggccaattccaggcctttccacttccaagatcattttacacacgcaagtattcctggacaagaagaggctgaaggatcttctgtgggatttttttaaaaaattattattttttgctgttattgttacaaggaaggtagtgagtgcaattttgggataactcagatgaacccaaatgttttttaatgcccaaataaaatagcctgggtccctgttcctacccagacaagaaactcagcacttgtaccaggttttcaagggtttccagagagatacctctcttgggaatctaatcccaggaactctgtgccggctctccctcttcctcctgcccctctgccctccctctgtcccacttcatgccacatgggctattgcttttccctcctttcccagggtgcttgtgtataacagactttgctgaaggtcaaggacacgggggaagaggttatagcacaacccaaaatgggcaacagtgactgagacatcaccgtccgcaggttccttgcctctggctaccacaggagacttcatgctgctgtctctcttctcaggctattttgtgctgagaccgtctcccaccaaaccccacaggtctttctttctcagttctgggcctgttccctgcttggggaatgcagaaacctccaagccctgttaaccttattatgtaaaataaacacctttccatctctatcccagtataggatcaaagcacacttttgctttatagtaataataaagatgttttgatttaaaaataaaaaagagttggctatctctggtcacctaccctagagatgtaaccctcaagtgcaaacaattaaattatgattttttttctttaatgcatctaagataaaagtttttttagagacagggccttgctctgtcacccaggctggagtgcagtggtgtgatc

SEQ ID NO: 114955 - DNA, 1000 bp, Homo Sapiens
taggggggctgttagaattgctgctatactggtggtatggattatcatggcattggaattttcatagtaatgcagatccaatttctttgtggtacctgcagtttacaaaataatttgacttcagtgagcatattggtatctggatgttccaatttagaactaaaccatatttattacaaaaagatattaatccctctactcccaggttccctttatatgttaagatataatggctttgaggggggaaaaaataaacctaggggagaggggagtttcctgtagtgctgtttcattagaggatttcagtaaattaaattccacagctaattcaataaataatggtacatttaagtgttctgattttaataatatatttcacatttatccacacagtaacaatgtaatatgttaatgtaaataaaattggttttgatactcagaaataacaagaatttaattttttaaatttgtttacagtcctgggaaaagtaagaattatttgccaaaataagaggaaagaaaaccttagtattattaatgagtttaccatagaattgttggaaatactgaagacaggtgcaatttactaaacttttgtttttaaactattgtagaggctgcattagaagaaaatgtttataatgacagagcaactatgactatataaaaaagctgaaattagaactgtgtttagaaatagatcagtaacccagtgccaaggatgccaagctgccaccatggtcttggctctcccacaacccagtgtttctggggtaagtttcacagtttctaggccctggaatagcaggcagtgtaagcctttgataactttagttcgatgtttttcttgtttttgtttgttggtttggtgcatatgatagtgggtgttatgctattttgctcttcccatcaaaataaagaaacttccagaggtttactgttaaaaatactgatatttccataaacgggtttaccaagggtgtagtatttcataccgcct

SEQ ID NO: 114956 - DNA, 1000 bp, Homo Sapiens
gcctcgggaagagcttctcgactcacggtttcgctttcgcggtccacgggccgccctgccagccggatctgtctcgctgacgtccgcggcggttgtcgggctccatctggcggccgctttgagatcgtgctctcggcttccggagctgcggtggcagctgccgagggaggggaccgtccccgctgtgagctaggcagagctccggaaagcccgcggtcgtcagcccggctggcccggtggcgccagagctgtggccggtcgcttgtgagtcacagctctggcgtgcaggtttatgtgggggagaggctgtcgctgcgcttctgggcccgcggcgggcgtggggctgcccgggccggtcgaccagcgcgccgtagctcccgaggcccgagccgcgacccggcggacccgccgcgcgtggcggaggctggggacgcccttcccggcccggtcgcggtccgctcatcctggccgtctgaggcggcggccgaattcgtttccgagatccccgtggggagccggggaccgtcccgcccccgtcccccgggtgccggggagcggtccccgggccgggccgcggtccctctgccgcgatcctttctggcgagtccccgtggccagtcggagagcgctccctgagccggtgcggcccgagaggtcgcgctggccggccttcggtccctcgtgtgtcccggtcgtaggaggggccggccgaaaatgcttccggctcccgctctggagacacgggccggcccctgcgtgtggccagggcggccgggagggctccccggcccggcgctgtccccgcgtgtgtccttgggttgaccagagggaccccgggcgctccgtgtgtggctgcgatggtggcgtttttggggacaggtgtccgtgtccgtgtcgcgcgtcgcctgggccggcggcgtggtcggtgacgcgacctcccggccccgggggaggtatatctttcgctccgagtcggcaattttgggccgccgggttatat

SEQ ID NO: 114957 - DNA, 1000 bp, Homo Sapiens
acggccgatatttatcagtgggaatggtaaacatttatcaagtgagcaaccaagttcagttacttaatctgagtctcattatgtcttctataaaatacacattaaaaatagaaagtaaaaacgtgggtaaagtacccagtggatggtcattactcagaaaaaggtattttaaaagtttctcccttattctttctgagtacaacctgtagtacttgaaccacttctctttcgtcccctaccacgctgttctgcaatctctttttacctgtctcactctcttcctgtactgtgtgcctcatcgggacttctaaaggcttacggcctaggtctttgtattccgtgtctctggcacgcgcctctgcacacagcaggcctgaaccaaaacttgtgagcaaataggatgcaagggggtgaaggaggtgggcgcgaaacgggttcgaggtcgcgcactccgccggtttctgccgccagcccaaccccgctgggtcgtacctaagagatcgccggtgtcagagcgcagcgggcaccttcacaagcatcttgagggacaagcagagtcgctcctcgcagggcgcgggctaagaagtgaggaacccaaggggctcccgtccaactaagaagcgaaatcccccacctccaggccttcagggctggttcttgggaaatcctaactctttcccttctaaccccttccttggcccttcttcctgcccgggaggatcaagggcgctgttttccagaagctgccgggtcggaaacggtgggggaacggggcggtacgcgtgggtggaggataggcggggagggggcagtccacgaacttttgtcattcagcctgggagaccacggtgacattcctgtctgcgctgcgggcaggccagcctctccggccctggactagggggcgccgccgagagaagccgccgcaggctgcagagtcgccgaccgcgctgttcgcaggcagaccccgggctgcccaccgcggcctagcgcgcgccgg

SEQ ID NO: 114958 - DNA, 1000 bp, Homo Sapiens
gtcagaggagctggcaatcctggggccgtggtgggggagatgagctgggagctcacagaagcagtgatggcagaagcctggtccaaaagtgagaccttttcctggtgacccgagctcgcaggccttcatctatgaaataaagggcttggctgtatctgcatggcccacactgatcttcagaacaccagtgtggcaaaaatggcgataaataggcccaatgaatatgcacaagtcagtttagaaaatgatgtatcatgtaaagtgaaagcagtgcaggctcctcagcgtcttcactggcccagtgtggatgctgacactggtgggaggggagctgtgcacatagcctttcccaagcatgttgaaccagagaccccatttgctcacacgatacctgctaggaactcgtggaccaagtggtcctcggagcacattttggaaacactcaggtaaatggtttctaacatcccttcctgtggcaatgccatttcaggtttttgagcacccacatcttccaggtttgggagcacagatcactgtccagtgagcacagaggaggcaccagaacctacacatagacactcattggggtgaaaaggctccagaagaggatgagcccagggctctcgaggcctcctagagagcaggtgcctatgtgggggaaggatgatggtaactcattcctttctccctcattgggcccaggggctgtctatactaagcttgactccctggccactcacctccccttcctcacctccctttatcctcactcttttgcctgcctagtgtcctggaaaacaattgaaacacagtctgctcccagtctactgggtccccagacccagccagaatcaggctcagcagcagtagtgatgacatggaagctgcagagctgggttgtcccaggtggcctagctcagatgccacgaggagggaactgttgcaggctaactgcagaggccagatggccacaccagagagcagggcaacttaaagagat

SEQ ID NO: 114959 - DNA, 1000 bp, Homo Sapiens
tataaataatacaaaggcatactatagtgtttagtagaatcttattcacccattctgatttggacaaatgttaaatgagacaaacaggagaaaagtttattgattaggtaaccgattaaaattttggtgaaaagcagaagtagtaagttccagaaacaagaaataaatcatgtatatcaacaagaggaatgaaggcattttgtgcaatcctggggaatagattttcttaggtatttcataaaatcattgactctagggcaggaaaaaaccctacacacataaacccacagcattctttttcctgcctccacagttgtaaaggcccgatgataaaacctgtttcctaagacttccccagaatgtgattcaacacattttctatttttttaaaaaaaaatttctgccacttaatttcatgtgataattttccccaatgactaaccaaatatgcttcactattatataaatcaattctttcttaatgccacaagtgaaagtgcaaaggtagctaatggttttcttctcataaaaatcacactttggctttttcctttcatatgtaattaatcatatttgtgacaatcttccaaacttacttgaaatttttctgaatccctttcaaatcaggacaagaactagaaatgtctatacaggtttaatatgaagtaaagaaaatgtttttcattttcttgatttatttctgaattcagcttgctcttcattagcgctacatagctgmcttattattcgtggtcccctatgaccccctgatcattttccctgagggtgcatatttattcactaactatgttacaatcatgtgatctgctggattttttctgatagtctactctagatttgttctaaattaataaatcccattatttttggcttctactacttctatttattaaattcattctgaatatgaagtttattttcaaaggaattcataattctttactccrrgcttgagtatwmtakrgysycwcmwaaayms

SEQ ID NO: 114960 - DNA, 1000 bp, Homo Sapiens
ttttccgtttttggaaagggacagtatctcctgaataagtgggaggaaaagtcctttaactcatcgctttcagcaccacctgtgctggccttcacgttctgtctgtgtaagtggagggtttccaggcagtgtaagccctaacctggactgaagtccttgaggggaaggggtctgtgatgtcctgccttgtgatctgtcccccattcccttcccctgcaggaactcagcgagatgctgtacacagaccggcccgactggcagagtgtgatgcagtacgtggcccaaatctacaagtactttgagacgtaaccctggagggcctggggcagccaccattgccacctactgcagcttttcctggaagcgcctgattactgtccactgaccctgctctgcccaccacccagctgcctagacttcaaagacaggctcaatccaagtggaccaacacccaaataagaaacagagtgggtcccacgatgtacctgtctgaaatgcaaatgcagctggactgtaaattggggactctttgatctcttgtgggatgcttctaaagagggcagcctccctccttccagaccaagaccccacacccaggcttgttttgctgattatattgggtggctgaacgaacacattatctgcagaaattcagacaaagaacatctccaaatcagtcttttggttgctgttgttaaaaatatcccggctttgcctttatgaaacctttgcccttggctgggtgtggtagctcgtggctgtaatcccagcactttaggaagccaaggcagtaggatcgtttgagcccaggagttcgaggctgcagtgagctatgagcataccactgcactccagcctgtgtgaaagagccagaccctgtctcaaaaaaatgataaaacccaaaactttgcccttgtgaaccctcccttcccccctccccccccaaaaaaaaacaacaaaacacaaaaaataaacatttgttccagggcaacctggaaac

SEQ ID NO: 114961 - DNA, 1000 bp, Homo Sapiens
ttgggcaaaatatataaatagcaatttttccaaagatatacaaatggccagcaggtatataaaaaatgctcaacatcactaattatcacagtaattaaaatcacaatgaggtatcaccttatcgtggtgtttggatacctattatcaaaaagtcaaaagataaaaagtgttagggtgtggaaaaagagaacacttgtgcactgttgctgaggatgtcaattggtgcagctattatgaaaaacagtatggaggttccttaaaattgttaaactagaactaccattaatcccaattaggagtatatagccaaaggacataaaatcaggatcatcaagggtatctgcattcctctgatacagataaactgagagacataatttcagctttaataaaaatgaaactctttcatccacaacaatattgataaatcttgaagacattatgctaagtgaaataagctgaatacagaaagacaactactgcatgatctcgtttgtatgtaaaatctaaaaaagtaaataaaaatttaaaaaagccatggaaacagtagaacgctggttcccatgggctaggaagtggggaaagtgggaagatttccatggaaggggcgcaccttcagttacaaggtgagtaactgctggggacctaacgtacagaatagtgactatagttaacaatactgtgtacttgaaatttgctgcaagagtagatctcaggtgctctcaccacacacagaggcgtattcactatgtgaggggatagacaggctaactagcttaactgaggtgatttaaagaccactgacatctcaaaacactctattgtacaccctaaaaatacacacttttcaatttgtcaatcatagctcaacgaatggagaaaaaaaataagagtaaccagcaggtcatagctcgccacacggaagctcgatttaaaacacgcttggccgctgttcgcagctcaactcgggaacggccggagcgcttctggcccctggact

SEQ ID NO: 114962 - DNA, 1000 bp, Homo Sapiens
tccactggtgacaggataaaatattccaatggtttttattgaagtacaatactgaattatgtttatggcatggtacctatatgtcacagaagtgatcccatcacttttaccttataggtgggcctcttgggaagaactggatcagggaagagtactttgttatcagcttttttgagactactgaacactgaaggagaaatccagatcgatggtgtgtcttgggattcaataactttgcaacagtggaggaaagcctttggagtgataccgcaggtgagcaaaaggacttagccagaaaaaaggcaactaaattatattttttactgctatttgatacttgtactcaagaaattcatattactctgcaaaatatatttgttatgcattgcggtcttttttctccagtgcagttttctcataggcagaaaagatgtctctaaaagtttggaattctcaaattctggttattgaaatgttcatagctttgatagtgtttttcagaagaccaaatttacagtgggagccttgggcttttgttttttaacagctcttttttgttcctgcttcagtggcctgacctccaagttagcaatcgccaggttgagaaatgctttgcgagacataacagatgctcctgaaataacaaacacttggaatcatgaggtagtggaattgaaaatagaaagtgtagtgattgttttttgttatttggatgggatgaacaatgtcagattagtctgtaactatttttttttaatgtcactctgatttggtcacaaaggatctctagtctcattgccttagtatcattctacgaattagaatgtgttactgtgtaagagcacttcttgtatatgagagaaatagcaacagttccagtttaaagtgatataaatggaaaccaagaaatgtctttactgggaccaaatctggacagcatttactgtatttttgctggtattttctctagtctttccgggtatattcacatttaatgatc

SEQ ID NO: 114963 - DNA, 1000 bp, Homo Sapiens
tctgaaaaatggggtgataatcttagaaggacttgcttcatgggatgtggtccataaaacttcctctgccccagttgtagggcagaagacaatttctgttactgtagtttggcctttttttgcagagattcagacatctgtttactgaccttagttaaattgtgacactatgcctaaaggagcctgcaagcttttatttttgctcactatgaagtcatcattcaattgtaaaatttcctttttaagtttcaggttgacttaatgtctgtcaaagcacagtctttggcaataacaaaacaaacatatgctgaatgaaaatgtttaagagatggatgactatttactactaaaagaagaaaaattggaagagaataaaatgaaaacatgcatctcctaaaccatatgtccaccccctaggttcaagcaattctcctgcctttgcctcccaagtagctcagactgcaggaatgcaccacccacacccggcaaatttttgaatatttaatagagacagggtttcaccacattggccaggctggtctcaatcttttgaccaaaatgatccaccagactcacctcatgagttgctgagattacaggcgcaatccactgtgcacggcttgcatgttttagtgattcatactaggtcagtattataaaactatgctttgtccttgtaaggggaggcttaaattgggaagatttataaaattaaaatttctggattaaactctgctaacctgcctctaggtggtatcaagacattttttgccctctacctgctgattgggtttggccagtggggacaccagcctacgcatacagtggcactggacttgctgctgtgtctcaaggccaagtgacgtcatagttcctgtgatgacatctttcaagttctctgcaccatccgcctctctccattgctgagaatttctccctcctttaaatctcactcccaaggagtgctaagagtgtcatcctgctactatccccgggaact

SEQ ID NO: 114964 - DNA, 1000 bp, Homo Sapiens
tgttcacactcctcatcaggtcactcttaattgtatgatgggtatgcaacctctgaatggcaaaaacaaggaatgactggtcatccttttgacatctggcctattcttgtctgagttattatgaggatacatgatgctggattaatgattaatgcagtgcagacagatcaaatcctctcctgtcgtgtgatagtgaaatgctctgcacagcaaaaggattattttctgtaaatggcagtgtttaagaatctttcctggccccctccaatccatgaggttaccttgcttctttacttgctccagaagaagatccttcatggctggctcttctgcaaggtcagagggaacttcaccttcaccattgacaatacctccactggctccgtgattaatgaaatacctgcatagacaagatccaggatcaatattatctgtcaatctaatataaattttacccatgcatctggcattcaatacacaacgaagtctctattttgagtttaaaatatggtctcagttaagatattccattattaatttctatgtgccttaaacttcaataattaagactgaaggcttccccatttcctgactagagcaatgccaacaaacaggatttctttcacactcatgttactaactcccatcctgtcactcccagtggatggcaagagaatttctaagttacataaagaaggcatgcagccttaaactttcccagtgccacattggagcttattaagtagtgctgtgggtgtgaaaatagaagaataaagtgtgcatttaaatttgcataaatctgcctaaattatgcctccataaaactctcctatcaaccagacatccacatgaaatcttcctctactctaagatgaaactaaattacttaagaagaaatattaaaacgttaaagaattaaattctaaatccaaatagaatacttgattctgaagaagaaaggtctgataattcaataccttacatagatcctttttgattt

SEQ ID NO: 114965 - DNA, 1000 bp, Homo Sapiens
aggttgcgtattggaagatcaagagcatcaagtcgctaaagaagaaagggaaacacctactactgatagtatgccgccattattacgacaagctatcgaattatttgatcaccaaggtgcagagccagccttcttattcggccttgaattgatcatatgcggattagaaaaacaacttaaatgtgaaagtgggtcttaaaagcagcataacctttttccgtgatggtaacttcactagtttaaaaggatctaggtgaagatcctttttgataatctcatgaccaaaatcccttaacgtgagttttcgttccactgagcgtcagaccccgtagaaaagatcaaaggatcttcttgagatcctttttttctgcgcgtaatctgctgcttgcaaacaaaaaaaccaccgctaccagcggtggtttgtttgccggatcaagagctaccaactctttttccgaaggtaactggcttcagcagagcgcagataccaaatactgtccttctagtgtagccgtagttaggccaccacttcaagaactctgtagcaccgcctacatacctcgctctgctaatcctgttaccagtggctgctgccagtggcgataagtcgtgtcttaccgggttggactcaagacgatagttaccggataaggcgcagcggtcgggctgaacggggggttcgtgcacacagcccagcttggagcgaacgacctacaccgaactgagatacctacagcgtgagctatgagaaagcgccacgcttcccgaagggagaaaggcggacaggtatccggtaagcggcagggtcggaacaggagagcgcacgagggagcttccagggggaaacgcctggtatctttatagtcctgtcgggtttcgccacctctgacttgagcgtcgatttttgtgatgctcgtcaggggggcggagcctatggaaaaacgccagcaacgcggcctttttacggttcctggccttttgctggccttttgctcacatg

SEQ ID NO: 114966 - DNA, 1000 bp, Homo Sapiens
cctacctctgttccatcagattactttccagaaaagctgttcttgtctgccaccttctcaccgtcactgggttttttaccattctaatatttgtcattctgccaggtgtgaaagcggtatcttgttttaatctgtgtgtccctgattcctggcaggtttgggcatttcttcatgtattagtcattttggcttcctcttctgagaactgcctgctcatttcctccagcctttcattttcagaacttttttaaaaatgggttttttatcttgttgatttgctagagttgctagtatagaaggaaatatctattgggtgataactttgttgatgatgtcctttgaggaacagaagtcttcaattaaataaaaagcagcacacatttcaactgtttccattttcccttaagaggatgacacagaagggaaatgcagttatgcctgcagacccttcatgagctgcatggatcctcctgactccttttctcagcctcttgactaactcaaagagccatttaaaaaaatgccagatataggccaggcgcagtgctcatgcttgtaatcaccagcactttgggaggctgaggcgggcagatcacgaggtcaagagattgagaccatcttggccaacatggtaaaaccccatctctactaaaaatacaaaaaaattagccaggcatggtggcgcgcacctgtagtcccagctactcgggaggctgaggcaggagaattgcttgaacctgggaggcggaggttgcagtgagctgagattgcgccactgcattccagcctgggtgacagagcgagactccgtctcaaaaacaaaaacaaaaacaaaaaaacagatattgcctaatccgtttttttttaatcctaattttcatgtaattacttccattcattttttttcaccttatgatttgtgcttttggggtcttgtttatttttttatttttttttaattattattttttgagacggagtctcgcgcagacccccaggc

SEQ ID NO: 114967 - DNA, 1000 bp, Homo Sapiens
ggctatttcagagaaccaatatgaaatgtttttgttagtacaaaataccattgccttaaaaggtttcaagcacattttcttttctatttgagaacttaaattgctgacttgtattcgttaagcaaccttagaaataaaccactgcttatatctgcatgaatattatgcatttcatgagtacagttagttgattagatatttcagggttttgcattttctatagacatggggacttttttaacatggtaacgtcttaggaaaaccattctctcaaggtattacaccatttccaattttatccaaatgaaaagcatatctgcttaaatttaggatgtctttgctgagaatatttggaggctcttgttaggaagaatcatggattcagtatttctaacctgattactgcctcagaggctgtcttgaagggaggcagtaggattcactgactacctttacccagatgagggatcaacaaatctcacacttaaactaaatgagttgacaggacaataggtgctaatctcatgtgccctaagatggacttatttagatagggatttttgcattggaaaagcagcacattctctgaccttgggtaccaagctatgatactaatttgagaatcacattctgatacgttaatatcagaaatcagtgagcaacctaattgctgtaagctgacatacatggaagccgaaatcaaaaggttgcttttgttagtttccctggagcatctatttttgtaatacattttgccagtgggactgaaaagctcaaaatgttttagacctaatatcatacattaattttctgctctgcagtgtcaatttgggcacagccagtttttacctctgtggcaccttctttataatttactgttacctattctgcctgacagattgattaagtaggttgataagatccatcgaagattgaatggctaggagtaattctgttctcgtataggcaacttaacttcactgtggaatccatttatctc

SEQ ID NO: 114968 - DNA, 1000 bp, Homo Sapiens
tgggagaatatttaatggaaaatcgcttggttaaaacctgacacttttaacaggtatgtgttgttttagtactttatgattgagcatagcatttaatccacacctagactaaatcaaattttttttgtcagtgaacagcgttctgagtgtggacgagtagccagtgaagataatgaatgtcgaatgtgactgactagcagcttcattttgaagtaggttgtatggcttaaaagttctgtagtatttgtactataatacttgccttttagcattaccttggtttgtagtcagtgtcacagaagtgcagtttaatgtattatgtgtacatatacaaggtctgattggtctaatcaatgatgaaacctatcccgaagctgataacctgaagaaaaataagtacggattcggcttctgagattaagaccagtaattcagaggtggagtaaattttgttgccgtgattttataacagttgtgttataaaatcctgggttttttttttttctgccaacagtgagggtcgctgtctgcccattgatagaggccagattgtcttggaagttccaaagttgcaacgatttctgtaagtggagtttttctgtttgcttagagatcagtgaatattgtgtccttggtcttatctgtgatgatcttatcccgaacctgaacttctgttgaaaaaaaaaaacttttacggatctggcttctgagatggaccgttataaggacaatatttttttttaatacttttaatgcttttacatatgttgtaatgtttgtagtcttgtaagaatctcgtgtttttccttttctagggctagtgccacgaggtttacttgactgttgtgtgaaaagctgataagaaaaccatccagaaaaaagctcttcgttttacaaacatgaaaataaaacatgtaattttggattatgttcctttttgttattacttttaaataggtcctgaaataacatggggagcattaaatggaaaatccactaa

SEQ ID NO: 114969 - DNA, 1000 bp, Homo Sapiens
tcctgaatacctgggattacaggcacccagcaccacacctggctaatttgtgtatttttagtagagacagggtttcatcatgttgcccaggctcatctctaactcttcaccccaagtgatccacccacctcagcctcccaaagtgttgggattacaggcgtgagtcaccacgcccagccccaaagtggtaaattttacattatgtaaatcttaccacaatttaaaaatccataaagcatgtattagaaacattcttggcatgtagaagatgttgtgtaactgcctgctgtctttaatgataagctctttaaaggaaacagtgattgagtgatatgacaaactgccaactatgggcacagagttacttttagggggacaaaaagatactctaaaattagattttgatgaaaattacataaccatgcgaatatactaaaaaaagttgaatgttacacttcaaatgggcttattggaaagtgtatgaaatacatctcaataaaacaattaaaagaaaaacattatataaggttactattaaataaatcatactaaaaagtactaagtactcaaaactcatgacttctaaattgttttactacattttactgttacctatgctcttgaagtcattgactgtatcctgtgtgtggtgaaaatactatataataacgtgttccccaactccactttcagtgatctcatatttataacttaaaattgctcagggtaccactatttacaccatggaaatagacattcgctacaaatccaggtgtcatttattgctttattgattgtctcgacttaagaaagtggggtagaaaatattaattcaggccaggcgcggtggctcacgcctgtaatcccagcactttgggaggcggagacaggcagatcaccggaggtcaggagttcaaaaccagcctggccaacacgggaaaatctcgcctctactaaaaaattcaaaaacaattagccaggcgtggtggtgggtgcctgt

SEQ ID NO: 114970 - DNA, 1000 bp, Homo Sapiens
ccatggctgcacattgcaatcaccgggggatatttacagacacctgggtcccacccctagagatttctagtgtaattgatctgggatgtggtttgggtgtagggatttccaagcgtcctaaatgattccaaagtgcagctaaggttgaaaacccatgcattagtaaatctcaagccccacagtaaatttttctatataaacttgtaaagatagaagttaaaggcttatatttatagaagaaaattatggctttcttaattcagcctattaaatcagaaaatttcattgaagacttgaattaaggttttgttgtttggctaactgaacaaggctagctgttgtttagaaatacagaagcattgtctcaaataaacataaaaatacagaagcattctgtttaataaaacactaggtgaaaattatatatatatgtgtgtgtgtgtatatatatatatatatatatacacacacacacacacacacacacacacacacacacatattttgagatggagtttcgatcttgttgcccaggctggagtgcaatggcactatctcggctcaccacagcttccaccttctgggttcaagcgattctcctgactcagcctcctgagtagctgggattacaggcatgcaccaccgcgtctggctaattttgtatttttagtagagacggggtttctccatgttggtcaggctggtctcgaactcccaacctcaggtgatccgcccaccttggcctcccaaagtgctgggattacaggcatgagccaccgcacccggcctgaaaattatattgactatgaatagagcattttggaaaatcttatgtgaccttgagactgtaatgtattttttaaattgggataaaatacatggggacagttagttactttgtaaggtaactaacaataaatctgtaagaatgctgaagggacttgggattagaaggaatatgaatttgtggtgttcaagtagattttagggtttgtgggaa

SEQ ID NO: 114971 - DNA, 1000 bp, Homo Sapiens
tgtctactcaaaatctggtctttacatgaggacttgttgtgattccaactgttcattgttctatctaaatgccaacataaccaaaaataactaaaaatggaaagaaagaaaaatatcccccgaaaacaatagtggttacattctaaggtttattttcttccagatcaatggaggttgtggctcttcaaagactttttaccctcctgcaatttgcagtattttttttcctcctacattgacttatttttatctatatctgtttctgaaataactatgaatttcagctcattgccagagtatggtctgtgtaagagaattaattttaacttgtggcaccttcaaattagccagaccacagaactgaccacctcagagtccaaagtaagcccagtcttctctcttccctcacagtctagaagagaactgggacaactttctcaccactcagtacagctctggccaagactgttgaaggttgtgtggaaatctgggaactacttagccactatgtgtcacctcctaaaataggttgaagttctgagttacgctcaaggaccccctacccctgtcaacacaaaaacaaatttattaaactattttaatacatttaaagccaaaaaagtaaataatacccctggagtaaaattcactggggacaaacctcagcttgtctgtcgcgaaaatcaaagaaagaattgcctgcttgctttgcccatttctctcttttttcctgggagctctaggctctcttgtggatcgctgtacccctttttgtcatccctaactaattgcatgtacaatcctccttctcccaaatatgcctgaaccttgttctgacaaactgtaatatgaatctcctgaatttggggttcattctctcttcctctgggaaggttccaggcgcatctggtccagcttaagacatgctgttggtttttgagaacaatcagcattttctttccattgttgcacacaatctggaaatttaaacagtatgatc

SEQ ID NO: 114972 - DNA, 1000 bp, Homo Sapiens
  misc_feature (376)..(376): n is a, c, g, or t
  misc_feature (400)..(400): n is a, c, g, or t
  misc_feature (438)..(438): n is a, c, g, or t
  misc_feature (764)..(764): n is a, c, g, or t
  misc_feature (824)..(824): n is a, c, g, or t
gtcacctgtgagctggagagaacccagatgttgtttattgaatctacaactctgaaagagaaatcaatgaagcaagtacaatgttaaccctaaattaataaaagagttaacatcccatggcacaggagcctgtatttctttccacggcacacaaaatgaaacatgagtgctgaccaagtgttaagtggacgttactttaactgtggtttcagatctgtttgatgtcattacgtggaaggtcttcttttgagctttagcaaatgttgatgtaaggaagcaatggaggaaatcccagatcccaaccccagaatgtcactgggcaaagagaccccttcagaccacgttagcctcactgggaggaggttctagagcctcnccagatgtaggggccccttccatntgtcacgggggagctccccagagcccaaactgcctctncaccggttgctgccaagtgtgattgaattaggttacagcttgtcttctatgcagtggctgaaatccctgaacccatggctgatgcactccttgggatgtttaccatggcctctctgtgaagtcagaagcttgtacttgctaggaatcctttggctgcaagtaaaggaacgcaccaactagaaatgacttaggtgaaaacaagagtgggtgaggggcgttgttttgagaatccagagtggattcagaatttcagggaagggtgcagcagagccttgggaaagctggagccggcattaaatgtcacctggaccctctctgtacggcancactgcccttctctccatggcgccttctccagttgatgggacaaatgacaagacctccancatcttccaggtaaaactggtacaaatccaacccctcaggccaactttctgggtctgtttcttggctcttcttttcccagggacaggacttggtcagcctgccttacatgggtactctccctgtgtcatcagctgtggctacaaggacaggcttgtgcagcagaatatggctgcag

SEQ ID NO: 114973 - DNA, 1000 bp, Homo Sapiens
cgctgtcgtgtccttctgctacctgcgcatctgggtgctggtgcttcaggcccgcaggaaagccaagccagagagcaggctgtgcctgaagcccagcgacttgcggagctttctaaccatgtttgtggtgtttgtgatctttgccatctgctgggctccacttaactgcatcggcctcgctgtggccatcaacccccaagaaatggctccccagatccctgaggggctatttgtcactagctacttactggcttatttcaacagctgcctgaatgccattgtctatgggctcttgaaccaaaacttccgcagggaatacaagaggatcctcttggccctttggaacccacggcactgcattcaagatgcttccaagggcagccacgcggaggggctgcagagcccagctccacccatcattggtgtgcagcaccaggcagatgctctctagcctggatctgaggcacaccagcagcatgacaaactcatgaaatggtgggagagagtctgctgcaagggtgagaccaggcagcctgctgggccacactgtcctgttggcatcacagccccaaggctgggggaacttcatgctgggacaagcagcccatcaacgccatgggttcaggctgatccaggagatgctcacaggccacaggacctggaaaacactcttggtggtgtcttggggatttggtgcacacaagaccaaggaaaggacagaatgaggaaaggcctggggcagaagagcccaactccttctcatagctgaccctcatcctcctgccttggcctcctggctgctttctccccttccccccagcatggcaggatctcttcctgttagcaaggatgaaagagagaggtcagtaggactggaacttggtaactacaagggcctcaggtggggcaggtgcagagggctctcccttctctcgtccgttccttaccttcgacagacagcgtcctctccttgcgatcgggggcgggactctagcctcga

SEQ ID NO: 114974 - DNA, 1000 bp, Homo Sapiens
acaaatcatatcctaactatatatgtatgtgaacaagtgagatgaccttttagagtccagcattgtttagtcatttgaccatcatacagtgagtgcctactcggtgccagcatgaggtcaggagttcaagaccagcctggccaacatggtgaaaccccgtctctactaaaaatacaaaaattagccaggcgtggtggtgggcacctgtaatcccagctactcgggaggctgaggcaggagaattgtttgaacctgggaagcaggggttgtggtgagccgagatcgcgccactgtgctccagcctggctgacaaaagcgagactccgtctcaaaaaaaaaaaaaaaaaaggccgggcacggtggctcatgcctgtaatctcagcacttcgggaggctgaggcaggcagatcataaggtcaggagttcaagaccagcctggccaatatggtgaaactccatctctactaaaaatacaaaaactagctgtgcatgacttggggcgcctatagtcccagctactcgggaggcagaggcagaattgcttgaacccgggaggcggagtttgcagtgagccaagatcgcaccactgcgctccagcctgggtgacagactgagatttcatctcaaaaaaaaaaaaggaaattatgaaattatgtgcataaatgtctgcttagggcagagaggtgggtaggaagtgccagttcccagggaggatgctgttgactccttatctacggccattctcctcccgcttctttcttgctaaggaaaccccaagtttgttcaaccctcaggtagcttagggctgtagaggaagtgggccctccctaggcctgggggtgaatctcttttggtctaagccagtcctagtcattccagtcccttcctagtaatttgagtggaaatgggcatataatgctattctggccaatgagagggcaagtcagctggaaaagagggctctgagaaaatgttcatagacaagaaagcaacatttctg

SEQ ID NO: 114975 - DNA, 1000 bp, Homo Sapiens
acagaaacatctgagatggtgcttttgactttatagtggaacaaataccacagagacacaaaattccaaattaaaagcctaatattttaggataaacatttccaacacaaaattcactgatgatttctctcccaaactgaaataggatgcaatttatgctgagatttcaattgaatttctttttctttataaatgtctagtgtttacccagttaacttgaagaaatctttatctctctaaaacaaaacttgtacaatattagtgcatcatgaaatcatttaggtagaattatccaagtgttaatgtttagaatatatacttttgggttaactttgagtatgttctatttaataagttaaaattctggacacattattaaaggcagaaatttctttcaaagagaagaaaagatacctacactatatctgacatttaaattactggtgtttgcttttatgtgcacactatttcttagaacactctacatgttcagccatcgagaagctctggcatcttgtcctcttggatttttatggagactccattatgtaggtatgattgaataatccactggctgatggtgatcaacgtcacctttatcacagggacagagttaggtgaatgagtgagtgatggttgagcacagccactgcacacagctagccatattggctatgatggatgagcagttccaggtgctggcacaggggccagctccctaaagttctttggctgaatttggcataccaaaagctgtttcctctccagggacggggaaatgcagtggaatccagaagcttagaaatgtcagaaattgcacagccccaaagagggtgtcacaacactgtcttgggaaaggtttaggtctgagttcctttagggccaaagctctgctgtcccttatttttgtggtaagcaacaatgtggcaacctgggggttgtgagtttcagtcctgtttgtgttactaatttttcagttttgccattcagtcctgagtcc

SEQ ID NO: 114976 - DNA, 1000 bp, Homo Sapiens
taaaaagacatggactacattctccagttaaaagatggatgctcttaatccagctatgtggtttttcaagagacacacacaaaacaaaatgacacagaagagttaggagggaaaatcatgggaaaagataaaccaggcacacagtagctcacaaaactcacaagtttgtggcattttactgtcaggcaaaattgatgttttgggaaaaagcattactagagatgttttaaagggcatgaaatactgattattgtaataacatgtagcacacgaagcacttacaatggcctgggggctgctctcaaccccttagttaaattaactccccattttacaggtgaaggaagccaagcacagaacagtcaggaagtattttctgaattttcatgtaagctgtcttttcaatcatctgccttatgatttgtgcttccgaatttttattttataactttttccctgctccaacatcaataagtgatcctcctttttttagcattaactttatagttttgcaattcacagatctataatctggctcaagtccacgcacatatgggataagtggtggaggcccagtttctattattccctgtatagtgagtcgattttgccaacaccatttataaacgatcttgtctcattgatttgtggtgtttcctttttatcttatattaagaatctgtatgtggtagcagtaaacattgttcatattcaccaatagccagtggttctctacttccaggagcacagagttactcctccctcaccccttggccttgtcattcgttctggccaatgatatttgagaagcgatgtatggaatttccaggtctaagcattcaatggccaggatccctctccactcctagcttccctgctataactgtgatgataaccctcttagttcatagttttctatccttgtaatttttcaacttgtgtcttcttttgttttaattataaagttgctcttggagtgctcgtttctttgtttgttcat

SEQ ID NO: 114977 - DNA, 1000 bp, Homo Sapiens
gcaatgtgctgtggattccattttcatcagttctgaaagaactgcaatgtgtaaattatcagtgaaatgcatgcatataagggctctatcattatcaaattgtaaggacaattgtacccttctatatctttgggcatgctagacacccccatgccttcattgagatcccattttccccctctcaagtggaaaataatcacatccagcaagctctctcattattgagaaataccatttggaaattgccactttttattcctaagcagcacctttcactgttcatgatgctaatgttccacaaaagcatgtgccattggcccactgaaggatagagggacccttttcaatctatatcagctgggctctgggactgaatctctcacctattcttgcagaaagacatactaattaaaccttgtcaaagtagtaagtcaaatggagcgtatgatgctttcagttgctcttagctcaaagaacaaagtcaagggattaacccttcagggatcaatcctgtcagggcttacctgtttcaacttcctcatttcctttctgcagcttttagcaggtattggcctattctaggaagtcaatggccataaccctgtttctaccaggtcaacaagacaatggaatgtatttagacagggcaacccccattcatcaagtccagcccattaagtataccctgctctctcccatcaagaaaacatttcgaagtgcaaaacaaatgagagtcataagaaaatgataattatcataagaataactttgaatccactgtgatttataaccaaaagcaaatgtttcacaaacctcagtattttaatttgttagcaaaacatttcttgcaaagaaggtcttaattacaaggcatggcagctgagtgcctgtagtccaggtaatttttaaagttcctttcagctctgcgactccatgaatagggaggcagtggagccctgcctttttgtaagaatatgctttggacaagctgtttcatctc

SEQ ID NO: 114978 - DNA, 1000 bp, Homo Sapiens
ggtctgaccccattgacgggttctcagtgcaaaaattacctcacacaaggaccatttggtctcttagcgggatattaattttctgcgtagtcattggccctcagggtggttgtcaggaggtctagtagtggtctggtgcttaatgaggggatcacaaggcatttttttttggttttgggactactactctccttaacacatgcccaccctgtattttaagaacagaagtttcgagttcttagtatgcaggtctgttagtgatcagcaacaggattgcatcatcaggaaaattctcttcatcttttcctcagaatagtaaagtcctaaagctttcccagtccctgtcaaccctttctggattcagacttggctgtggtgttagtgtgggaggctcagccatgtcctgaaaagtgctgccccaggctttgaatccagcttttctctcatttgctttgggatcttgtaggcgttctctgagctggctttcccatctgtaagtggggatgatgccaacttccaaagcctattagaattaaatgtggtgatttgttgtctaagatagggcctggcacagggtaggtacttaaatgggtgcttgctttcatatacaaccactcagtgatcccctgctctctcactggggaaggaactagggatttggtggagcctgaaacatgacagtttcccttcgtgtagttcaagccccatggaggcctcagacaggaggataagttatagcccaggaaggtaactgcagaagcacactgaagggggacatcttttccactttggagtgttggaagtttaggggaggaaatgaactggaatgtgaaaagtgactaggaatgagccaagcagagaaaggtggagaaatacacaacagcagtgtctttggctgcagtagcaggagtagccataggtaagagggggtggatgttgatgggaggcagatggagttcattagtagagactgtggttgagggtgctctggtgaactcta

SEQ ID NO: 114979 - DNA, 1000 bp, Homo Sapiens
  misc_feature (598)..(599): n is a, c, g, or t
tcttgtttacctcttgtttagtgggttttgaatcttccctattagttcttcatgtggttcatggtactgatttagaaatccagtgttttggggatttttttctctgggttcatgaatttagccctgttgtagcatgttaaaggtgacaaacagctgggcaaatttttaaaaagtaaaataaaattttatctataattagtattattacatttagcttttcattgaaccgaaagaaaaaaagtgatattggaccctggaaagattttgaaacttgagtggtttgataacccttctatgtattgtaggggagaaaaaaaaaaggtaattttaattccacttggtcctccctaaagcatcatttgagcaataaatgaatattgtcttaaaccaagggttaggaattttcctctctctctctcctcctctctctttctgttcaaagaacttcaaacatttggaaccacctggtattctgtattttcactggccatattggaagcagttctagttgcattgtattgagttgtgctggcagtagtttccatgcctgtcaatgtatcatagtccttgttgcccagataaataaatatttgatacnnttatgtcggatttttttattcagtggctgtctttacccaggcgtatttttgttcttggcagtattttttattcagtatggttcagtaattgagtttaactctcccttggcaattgctccttgcaataagacggctgaacccattgtttccctacagtataataaaaacttactttcaacttggagttcagaggcagggtatcatttagatattccactgtgtctgtattcagacaaatgacacaaataaaacccaatgtattcttttggataaaagattgtttgtactgctaaaggaatgacatactgtcttttccttactagaacattaattttattattaaaaataaagttttattttatttatgttgatcgagtcgacgccctatagtgagtcgtatt

SEQ ID NO: 114980 - DNA, 1000 bp, Homo Sapiens
acctggagttctgctggaacataagtcatatttggagtccaggctcttggcggaaaagtcgatggcagatggcacagcaacagtctccaccccgtggccctcctctttgtgctcgtgggctgcagcgcagcccaccagcccacccagcaccacctctgagaattattcttctaataacgttattcttccttttgcattcagatatgcttaagaaattgtacagttccaagtagctcacttagaacacccatttgcatgtactaacataatgtaaatattaggcagtacagcattgttatttgaatattcattgaaatgtttaagtcctaaacacttccaaagcagatttaaaaaattatttttctagaattgtaatgtgtaaataattccctggtatttcacgtagtccagaaacatgtccaagcagttgatgttgaatcaatcttgcgagcctccaaatcagtatcacaagctaactgtatttgtttaatttcttcttttcctgtatttgctcttacaaaaggggtattggtcagtaaaatggtattaacatttattaaatgtcaaaatataaagaaaggtagtaattccaaattattaacatctgtttttggttttatgtttcttctttttaggccaagacccatgttcttgacattgagcagcgactacaaggtgtaatcaagactcgaaatagagtgacaggactgccgttatctattgaaggacatgtgcattaccttatacaggaagctactgatgaaaacttactatgccagatgtatcttggttggactccatatatgtgaaatgaaattatgtaaaagaatatgttaataatctaaaagtaatgcatttggtatgaatctgtggttgtatctgttcaattctaaagtacaacataaatttacgttctcagcaactgttatttctctctgatcattaattatatgtaaaataatatacattcagttattaagaaataaactgctttcttaat

SEQ ID NO: 114981 - DNA, 1000 bp, Homo Sapiens
attccttgaaatcatttaccaacactgtatggagcattaggatttaaatatgaatttgtcttaaaggcaattcctttttgcttctgtattatctggaaaagcatgagagaggtgacacctcaacaaactgatcagagaaaataagcagttactaccctgataggcaccttcccaatcctgttgcttttgaccattgtctgtccaacggacacacctcaaacaaacaaaactaccaaatagatgacagatcagaataaaggtgagaggtctggtccccattgaaggctgctacagtcttcaaagaggtgaaggagttcataagagaacaacagtaggaaagttgagagccaagggtaggagagttgcccaaaagacttcccctactactttagggtactgaaaactcaaaggatcagctacagctttatctaagtatttactaaatgctacatgagggtgtccctgtccagctttctggcacatgagtcctgtgtggagagttacctcctcttccagggactgtgctgttgggaactttgggcaagtcacttacctctttgtgcctcaatttctgtataatatttctaagctacctcactgaggtggtatgaagattcactaatgtatgtagcgtgtttgtcaatcctccagtgaaaagcactatctagatcacattttggatcacattagccaaatgcagtaaatggccaaattagatgtgtgctgaagacaatcagtcactgggtctatattaaacagcaaccagagcaacaaatggcaaacaatttctattttcaagtttctttgcatatttttttggtgcaaaaccatttataaacttttttttctaacactagtgtctacagcagcattcaaaaaaattctgttaccttttctgtattaggatttaaagtctatttcttattgtatacctgattgaagctgttcttggagatgaatgttttaaatgtctatatccaaaaaataaacattttgatgt

SEQ ID NO: 114982 - DNA, 1000 bp, Homo Sapiens
actgacttacttacttacttaagtaagtcttgctctgtcgcccaggctggagtgcaatggtgtaatctcggctcactgcaacctccgcttcccgggttcaaacaattctcctgcctcagcctcctgagtagctggtgcccatcaccacacccagctaacttttgtatttttagtagagacggggtttcaccatgttggccaggctggtcttgaactcctgacctcgtgatccgcccgccctggccccccaaagtgctgggattacaagcatgagcccagcgcctggctgtatctttcattttacccaagtcactttacccaagtaagtaattaggggaaagcctgagtcttgtaccacctgttcatttggggaactgtgggaaacggagccaacggacctaagtgccctttgacagtgagtttcataccatttcagtagtgtatttctttcttaatctgaataaaccagaatgatactctcagcacagaagaataaagggagcgagtcattaacgttttctttttaaacctttatgatgacttccttatgaattactgaacgaacactggaatgggactcaggtatcctgaggacatctctcaactctggccttagttccccctctgtaaaattagggtgccaactaaatgatctacaaggtcccttccagcgccgccattctgtaattacatcatgtgtaactgtattaaacatacacaagtgactgccaggcatgggaatgtaacttccgagtaaatgctttggtttgttcagaatacactatgaacttctttccaaagacgggttgtggtaaatagtggatattttgattataagaaatagagtttccttgaagctttagctggagatacagcaatagtgtggtgttcctacaaatatcacagtgtattcaaacatatttttctatcaaaaatcatttttgtaaaagctgtgtgtttttatccaacttgtgataataaatgttctttattttagaat

SEQ ID NO: 114983 - DNA, 1000 bp, Homo Sapiens
ccccacggctgcccggctttgtgtctgcggcacagccagcagcacgctggggtcgactgccttcaccgtgtccacgcctgctccggcagtgggagctcaggtccgtgggggtgaccgcggggagctcagtgccaggctgtcgggggcgtcttggaaagcagaggtgtccccacaggatctctgagagtctgtgtggtccgtggccgcgctgggttccccggagcagcgcccgacgtcactgccgagaccttaagggaaggcgcgcgtccagtcctcgcactgctgcgtgttctggtcagaacggaagtggtagcctccactgggagcttctgtgctttgggagaatgtgtctaaactgtggtcctgtttgttctccagtcctgtgtggacaccacgacccagttgtaaacacaggtcccgtgcagctcgctttggggaaaaggcgcgcccgcccaggtcctctgtgtgtagctcacgcccggggctccgtcccgtcctgggtgggttttcacctgcaccgcaggcccctcccccgggagcattcgtggagccggcgtcctcagccaggagcgcgttgctggctcagcggctggagctcaaggtcggctcaggggactgtctcgtgctggaggttggcggccgagcagcctgtgtttcccggaaaacggcccagggcctgctccgcgctgctggccacgtcttcgccatcccctcgttgcaggttcgaggccgagctcagccccgtggagcagaagctgagtgcgctgcgctccccgctggcccagaggcccttcttcgaggcgccctcaccgctgggcgccgtggacctgtacgagtacgcgtgcggggacgaggacctggagccgctgtgacgccacccgcgagaacgccgccgcggggccgccccccacgtgccaccaccgggccaccgcggctcgtgtaaaaactgttgtggaaaatgagtgcgtttgtacggaatgataaacttttatttattcac

SEQ ID NO: 114984 - DNA, 1000 bp, Homo Sapiens
ggccattgcttctggggtcagcaaatttgcaacactttcactacatgaccggaaggagaggcaccacgagaaagatcacaagcgaaatcatagcatgggacacatttctagcaagagcagtgacaaactgaatctagttaccaaaaccaaaacggaccctgctaaaactctgggaacgcccctgtgtcctcgaatggaagatgttcccttgttagagccgctgatatgtaaaaagatagcacatgagagactgactgtactaatatttcttgaagactgtatagtcactgcttgtcaggagggatttatttgcacatggggaaggcctggtaaagtggtaagttttaatccttaatgctgcaccagatctagaacttgaataggtagtgacttttttctttttcgtgggaggggtggggtgtacaatgaatgtgaatgacacttcttattcttaatgtaaatctcaatgcatcagagccataattttggatactgcatgccatgtaattctgaatcatttgataatttaccttagagcatttaaaaaaatataatcaaactaattgccagccaagtcagtcatcctcctgggagtatatagagtcccaaggttagcgctcctgtattagactatttcaattttaggaaaatcatgaccatgtggggaaacaatgactttaaaatgctgaaattaaaatttatgctttaactggaatattttttgcttaactactcaattagaatattgtacacctgatcaatgtgtgttcagcacagatggccatgaattgtcatttatagtccaattttttatcttaatcataaaatgtttaggaatctatgaaatttaactttaggaacaaaacgtttagcagggttgattgatattatttttacattgttctggcaatccacagaaagagaagagccttaatttttaaaacccattttagtcattttatgacaattaaagttgtttaataaacatcttttttcaaag

SEQ ID NO: 114985 - DNA, 1000 bp, Homo Sapiens
gcacagcatggcccctccagcccacttcagggcactcttgtatcacccgggtaccgccacactggtcccccacccagccagcatctcccagcacagcccctctccctggggaaatgctctgggtagccagtctaaaggcagaggcacctaactgctccccgcagcccaccccacccaagattcagacacaagccaggaaaggacccaagagaaaatccttcaaggtggcctgaggtcccatccctccctcagacccatgtggtcccaggccaggctgcctgggacacggtaaataccactgtgtgcaaaaatcgaagtacaaaaccacaagactaaacaaaacaaacccagagagccaaacttgtagaggtgggcagtccagaaagcagggggcagccctccccctttccttctctccctgatcctcagaatatatattgttgtaataggaagcatttttgcattgttctcttgtgggtgtcactacagacatgttctggcgtgttctccgagggatggagcatcctgttatatatttgacttcaaattgagatgttggcttcattttttttttttacccaattaatctcccaatccctagcaactgtgactctgtatttagcacaagagaaagctgagaatgtgggtcttgcctccttccagaaatatgtctggctcatcaggacatttttttaaaacttcaaaatatttttaagatattttaaacttttataaaaaaaaaatcaaccaacaagagacttttctgaggaggaacatttgtatttgaacaagatccttggtgtgtagttcagtcttgcagtatacaagcttttgtgtataaatgttttatgatatgattccctgtattttgcaggggtttttttctcttttgctttttagataaatatgtatatcaatattttaaattcatctttgctttttttagaggagtttgtaatcaccttataacatgaaaataaacatttcctttttaacatcc

SEQ ID NO: 114986 - DNA, 1000 bp, Homo Sapiens
aaaatagcctgttggccagtgaataaggtaggaatccaggtggtcccctgagggtcttctgacaggctcctttatcaggctcttctcatggtatgagcaccgcagcttgctgacagtggcaacgttctcaagcttcacagactccgtcacttggcctggaggggaattctaggtgtccagccccaggacaggcattttggcaccatgattgagcacgatatggtgagccatcctcacaggattaagaagaattctggacagaaatatagttgtaagtaagcatcagtcagcctgcactttgacccacttccttgtaaccaacagtgacgtagcactaggtaacatttgcatccccgttgttcctatagatacaatttctgaccttagaatcacaaggcttttgtttaaaatagatgggatctctgacattagaatcataagatttttgtttaagacttgcttaagatgtttttcagatcctgaattccagcaaaacagccgacaccaaccagtttgaagacccccacagaggaatgtgatcagcatgaaaatacagcttcgtctccctctcccatgactccaccctgcacacttcgaccaatcaaccatctccacactccagtctccactcccaaacccttaaaaaccccagccccaaactcctcagggagatggatttgacgtttcctcccatttcctccttcggtggccctacgatgaaacctctttctctgctacaaccctatgcctcggcgtattcactttctggtcccatccagcgatggacccatcgtggttaccgtggctggccaagcctgctgtgcttcacagaccccactcaggatcacaccacttcgttccactgtttggagatgccatgtttgcttatcccttcatcagctgatgagcatttgtgctgttttcactttttggctattacgaaaatgttgctacgagcatccatgatattcgcccatttaaaaaagtgtttttcaccatt

SEQ ID NO: 114987 - DNA, 1000 bp, Homo Sapiens
atcttgctaataagccagtacattaaattttagtgaaagctgtttcatgtattttacagtaaatactgccatattaggtacctacaacaaatggtggtttttggaaacttttacggtgggtttttaaagttattaatagtccatcatttcatcatttgtgtttctgtatttattttgctaagaactaaataagattttgtacatcagattgtgtttgaaccgtaaggcacatctgctttatctaaaagaatcttaaggtggaaatagtgtaaaatttaaaattttttatatttctaataaactttttatatataaatgttacctaaagtggacacatgttacttctgaatttcacatgaaaggaaattaaagatggacaataattatctctcaatattttaagatttgttttactaattgaaaacagtatgtcagtaaatctttggccttagtgcttttttcccccttttacacattaataaaatgttttaaatatggtaatactcttaaaacggtagaatttgccacagttgtttaaagcatttttattttttctttgaattcttaattcatggtgaacagatgttgggttcttaaaatataaaaatgagaaaatatgtattaaaaatacttgatagagggttttctctttaatcacaacttaaaaaaagaaacctttaatacctctgcataagttctctgaaagaacttaaattcttagtttatatgaaaactgatatgtatgtctgtgtaacaaagcctgttgggtacaggtctacaaggagatactttgtttctaaaaaaggagttaaatcgtgtcacctgaatttttttttttttgagataagtggacattttggggattttggttaaaacatatttctctattctaaaaattacagaatatgtattcataaaagggaagaaattgttagaaaatttcctgtgtacgtagtttgtttttaaattaaagaatcttgtgacctggtgtaggacattt

SEQ ID NO: 114988 - DNA, 1000 bp, Homo Sapiens
aaggagtttgtggaagctgtcctggaactccggaaaaagaacgggcccttggaagtagctggagctgctgtcagcgcaggccatggcctgcctgccaagtttgtgatccactgtaatagtccagtttggggtgcagacaagtgtgaagaacttctggaaaagacagtgaaaaactgcttggccctggctgatgataagaagctgaaatccattgcatttccatccatcggcagcggcaggaacggttttccaaagcagacagcagctcagctgattctgaaggccatctccagttacttcgtgtctacaatgtcctcttccatcaaaacggtgtacttcgtgctttttgacagcgagagtataggcatctatgtgcaggaaatggccaagctggacgccaactaggctgagcaatgacagaaccagctgcaccatgtaccccaccttcagtttaaaagaaaaaaaaaatccccttcactcctactgggaggtgggacccctttcattttcagttttgctcatctagggaaaataaggctttggtttccagtttaattgtttttgaccttctaaaatgtttttatgttagcactgatagttggcattactgttgttaagcactgtgttccagaccgtgtctgacttagtgtaacctaggagattttatagttttattttaatgaaaccctgattgacgcacagcagtggggagaacagcgtcttttacctgtcaccgaagccaggaagccccgtttgtaagcgtgtgttgtggtgctttattgtacatcctccagtggcgttctttttactctaatgttcttttggtttcccccctcagaagaatcatgaatttgcaacagacctaatttttggttactttttgtcttattgatggatttgaaaatgaaagatttaataaggcaaagcagaatctgttgtccttaattatatttgcaatttggaatttgtgtgagttgatttagtaaaatgttaaaccgtt

SEQ ID NO: 114989 - DNA, 1000 bp, Homo Sapiens
aagggctccccaggcctgggatctgacaccatcaccagtaggagacctcagtgttttgggtctaggtgagagcaggcccctctccccacacctcgccccacagagctctgttcttagcctcctgtgctgcgtgtccatcatcagctgaccaagacacctgaggacacatcttggcacccagaggagcagcagcaacaggctggagggagagggaagcaagaccaagatgaggaggggggaaggctgggttttttggatctcagagattctcctctgtgggaaagaggttgagcttcctggtgtccctcagagtaagcctgaggagtcccagcttagggagtcactattggaggcagagaggcatgcaggcggggtcctaggagcccctgcttctccaggcctcttgcctttgagtctttgtggaatggatagcctcccactaggactgggaggagaataacccaggtcttaaggaccccaaagtcaggatgttgtttgatcttctcaaacatctagttccctgcttgatgggaggatcctaatgaaatacctgaaacatatattggcatttatcaatggctcaaatcttcatttatctctggccttaaccctggctcctgaggctgcggccagcagagcccaggccagggctctgttcttgccacacctgcttgatcctcagatgtggagggaggtaggcactgcctcagtcttcatccaaacacctttccctttgccctgagacctcagaatcttccctttaacccaagaccctgcctcttccactccacccttctccagggacccttagatcacatcactccacccctgccaggccccaggttaggaatagtggtgggaggaaggggaaagggctgggcctcaccgctcccagcaactgaaaggacaacactatctggagccacccactgaaagggctgcaggcatgggctgtacccaagctgatttctcatctggtcaataaagctgtttagaccag

SEQ ID NO: 114990 - DNA, 1000 bp, Homo Sapiens
agcccgtggagactgccagagatgtcctctttcggttacaggaccctgactgtggccctcttcaccctgatctgctgtccaggatcggatgagaaggtattcgaggtacacgtgaggccaaagaagctggcggttgagcccaaagggtccctcgaggtcaactgcagcaccacctgtaaccagcctgaagtgggtggtctggagacctctctagataagattctgctggacgaacaggctcagtggaaacattacttggtctcaaacatctcccatgacacggtcctccaatgccacttcacctgctccgggaagcaggagtcaatgaattccaacgtcagcgtgtaccagcctccaaggcaggtcatcctgacactgcaacccactttggtggctgtgggcaagtccttcaccattgagtgcagggtgcccaccgtggagcccctggacagcctcaccctcttcctgttccgtggcaatgagactctgcactatgagaccttcgggaaggcagcccctgctccgcaggaggccacagccacattcaacagcacggctgacagagaggatggccaccgcaacttctcctgcctggctgtgctggacttgatgtctcgcggtggcaacatctttcacaaacactcagccccgaagatgttggagatctatgagcctgtgtcggacagccagatggtcatcatagtcacggtggtgtcggtgttgctgtccctgttcgtgacatctgtcctgctctgcttcatcttcggccagcacttgcgccagcagcggatgggcacctacggggtgcgagcggcttggaggaggctgccccaggccttccggccatagcaaccatgagtggcatggccaccaccacggtggtcactggaactcagtgtgactcctcagggttgaggtccagccctggctgaaggactgtgacaggcagcagagacttgggacattgccttttctagcccgaatacaaacacctggactt

SEQ ID NO: 114991 - DNA, 1000 bp, Homo Sapiens
tttggcacatagttgctaagcattgcacatgaacagcaaaaatggtagaagctttagtagctctttctgtcatttctggctgttcctagttcatcctctccccaacccctttgctgtctgtagagagacagcaggtgccatgcttctgctctgactctggaaccagactgcccgagttgaaatcccagctctgctatttaccagcttgagcacctataccactgctctgtgcctcagttcccccatctgtaaaatgaggactgtaattgtaataacttcatagggttgtcacatgcatttaaggaaagtacctggaagaatgccagatgcatcacaagcacttactaagtgttagctgttgttatcattgtcattactaggcagacttcttggtggcttggtaatgctgctctgtatagtcagatattatttctgggacatctatggatatagtcttgattgttgtgaccatttgcaatgtgttatgtagaatctgccaataaaaaagaatactatgagcactcccttgggaccaagcactatgtaagcactgtaagggatccaaagacatagaagaccacatctttccctcaagcagtttatggtctagttgtagagatgaggcctgtgtagggaaagctaaatagcaatgcaagaactaatatagagtaaggccacaatctatgatatacataagaagcacatataggctgggcacagtggctcacacctgtagccccagcagtttgggaggctgagttgagaggaagatgtgagcacaagagttcaagaccagcctgagcaacacagcaagactctgtctctacaaaaaaattaaaaataaaaaaaactggctaggcatggtggtgtttgcctgaagtcccaactactcggaaggctgaagcaggaggattgcttgagcccaggagttcaaggctcctggtgagctatgatggtgccactgcattccagcctggcaacagagcaagacccctgtctc

SEQ ID NO: 114992 - DNA, 1000 bp, Homo Sapiens
agaccagaaaactttttttaaaagtaggtaaattaaaattaaaatcacgagtttgttcacatttgtcccataggttcctagtgcaaaaatgcagggagataaaagcaaacatttgaactcagtgaagtgagagtctttgggaactcctagatgttagaaatagcaccggggcatcaggtagccaacgttcaattcacttttcacgtttgtgtctttgtagctttagagctgatgagtctgattggtttggaagagagagttttaatttatgatgtcactgtgagaactgttgtgaaaattttgtaagaaaatacagtaatctgttgattttttcctgtagttttggctttcacatccctttggctgtgtttaagttcaagagcatgccaaggccatgagggtcctggcttgcacttcttgggaacagggcatgctagaggtgggtcatgaagctttcaaggtcactgttccagcccgaccctgcgcaatttaggcattgcctttatgtctctcctctctggaacttcatgtagcagcctaacaccggggccgagttgcctttactctattttctatgatgaatacttgtggagaaactgtgacaaatccattgatcctgatatttttattgttggagtcttgttgattctctatgaataatttctatttgattgtactgtgtagagttaatacccactagggatatgttaataaagctacaaatgcatagtgtaatatagaatagcaagatttttttgtgaacaatttatatagaagagtaagttgttttttaagtgttaggctcatttcttttagaaacttaaaatgttataaaagttttttaaacattcaatatttttaattataagagacatttgttactagagccaattatttcaggtgttctaattggagtgttgattttattacctcatatacctctagaatgccacgtgttctgttggggataaaattgcacaataaatgtcaagtctctgtt

SEQ ID NO: 114993 - DNA, 1000 bp, Homo Sapiens
acttcccaaaggctgaatcaccaaagaccatcacattgctggtgaaggcttcaacatatgaatttgagggacacgaatattcagtccataacatcaactaaaggaaccaagactctttgataaaatggctaaattcagggctggggcagagaaaatacatgagtgtggaacttcttgtgccagagagaaaaagtgcccaaagattgatgaggatgaatcattgaaatgacacacagattaaaagggttcccactggacaaatttgagcatcaaaataagtaatagtagtaattaattataacccatcagaagaaataaaccatgagctcatgtgaatatatgaatacaaacataaacaaattacaagcataatgaggaatgtgatatttatatggtttaaaggtacctctccaggccgggtgcagtaactctcacctgtaatcccagcactttgggaggccaaggcaggtagatcacctgaggtcaggcatttgagaccagcctgcacaacatggtgaaaccctgactctactaaaaatacataacgcgagccgggcgtggtggcacgtgtctataatctgccactgattaggtgtgtgattttcccaagcaggggataatagtagtacctatgtcaaaggctgttatgaggattaaatgagctaacacataatcgtgctttttttttttttttttttttttgagacagagtcttgcactgtcgcctgggctggagtgcaatggcacgatctcggcccactgcaacctctgcctcccaggttcaagtgattctcctgcctcagcctcctgagtagctgggattacaggctcctgccaccacacctggctattttcaatagagacggggtttcactatgttggccaggctagtctcaaaaacctgacctcgtgatccacccgctttggcctcccaaagtgctgggattacaggcatgagccactgcacccggctttttttttttttttttgagatggaatc

SEQ ID NO: 114994 - DNA, 1000 bp, Homo Sapiens
ttattctggcagtgctggcagctgattagatggtgcccacccagattgaggatggtctgcctttcccagtccactgactcaaatgttaaatctcctttggcagcaccctcacagatgtacccgggaacactttgcatccttctattcaatcaagttgatactcagtattaaccatcacagtccatttgggcaactataccaaattaccatagaccaggtgacttaaacagcagttatttctcacagttccggaggctgggaaatccaacatctaagtggtagcatatctggtgtctggtaaggcatgcttccagatcttaccagatgtcagtcttttgatgttctcacatggcagaaaaagaggatgcaaactctcaagtatatctttaagggcacaaattccattcatgagggctctaccctcatcacctaattacctcccaaaggccccaccttctgatactgtcactttggggatactgtctcccctttgaattctggggggaatacaaacattcagtttgtaacaatagccttatgatttagaggttacttgttcattcacctagacctcaaattgcattttacagctagtcaagtatatctttctctgatttgatagtgtgacctaaaaggggaccattgtttgaaatatcattagagttgcttattattattattattattattattattattattattattgagacagagtttcattctgctgcccaggctggagtgcagtggcatcatcttggctcattgcaacctctgccttctgggttcaagcgattctcctgcctcagcctcccgagtagctgggattacaggctcctgccaccacacccggctaatttttgtatttttagtggagacagggtttccaccatgttggccagcgtggtcttgaactcctgacctcaggtgattcaccagcctcggcctcccaaagtgctgggattacaggtgtgagccactgcacctggcctattattat

SEQ ID NO: 114995 - DNA, 1000 bp, Homo Sapiens
atgctattgctgaatatgaatagaaatacagggcatcatttccttgtctcattataagttagtaacaatatatagattaaatgtttacaatatagggaattgtaaataaatatatcagtttttttccccttcggtcttccacagcagtattattgtctttgtggagttgactaatgataatttaaaaatcctgtaatggatttctactaaaataaggtcatagtggcatataccaaataaaatcaaatacagaaatacaaatgagtttggatttattgaatactcattttcttaacaagtctttgattaagcctactactatctttttttttttaatgcttctaatagcttacattgtggtggtggtggtcatggtgttaggagtaatagtgataggagaatgcattcaattagagggagcattacattttttaaaatggagatgggagaaggcacttgacacatgggaaagtgtaagttatttgatatttttaaagtacattgttttcattttgggtggagaatgcataacaagctaagccccttatcataaacagttatgtgtgtgcaatgccaagaaattttgatattttgtatcccgtaggttcagttaacatttgagaggaggaatgacatgatcaggtgtatactttaggaaaatatctgtgaaaaatagatgagtagaaggaacaactagagacaaggggaaaacaagccttttataaagtccagaaaaaaaatgattaggcccgaataagaacagtggtaatggtaataaggaagcatggatttggaaaggatttatgagttaggatgaacaggagttgattattgattggatgtcagaaaaagttaaagatagctcccaggattttgatttaagagtttagttgtattatttatcaagatgggcaaggtacatagaggaaaaacaaaaaaaagcaggtggcaaaatgaagttagtcgtggactttatgagagtatgatgtgagaaacagga

SEQ ID NO: 114996 - DNA, 1000 bp, Homo Sapiens
ctataagatatatttcattttagacatgccttctaagttgttcacagatttttacctgctaaaacaatattatttccagtaaaacctctcctaacaggaaaagtggagttcaaaatatccaattggagaaaaattcagagttccttcattaaatataatttttttcatctagtatgtactatttcaagaagtgcaaaaagtaatgatagtgaatgtgataccatacttaactaaggtaatatatatccttagtttgctcaaaagagtcctggttattcctgttttctcagcttaatagtgcctcatcgtactctcaaaagtgttctaatttggaggataagttatatgatcatcctgtgtataattgtagactgtaccaagaagcaactaccttagctccactgccctttgagggatggaactggggtaagggcaggagccagttattattgccacagtgttttctaatgaaccatttggcctgtagaagaggaatagtattttttttaatagttgtatttgaatgattccagcttatcgtaaatactaaactgaatggcttttatatttttaactgctgttaaatgttattttagcatttattagttgtttattatttaattcttcaaatagtcatatgaaaacatatatttgataaaggtcaattgttagatgataatgtgccattcattatcataggaatgtccttgcccatatataaaacatgctggcatgtattttacttgttaataaagttgtatagatgtggaagtgtgaacctgtgatgcatccttttcaaaatcagtttaagattcgcatattatcatgactgtgacctcactaaactgtttatgtgacaaacctttcaagattggagatgaaaacaacacttgtgaaattaggttggggttgcaacatcttttaacttctcagttatttgtatgtcaggaaacagattgtggtttaattttaataaacaaaatatcatctttttgaaaat

SEQ ID NO: 114997 - DNA, 1000 bp, Homo Sapiens
ttctgtggtgtaaatacatcaatacgaaagaaaacttttatttcaaaacgccaatagtaaataagataaaatttatagagctcttcttagaatatcatgagattatttgcgattgcaataatttctgtttcctctttataatattaggtgcagtaatcaatatgaaataggggaaagtacaaggaaaaattttacctggaacaaaatttttatcaataggttatcactaagtataaattatggcatattattgttttcaaaagctctttgtaataaaataatatcctatgtggatgccaagatttataataaatattaataattgtacctgtaagtgtcatcattcatttttaaaaatgagataacatttatggttttagacctaaacaatatatattaaatcaagtggatattataagtaacagtgataagataaagtttaaaatatagaatttttaccaaagattgatttacccgatttggagtatttcttgcagtctttgatttcatctctagtgactgaagagttggttcaagttgttttgcttcaacttctttcttatattgtttctctttcctttctaattcttctctattttttttgtacagcatattaacatttgttttttcttcattttcttgttttaaggtgcatctgcagataaagacatttatcttaaaattcattttgttaaaaaataaggagttcatcctgttatctacctctgcagatgttgtttattatcctaacaaaatttccatgttctggattatttttcctttgcagttctcagatatttaatttctcacttcaacatcttcaaatgaatgcatatacttgaaaagtagtaaggaaagaatattctgctaaagtttttgttactagtcactctaatatacattataaaaaaggataccagagataattcagtaaagttacaggttcaaaattacctttttaaatcacacagtcataattactccctaattagaaaagatc

SEQ ID NO: 114998 - DNA, 1000 bp, Homo Sapiens
agcctgcagggggaggactgccgagactgttgcagcgtcttggggtcagcgccaacctgccggagagcagctgggtgcctgctggcaggcatgcacacactgctccagcaggccctccgtctgccccccaccagcctgaagcctgacaccttcagggacccagctccaggagctctgcatcccccaagacctggtcggggacttggccagcgtggtatttgggagccagcggccctccttgattctgtggcccagcagcagggggcctggctgccgcatgttgctgactttcggtggcgggtggatgtagcaatctccaccagtgccctggctcgctccctgcagccgagcgtcctgatgcagctgaagctttcagatgggtcagcataccgctttgaggtccccacagccaagttccaggagctgcggtacagcgtggccctggtcctaaaggagatggcagatctggagaagaggtgtgagcgcagactgcaggactgacccctcacttgaccagtcccattcagatccggcttggacaggcacctgagatggtgccaaagtgcagctgactcttcccacgacagccctgcccttcccatgaggcaggctcttcagtgagtgtttgaacgtaattatgtagttttctgtttaattgaaaaagagagctatgcctttttttctttttggaagtaaagcagctaaaaacatgtttctataggtgagtgttggacctcacaccctccccttccctgtacatttgtctttggtgctggacgtggccatgtgaggccaggttgaggccctttgtagacaacatacagttgctcagcctggccccatgtagccaggtgcttttgtagatcttgtgttttaggttgggcattttcactcttctgccttaaatccctgaccccatggagctgacattctagtgcggctgaggggaggggaaacattgtaaaataaatcataaaaattaaaaaaaaaaaaaaaaaaa

SEQ ID NO: 114999 - DNA, 1000 bp, Homo Sapiens
cacctcatatgcgaatccgacttagcaatattacacctaatattaagcggatatgtgataaaaagacacaaaaacactgttctcattaaaattggaggagtttgcatgtctcatgataaccaaatgtaagatgaaaataaaagatgatttacttcatctctggtatttgggggatttaaataaaatgattccatttttttatactatttagattttaagaaggctaaagaatcaaacgttttaaacatattgtgttattattggtatttctttacattgtaattttaaagagttccatgatcataactgggaaataatgatccccaagataaagtcccagtcccttaacatatctcttcaggatctaatccctaccaatctttccgtgtctactctgcagctctccaatcccatggaacttcttgccattccctaaacatatcacactgttttatcgtttcaggtctcaaaaagcgattctgtccccatcttactttctggtaggctcctatttgcttcaacactttgacttgtaggtactttcattctctgtatcttcctattttgatgctgtttcacacttgtatttaatgtttgtgtctgtctcaactgtgaactccttgatggtctcacggttcccaatgttttcagactaagctcttagagagtcttattgagtcttatccaaatctgtgtctccataatctggaaaaaggctttactaaattagatgctcagtaaaggaaaaacatgttggtgaaagtgaaccaacaaaaaatggaatgggggatttcctacattcattgattggtatggtagcaggtgtacacactgctaccctttgggttttttggctcacttactctattaactacagttcagtgtggccattatgcagaggtcayccaggaatgtcatasttttatgattcaggctgaactattgagggacaggggatgaastgtgaagagtattttcagatactttgtttttttctcag

SEQ ID NO: 115000 - DNA, 1000 bp, Homo Sapiens
agtgcaagaggattgtgccaagattagaaaacaaatatttgcaacttttgtaactgtcttctctaaaacttgaatgtggtgattctaaagtaaagaccgacacaaaattctttttctttagcagtcaggaaaaggcatgcatgaagtaatcagatcaggtgtggtttcagcataatggcctaatgctttcatgatctctttcaactggaaagcgttctagtcccactggacaccaaggaggaagaagggacggaaaatattaggcccataggtttatcttcctcagtagtccacgagatttgagcttatatgtagggagcaaaattgtttgtctaaaagcagttaataaatgccccaaaaaggctgggcgcagtgactcactcctgtaatcccagcactttgggagctcaagattggtggatcatgaggttaggagagcaagatcatcctggccaaacggtgaaaccccatctctatgaaaaatacaaaaattagctgggtgtggtagcgcgtgtttaatcccagctactggggaagctgaggcaggagaatggcttgaacccaggaggccaagattgcagtgagccaagattgcgccactgcactccagcctggtgacacagcgagactccgtctcaaaaaataaaataaataaaataaaataaaataaaataaaataaaataaaataaaataaaataaaataaaataaaaataaaatgaacgccccaaaaatattttgggcaaactattttgtgtttcttttctttatttatttatttcttttgagacaaaatcttgctctgttgccccggctggagtgcaatggcacaatcttggggctcgtatcctcaacctcctgggctcaagcaactcctgagtaactgggaccacagggatgtgccacaagttccggctgattgtgttagccaggatataaattgctgcctacatagagtttgtaggcatctccgtgacttgcgttatgcagatgtccttcga

SEQ ID NO: 115001 - DNA, 1000 bp, Homo Sapiens
gaagcccctactttcctgctgcttacgagccaggggccactctcggctgctatagccagtctaccatgtacctccacatgaccctccccacaacatggcatcttgattcaaagcccagagaaaaacatttactgcagcttcaaatctctctgatttcttctgtctctgacattgtagaaccttttttaaaagggctcacctgataaggtcaggccagcatgtgccagcagggagtagaaatcttggggccatctcagagttctgcttaccacagaaagcattcacccttatatttaactgtgaaatatctgatttgaaattatttacttcttttttccacagcctggtgagagtcaaagaggccccaggggaccatatccacctggaccgctggctcctcctcaaccttttggcccaggatttgttccaccacctcctcctccaccctatggtccagggagaatcccacctcctcctcccgcaccctatggtccagggatatttccaccaccccctcctcaaccctaaggtccaccactccatcctgatgccccaagttatccacagcctccttcccgaccaagaccctatccacctggacctccatttttccctgtaaattctccaactgatcctaccctccctactcctgcaccccaaatatgaacaactgcagcaggtgccaccaccaccacaaaagacaccactacccttgtaactactgcttctgctacccaaaatatgaattccaacactgcttccaagagacatttacataaaattgcttccatttttggatgagaatgaaaaattccaaaagtgctgagctttggggagaaataatcttagaaagaaattgtagaaaaaacccatgcagacataacatttataccaatgaggcaaaaataaagaattgagcaccaatatgaagtctccactgttgtcatcaaagccaacatttttcccccagttatgtcacctaaatgagtgaacatagatc

SEQ ID NO: 115002 - DNA, 1000 bp, Homo Sapiens
aatacagattgaataggacctactagagcagcatttatagagtttgatggcaaatagattaggcagaacttcatctaaaatattcttagtaaataatgttgacacgttttccataccttgtcagtttcattcaacaatttttaaatttttaacaaagctcttaggatttacacatttatatttaaacattgatatatagagtattgattgattgctcataagttaaattggtaaagttagagacaactattctaacacctcaccattgaaatttatatgccaccttgtctttcataaaagctgaaaattgttacctaaaatgaaaatcaacttcatgttttgaagatagttataaatattgttctttgttacaatttcgggcaccgcatattaaaacgtaactttattgttccaatatgtaacatggagggccaggtcataaataatgacattataatgggcttttgcactgttattatttttcctttggaatgtgaaggtctgaatgagggttttgattttgaatgtttcaatgtttttgagaagccttgcttacattttatggtgtagtcattggaaatggaaaaatggcattatatatattatatatataaatatatattatacatactctccttactttatttcagttaccatccccatagaatttgacaagaattgctatgactgaaaggttttcgagtcctaattaaaactttatttatggcagtattcataattagcctgaaatgcattctgtaggtaatctctgagtttctggaatattttcttagactttttggatgtgcagcagcttacatgtctgaagttacttgaaggcatcacttttaagaaagcttacagttgggccctgtaccatcccaagtcctttgtagctcctcttgaacatgtttgccatacttttaaaagggtagttgaataaatagcatcaccattctttgctgtggcacaggttataaacttaagtggagtttaccgg

SEQ ID NO: 115003 - DNA, 1000 bp, Homo Sapiens
ttttatacttaattatttgatttttagaactaatgtaaatagcattgtgttctgatttttcaaattccagtttgtcattgctagtgtatgagaaagcagttgatttttgtatattaaccttatattctgcaaccttgctatagttactcatttgtttcaggagttgttgactctttggattttctacatcgacaatcatgtcatcagtgaaaaaaaagtttttatttctttctcccaatctgtgtatcttttacttcccttccttgtcttttttgcattagctaggtctttcagtatgatgttgaaatgggttggtgagaagggatatccttgctttttgctaatgttgctggaaaagtcttgagtcttgtacaattaaatgttagctgtaggtttttgtagatgttctttatcaagttgaagaagttcccctctattcctagtttaattagagtttttatcgtgaatgggtgttgcgtattgtcaaatgtattttctatgttgatttatatgatcatgtgatttttcttcttaagcctgttaatatgctagattacgctaatttatttttgaatgttgaactagccttccataactgggataaatcccacttggtcatgatgtacatataattctttttatatattctcgtgctcaatttgctaatatgttcaggatttttgcatctatgttcatgggagatattggtctgtagtttagctttcttgtaatctctccattcagttttggtattagggtaatgaattaagaagggttccctttgcttctatcttctgaaagagattatagaaaactggtacaattttgtctttaaatgtttggtagaatacactagtgaatccatctgggtctagggctttctgtcttggaagtttatttattagtagtttagtttatttaatagatacatgtcttttcacatgatctgtttctccttgcatgagttttggtagattgtgtatttcaaggagaattgatc

SEQ ID NO: 115004 - DNA, 1000 bp, Homo Sapiens
acgaggccaccaggttggagggcctaccaccaagctggtacaaggtgttcgacccttcctgcgggctcccttactactggaatgcagacacagaccttgtatcctggctctccccacatgaccccaactccgtggttaccaaatcggccaagaagctcagaagcagtaatgcagatgctgaagaaaagttggaccggagccatgacaagtcggaccgcagccatgagaaactagacaggggccacgacaagtcagaccggggccacgacaagtctgacagggatcgagagcgtggctatgacaagcagtaagccgaaaggatgaagagttagaccccatggaccctagctcatactcagacgccccccggggcacgtggtcaacaggactccccaagcggaatgaggccaagactggcgctgacaccacagcagctgggcccctcttccagcagcggccgtatccatccccaggggctgtgctccgggccaatgcagaggcctcccgaaccaagcagcaggattgaagcttcaatcactagtgaattcgcggccgcctgcaggtcgaccatatgggagagctcccaacgcgttggatgcatagcttgagtattctatagtgtcacctaaatagcttggcgtaatcatggtcatagctgtttcctgtgtgaaattgttatccgctcacaattccacacaacatacgagccggaagcataaagtgtaaagcctggggtgcctaatgagtgagctaactcacattaattgcgttgcgctcactgcccgctttccagtcgggaaacctgtcgtgccagctgcattaatgaatcggccaacgcgcggggagaggcggtttgcgtattgggcgctcttccgcttcctcgctcactgactcgctgcgctcggtcgttcggctgcggcgagcggtatcagctcactcaaaggcggtaatacggttatccacagaatcaggggataacgcaggaaagaacatgtgagca

SEQ ID NO: 115005 - DNA, 1000 bp, Homo Sapiens
cctccagcctcagtctcctgagtacctgggactataggctataggcgtgagaaaccacacctggctaatttttacttttttctgtgtagagatgaagtctcactctgttgcccaggctggtctcgaactcctgggctcaatggtccctcccactttggcccctccaagcgctggggctgcaggcatgagccgccatacccagcccagacaccttttctgaagggctcaccgccagcttggcccttccaggaagggccccatcgcacatgccagcgtgcaccaggcaggcagggcctgtcagattccactgagctgcgtgcttcctgctgggtggaggccttgttgtgaagcctgcagtttgggagtgcataattaacacgcctctaagtcaatgacacggaaggagaaaaacagtcaccacttggggctaacccagcgatggtaccggagccaaggcccagtgacagcccttccacagcttctgaccgaggagacgaagacagttttcagaactaggcaaacaaggacggaatccccacccaccaggcacatctattcttaatgccacaagcaaacaaaccccgtcctgtcccaagagctcataaaatacacattagtcactgcagtccccggagaggctcatggcctgctgagaggccgagaggagcccagacacacatgaacgtgagctgctctcacagcctgaatccaccccccaccagctgttcctgcacctgcacgaccggccctcagacttggcaagaccagcggttcctttgcaaggtgagccctggcaggagcccagaagaggtgaggagggaggcagtgatgagacccagatggggcagagggaggccccaggcacaggctgagctgggcgcaaattcatcctgggaccacagcaagtcacttctctgctgtgggctgtttcccccgctgtaaaagtaggctagtgcataggctaggcatggcaaacacatggcaaggaagccctgaagct

SEQ ID NO: 115006 - DNA, 1000 bp, Homo Sapiens
gatgatttcctgggttaacttccttctttccatccacccacccactggaatctctttccaaacatttttccattttcccacagatgggctttgattagctgtcctctctccatgcctgcaaagctccagatttttggggaaagctgtacccaactggactgcccagtgaactgggatcattgagtacagtcgagcacacgtgtgtgcatgggtcaaaggggtgtgttccttctcatcctagatgccttctctgtgccttccacagcctcctgcctgattacaccactgcccccgccccaccctcagccatcccaattcttcctggccagtgcgctccagccttatctaggaaaggaggagtgggtgtagccgtgcagcaagattggggcctcccccatcccagcttctccaccatcccagcaagtcaggatatcagacagtcctcccctgaccctcccccttgtagatatcaattcccaaacagagccaaatactctatatctatagtcacagccctgtacagcatttttcataagttatatagtaaatggtctgcatgatttgtgcttctagtgctctcatttggaaatgaggcaggcttcttctatgaaatgtaaagaaagaaaccactttgtatattttgtaataccacctctgtggccatgcctgccccgcccactctgtatatatgtaagttaaacccgggcaggggctgtggccgtctttgtactctggtgatttttaaaaattgaatctttgtacttgcattgattgtataataattttgagaccaggtctcgctgtgttgctcaggctggtctcaaactcctgagatcaagcaatccgcccacctcagcctcccaaagtgctgagatcacaggcgtgagccaccaccaggcctgattgtaatttttttttttttttttactggttatgggaagggagaaataaaatcatcaaaccccaaaaaaaaaaaaaaaaaaaaaaaaaaaaaaaaaaa

SEQ ID NO: 115007 - DNA, 1000 bp, Homo Sapiens
agtgatggaaatgctctgtaatctacactgttcagtacaggtagctacggagcatctgaaatatggctagaaactacatttttgttttgattaatttaaatagccatacagttgctaccatactggtcacggcagctgtagactgactgggtccatagttcatcacctcaaaattctttcaaaatttattatctctttctctccttacatgtttatttcccaggcctaccctggtgattagaacagctgaagggcctttcttgttaggctgtccatgccctaaggatgggttcctgtttatccttgccacgcagctgagcttactgcatgtttatatctcccaaggactgttctctgctcagaaatgccctgtcaagggtgtggcatcacgcagtttcatccaagttgtttcaggaattgctgacactgctgggtgcagttctatcccctaaagcctagggtgtggccctttaacttccccttcagtagaactgggaaaggcagtaccattcctagttatgagtgaagcatccactttcttttgtaacaatgaggaacagaaaggataagactgaagagtgatcttttgtccaactaaaccatttatctccttttgtaggtaaattcaaatcctgcccagttatagttttcagtcactggagaattccaggtaggagccctactttaggtgatcctaggaactcctatgttcagaaaagaattttcttcctactatataattacagtatttagctgtcaattttaagatgaatttggtagagccttatagtaaagtatgtatcttggtcacacacaaagcttggaaaaagtaaaagatgtctaaaccataatcttgtaactcataacatctgggctggggcccggggatctaattgtttagagagccccaaaagtggctcagatgtaaagccagggttaagaaccatctgccttggaagatttaagggaaacatataaacttgtacaaaggacacagaag

SEQ ID NO: 115008 - DNA, 1000 bp, Homo Sapiens
gcgcaccagtagtcccagttactcgggaggctgaggcacaagaatctcttgagttgaggaggccaaggttgcagtgagccaagattgtgccactgcactccagcctgggcaacagaagtgaaaccctatcttaaaaaaaaaaaaaaaaaaaaaaaaagtcttttttttttttcatctaatcaaatttattgtggcagaaatcagtacgaagttcgtaggacaggaggaaaccaatataaatatctcagcattgtaggaaatttaacccatggaaagcaggggtgaattaaagaccactttgaaggctgggaaaagcagataatttagatatagtcaaagtatgaaatcattgatagatccagaacaaggaaatgatgtatgtgtttacatattacatctactttattaacaattttccctctgttaaactaatatcgactaatagtagtctaggtaagtcaagttcaaattaagtggtaattgaaaaagtcttctttttaaaaaatttttaatggtagaggcagcagctacccagagtctacttattcttacttcacattgaattctaacaagtttggttatctgatttctgcttcttaacaaatcacaagtatcaaaagggtcttgcagaaggggtgaactacagaatgtgacagctgacagcaagtcaggggaacaaaaataaatttaaggtgaacattaaaggcatagcagcttgagacaatttataggattctgcatacaactgtctctgaggacatcactgtgatcaaattatacaagtgatgtttagtgatgaattggaatcaagataagtagtatgtgttattcaaaaaggcaggatatgtgttgcatttggtggtaacaatttccccttagctatttagttaaaagcttagtgcttaacatgttggaaaatttatatgtaaaatatattgacttactcgatgattggaggctttatcacaggaagttttcccattcaattgaaacatttttc

SEQ ID NO: 115009 - DNA, 1000 bp, Homo Sapiens
cccccactggagcgtgtactaccccaggacgcatgcagggcccccacaggagcgtgtcctatccccggaccggacgcatgcagggcccccacaggagcgtgtactaccccaggacgcatgcagggcccccacaggagcgtgtactaccccaggatgcatgcagggcccccacaggagcgtgtactaccccaggacgcatgcagggcccccatgcaggcagcctgcagaccaacactctgcctggccttgagccgtgacctccaggaagggaccccactggaattttatttctctcaggtgcgtgccacatcaataacaacagtttttatgtttgcgaatggctttttaaaatcatatttacctgtgaatcaaaacaaattcaagaatgcagtatccgcgagcctgcttgctgatattgcagtttttgtttacaagaataattagcaatactgagtgaaggatgttggccaaaagctgctttccatggcacactgccctctgccactgacaggaaagtggatgccatagtttgaattcatgcctcaagtcggtgggcctgcctacgtgctgcccgagggcaggggccgtgcagggccagtcatggctgtcccctgcaagtggacgtgggctccagggactggagtgtaatgctcggtgggagccgtcagcctgtgaactgccaggcagctgcagttagcacagaggatggcttccccattgccttctggggagggacacagaggacggcttccccatcgccttctggccgctgcagtcagcacagagagcggcttccccattgccttctggggagggacacagaggacagtttccccatcgccttctggttgttgaagacagcacagagagcggcttccccatcgccttctggggaggggctccgtgtagcaacccaggtgttgtccgtgtctgttgaccaatctctattcagcatcgtgtgggtccctaagcacaataaaagacatccacaatggaaaaa

SEQ ID NO: 115010 - DNA, 1000 bp, Homo Sapiens
aaatgttttaaatatttaggaagcttttaaaagacactaaattgtactctaaaagacactaaattgtactaattgtacaaaggtcaagccaattttatgaaacagtcctacagagtaatatatgtgatgcagtgtaagaaggaaaatactcatctctaacattatggtaataacatttagcctcttaggagttggagcagggggatgggtaattacagatttgcagactatagaaagagtttcatttttttgtgaccccacagagtctcaaatttttatttcactacctgctagagcctactgtgaaatcactgctccatatttgccagtggaggaaatgggcatagagtagagaatagcttcatatgtttacacgtttgcatagactacacacatgtcatgcgtttatggcaggtagctggtatttattccccaaagtaataatgttgaagtatgggtctcatcattcccatacacagaaacacaaaacactttgatcataaacttttttcttcagaagccaaactaacttgcagaataatagagccactggtttaatgtttcctcaagataggttttagtgtaagctagtattctgtgtgttcgtagaaatgattcaatacctgcagctggtgaattaggaattgtatttgttgccttttttatattagatgaggtgcaaaaattttaatgctagtcagtatgcaccaccacaggaaagttagatcccattagcacttgaaactacagctttggaaacttaggctaagttaatttggatttgttacttgattcacctactgacctttccttttgtttgaagtgcttatcagcataatgagctaagtgtcatgcatatttgtgaagaaacaccctttttggtcccttttgggacagagaggtactccttgatctttatgaatgacaggttactgttttgccttattgcttaacttaatgtagtgaaataaagcagacaaagcttgcaaaaaaaaaaaaa

SEQ ID NO: 115011 - DNA, 1000 bp, Homo Sapiens
caagtctaataaaaagatacggccttatttgttatttgtctgacaaccatccttacgatggtaatcctgtgagtgcctgatggacatctatctttgtgtttttctcaaaccatggaaggttgagaggaatatacagtatctgggggctgacttactctactagctaggagcatcacagcagagagataggacagagaccagagtcatgccagcttggggtcttgggaagagaggcagatggttactctgttctggaatgggactctgcagctctatgcagtggccaacattctgagcactttgtgcaaatgcttgtagagctcaagaacgtctccatccagaaccccttccccatctgcagagaccatgtccaggcctttcttgtgtctgcagaggtgaagtgcacatgtggaaagggatcaaatgtagcacagtgtaaagaaagacagcaacacaggtagagggacccagtgtgtgctgggaggtggctgtggaaggtaagtatagacctacatctctgttggggaggtggtcagggcagaatggcctgggtgtttagcagcttctaggggtgagggtggcaggaccccaaaaccaaggccctctgcatcgttgttgtaataatcagctctggcatattcagctgcaactgtccctgaagaagaggtttctgagctggctgaccccatgtaggagggtgttaccttgtagaaaaagctggagggacctggtgggacagtgcagtgaggcagggtagaaatggtcagttgtttagggccagtggccacataccaaaataccaccaatgtgcccagggccaaactgccttaattctgagtgctgtgtgttctgcaggtgacagtttcctgaggagaggggtgtatccaggcttacctcccagcaggagtggtaccatatggtgtttatgtactactctatagaactcttggcttgcacttctacagctctgtacatttataagaataaatgcaatcacact

SEQ ID NO: 115012 - DNA, 1000 bp, Homo Sapiens
gcatagtggcagaaattataaagaaggttgaaaggagcagggaaaagatccagaagcatgttagttcgacatcatcatcttttcttgaagtatgatgcatattgcattattttatttgcaaactaggaattgcagtctgaggatcatttagaagggcaagttcaagaggatatgaagatttgagaactttttaactattcattgactaaaaatgaacattaatgttaaagacttaagactttaacctgctggcagtcccaaatgaaattatgcaactttgatatcatattccttgatttaaattggcttttgtgattgagtgaaactttataaagcatatggtcagttatttaattaaaaaggcaaaacctgaaccaccttctgcacttaaagaagtctaacagtacaaatacactatctatcttagatagatatatttttttttatttttaaatattgtactatttatggtggtggggctttcttactaatacacaaataaatttaatcatttcaaaggcattctatttggtttagaagttgattcccaggagtgccatatttcagctactgtatttcctttttcttgtaatgtaagcagctcagataccatgtgctatcatttttgtatcaagttttttgcacaggatgtgaccactgtcagatcactgttcttttctttctttttgtgattgaaaagcctatactacaatttgaagtaaatttttgtttttcttagtaagtgtaaatggttgctttatttttattttaaaaaggtatgtctttggtttggcagaattcatgcagggctatcaagtggtgttctagggtaacagtgtccataattaacgcttagtcatagagtcaaaaacatttaagactgattgggttgaagtttataataaattatattaacatgtcttcctttttgaggtaaagatatatactttgtcaaatatcattttgtcatcctctaaatataaatccaaatacctcagct

SEQ ID NO: 115013 - DNA, 1000 bp, Homo Sapiens
ctatgcgaggccaagtctcccccacagggctgctttcaatggctaccatcatagtggaagtattgggcatttgttaaggactgtggtgtgctagatatagcacaaaacatctaaatcatggtcccctgcctttgtgagggcttcctggctacagatggcagctggctttctcaggggaaacttgggggtcatagagaaagctgaagaggggtgcttgcttctgtggatgacctcttcccacccagtgcagcgacactccccttttgtctatagctatccttagtcaagccagggctgcgggaccctaacccacacttccgctgtgtttctggatctctggtttgcaaggccagtggctctgtgggcaatacgtatgaaagaggactgctgttggaggaaagttccatttaggttgctggtgggaagttagtgcatttcataacaatttttttttttcaaactttctcttttttttttttttcctttaggccaagagaagccatagggatactgtgacctttgtctagagttgatgggggtgtgatttgtgaaataaaacaggaccgtactgcttggaagaaggaaacggaagctgacataatggggattaattagttgattgctgttgagatggtaacagatttgctcctaaaccattgagctagcgatttcagacctagcagggaaggtgaagatgaagaagcctttgttcaggtctctagatgtgtagggctgagggctttgccgccatgggatgtcaacagccataataataatttgcacttatatagcacctttcaaccaggcacctcaaagcggtttaaccacattaattaattaaagcccacaatcctcctggggagaggaggaggatgactaacaagatttgtaattacaggagggaacatttccgaataaagtattgtctaccagataaaaagagtaggtgtaaaggaattggggtctccaaatagtaaccgattcagaaatgaaatcatgg

SEQ ID NO: 115014 - DNA, 1000 bp, Homo Sapiens
cgagcgagtcatggccaacgcggggctgcagctgttgggcttcattctcgccttcctgggatggatcggcgccatcgtcagcactgccctgccccagtggaggatttactcctatgccggcgacaacatcgtgaccgcccaggccatgtacgaggggctgtggatgtcctgcgtgtcgcagagcaccgggcagatccagtgcaaagtctttgactccttgctgaatctgagcagcacattgcaagcaacccgtgccttgatggtggttggcatcctcctgggagtgatagcaatctttgtggccaccgttggcatgaagtgtatgaagtgcttggaagacgatgaggtgcagaagatgaggatggctgtcattgggggcgcgatatttcttcttgcaggtctggctattttagttgccacagcatggtatggcaatagaatcgttcaagaattctatgaccctatgaccccagtcaatgccaggtacgaatttggtcaggctctcttcactggctgggctgctgcttctctctgccttctgggaggtgccctactttgctgttcctgtccccgaaaaacaacctcttacccaacaccaaggccctatccaaaacctgcaccttccagcgggaaagactacgtgtgacacagaggcaaaaggagaaaatcatgttgaaacaaaccgaaaatggacattgagatactatcattaacattaggaccttagaattttgggtattgtaatctaaagtatgttattacaaaacaaacaaacaaacaaaaaacccatgtgttaaaatactcagtgctaaacatggcttaatcttattttatcttctttcctcaatataggagggaagatttttccatttgtattactgcttcccattgagtaatcatactcaaatgggggaaggggtgctccttaaatatatatagatatgtatatatacatgtttttctattaaaaatagccagtaaaaaaaaaaaaaaaaaaaaa

SEQ ID NO: 115015 - DNA, 1000 bp, Homo Sapiens
atatataatatatattacatatatgtcattatatatatgatatataatatgtgatatataatatatataatatatttcatatgtaatatattatatatgatatatattatatatgatataaattacatatatgatatatattatatattgtgtatgatatatgatatgtaatatatatgacatatataaaatatatatattacatatatattataagatatgtaatatattatattgtattatatatcataatatatattataattattatttaatttaatattattatatattatataatattatattctatataatatatatattatatgtttaatataatatataataatataatgtacttatattatgatatattatatatcatatatattatatactatatattatatataatataaactatatgttatatataatatatagtatatattatatactatatattatatatattatatattatatataatataaactatatgtattatatattatataatatataatgtatatagtatatattatatattattatataattatatataattgtataaatataattatatataattatataaatataattatatataattatacaatatatataattatatattttatattatattatatataatatatataatatcaggatgcaggatgtaaaaggaaatatctataatatatatattatatatattttatattatattatctataattaaatatatatatataaatatttgggggtgtcctatttcgaatctaataacttattttaagaagcacagcataataatatgtgggcttgggattcagtttttgaaacagaacaatgagccttcaatgaccttcctgtacatgtaaaagcacaactgtctgcatggcagcagttggacctcacaatgtggattgtgccttcaccgtggaatgtttataccctatcgccatggtgatgggattagggatc

SEQ ID NO: 115016 - DNA, 1000 bp, Homo Sapiens
tgacagtttatacacacatcagtcccttttcaaatgtcatttccattagtatcttacatcagaatcacaagtgaaatgaacatgctgtaacctagtattttaaaaggttatgttgaaggagtagagaggcttaaattaattttcccttttctaatccagtaagcctttactcaataggatttcctataattctatcttaatccatgtctctgtggatgaatcaaacagaccacaacatagaagagcctgccaaagtggcttcctgccagcagccctctctcctctttaagatagacttcagattaatgattgtacagtgatccaaatcaatgaagaaagcaaagaacagacaggtatctcattatcttctgcaaagatctatttgtttagccatgttcaaatattgccctaaaatggtaagttggttagcacatattaatcatttactagatctattcaattcctaaaattaacgtgaatttaatatgcagggggagttgcatggctgtttttgttgctgtagacttgatataggcagagaacaagcagaaaattatttagaatatccagtggaatccatcattatatttttgagactattaattagccaaagattgtaaaattattttctagcaataccagttaaatgaagtagaaaagttaaatgaaggctaaaagcccacacaatgctatcatgctctaagtattgttctcaattattggaagtacatatattatagaagctcagtatgtatttcctaatgaactgcttcatgtgaattatttcatgccataatcttatcctttcctatactttggcaactgttgagaggctagaaaagactgtattatttattctgaggccaaaatataatcatacttgggtaaaagatactagatgttcatccactgaacatttattacagcaaattttcataatccataacacttaggatgtttacatctaatttttatcttgattgaattcagcattaataaa

SEQ ID NO: 115017 - DNA, 1000 bp, Homo Sapiens
attcctactttcccatcttttggagtctccgtctttatgaacatgtgtagtcattatttagctctcacttataagagggaagatgaggtatttgattttatgtttcagagttatttcacttaggataatgtcttcccatcccattcatgttactgggaaagacataatttcattagtttttatggctacatagtattctatggtgtatgcatattttctttatccaccataaggataaatttaaccaaagaagtgaaagatttgtacactgaaaattataaaacattgttgaaataaattaaatgtctacataaataaaaagacatcctgggtcatgggcttgaagacctaatattgttaaggcaatcacaattccaaattttttctgaagattcaacataatctcatcaatatttcaactgcttcttttctcttttcaaaaatggacgagattattctaaaatttatatggaaattcgagggaccctgaatagtcaaaacaattttgaaaacaaaaaagaaagttgggagaatcccacatctcactttcaaatcttactacaaggctacattcattaagacagtgaggtagtggcataatgacacactcacagacccatgggatagaactgagagtccaaaactaaatccgtatgtccatagtcaactgattcccacagagtaccaaggccatgcaatggaaaaacaaataatattttcaacaaatagtgctggaacaaatgaatagccacctgcagaaaaaagaaattggacccctgcttcctaccatacaaaagaattaactcaaaatggatcaaagagctaaatatatagtgttccataacactatcagaagaaaacataggtgtaaatctgcaaagtcttggactagagaatagtttcttagatatggccactaaaagcataagtaataataacaaacagtgcataaatttgactataataagtttaaaacttttgtgctttaaatgacactatc

SEQ ID NO: 115018 - DNA, 1000 bp, Homo Sapiens
tcttcttataaaaataacagttagattgaattaggaccctctctgaaagcctatttaacctaattacctctttaaaggtcctgtctctcacattcataggatactgggggtcagaacctcgacataggaattctaggaaacacaatccagcccataataacatccaaatattctaatcactcaagaagggctgatgccgtttgactccttcctctctttacctctttccattcaaataggttttgtacagattctactatgtcacctttttgtactctccatttctactctaatggagatttcttatttggactaattcctacagcatgttaacaaactctccaatactgccttacactttgccaatagatctgtctaaaagtttgcagtgataattctatataaactcaaagaccttcagtgactattacattattttctaatgattgcctaataattacttaaactgctttttaaaaatgtcttttaaggcctattctcatctctttcctaagcctctaatgttatgtcccatgatttccctgtagagactttagtcttagaacagtgtgttcatactgtgcagaaataattattggcgaatcatgacactaattttggccagcatttacgaatagaatagaatagaatagaatagaatagaatagaatagaatagaatagaatagaatagaatagaatagaatagaatagaatggatcagagtaatattaaagagtatctagatattcatccacattataaagttttagttcaggcctctttttcttctccatcaagttattccttgaggcttccctgaactttttattttatgcctttctctgaatattttccagacattattaccttataggtaattagattgtacaacacatgaatataaattacatttattttcccaagcaataactgaattctgtgcacagaagtccttattttctgaaatctttcctctgactcttgactcacaggtgggt

SEQ ID NO: 115019 - DNA, 1000 bp, Homo Sapiens
tcaagatattctttctaaggtgaaggataagttgctgcatttgacccctcctacaaccaagaaagaggcacaatacctagtgcgccaatttggattttggaggcaatacattcctcatttgagtgtgttactccagcccatttattgagtgactcaaaaggctgccagttttgagtggagtccagaacaggaaaaggctctgcaacaggtccaggctgttgtgcaagctgctctgccacttgggccatatgacccagcagatccagtgttgcttgagatgtcagtggcagacagggatgctgtttggatcctttggcaggcccccataagtgaatcacagtggaggcctccaggattttggagcaaggccctgccatcttctgctgataactactctccttttgagagacagctcttggcctgctactggactttggtggaaactgaacgtttgactatgggtcatcaagtcaccataccacctgaactgcctatcatgaactgggtgttttctgacctatccagccctaaaatgtgtcatccacagcagcattccatcataaaatagaaatggtatatacatgattgggcttgagcaggtcctgaaggcacaagtaagttacacgaggaagttgttcaaatgcccatggtctccactcctgacactctgccttctctccccgatcctgcactgatggcctcatggggagttccctatgatcagttgacagaggaagggaagactagggcctggttcacagatggttctgaacaacatgtaggcaccacccgaaagtggacagctgtggcaatgtagcccctctctaggacatccctgaaggacagtggtgaagggaaatcttcccagtgggcagaacttcaaccagtgcacctggctgtgcgctttgcatggaaggagaaatgaccagatgtgcgactgcatactgatatatgagctgcggccaatcgtttgactggatgatgagggacttggaagaag

SEQ ID NO: 115020 - DNA, 1000 bp, Homo Sapiens
agtctatgataatttgttctagcagcctgaatagactaagacactagctcatgtaataatcaaatgaagtcagcaggaagctctgctccatgtagtcattcagggatgcagtgtcctgccatcttgtgatagcagcatgttctaaggcttcatcttcctctacattaagccagtgataggagcatgaagaactgcatgtgagaaggttccatgggccaagactcgaagttgtgtgcaacacttacctcccaattccattgacatgaattcaggcacatcaaaccccactgtactgatctgttctcacattactataaggaaatacccaagactgggtaatttataaaggaaagaggcttaattgacccacagttccacatggctggggaggcctcaggaaacttacaatcatggtggaaggcgaaggggaagcaaggcaccttcgtcacaaggtggcaggaagaagaataaccaatggagaaacttgccaaacataaaaccatcagatctcatgagaattcacccactatcacaagagcaacatggggagaccgccccataattcggtcacctctacctggtctctcccttgacatatggggattatggggatcacaattccaggtaagattttgggtggggacacagcaaaaccatatcacccaccatcccaccaccaccacctattggccactgcaaagaaatatggaaaatgtgtgcctagaaattagtggaaattagtctggtaaacaatcagctcatctcaagttccagccacagaacatcatagctctttctccctgcttatgtttcttcactctgctggatcaaatgagctaataactgaggaaataacaaaacaaagtattaaattctgactactttccaatggcctaaacaactcatagagtcttaattctttttgtgaaatttaaatcctgaaaatatttaggtaaatcaatttctcattctaataactatttcataataaattggctaa

SEQ ID NO: 115021 - DNA, 1000 bp, Homo Sapiens
tgtattagggttctccagagggacagaactaataggatatatgtatgtatgaaggggcgtttgttaaggagaattggctcacatgttcacaaggtgaaggcccattataggccacctgcaagctgaggaggaaggaagctagtagtggcccagtccgagtccaaaggcctcaaaagtagggaagccaacactgtagagccttcagtctgtggccaaaggcccaagagccctcggcaaaccgctggtgtaagtctgagagtccaaaggccaaagaacctggcgtctgatgtcaagggcaggaggcatccagcaggggagaaagatgaaagctggaagactcagcaagtcacctatcccacctttttcctcctgttttgttccagcctcgctggcagctgagtggatgatgcccacccatattgagggtgggtcttcctctcccagtccactgactcaaatgttagtcttctctagcaacgccctcactgacacacccagaaacaagactttacagccttcaatccaatcaagttgacatttaatattaactgtcacactgatgttttcatgtacagatgtaagaaacaatgcagagttccttttcactttgtccagtgtccgccattgataacattttgcaaaattgtagtatagtattacaaccaggatattgatacaatctcccatagcgttcagattgccacaattttgcttgtactagcatgtgtgtgtgcgggttaagttctatataattttatcccctgcgaaggtttgtgtatccaccaccatagttaagataacagccgggcccagtggctcatgcctgtaatcccagcactttgggagggcgaggcaggcagatcacctgaggtcaggagttcgagaccagcctggccaacatggtgaaaccacatctctactaaaaatacaaaaattagccaggcgtggtggcgggcacctgtaatcccagctactcgggagactgaggcaggagaatcac

SEQ ID NO: 115022 - DNA, 1000 bp, Homo Sapiens
ggctgtcaagggtctctatgtataagaaattcagcagtctctcttaatgtctgctgctttgagaagaagaagaaagtttggggctccagggagtgaaatcagagaacatgctcctctttgggcctggatactggtgagtcaaggtcaccatctcttttgtctatcttcttaaatttataatttctctcttttttcatattgcatgttaagtaaaagattcaatgtgcttggttgaccctgaaaagaaagagttgttgggagcaggctttgatttgactgatatgttaactcatgtgtacatgtcctattcatcttcacatcctcagttcctgtaatagtctttaggacatagtaagggctcagagaacatgagctggatgaatgattgaagctataggacagtcttggatctactcacttggttaaataaaaatccaggtagactgcagctccaactatcaagtgaccaatacctaggcaagggagaaaactctcagatatgattcctacttgggagccattcattcattcattaacaaatgctgaacttgcatgtactctaaggtaggctgtaggtgctgggtccctaggggcaggcaagagcatgagcccctcctgcaaggaactttggtgaagtggagaagacatatcttggacacataaagagaaaattataaactgtgatagatattatagttggataaaaagagcgcaggaaggacatagtatagattgggtttaagcatccacaagtgaagagatggagtggagctttgaacttgttcattgccctgcagtctgtcagggtgcttctccctgacacatgtccctcagaggaaggaccctgcacctggtcatcagctgcttgagtggcatcagaggctctgagttcgtgcaatgcagtgctcctctctgtgagcacgtggtctgttacccaacacactccactgggcgagtcatagggagtcctttctaacattgttaaagtcttagctactga

SEQ ID NO: 115023 - DNA, 1000 bp, Homo Sapiens
aaatatccaaactatgtcaacatggtgttgaatgaatggacagaataaaagcaaaataacatattagagagagaatttaaaaataaaaaaactgtatgtaacaacaacaacaacaacaaaaacaagtgaagtcaaaaatagtcaaaataccctccaggcaccagatcacagattgggacagaaaacagaaaggcacttcattaattttcaaggctttgcactcaaaactgctacataagcaatgcagtgacagattgcatacagaattcataaggaacctccaaggccatttgtgtgatcaggacagacaacctgggcatgaacttgaaggcacacatttttcgtcaaaaatgtgccaaaatgaaagcaacctcccaaaacaatttaagagaaacagtggcaagtgcaaagaaaactggacaggtatggtgaaccctactccttattcccaaagaagtataggaaagctgttgcagagccctgcatgctcaatttacaattcctggatcaacgtttttccaccctgttttcactgagccagggagccatccaatgcttcatcatcccagggaaaatgaacaaggccatcttattaattggactacatcaccctttttcctcttaaaacagggctcactgttagaaactcacactggattagcgagaaaatgctccaggcttcaacttagcacatcagaaagtcagagcttaactcctaatttaaaataaaccctgtatttttggttgttttcctttttgacattgcataaaatggattatgcaataaatagcagacagactattcacgttgcaccagtgcatattctaatgttctgcagcaacatctaatggtgtaaataagatgaaaaaactaacgatcctttatgaaagattttttttctttatggggcataatagcatgcacaaatggaccctgcagaacaatttgctttcattccttattttcgctcttatactagtaaatgtgggataaatgtat

SEQ ID NO: 115024 - DNA, 1000 bp, Homo Sapiens
gatgacgggggtggctggggaaagaggctgagtggtgtccacagaaagggtcatcctattcacttgattattaaaattctcctctggtgaggtcccccgttggtgagcactcacatgggatacaaatatcttcacaatttttgaccactcagagaggtccatccacatccctcttccccaaatttctttgtcaccaattttccaatcatgcttcttccaattccctgatgatccagccaaaccattggctacggcccatgaatcagtgtataatcacacagctggccatttctccttccatgcaaagtgcacaaccaggtgcactgctcgaagttctgcccactgggaagatttcccttcactgctgtccttcatggatgccctagaaaggggctgtagtgctgcagctgtccactttcgggtggtgcctgcatatcatgcagaaccatctgtgaaccaagtcctagtcttctcttcctctgtcagctgatcatagggaactccccacgaagccatcagtgcaggctaagggagagaaggcagggtggcaggagtggagaccagggcatttgaaccacttcctcatgtaacttacttgtgccttcaggatctgctcgagcccaatcacgtatataccacttccatttgatgatggaatgctgctgtgcatgacccactttatggctagatgggtcagaaagtacccagttcatgatagttcaggtcgcatggtgacttgaaacattcagtttccaccaaagcccagtaacaggccaagagctctctctcagaaggagagtagttatctgaagaagatggcagggccttgctccaatattctagaggcctccactgtgattcacctatggaggcctgccaacagctccaatcagcatccctatctgccactgacacctcaagcaccattggatctgctgggtcgtatggcccaagtggccaagcagcttgcacagcagcctggacctgttgcagagccttc

SEQ ID NO: 115025 - DNA, 1000 bp, Homo Sapiens
tcccctccccgcttcacttcattaggcccccgccccgattcttgccccgcccgctcaatgtcccgcctacgaccccgcccactactagtgaccggcccgcccgttcgaggccccgcctcctccccgcccaatgctcggccccgccccgcgcgtcattgggccaggtccccgccccgcccccagccccacccccgcccctttgactggagttggctttttccagagaactttccgggctcggattggccgcgccggttgatgttccgccctttcattggcccgcggcgcccgctttcgcgagcctgcccttgggcgggggcggggccggcggcggcgcgcggcgctagattggttagcggcgcagaggggcgggcccgcgccgcgcgcagcgctcgggctggagcgcctgaagccgcgaccgccgcctcagccgcctcagccgcggtcgccgccgcttcggctgacttaggctccgccgccgcctcctcacccgcctcgccccgaccccgcccgggcctcccggcctctccccgccggcccgcgggctcgccgtccggcgcagggcaggtgagtgagcggtggcgggcggggtcggggtcgggcgcccttgcgggttacggggacccagtccccgacggaggccgagtgacggggcgaccccgggccgcggcaaacttcgcccgagccggggcgggcgggggtcccgggctgggtcgcgccgtccccgaccgccgccggcgcctgcggcggcccggggcagcgaggggactcgcgctccctcaaggtgcggtcgccaggcctggcccgcccgcctccgccccctccccaaattcggaagttgcggcgggaagccgagaacgtctcggatgtgggtcagaaaacgtctggactacttgaggcttcagtttcaaaacggcacaaatttcatctcttgattgagaagagatctggggaacaccccggagcggccgcggcggctggagggcggcggggcggggcg

SEQ ID NO: 115026 - DNA, 1000 bp, Homo Sapiens
agacgcacggcccccccgacccccgttctagaagaagtcgtgcgctgctggttctgaatccagcgagaaaccttcccgtgaggtctcacttgtccggtcccgtgccggggacgccctgcccttcgggggaggttgtgaaggtttctgactcccctcgaggcacaggagcggtttggggtctctcactccaccccctccccaccgtccccaccgagggacgtcctgctgccttttcccgggagagcctctccgggcccggggctctgtgctgcaggcgctgggctggccgggagggcaggcccagcagagactcggggaatggggcgagagcttgaaggcccctctcctccatcttcggccagactgccccgtggacctgttctttgtgctggacacctctgagagcgtggccctgaggctgaagccctacggggccctcgtggacaaagtcaagtccttcaccaagcgcttcatcgacaacctgagggacaggtaggagggacgccccgtgaccttcctcctgtgcttctgggcctcttggagggaggggtgggggcccaggggaacacgggtgcgacggcctcaacctcctaaggttgggcgagcgttgccctgaccggggcccctcccggcgccctccagagtgaggccggggccctttccggcgccctccagagtgagctggtctgagcctctcccagcgccttccagagtgagctggtttgagaccctgctcgcgggggtggcacctgttcagcagggccgaggtgacagtgaggctgagatgtagggaagagaggctcccgcaggctgaccgagagggctcagcgcactggcccagacacgcagtcctgcctggtgcgcgggagcccctcactaaccacctggaccctggtttgttccgtgggcagtgagagcctctacctgggtcctggatcccacgttctgaaggtccccgactcgggagccaggaggggtgtcgctctgcagccccagggcc

SEQ ID NO: 115027 - DNA, 1000 bp, Homo Sapiens
cacatgtatgtttattgcggcactattcacaatagcaaagacttggaaccaacccaaatgtccaacaatgatagactggattaagaaaatgtggcacatatacaccatggaatactaggcagccataaaaaaggatgagttcatgtcctttgtaggtacatggatgaagttggaaaccatcattgcaatctctttcatgcctactttcccaggacttgtggattaccgtataaggaatttgtctcctccaatgatgctgctttcaaagagttaaggaagggtccagagaattgctccatagcatggaattaaattaataatcaataacagtaagatctctagaaagtccccaaacatccattaactaagtaacatgcttgtaaacattcatgaatcaaaaaagaaatcagaagcatatttaaaaaatatttttgcctgaatgaaaatgaaaaatgtgtcagaatttatagaatgtcactaaaacagtgacatttaaattaaaggaaatttataacgctaaaggcctatgtgttatagaaaagaaggaagatctcaaatcaatgacatcagcttcttccttaataatctagagatgaaagagcaaattaaaaaactagtcatgagaaagaagataataaagatcaaaggagaatcaataaaatagaaaacagaagaaatcaatagatataatcactgcaaccaaatgcggttctttaagatcaatactattaataaacctctaaccagatttctcactaccaatgtttggaatgagagaggtgatagtattacaagtattaaaataatgagaagaaaatgttgtgaaaaaaatatgtcagtaaattcaatgacatatgaaaaggacagattccttgaaagacacacttacaaaagctcatgcaagaacaagtagttaacgtggttatttatgtattaaggaaattgaagttgtaattaagatcattcccacaaagaaaactccaggcttcacgatgaattc

SEQ ID NO: 115028 - DNA, 1000 bp, Homo Sapiens
agttatgaaggaatttcaatgtttcttggtgtctcttcaactctgagacttttgtgaaaataatatggagtcccagaagttttaaaatatttatttctttgtgaaatgagataattcctgactaagcaatttgggtggaattaaaaaacaatgagacatggttggaggaactaggtgtgggtatataagactttttatatttgcatcttgttcggtgcatagtttttacatccatgaatttagaaaatcattgcatttaatactgggaaataataaagctgaaaatatgtagcagcaaaagaaagaaagaaagaaaaattctgaaacccattaaaccctatcagcaaaaaaacttggcaagattttgaaaatttgtttatgatctttgaacttcaaaatgaatggcatgcgaggtaactgaataatgctttcaattgaggaataattataagcactggaactgcccaaacatattgataatactatatgctgaaaattttttttggatctattttgcatttacagttgttagtacaacaaaaccatatgcaagcctctgtctgacatccatccttctggggggcagaaatgcaacctactctccagccactttagacctatcgaatattattggttatagatttgttttaatgttcagaacttcacatttttttaaaaaaaatagaattttggtttacaatgattttcagatgacactaaagaacactttagtattgattaatcattttaaatttgtaaattgagatgaacacaattacaaaacaatacaaaattagtattttctgtttgggaaattatttttatctcctacattgttcttgtacagtgtattcaatataaacagacacagtgtttaagcttcagcttcaataatggctgatggtgatacatttgagtaattctattaccagttgaatgagggaagctgctgtgaatgcgttactgaagtaggatattagccaaaattgtgacttatggt

SEQ ID NO: 115029 - DNA, 1000 bp, Homo Sapiens
tccttacttcttgttttcttaatgattttgcataagacaatttatttaaaaatatttcatgatttttgacatacaaagtttcctgggttttataaatacataattttttttggtctcttgattcttttcagctctgttatttccaatgatttcgtattgtgtgtgatagaagcagaatagtaaacaaaagcttcatttctggaattagattgcctggattttgttatagttttcccacttactatctgagtaactttgagctcgtcccttccattggtttcttcatcccttataagggaaaatagaaccaaccttgtagagttgttgtcagaatttaagtaatatgggcaaagcacacagaacagtttctaaaccacattaaacaacaaatgattaacacttaggaatgacacctttagatagctccatgattagtacataagaatcatatcaaaagagtaggtgttacctttaaaatataaaatatgaaaagtaaacaagagaagaagcataggttttgtgaacaaatctgtgcttctgtaagaaagcagtaaatagaagaaaatacatcaggctttgccatcaaaattgatactaaacattttagctgtgcaaacttagaaaaataagctctcctctctcagcttcacttctgacctgtaagaccaaaagaatattttctgtatatcaggacaatgcttgttacatcgattaagaaaaaaagtgtcagttttctagtttctacttcttcaggatgtctgtaaattcaaaatggttgtccagctctgtgaagttaaaatttattcacaattctataaacagatttgtttttttgccatgtgtttctgcccaagactttttaagtcctcagaatgaatcctgacttgttattgtggccactttctatgttgatgtgcgcagcacacatgtccatcaaagtcttcctctgcagttagttaattcactggggcacaggctacccacaccaatggcacaaggc

SEQ ID NO: 115030 - DNA, 1000 bp, Homo Sapiens
tattatcttaggtattaaaatggcaaaggagaaaaacattcgttttctaatacttatatagtaatacaagtattacttggggaatgtgtttgggctttggaggaattttactattattgtacaatttttgtttgaattatatacgatggtttgaaaagaggtaatttagctattctgataaaatttaggttagggaatttgtggaggaaggaatacaaccagggaattagtttctataaggacatgggaaatgctagtgacttcacctgccaagggagtgctttaaagttgggatttataaaataaaaaaaaaaagaaaagaaaaaagtaatctttttatgatatcttcaaagagtgttgaacattctctgttttaactgtggagtacattttggtactttaaaggctggtagcatcatacaatggttctcagaatgggcagcttcttacagtcaccttggggatcctttaaaatctgatgcctgggctccccttatagattaggatttaattggtacaggatgcagacctgggcatgaatacatattgttaagctctccaggtgattccagtgcacaaccattgttaataataactaatccagacctctatagcaaattaaaatcaggatggttatttattggaaagagttaatattcaaataacagtgtctctatgtcacatcccagtttcttgccaattttcccttctagtaaatacctagagtattaatattgaaagaaattgttccttgttctcagtgaacctctaatgaaatgaatcagcattgaaaaccctaggctatttctaggaagagaaaatgaattttattattttgaaagttgttcaccaaatactgtcattttagcacttctgcagcctatttttaaaaataagtttatgacttggagtgggagggatggctgtacaccacacttacagatgcatttgtctgaggtgataggggagtcagcactaatttagtcagtgtggacaagtg

SEQ ID NO: 115031 - DNA, 1000 bp, Homo Sapiens
agccaaaaggaaaagtcaagctgggaattgcatcatgaaaacctgccttctgttttgctcctatataagatagctacaaagataagaaagctatacacctccatcacaatttgcccaccaggaaattccttgtgggccccaagttctttaccctaaaacagttctgttgaattttattctgatagtgtaaattgatagctcatcttcacaggtgtgggacaaaggtcagaacaaaaagtcatccctctgctcacctcaaccaaacgcatattatattgaagtatctgccttatgtttatcttatgtaaaaatgcagattcactgagtgcaagacaaatgcgtaagtgactattcctctatctcccctcacatgtaaaatgtgtattcagtgaatgctgatcaaagactcaaaagaatgcaaccgcttgcttcttatctacccacatttttttttctttcttcctttttcccccagtacaaactgttttccctttaaatattgaggtcctcagcccttcttccaaaaaagcacagaacacagatttctcctgtggttctgtgttctttttctgcgtacatccttaaccttggcagactaaccccttgaaatgattgagagttgcctgggtcattttctatgattaataataagtctttcaagcttagtgaagtacatgaataataagtaaaaagagtaaatttagaaaggtagtttgtaaggtcaaatgactacagagactaaaacctaatcagtgagaaatattttgtttcttaaatccttagcaaattaactcccattgttcatagtatgtactctgtatagtgtcagtcagggatacgtaaaccatataatcatatctaagaagaaaatattttgacttagatttgcttatgtaaacttccagcaataatttggatctttgacaaatattgtaatgttagtgatgattaggtataaaggtcattaggtgcccataaacaatgatgtaaaatagatgca

SEQ ID NO: 115032 - DNA, 1000 bp, Homo Sapiens
tggttcaggcagccgtagcaatctagtactaatactcagaaagctcaagggagtcagaaaataaagtcacaggtttttgcccagtttgtagacttatcccacttttcaatgcagaacacaggggctaaaggcaaagctgggtctctatgaggaaggaacttgcaatccacaaggctagaatgttctatagcaattcccctaatttctcaggggtatccatgaaccattacttgctcaaacataaattgggaaaggaaaacacccagatctttagaggatttggggacaaactgacattcacatcaagagatacaaaatactaccatgtcccctttcctatactgagtactaatgagcatgaggttcagagcatagtgggtcccttttatctacaaaactacctagtattcagggccttgttctctgaattataacagaaatggattaaggtgatatataaaaggttactcatatcaggctcttgagctgtaagggaatagttatgtattcgtccattctcgcattgctataaagaactacccgagactggatcatttataaagaaaataagcttaattggctcacagttctgcaggctgtataggaagcatggtgaggaggcctcagaaaacttacaatcatagcagaaggcaaagaggaagaagtcacatgttacattgccagagcaggaggaagagtgaggaagaggaggggctatacatttttaaacagccagatctcctgagaactcacgctcacaagaacagcaagggaggaaatctacccccatgatccagtcacctcctatcaggccccttctccaacaccagggattacaattcaacatgagatttgggcagggacacaaatccaaaccatataattccaccatggcccctccaaaatctcctatccttctcacatttcaaaatacaatcatgccttccaaacaatcctcaaaagtcttaactcatcccagcatttactcacatgtccacag

SEQ ID NO: 115033 - DNA, 1000 bp, Homo Sapiens
tatatctttgataaagagatatatacacacgtaaatctttgataaagatatatatacgcatatatatttgataaagatatatatacgcatatacatctttgataaagacatatgtaggcatatacgtcttagataaagacatatatgtaggcatatacgtcttagataaagacatatatgtaggcatatacgtcttagataaagacatatatgtaggcatatacgtcttaaagatatatatgtaggcatatacgtcttaaagatatatatgtaggcatatacgtcttaaagatatatatgtaggcatatacgtcttaaagatatatatgtaggcatatacgtcttaaagatatatatgtaggcatatacgtcttagataaagatatatatgtaggcatatacgtcttagataaagatatatatgtaggcatatacgtcttaaagatatatatgtaggcatatacgtcttagataaagatatatatgtaggcatatacgtcttaaagatatatatgtaggcatatacgtcttagataaagatatatatgtaggcatatacgtctttgataaagatatatatgtaggcatatatgtctttgataaagatatatatgtaggcatatatatctttctaagtggcattcatagcaaaaaaagatatatatatctttatatatatatatatatatatctttttttgctatgaatgccacttagaaatttattctattctctgagactctcagttcattgactttctcttctataaccactttgttttccactacaactctcatgtcttataataggcttagaacattgttttttaaactagggaattaaaaagaaacagtataaaatatttcctgaaggaacataacgtctaataatgaattatgccaatggataattggacagatcaagatggatcaaagacttaactctaagatataatagcataaaaattatagaagacaatattagagaaacccttctaaac

SEQ ID NO: 115034 - DNA, 1000 bp, Homo Sapiens
agagcaattaaccttcacccgacaagctctgtccaaccgttataaacattaaagagacagaatccttcccccctccttgtagactaaacaaccagatttgaaattccacgtaaacggcctctttctgcagatgtgcaccaacaacaacgtttagggggaaaaggtgggcaatggctctgttcataactctggtaacttttggccttggtgtgagtgggctgaggttattagcgtaaaaattaactggaggtatttccaataaaatcaccaggtttaggggactggacatagttgctttcatgcagaaacccatgtgtcctataggaacacaacttgatgcttgagagattcttttttcttttctttctttcctttttttttttttttttttttttgagacagagtctcactctgtcgcccaggctggattgcactggtgcgctcatggctcactgcaaccttgacctccccaggctcaggtaatcctcctacctccacctcccaagtagctgggaccgcaggcgaaggccaccatgccccactaatttttctgttttttgtagagacaaggtttcaccatgttggctaggttggtctcgctcaagcgatccacccaccttggcctcccaaaatgttgggatgacaggcgtgagtcactgcgcctggacttcttttttcaacagtagaaatatttgcactgggctagactctcactcactcccaattcctctcttccgacatttgcatgagtgatgctgcttgtggtcacagaagggagattttttttttaatctccgagaagttattggttttcatggggagcaaacctgtgatcttgcctttatcagcatttgccgtaaccagtcgagttaaccaagttgggccatgtgaaataccgagtggttagagaatctaccaggaaacctactgttaaaaataactttcacaacactgaagagaaatagctgaggtcacttaatttatcactcaggcatgagct

SEQ ID NO: 115035 - DNA, 1000 bp, Homo Sapiens
tctgtttctgtgttgaatttgtgtagcaacagagcaagtatttctcctgaaactcagactcactcaggccacctcagcccttctagttcctttcgtttattatagagtaacctacagcaggaataccgcgttcatttactgttaatagaagatccacaaaagattttgaaatcaaatacattctaaaactaggcaagacacgctgcaactccccttgtcctctgggttatgaggggtgagcgttggtttccgtgtgctcagatcccatgaatgagacctcacagggaagcgcccagtgactggcaggctccttaatgcctccaggtcaggctcaggaagtctctggatgcctgggtagagtctgggtcttctcagagcgggaggcacccagggcctgtggaggcctgagggctgctctggggttccagggccccagatagtggcttagcatcctggtgacacagaagggagagcactcaccgcggtcccacgtgtgtgttttgaagcctaagatgtttgcaatgactctcaacagtcgctttgaccttttcccctagatctttagcagttaaggagtttttttcaaagcccaagtataaccacattttgaaaccagaagactgtctctctgaaccgtgcactatattgcagttggacatgagaaccgtgcaaatttctgatctagaggtgagaaaaagatgaattgctccttacattcgataatcagtgaccacgaaacactcagaccagagcctggcttatcaaaaaccttcagtgagtgctgggggtgtgagtgaataactaattattttattatgcaaataagtgaatttataaaacgtttgctactgattttttccagtcttttttcttttttacgttctattttgattctttcatattgtacaccattttatgtctccagcgtcttcattttagatttatgtttaatattctcagcatcttcaaaatcaaataaattatatttcgtttcattatg

SEQ ID NO: 115036 - DNA, 1000 bp, Homo Sapiens
tccaagtatacaaatgatcactgatacaaataagtcactgatacacatactgggttcaaaataaactttttagaaagatccataaggatttgtttttggacagatgttaacagtgaaacaaggctgtatccaaagaattttggaacaaattaccataaagtatcgatggagtgttctctgattctcaaccatatccatgtagaacaattctcaaaataacagaaatggtttgtgggaagataaacattttggaaaaaccaagattaaaattgtcatgacatatagaaaatatataacaagttgaatgatgtcatctgcaaaagggactccacatccacctacatgtataaagaggctcttgagagaaatcttgaagaatcataggagttactctgagattacaatttatatattgtattttttgttggagaagggatcaacacctatgtctgtgtgctcattcctactgtgatgaagtttcaaagggaatagtttctgcaaatgtaaggactataggacagcatgacatattaacaaatatatatctattatagcatattaaaactgaaacactcaagtttttgcaagaactttaagagaaacatgtattttatgtcataaagtaaaatttgccaataccacaatagagagtaatgaaagtaaaattattcaacaacaagaaattattcctcttttttagatttagacaacaagatgtaatccttccttttaagcaaagtagtgtgttcttataagtacatataactaaaatattggccttacctctgttttctttttctttacctttattttctttagtcatataaaccttgaaaatatttgtttcaaatattcacaaactatagccaaggaatatcgaagtttgcttgcatataaacacttttagcacatgtttatgaattattaaatatcagaataaaatttgaaaacttttaaaagttacttgatcaaaaattattgaattcaagttgaaatgaca

SEQ ID NO: 115037 - DNA, 1000 bp, Homo Sapiens
aaaacacaacaaatcaaaatttgggggatgaagtgaaaccaatgtttagagggaaatttccttgaatacatatattagaatataagaaagatttaaagtgaattatctagacctctacctcaggaaactgagaaaagaagagcagattaagttcaaagtaagcagaagaaaacaaataataaacattgtagaagaagtaaatgcatttcaaaacaaaatcaatagagaaaattaaaactgaaagctggttcttttaaaagattaacgaaattgctaagtctatacctaagctaactcagaaaaataaaagaagacagagatagagaaagaaaatacacaagaatatcagaaataaagaaggaataactactatagacagcattgtcattcaaaggataataaagtaataccatgagcacctttatgccaataatttgataaccaaagtgaaatagagaaattcctcaaaaggcgcaatcagctaaatgtcacaaaggaagaagcaatctgaacagacctttatatccatcaaacaaattgaattaataatttatagtctccccagacagaaagcaccaagcccagacaagttcactggtgaattctaccaaacatttaaacattaaattatatcaattatctacatgttatttcaaaagatagaaatagagagaatactttctcattctatgaagccagcattactgaaatgccaaaaccagacaaagatatgacaagaaaaccacaggccaatatctttctaaacatagatgcaaacaccatttacaaaatattagcaagtcaaatccaacaatttataaataaactatatatcacacccaagtgggatttatcccaggtatgcaagtctggttcaacgttaaaaaatcaatgtaaatccaacacttcaagataataaagaaaaataatcataaaatcatattaatatatacataaattatttcacaaaatttgatacccattcataataaaagctttc

SEQ ID NO: 115038 - DNA, 1000 bp, Homo Sapiens
tgaatataaatgttacattattttctgaagtgtaatatttaccacccatattcactttctctttttttttagccaaatatagctgtcttttggtctttatagacctatacatccatccccctgaccatgaatgaataggcttggattcaatttcttcaacctagcaactttgcctgctcttctgtaaatttaaatttgactcctggctttgagattattgcacaagcctgacaatcaaataaaacatagtccttcttctataaagtgctattttcttacacatgtccaaacacaaacacccacaaacccttaaacatgcatgtattccaccaaattatatcatattagagttatctttctttagcaaaaagtctcttccaaaatatgactaccaaaattattaagtcttttataagatgaataaaatcagacagtttaatatttagagctgatgcctttaatctttagcattttgtattttttttcccttgacaatctaatttcttccccacagttcgccaaggctgtaaactataagtgaagtagaaaggtatgacaatcatattacaaaatattgaaaaggttaaagtagtaaagcacctttcccaggatatatgagacattaagattttggtattttatattagtgaagagattacattgaaaaaggtaaatggcacaacaaaaagtcattatttttaaacagaaagttcatgaggattctatatgataatctttcttttggtcttgaatcttaaataatatttttatagtaattttaacttaatttaatttaagcacagctagaatttatgtatgcatacatgtttataagttaaatatatatgtatttatctcacactttaatgtactgtctagactcactgtaatattgtcaattgtcaatacaatattctttatattaaaataagatttttgatatatttgggggttacattctgtatgatagaaccctaactggttttattgttaagagttc

SEQ ID NO: 115039 - DNA, 1000 bp, Homo Sapiens
cgcatcaaaagaaaagtatcaaaggaaattcaaacaaacaaaaaacataaatatgtaaaatttagtggaaatgataatacaacatctcaaaataagttggatataattaaagcattgctgagatcattgcacacactaacaaagaagaaaggtgtaaagtcgttaacctaagttctgacatcaggaaaatgaaaagaaagaagtaagtactttatggtgaaagactaaatgcctttccactaagaccaagaagaaagaaaggttctctccttttctgattcttgtttaatgagaaaacgcacacgcaaaaagaagtaaaaggcaaacagatgggaaataaaaataaaaataaaactttctttgaaaatgacataattctctgtgtagggagaatttacaaataatctcctagaactaatagggacattcagcaatgttgcaagacatatgatcaacaaatatgtcattcacattttaatataaatagtttacccttaaacagcacaggtttaaactgtgtgggtccacttatatgcagattttcttcaacctctgtcatccctgagctggcaagtttaaccccacctcttccaccgtcttctcagtttattcaatgtgaagactcaatgtgtagatgaatatctgtgaagatccacttccactaaatgaatagtaaatatattttattttccttatggcttccttaataacattttatttttgctagtcattttattgtaagaatacattatataatacatatacaaaatatgtaagaacggactatgttattggtaaggctgctggtcaacagtaggttattaatagttaagttttaggggagtcaaaagttgttgcatatagattttggaccgtgcaggggacagttctcttaactcctgcctcatttaagggtcgactatactaacaatgaatatgtgaagaacaaaaattaaaaactacaatgccattttcaattgctccaatgacaatgaaatcc

SEQ ID NO: 115040 - DNA, 1000 bp, Homo Sapiens
aattcatgagtctcattctcttctcattcaataggcagaattttaatgtgtttgatagaatatttaattcatatatttatttttgaatcaaatatacagctcttttatttctatgaatgatagtatgcaatagttttaattttatatttcacagcttttactcagtatccttgcaaaaatcaatccacgttgctggatgtgcactgctactacactgttagtagcaattctgggattatgccataatgtgcatcaaccatattgtatatattcagttcacagtaatggaagcatagatcgcatttagtacttaataatttcatatgctttcactctgaatgtatgtaaagttttctctgaacacataaaaagatgtttaacctccctaatcatctgggaaatgcaaatcaaaaacaccatgagatttacctcatatccactagaatgctactattaaaaacaaacaaacaaacaaacaaacaaacaaaaaacctctaaccaaaaccccgaaataagtattggtaaggatgtggaaaatttagaacccttgctcattgttggtagatataaaaaatagggcagccactatgaaaaacaatatggtggctcctcaaaaacctaaatgtagaattatcttatggttcaccaattccacttctgaaataaaacccaaagaattgaaagcagggactcaaatgggtatttgtacatccacattaatgtagcattattaataatagccaaaatgtagaagcaacccaccaattgttaattgacagatgaatgcatgcacaaaatatggtataacacttacaatgggatattaaaaggaaggaaatctgacatatacaaaatggatgaaccttaaggatagtgtgctcagtgaggtaagccagtcacaaaaaagacaattactcatacaatgttccttgagtcatcaaattcagagaaacagagagtagaatggtggttgccaggtgcccgaagggtaaaaataatg

SEQ ID NO: 115041 - DNA, 1000 bp, Homo Sapiens
ttttatttatgcatgtaaatatatatgtgtgtgtgtattacacataccatcatatgcctaatgaagatgatttaaaatttgctaaatgctgcatattgtgtaataagtgtggtaggaaacaatatttatagttttacaacatgaacagttataaaataaagcaattgatctccctggtataaaagcttacttttagatgtaatttttaaaataattaaatgcaacatttcagtacctccttcaagaagaaattatgtaaacccatagaagaaaatttgatggtttataggcaggagaatgaagctgtatgacacctgataggtggtgttgaatcctattgatacatttagtaactgattctacagatcaataatggcaataatcatggtgatttactgtgaagggaatatattttggtggtatttaggccttgactgacaatatttaaaagacgaattgaataatctgccatgttaagcttctcatgaagactttaatgtatctttgatttgccataagaagagtgaattccttattgtttaaaagcattgtgttgaatcagaatattttattagatctgtgcagtgtttatatgttaaaaaagaaaactgaagttaaattgcctttcagtgaagattcctaatattgatcttgagtcctttttttttttttttttgagacggagtctcgctgtgtctcccgggctggagtgcagtggtgtgatctcagctcactgcaagctccgcctcctgggttcatgccattctcctgcctcagcctcccgagtaggtgagactacaggtgcccgtaaatcactactggcaaatcacttcactttatttattggagactccattctctcatctattagatagagattgtgctgcctacttaacagatttgctgagtccaaggggaaaatataactagcgaattatctaaaagattgatatcatattacaaataaacagctaaaagctgaccttgattcctggattat

SEQ ID NO: 115042 - DNA, 1000 bp, Homo Sapiens
aggagtgcaaatcattggggtttagtttagcttggaagatgatcctactagaagagccagattgcatcacccaggtgcacaacagatgagattatgctatttaaggagtgcagactgttgagaacagagcaggaaaagaagttttcccatggcagaatgaaataggcaatctggtaaacaggagagaatggaacttttggggcaattacatgaaactaaaaaataacctctctgcaacatctagggaaaattggtggaaagatgatatgtaagagagaatacggaggaaacaaattttaacagcaaattattgaacaaaatctagaagctggaaggtaacagaatattttgaattattatctaccccagatgattcagtgtaatctttttgcaacaagcttctttgataatgatgttaatgaaaactatacctcaaatttgcttgaaagtcaccttttgaaggagagacaggggtgcagccattaaatggtgatcttgctggtctcacgagatctctattgcccagtaaagtcttcatgagtctggggcctgatcttcagctttttgggtgacttgactttgttaatttatctgaaaactatcaggcttaaaaaataatttatatcagtgtttcttagtatattattagaaccaccaagaaacttctccaaaataccaatgcctgagcctcattcctaaatattctgatttattttgtctgggatatgtttcaggcattgatagttactaaaaactccccaggtgatacttatgtacagccagtgctgagaaccactgatttatattaaccaagctcatatttttaagctacaacaataatattcacagcgactgcttgctgagtgccacaacacgatgttcactacagtaataggttattgacatttaattggagaggaagtgttattcctaatttatagattttagagataaagcatagttatagtatttgaacccaggtttgatttcaatcttggga

SEQ ID NO: 115043 - DNA, 1000 bp, Homo Sapiens
ttctgacccaaagaatcatatgggaaaagctccttgatattggccttagcaataatttttttttggatatcacaacaaaagctcagatgacaaaagctaaaattaacaaacggtaatacatctaactaaaaggtttctgtgtagcaaaaaagagaaagaaaaggcagcctactgattgggagaaaatatttgcacacaatatatctgattaggggttaatattcaaaagataagaaattcacataacccaatagccaaaaatacaaccagtttttaaaatggcaaagaacttgaatagacatttcttcaaataagacagaaaagttgccgatagatatatgaaaaagcactcaacatcactagttatttgggaaatgcaaaccaaaaccagaaaatatcaccccacacttgttagactggctattatcaaaaagaccagagataagtgttagaaagggtagacgtaaagaaaagggaaaacttgtacactattggtaacaatgtaaattggctcagccattatggaatgcagtgtggagattcctcacaaaagtaaaaatagatctactatatgacccagcaatccctgttctgcatatatatgcaaaagaaatgaaattagcacctcatagagatatctgcactcccatgctcattgcagcattattcacagcagccaaaatatggaaacaaccttagtgtcgattggtgaatgaatggataaagaaactgggagatatatagatatatacatgtagatgtgtacatagatacatatataaaattaaatcatatataatgaaatatagtaagtattattcagccttataacagatggcaatcctgccatttatgacaacatggatgagtctggacattatgctaagcaaaaaaactcagattcaaaaagaaaaatattacatgatctcacttatgtgtgaaatctaaatatatataatttatatatatttatatatcacatataaaaattatatatctt

SEQ ID NO: 115044 - DNA, 1000 bp, Homo Sapiens
actcatttattcactttccactgcccacctgtactgttagggtaaaccgggattctggcaggaaagatcagtttaaggctgtttagagccaaactccaatgcacttggatcatgggaactcatgttatgggcaagtcttgccttaaatccttgctgctgagacacctccttgctttgcagaacagcgcattcagggacagaaggggaaaaaggagccagacacagggaccaaggagacaaaggaaaaccccaagagtacaggatcatggatggccaagaagagaccctcaggactgcagagaggtccctgacgatgatgccagggaaactacttggtggacaaatggaaggccagtggtgacagtgtgagggaacacagagtgcaaaggctggaagatgcagtgggtctggggatatgtggctgtgagaagaagaaaagaatgacaacttgagagggtaacagggttatgacgaggtttttcttccccctagctagaagagacctatatatgcttcatggcagcaggaagaagtctgtgcaaggggagaatttggccacttaagggagggcattatatgggtgcaaggagtgggagactgccatcacccagggaagaggacagagtaggactacaataaaagttggttgatcgacagatagttgctcagtttgcgctggctggtaaacataatgctgtatggtattggggttaagcgtgcaggctctgagttctgcataatttggggcaagttgctgagatgtttatgaagtctccttttccctatatgtaaaatgggggcagttataatacatatctttgtggtaagaactgagagttaatacatgcaaataatttaaaataggttctggttcatagttaatgctcaaaatgttagactcagtaataaaaataatggccatctttgaggattaacgattgaaagctcaaggtcaagtctcattatacagcaacataaaagaagaaggtaaaggtgatta

SEQ ID NO: 115045 - DNA, 1000 bp, Homo Sapiens
atatcctggaaatcttgtcattcacagacaattgttatcttgctttgttccttctcaaaagatggtttataatcaagctatattaaagaatttaacaggcattctcaaatacaggtttttagtagctttgaagattgtaacattggaatagagaatgtatgggactcataatgagcttacatgttcacaaatatcaagcaaaacaagatttaactagacggacagcactcagaaggttaaagcaactttttgactcttgcttggaatattgctgatccttgttttatttttcagagtgaaggaaacttactttgaactatttatggcctttaataattgagtaaggtatactactgtaaacaaaatttggagtgtgtttgtttttctctgcctggttcctctagaatttggaaactatctgtgagtactcttaacttatggcaatatttgcatcagtgcaataagaatccatttttctttgtcaacaggacacaattgaaaaaactggttattttaccaaggctttgactgaaagggtgtgtttccctttaaggaatgaagcttgacatgcagacccaataaaagccccttaaggagaactggcctcataccttgtctacacagttcctgcacaaggttcctaaattgtggtcagtaaagaatgtcattttctaacaggtccagcagctccaagtttatcttagaccctcaagaggagaggattacccaactcacaggtatttgaggatacaaacccatggctgggctcagctttaaagatcttatctgaaattccttgtggaacagagtttcatcaaagccaatccaaaggcctacatagaaacaaccattcttgctgcactttatgcaaataatcaggccaagtataagactaaagtttattctacgaacaacccacacagtcctatcataatttgtttttaccaaaaatgaggactggagagagaaattgttctccaaagcttatcatacatttgtc

SEQ ID NO: 115046 - DNA, 1000 bp, Homo Sapiens
gagctgggggtcagggtgctgctgatgcaggtgggaacccagaagccacacacgccttgggaccacctccaccactcctgcccttccctcccaggcatcccccgcacttcccagtctcctctgttcagctctgactttgaaactctgtgtccagaagcccagggcttatcctcaccccttatttcatgctcccacaatggtcttgcccctgtatcatctcacgtccactcccccagtggggagactatgtcctccctttttggccccccaccaaaggggtgaggtttcagtggcgcttctgttatttccaagggagaccacagcaaggtaaagatacagtagagtaaacttgttctatgagcaatcaccaaaaatgagacatttgtgccttacacatcgtacttttcagttgaatccatacacaagtgctttcatttgttggttttgtgatgaagtgacgccctgcccctaccttccctccaatggccccactgaacggggtcctcagcacgccccatgtgtccacaggggccctcccaccagctcagtgcgtcctgcccaaaagtgagtgaccttcaccgcccacaccctgcttacagcagttgcgtttgttcctgtgatgacctaattagatcataagaaagacaacggacaacgagtacagagacagccgaacgtgataaaggggaggggctgcaaaacaaaattagcaagagtctgcctgtaagggtgcttcacccaaacagctttgcaaacatctttaaatttctgatcaactaaaggaagttaaaatgaaaaagcagactatgctttgtggatgtaactcatttaaaaaaggagagaagtgcatcattaaatttacattccatgactaggtctgggccccttcctggaaaagatggcaaacaaaggctggtctgtaagtgttttaagttaacataaatcctgcaatggctttgaagactccagtgtaactctcattgacactgagcacagatct

SEQ ID NO: 115047 - DNA, 1000 bp, Homo Sapiens
agaggttgaaacaacaatggcaacagcggtgagaaaggatacggggcctgctgagatctgcatcctgtccttaagggcctgatggttttgaattgtcctccaaggccactgccgtggttggagaggccgacgtgtcatcagcacagctaaaacagacaactcgggaaatatgggaacctgggggagactggagcccaagtcgctgcaaatccttgatgaggagacacaagaaaccactacttcaaagctggaggcagcttctgcacagaacagattcatgtttgcatttggggatgactgtctgctcactctgggacgtccatggttctgcacatgtgtagccgggggacatgtttctgttcttggaagacctggaagatttatattgttttatttttttttaattctttttgaggcagagtctcactctgtcgcccaggctggagtacagtggtgcaatctcagctcactgcaaccttcacctcccaggttcaagcgattctcttgtctcagactcttgagtagctgggactacaggtgcacgccaccatgcctggctgatgttttgtgtttttattagagacagggattcaccatattggtcaggccggtttcgaactcttgacctcaggtgatccacctgcctcggcctcccaaattgctgggattacaggtgtgagccactgcccctggctggaagcctttagtggtgtaaactgtgggtgggttttagcagatccgtgtctccgtgggttatgttttctccgtgtctccgtgggttatgttttctttacatcagatatttctttcctcactacctggaagaggtacccgttctttccaagcatgggttaatgagaaggaagcaacaaaaggctgggagagaacacatggagggaagctgccgttggtctcgaagctgtgccatggcgggtaccgtctcccctctgatgaatttataaccccctatgtgctaccatttcaggttaaaccaacttga

SEQ ID NO: 115048 - DNA, 1000 bp, Homo Sapiens
tttttatgccagaaatagaatgtgttattaaaagtgaatattctggaattttgattttttgaatgctggataaaaaatacataaagacttatactcacaataaaaactagataactagatcaagagataatctgtaaaagattagctctatagagtatgatttccttagccactgtagggagcaagacaaaaatggattttgatatcaaacactacattaaataatagcttacattcagcatgatgtcctgcaatgctgccccctaaacctgggccaaatgaacctggccctgtacttcatgctttagtcagttcccactctagccttccctgcatggctctctgcctaggagtgtcctccccatttcctgcttcttgaccatctaggtactcaggtcccagaattctctgctcaaatgatggaagcttgttcctgggacctgggttctcattcctcaggtttgttctctcatggacagactgccctgtggcatgcatcattctttggcctgaggatgtttctcttgcaggtgggagagtgggaagagtctggacgtggcagctgaggtatctgcagatgtacagagcttctgagagtgcaaagtggagcttgggagggggagaagagcagcaaaagccttggctgagactgactcatcaaggactgccatgtcccccagaggaagtctcaggaatccagacattctcatcagatccttgccttccaggtggcttggaaggtgtattggtcagagaaagcaatataatttgagtcttttagttccatcaatgacttttaaataattggaaatgcaacatgtgagcctttatttgcattcttgctctggttccacagattttaggtgcaagtctgtccctgtggggaatttctttctgttatttgcataaatatcaagggaaattagattctgtttgagcacacttttgctgagatttaggggaaagaaattacctggcagagagtaggatgtaagaggtg

SEQ ID NO: 115049 - DNA, 1000 bp, Homo Sapiens
tcaaatgattctcctgcctcagcctcccgaggagttgggactacaggcatctaccactatacccagctaagttttgtatttttagtagagacggggtttccccaggttggccaggctcgtcttgaactcctgacctcaggtgatccacccgccttggcctcccaaagtgctgagatttcaggagtgagccaccgtgtccagtgataaatcatgaatttgctaacaattcttctgttttcccttctgtttcctttaagttttgtattaatttttctaagtccctcctccctgcagaatactggattcacttttgctttccgtgaagtatttaagaatataaatatcattttgccttcagctttgaccttgtcccatgaggttttgatatataatatcctcattattgtaatttcctagataggctgcagttgtagttttatttcctctttaaaatgaggaaaaacgagattttttttacatttccgataggttgagtattaattttctttttgcttcaaccttattatttttagttttattgtagcttgagaacgtggtttctatttcacttcttagaatttattgaggttttctttgtgatctaatatattgtaaaattgtgtaagtctcctattgtttttgaaaagacagtgtattctattttctctttcctttcaggacacagaattagacatacatgtacagtgtaagatcagccttgtccatcttattcagaccctctgcatcttattttttattttatttatttatttttgagacggagtcttgctctgtcgcccaggctagagtgcagtggcgcgatcccggctcactgcaagctccacctcccgggctcatgccattctcctgcctcggcctcccgagtagctgggactacaggcgcccacaaccacgcccggctaatttttgtatttttagtagagacagggtttcaccatgttagccaggaagttctcgatctcctgaacttgtgatccac

SEQ ID NO: 115050 - DNA, 1000 bp, Homo Sapiens
tttaaaatttttaaaagagaagtgtagattccatcatctgtcattaatttccctccctcaactccctggcccatcttttacttggtcatatccttttggcaaaaacatctggttaaatccatcagactgcccagttcacacctgtacccagacagctgactgtggctagagaaaacagaagaaagcatgcaaacatgttggctggtctcactttaaattcctgacccctaatgtcaagtgtccccttaaatgccactggcaatcacaccaaaattctctgtctattccctcacccacactcacgaagtttatgtcttctgctttccttccagattcccaacaatttcttcccatctgatgaccttttgttctacttctctgagaaaaatgaagcaatcagagaggactaccacaaacttctaagactatatatattctctggtgatctatctgcatgcaggtatatacactctacctttctgcctgttgatgtagacaactatccatactcctctctaaagccaacccctccacttgtgatgaggtccaatctccaccccttgctcactcaagggcaatgttttagcaattttcctctctctcctccacatcatcaaattataactatgaaaatttgctgctttctccctctcctttgcagaaatattaaaagaggcatctgtatttgccatgttcccttattttccccattctctcttaaacccactccagtgcatcttccatccaaccacgtgctgttctcaagggcactaatgatctcccggtttataaagccaatgtttctctcttgtcttcattgtacttgacctattctatcagcagcatttgacaccactgattactcattctgctctggtgtactttcttcaattgcttccaagacaccataaattcttctgccttgctggctgcctttgctggttcctcctcttctccctgacctcttaatgttggagaaccacagggcttagtccttggt

SEQ ID NO: 115051 - DNA, 1000 bp, Homo Sapiens
atttaattataactaaacatctgaagaaatatagttttgaaattttgacatttccaagatttctaagaattggcaagagtattgagctcaaagaaaaacaaatttaaaaactatgcctatctttcagctacccctttgtttaataagaacaaaatcattaagaaagctacttattaccatggcacaaacttattcaattatttcaaaatcatgtttatttgtaggttttttttttctttttttttttagacggagtcttgctttgtcactcaggctggagtacagtggtgtgatcttggctcactgcaacctctgtctcctaggttcaagccattctcctgcctcagcctcccaagtagctaggattacaggtgtgtaccaccacacctggctaatttttgtatttttagtagagacgggatttcaccatgttggccaggctcatctcgaactcctgacctcaggtgatcccccccgccatggactccaaaagtgctgggattacaggcgtgagccactgtgcctggccatgtaggtatgtttttaccatgaaaatgggagccagttctcaataccaacacagagtcctcttgccaaattgtataggtataggcaggacatcatataggctggaatttacagaactgtctccagccagcagccttcttattaatttcacaatgtgcagccaattactgagtacttgggcagtcccttcaaatttcatatggtgatgttaagtctgtcatttgtgaataaggtcactccatgagttattttctctttggaatgaggcatttgcacattttatttaagtgagagccaaattaataagtgtttcagtatataattttgattcagtgagtaaacacagattttggttgttgctggatttatagaggaagttacctggtttattactatggaatgacgtaggctaggacaactggtcaccttggaattgtttacatgcagcctactaaaaactaagtattagctt

SEQ ID NO: 115052 - DNA, 1000 bp, Homo Sapiens
aatatgtattatttaagaaacataacacattacacagagatgtgactgggatgaggtgagtgaggcacatgcctcaggtacaaaattaagggggcaccaaaaacctcagtaatgaagataatattttaacacagtatttttaaaaatcaaatttatgcaaggtccatgaagagcaaaatatcaaatttttaaataaataccaaatcagtattactgattttttccttctgcctccggctccaatggcaccaagattttataaccacaacacaatgttggtccatttaatgtttccgcatattcagtacaatcagtaatgccacgatgaatatctctgtgaatattcatactcccatatttaggattatctcctaagaaaagaattcctgaagtggaactactaggtaaaaaggtacatagtaaaggttcttgatacataatgacaggttgttttcctccccaaaaaatgttcttaattatatttactccagtaatttatgaaaaaaacaccatttaaaagtattttcccactttgtttcaatttgcagctatttttaatgttcatttacaaaaagtacattataatggaacactattaactctcagtagcatttgttatcaacatttcctcaatatgtacgttaagttaaaattttatatatttgtttccatttttgtgccaaaaaaatctgacagtttttacctttgtgatttcttctatctcttacaaagttttatttccacattaaaagaataagaaaatagtttcatttttataataatacattcatttactccagggatcagcaaactttatctgtaagggaccagatagcaaatatttttgactttgcaggccatatggtctctgtcccaactactcaactctgctctggtggagcaaaagcacccacataatatgtaaatgaatgaatgtggcaatgttcaaataaaactttatttatgaaagcagtgggtggaaaaaaaaaaaaaaaaaaaa

SEQ ID NO: 115053 - DNA, 1000 bp, Homo Sapiens
atctttccacctcagcctcttgaatagctaggaccactatgtgggccactatgcctggctaattttttcaaaaaaatttttttgtagagaagccgaggcaggcggatcacttgaggccaggagtttgagactagtctgaccaacatggcaaaacccatctctactaaaaatacaaaaattagctgggcgtggtggcacaggcctgtaatcccagctacccaggaggctaaggcatgagaatcggttgaacctgggtggaagaggttgcagtgagtcgagatcatgcctttgcactccagcctgggtggcagagtgagactctgtctggaaaaagaaaaataatttatagagatagagtcttgtcatgttacccaggctggtcttgaactcctgggctcaagtgatcctcccaccttgccctctcaaagtgttggaattacaggcatgagccatcatacccagtggctgctgctttttttgtgtctgtgagctcctttaatagaaaactacagaatagaaattatttccaactttcaactttaaattggttcttttaggccaggcactgtggctcacgtctgtaatctcaacactttgggaggccgacgcaggtggatcacttgaggtcaggagtttgagatcagcctggccaacatggtgaaaccctgtctctagtgaaaatacaaaaattagctggtcgtggtggtgcacgcctgtaatctcagctacttgggaggctgaggcaggagaattgcttgaacccaggaggtggaggttgcagtgagctgagattgtgctgttgcactctagcctgggtaacagagcaagaccctgtctcaaataaataaatacatacataaataaataggttcttttaaaaatgtaatatatggccagacatggtggttcacacctgtaatcccagcactttgggaggccaaggcaggaggattgcttgaggccaggacttcaataccagcctaggcaacaaagtgagatc

SEQ ID NO: 115054 - DNA, 1000 bp, Homo Sapiens
ttttacatataccagcatattcttggactttttcaaagcagaatattttaaaaggtaaaggtatttcagaaactaaatgaatgtgtgaattcaatttaaaaatatatagggacaacattcattgttttgatgttattgttattgttctcattgatagcacctgtattcatgatccctccttcagtctttcccctctcttcgtactctctcaatatctcctgggagaagccagcagataatgttacaagaggaaaagttgtggggtatgacatcaatatgctttctgaacaatcacctcaacagtctattcccatggcgttttcacaggtattgttatttttaactaatgtcctttcagaattggcttagggcttcatttggacattttttgagtttgcagaattctgtgacagaattctccctctatattgattaaacagggcattttttcttaatataatattatgtgtacaagcctccctctttgtatgtcacttgtatttttccagtataatcatatattgaaactaagttggtataatttatttcataagacttgttttttttccatttatcatgtatccttaaatattttacatgaagttgactttcattaactgtgtactatcatgttatttggacacacaataattatttaaccagtccacactcagttgatattgtattgtattaattcttttggaaatataaataacattgataaaacttcttatatgtacatttcatatacatttctacttcaaaaatctgaagaattgaatttatcacagcttataacaaaatgaattatgaatatgttcaaagttttgaatatacagtcatatattgccttctagtaattcatcccccagctagcagtagtgagaataattatcatagctaaaagttactgaggctttactgtgtacgtgaactaattcatctgatacatacagcaatcctagaggataggaggctctggtctctccagtttacagtg

SEQ ID NO: 115055 - DNA, 1000 bp, Homo Sapiens
ataatcatagagttcttgcaaagaagaattaaatcttgagttagctaattaatacagagtgcttagactggtgctggcactaagcaagcatctagtaaatattagctattatcattacaggtccacagtcactcatgtaaaacatgtggggccagatgagttttggagttaagaatattttagattttagaagttatgtatactctatattatataacacccactataggatttggggtagaaactcttaaacactttaatatttccacagccaagtctgtaaaatagttacattatgtgggaagaataaaaactataagtagctcaggtcaattaaggttaggttttgctatgaaatgagctagcaatttttttttgttcagactttttaggttttcaaatttcaggtaaggaactgtgaaactctattatattttctgatgttcctgagccaaacctgactctaccatagaatgacaagcatccataaggatgggaacaaacacacctctgcagttttcaaagtgttactggctcaggctcactttcgggcaagccggcttatatcagggtcctagtgttcaattagaactgaacagagatcacacataaaacaataaggtttagttaaatggttgacttgaaattctaaagaagaaaataccaaatctgcttcctaattatgatatgtccagaaaccataactcattttgtccttttcctccattccctatatgcagtacatgatgatactacagactcatagcattcttttggttaagaaatttaagatgaggaagggattttctgtacaatgcaactggcaatgagaaaagacaacttgctaaaatatgaggttgagtgatcttatggcttagcctatgaatatatatcttctcttaaaggcaaaatccatgcctttcactctgtctgataagtggtccagatggagtattaagctgaatttctttctcattaacaaaaagtaggagtgcctagg

SEQ ID NO: 115056 - DNA, 1000 bp, Homo Sapiens
ccctctttccctctctgcttccttcctccctccttccctctttccctctctgcttccttccttccctccctccctctccctccctccccctctctctttctttctttctttttcttttctttcttttttcttttcttctctttcttcatttctccctttcttcctctctttcttctttctttctttctttctaagaaaattggaattttacaacgtttgcagggattattatagggttctgagtaagaaggtacttggtaaaatgtaaatttaaatgtctctgtgactgccacttctgagttgaactgtttcaacacccaccttaccatttattctcctatcctctcccatcttctcctagctgttctctgtgttcgcaatgccatgcctcctattctcaggcccctgtatctctgctgcccaaatcactctggaaaataatctcctccaattgcccttcccaagtcaacaggagtggaggtaaaaatgaaaaacagaatgaaacaaacaaaaccctatagcttcctactttgaataaatttgtttcttctaatttctcccttcaggctggatacaagagaggaaaggcaaacaaaaataaagagtgtcataagatatttattctttttaaagaaatacagattctcttaagattccatagttctggctctagagaggaatcagtcatgtagaaaataccagacaggggttacagggggcctggagagaaaaagaaagttcattctccaataaagatgttatgaatcagttggtcagcccattgagtgtgtattctatttttgtagttctatctgcaagaaaaagtacaaatatattttaattgacacctagtatgcatgcacacatacacaaattgaaataaaatatttgctttaaataagagctattcagactgggtatgctttattttaatcttctcttcttttatctgctctccatttaaatttaaaaactgctggggttgaaacctaatttgatt

SEQ ID NO: 115057 - DNA, 1000 bp, Homo Sapiens
  misc_feature (300)..(300): n is a, c, g, or t
cagcatgcccaaggccctgacgtgacagtcccttgcctctcctagatctgtaactacgagggaccagccaagatcgaggtggacctggtaacacacagtgacccacctcgtgctcatgcccacagtctggtgggcaagcaatgctcggagctggggatctgcgccgtttctgtggggcccaaggacatgactgcccagtaggtgcccttcttacgccttggcccccactggtatgccsktcwtgccagtcccaggccccagccacctccatatgatgttagcatctgaccaaggggaaangatgtaggttggccccaaacccaagggcctaagtagaaactccaatggcttccttgaggaagtaaggctgagctgagcctggcaatgggaaaggtgcctggcaatgggaaaggtgcctcaggaagaaagaactgcatggccaaaggctcccgattctctcttctcagatttaacaacctgggtgtcctgcatgtgactaagaagaacatgatggggactatgatacaaaaacttcagaggcagcggctccgctctaggccccagggccttacgggtatgggtgcagggggtgggtcgggtatgggtgcagggggtgggtgggtcatgggaggtgctcatggaaggagcagggagggagaagccaggggtcacacatgtacctactgcccagaggccgagcagcgggagctggagcaagaggccaaagaactgaagaaggtgatggatctgagtatagtgcggctgcgcttctctgccttccttagagccagtgatggctccttctccctgcccctgaagccagtcacctcccagcccatccatgatagcagtgagtatcctgattgcctggggtgccaggcctggtsgsagaggtggcatgaggggtgacctcaagctgtgcagtcaaacaagacccaggtttcagaacctgcsctgccacatatgagctgagtgatcctgagcaagtcatttccccccc

SEQ ID NO: 115058 - DNA, 1000 bp, Homo Sapiens
  misc_feature (649)..(649): n is a, c, g, or t
ttaatttttttaaatttccacctgttttggggggggtacaggtggtatttggttacatgagtaagttctttactggtgattggcgagactttggtgcacccatcactcgagcagtatacactgcatccagtttgtactcctttatgcctcacccttttaccactctttccctctcagtccccaaagtccattgtatcattcttatgcctttacatcctcatagcttagctcccacttataagtgaaaacacacagtgcttggttttccattcctgagttacttcacttagaataatggtctccagtcccatccaggttgctgaaaatgccatcagttcattccttttcatggctgagtagtattccattgtatatttataccgtagtttctttatccacttgttggtagatggccatttgggctaatttcacatttttgcaattgtgaattgttgtgctgtaaacatgcgtgtgcaagtatgtctttcatataaggacttcttttcctctgggaagatacccattagtgggattgctggatcaaatggtagttctacttttagttcttcaagaactctccacactgttttccatagtggttgtactagtttacattcccaccagcagtgtagaagtgttccctgttcanccgcattcacgccaatatctattattttttgcatttttggtaatggccattcttgcaggagtaagatggtatcgcaaatgcaacaaaaacaaataggtgggacttaattaaactaatcagcttttgcccagcaaaaggaacagtcagcagagtaaacagacaacccgcagagtgggagaaaatctatacaaatctatacgtctatacaaggactaatatccaggatctacatggaactcaaattagaaagaaaaaagctaacaatcccatcaaaaagtgggctaaggacatgaatagacagttctcaaaagaagatacacaaatgaccaccatacgtgaaaaaatgctcaa

SEQ ID NO: 115059 - DNA, 1000 bp, Homo Sapiens
ggaggacagtctggaaattgtcatcaaaactgaaaaggtacacaccctttaagccagcaatttgccttcacttctaagaatttatttaagaaacaacaagaccacaaagatgtatgtacagagatgtttacagcagctttttctgtggtaaaaagtcttgagatagtttaaatgatcctcttatgggggactgactaaatgaattatggagcaataaaagagtagttttctgtagccgtcaaaagaacaaggaagaatccatgtgcacggacatggaaaaatttccatagtatatagtgaaaagaaaaaaagtcaagttggagaatagtaagatcccatttttataaacacacatacatgcaaatttggaaaggtaaagcaataaattcctcacatcaaaatgtgggaagaggtgctagagtggcagtagggatgggaggtggttgatccctactttatatatgtctgtaacttgaatttatttcttaagcagacaggcattacttttacagtttaataatgaaaagagaaaacaaaaggtaagacaaaagcagcttttgtcactttttccattgttttatgtgctcaccccaatcaaggcaccttctttctaagagccagtatttatttctgttctctttaaatcagaagttaggcagacatttcaggccatgagacctagattggaaaccactcaaaggaacatgccctttcctcttcaaacactgttaccaacatttagatactttcattttggttgcagcccactatttttagctttttcttctttttttctccagatggctgaagagaccgaggcctttcacactgaaggtggggtaggtggaacagatggaagggctttacctgtggtcgattaattgtttcataacccttttcatgagctttctttgagcaggcatgcttggttttggtaaagtcctgtcaaaatttctttgatttgaattagatgtactgggcaggtcccattcagatattt

SEQ ID NO: 115060 - DNA, 1000 bp, Homo Sapiens
ccacgatattcacaggttttgatgacgctcaatgttgagaatagggattacacaaggtgagaataccagggagtaggaaacattgggtcctcttagaattctatctatcacagatgtgtaagtgcttgtttgttgcttgggtttaatatatacaatcattaaactttccacttaagcattgtatgcctgtatcaaaatatctcagaaatatatacacctactacgtacccacaaaaacaataaaaaacacactaaaaaactaaaaaagtaaatgatgatattcattctgctttacagaaccattaattttgccaataaaatgcaaaacgactttctaagactgctgctttgaacttttggaaaccatcttagaatttcacatattcatttaagttcttacttgaagatatttaagtttcttttctaacattttttatcataaaataaacatttccataagatctattggcatgagtaaaaaactttttgattactgttttgttaataatgacttgattaaattttatgaagttatgcaagagaaatgtgaacaaacataatgcaatattaattcataacttcataaaatttactgtaatatatactgtactactgcaataatttcatagccacctcctgtagctattgtggtgagaacaagtgttgtgagcttaaaacgccatgtgatgatagtcatctccccatgagaggttttctttctagtaagttgcgtattgtagtaaaaggtgatctgttttggttctcgcatacctttcatcatgtttagtgcaaaaccataaacctgaataacaccatgacacccatatgaagtgcccctagtgatactggaagtgattccaagaagcagataaaagttatgacattacaagaaaaagttgaattgagtgatatatatcatagatggctgtctgcagctgtggttgcctgccatttcagacaactcattttgaaaacagacaacactattgtaagtttatgt

SEQ ID NO: 115061 - DNA, 1000 bp, Homo Sapiens
gtcataatttactttcttaaaaaccagatccaaatatagtacatgctttgcaactgattgttatgtcttctaagtctctttttaattataggccatcttccatctctctctttttttccctctttgtaatttatttttcagaaaactgggttgtttgtcctaaagagtttcccctcttcgggttttgctgattgcattttggggtgatgttttacatctttctctgcactctattttctgcaaattgatagttggaagctttatacatatgtaagatttttaagggttttttctttggcttttatctcctttcattcattcaacttttactgaatacctactatgtgtctgttactgtgggttgctatgaaaacaaaaatgcctcagaagcttagctatgagtgaaggaaatgcatgcaaacagaattataatcattgtgtttggagttgaagtttaaaatagctgctaaaatagccctgagaggcagaaactagcttgcctggagttaagggagccttcactgatgaaagtgattttgaattaggctttgaaaaataatgggtaggagttttccagatgagaacataggaagagaggaagtgcaggcaatttccagtccaagggatcagcactgtgaaggcagaacatcttgtaagaaaaataaacacagctcaacgatctaagtagaaacattgatgacagtgcccctgaactggataaaaagatcttaaattctttagttcctgcctcctcagtctctagagaagtttaaggcttttagaaagagttgatcatctcgtccaaggggaggagaagcagtgtatggagcggattccaagagcagcagagaatgacagcagatgtggtcagggaacctgagcactccataacagagcttcagacagagcccagctggcctgttccaggactggggtctttggcatatccagtgactggcatgttttacacatgcactcaaaagcagcctttggtaagata

SEQ ID NO: 115062 - DNA, 1000 bp, Homo Sapiens
atgtttgtagacccatgttcgcagcagcattattgacaacagccagaaggtagagtaatccatgtgtccatcaacagatgaatggatacacaaaatgtgactaaacacacagaacattactccgcctccaaaaagatggaaattctgacccatgctacaacgtggatgagccgtgagcacttgatgctaagtgaaataggccaggcacaaacagacaaatgtaagattccactcacatgagttccctagaatagtcagattcagagacagaaagaatggtggctgccaggagctggggattgtgaagaatgagagttattgtttaatgggtgcagagtttcagtcttgcaggatgaaaaagttctagagatggttggtggtgatggttgtacaacactgaatatatttaacaccactgagctgtatacttaaaaatgttgaagatggtaaattataagtgtatttaccacaattaaaaatgtttacattagaaattaaaggccaccctgggcaacatagtgaaaccctgtttctacaaaattaaaaattaaaaaattagccaggcatggtggcaccctcctgtaatcccacccactcgggaggctgaggtgggaggatcgcttgagcccaggaattctagacaacagcaagtcctgatggcaccactgcactccagcctgggtgacaaagcgagattctctctctctctatatatatatatatatgtgtgtgtgtgtatatatatgtgtgtgtgtatatatatatgtgtgtgtatatatatacatatgtgtgtatatatatacatatgtgtgtatatatctatgactcaaggacatgacaaaatgaaataaaataattttttaaattttttataaagattattgggaacaggatattttattcacactttgtgagtgactgcaaaggatccctccacagataactttttagttacaaatgggaaaagttacctttacaaatgatccaaacaaatgggatc

SEQ ID NO: 115063 - DNA, 1000 bp, Homo Sapiens
ccaaggcaccagtggggcatttttacgaaccccaggctccctctgctgaggtggagatgacatcctatgtgctcctcgcttatctcacggcccagccagccccaacctcggaggacctgacctctgcaaccaacatcgtgaagtggatcacgaagcagcagaatgcccagggcggtttctcctccacccaggacacagtggtggctctccatgctctgtccaaatatggagcagccacatttaccaggactgggaaggctgcacaggtgactatccagtcttcagggacattttccagcaaattccaagtggacaacaacaaccgcctgttactgcagcaggtctcattgccagagctgcctggggaatacagcatgaaagtgacaggagaaggatgtgtctacctccagacatccttgaaatacaatattctcccagaaaaggaagagttcccctttgctttaggagtgcagactctgcctcaaacttgtgatgaacccaaagcccacaccagcttccaaatctccctaagtgtcagttacacagggagccgctctgcctccaacatggcgatcgttgatgtgaagatggtctctggcttcattcccctgaagccaacagtgaaaatgcttgaaagatctaaccatgtgagccggacagaagtcagcagcaaccatgtcttgatttaccttgataaggtgtcaaatcagacactgagcttgttcttcacggttctgcaagatgtcccagtaagagatctgaaaccagccatagtgaaagtctatgattactacgagacggatgagtttgcaattgctgagtacaatgctccttgcagcaaagatcttggaaatgcttgaagaccacaaggctgaaaagtgctttgctggagtcctgttctcagagctccacagaagacacgtgtttttgtatctttaaagacttgatgaataaacactttttctggtcaatgtcaaaaaaaaaaaaaaaaaaaaaaaaa

SEQ ID NO: 115064 - DNA, 1000 bp, Homo Sapiens
aatgagttaccagagagcagcttgggaggttgattctggtcgtcgaaatacctattatgcttctattgcaaaggcatttgctggagatattgcaaatcagttagctactgatgctgtgcagatacttggaggcaatggatttaatacagaatatcctgtagaaaaactaatgagggatgccaaaatctatcagatttatgaaggtacttcacaaattcaaagacttattgtagcccgtgaacacattgacaagtacaaaaattaaaaaaattactgtagaaatattgaataactagaacacaagccactgtttcagctccagaaaaaagaaagggctttaacgttttttccagtgaaaacaaatcctcttatattaaatctaagcaactgcttattatagtagtttatacttttgcttaactctgttatgtctcttaagcaggtttggtttttattaaaatgatgtgttttctttagtaccactttacttgaattacattaacctagaaaactacataggttattttgatctcttaagattaatgtagcagaaatttcttggaattttatttttgtaatgacagaaaagtgggcttagaaagtattcaagatgttacaaaatttacatttagaaaatattgtagtatttgaatactgtcaacttgacagtaactttgtagacttaatggtattattaaagttctttttattgcagtttggaaagcatttgtgaaactttctgtttggcacagaaacagtcaaaattttgacattcatattctcctattttacagctacaagaactttcttgaaaatcttatttaattctgagcccatatttcacttaccttatttaaaataaatcaataaagcttgccttaaattatttttatatgactgttggtctctaggtagcctttggtctattgtacacaatctcatttcatatgtttgcattttggcaaagaacttaataaaattgttcagtgcttattatcat

SEQ ID NO: 115065 - DNA, 1000 bp, Homo Sapiens
tcttctcctcgagggatgaacagtcctggttccgggagactgagatctataacacagtattgctcagacacgacaacatcctaggcttcatcgcctcagacatgacctcccgcaactcgagcacgcagctgtggctcatcacgcactaccacgagcacggctccctctacgactttctgcagagacagacgctggagccccatctggctctgaggctagctgtgtccgcggcatgcggcctggcgcacctgcacgtggagatcttcggtacacagggcaaaccagccattgcccaccgcgacttcaagagccgcaatgtgctggtcaagagcaacctgcagtgttgcatcgccgacctgggcctggctgtgatgcactcacagggcagcgattacctggacatcggcaacaacccgagagtgggcaccaagcggtacatggcacccgaggtgctggacgagcagatccgcacggactgctttgagtcctacaagtggactgacatctgggcctttggcctggtgctgtgggagattgcccgccggaccatcgtgaatggcatcgtggaggactatagaccacccttctatgatgtggtgcccaatgaccccagctttgaggacatgaagaaggtggtgtgtgtggatcagcagacccccaccatccctaaccggctggctgcagacccggtcctctcaggcctagctcagatgatgcgggagtgctggtacccaaacccctctgcccgactcaccgcgctgcggatcaagaagacactacaaaaaattagcaacagtccagagaagcctaaagtgattcaatagcccaggagcacctgattcctttctgcctgcagggggctgggggggtggggggcagtggatggtgccctatctgggtagaggtagtgtgagtgtggtgtgtgctggggatgggcagctgcgcctgcctgctcggcccccagcccacccagccaaaaatacagctgggctgaaacctg

SEQ ID NO: 115066 - DNA, 1000 bp, Homo Sapiens
tggacttttgcagcttccttccaagtcttcctgaccaccttgcactattggactttggaaggaggtgcctatagaaaacgattttgaacatacttcatcgcagtggactgtgtccctcggtgcagaaactaccagatttgagggacgaggtcaaggagatatgataggcccggaagttgctgtgccccatcagcagcttgacgcgtggtcacaggacgatttcactgacactgcgaactctcaggactaccgttaccaagaggttaggtgaagtggtttaaaccaaacggaactcttcatcttaaactacacgttgaaaatcaacccaataattctgtattaactgaattctgaacttttcaggaggtactgtgaggaagagcaggcaccagcagcagaatggggaatggagaggtgggcaggggttccagcttccctttgattttttgctgcagactcatcctttttaaatgagacttgttttcccctctctttgagtcaagtcaaatatgtagattgcctttggcaattcttcttctcaagcactgacactcattaccgtctgtgattgccatttcttcccaaggccagtctgaacctgaggttgctttatcctaaaagttttaacctcaggttccaaattcagtaaattttggaaacagtacagctatttctcatcaattctctatcatgttgaagtcaaatttggattttccaccaaattctgaatttgtagacatacttgtacgctcacttgccccagatgcctcctctgtcctcattcttctctcccacacaagcagtctttttctacagccagtaaggcagctctgtcgtggtagcagatggtcccattattctagggtcttactctttgtatgatgaaaagaatgtgttatgaatcggtgctgtcagccctgctgtcagaccttcttccacagcaaatgagatgtatgcccaaagcggtagaattaaagaagagtaaaatggctgttgaagc

SEQ ID NO: 115067 - DNA, 1000 bp, Homo Sapiens
ccacctgacacaaccgtccccggcccctgccccgcccccaagctcggatcacatgaaggagacagcagcacccacccatgcacgcaccccgcccctgcatgcctggcccctcctcctagaaaacccttcccgccctcgggaaagtagatgtggagggtggcgccctgcgtaaccctcgccctgtccctcccactccctgggggcgctgttccacagtgactgggccctgtccagggcagtgagtcctctactttgctccgcggaggaagctggggtacaaggggcccagtgctggccacacagcagcgcagccgagccccaggagcccgtcaggccacagcccctggcactgcaggtggcctccctccagagactcgagtccccatgattccctcctcgtcagtctctcaaagaccccatggtccatcccctgagggtggtcagccaaggctcccgttccgtgggatgccataaaagccgcccagtgggacccacagtcacacagagcgcctcacctgcatcctctcccccacaagagccccaaagatcccacgggagaggggagagggacgcacagcactgcctgccaagcgagaatgcaggccccgccccctcggcccctcaccacctctttctacagcctaatttattggattccctattcgtagccatctccgtggccaatgtgactaccgtgccagcagcgggggcggcccagcctctgagtcccgtggggccccggctcccaccggtgccaaacccagcccctgcggccgtcaccccgccagcctacactgccagccgccaccggggcacacgggcctctgcttgccagccaggagtgcggacaccatgttcccagctcagtgccaaagaggggtcaccagggggagctgtctgcggagccagcgcctgcccgagagagaccccaccgccaccgtgtgcctttcccgggccctcagccctcgggccgggcaccacccccagtccccccagtaaa

SEQ ID NO: 115068 - DNA, 1000 bp, Homo Sapiens
actggagctcagtaaaagtaaattcatgtaatagcaatgcaagcagcctagcacagactaagcattgagcataataggcccacataatttcctctttcttaatattatagaattctgtacttgaaattgattcttagacattgcagtctcttcgaggctttacagtgtaaactgtcttgccccttcatcttcttgttgcaactgggtctgacatgaacactttttatcaccctgtatgttagggcaagatctcagcagtgaagtataatcagcactttgccatgctcagaaaattcaaatcacatggaactttagaggtagatttaatacgattaagatattcagaagtatattttagaatccctgcctgttaaggaaactttatttgtggtaggtacagttctggggtacatgttaagtgtccccttatacagtggagggaagtcttccttcctgaaggaaaataaactgacacttattaactaagataatttacttaatatatcttccctgatttgttttaaaagatcagagggtgactgatgatacatgcatacatatttgttgaataaatgaaaatttatttttagtgataagattcatacactctgtatttggggagggaaaacctttttaagcatggtggggcactcagataggagtgaatacacctacctggtgccttgaaaatcacatcaagtagttaattatctaccccttacctgtgtttataacttccaggtaatgagaatgattttttttaaagctaaaatgccagtaaataaaagtgctatgacttgagctaagatatttgactccaatgcctgtactgtgtctactgcaccactttgtaaacacttcaatttactatctttgaaatgattgacctttaaatttttgccaaatgttatctgaaattgtctatgaataccatctacttctgttgttttcccaggcttccataaacaatggagatacatgcaaaaaaaaaaaaaaaaaa

SEQ ID NO: 115069 - DNA, 1000 bp, Homo Sapiens
actgggtcgcttttgggattacctgcgctgggtgcagacactgtctgagcaggtgcaggaggagctgctcagctcccaggtcacccaggaactgagggcgctgatggacgagaccatgaaggagttgaaggcctacaaatcggaactggaggaacaactgaccccggtggcggaggagacgcgggcacggctgtccaaggagctgcaggcggcgcaggcccggctgggcgcggacatggaggacgtgtgcggccgcctggtgcagtaccgcggcgaggtgcaggccatgctcggccagagcaccgaggagctgcgggtgcgcctcgcctcccacctgcgcaagctgcgtaagcggctcctccgcgatgccgatgacctgcagaagcgcctggcagtgtaccaggccggggcccgcgagggcgccgagcgcggcctcagcgccatccgcgagcgcctggggcccctggtggaacagggccgcgtgcgggccgccactgtgggctccctggccggccagccgctacaggagcgggcccaggcctggggcgagcggctgcgcgcgcggatggaggagatgggcagccggacccgcgaccgcctggacgaggtgaaggagcaggtggcggaggtgcgcgccaagctggaggagcaggcccagcagatacgcctgcaggccgaggccttccaggcccgcctcaagagctggttcgagcccctggtggaagacatgcagcgccagtgggccgggctggtggagaaggtgcaggctgccgtgggcaccagcgccgcccctgtgcccagcgacaatcactgaacgccgaagcctgcagccatgcgaccccacgccaccccgtgcctcctgcctccgcgcagcctgcagcgggagaccctgtccccgccccagccgtcctcctggggtggaccctagtttaataaagattcaccaagtttcacgcaaaaaaaaaaaaaaaaaaaaaaaaaaaaaaaaaaaaaaaaaaaa

SEQ ID NO: 115070 - DNA, 1000 bp, Homo Sapiens
aaaaggccaaggcaccttgtcggtggtgacaatgtaccatgctaaggccaaagatcaactcacctgtaataaattcgacctcaaggtcaccataaaaccagcaccggaaacagaaaagaggcctcaggatgccaagaacactatgatccttgagatctgtaccaggtaccggggagaccaggatgccactatgtctatattggacatatccatgatgactggctttgctccagacacagatgacctgaagcagctggccaatggtgttgacagatacatctccaagtatgagctggacaaagccttctccgataggaacaccctcatcatctacctggacaaggtctcacactctgaggatgactgtctagctttcaaagttcaccaatactttaatgtagagcttatccagcctggagcagtcaaggtctacgcctattacaacctggaggaaagctgtacccggttctaccatccggaaaaggaggatggaaagctgaacaagctctgccgtgatgaactgtgccgctgtgctgaggagaattgcttcatacaaaagtcggatgacaaggtcaccctggaagaacggctggacaaggcctgtgagccaggagtggactatgtgtacaagacccgactggtcaaggttcagctgtccaatgactttgacgagtacatcatggccattgagcagaccatcaagtcaggctcggatgaggtgcaggttggacagcagcgcacgttcatcagccccatcaagtgcagagaagccctgaagctggaggagaagaaacactacctcatgtggggtctctcctccgatttctggggagagaagcccaacctcagctacatcatcgggaaggacacttgggtggagcactggcctgaggaggacgaatgccaagacgaagagaaccagaaacaatgccaggacctcggcgccttcaccgagagcatggttgtctttgggtgccccaactgaccacacccccattcc

SEQ ID NO: 115071 - DNA, 1000 bp, Homo Sapiens
cgactcggtgcccgcgttctaccgcgagacggtgcaggtggggcgctgccgcctgctgctggcgccgcggcccgtcgcggtcgcggtggctgtcagcccgcccctcgagccggccgctgagtccctcgacggcctcgaggaggcgccggagcagctgcctagtgtcccggtcccggccccggcgtccaccccgcccccagtcccggtcctggctccagccccggccccggctccggctccggtcgcggctccggtcgcggctccggtcgcggtcgcggtcctggccccggccccggccccggccccggctccggctccggccccggctccagtcgcggccccggccccagccccggccccggccccggccccggcccccgccccggccccggccccggacgcggcgcctcaagagagcgccgagcagggcgcgaaccaggggcagcgcggccaggagcctctcgctgaccagctgcactcggggatttcgggacgtcccgcggccggcaccgcggccgccagcgccaacggcgcggcgatcaagaagctgtccgggcctctgatctccgatttcttcgccaagcgcaagagatcagcgcctgagaagtcgtcgggcgatgtccccgcgccgtgtccctctccaagcgccgcccctggcgtgggctcggtggagcagaccccgcgcaagaggctgcggtgagccaatttagagcccaaagagccccgagggaacctgccggggcagcggacgttggaagggcgctgggcctcggctgggaccgttcatgtagcagcaaccggcggcggctgccgcagagcagcgttcggttttgtttttaaattttgaaaactgtgcaatgtattaataacgtctttttatatctaaatgtattctgcacgagaaggtacactggtcccaaagtgtaaagctttaagagtcatttatataaaatgtttaatctctgctgaaactcagtacaaaaaaaccgggattccggcc

SEQ ID NO: 115072 - DNA, 1000 bp, Homo Sapiens
tagatggctgctctaaaaagacaaatgaatggggaaagacaatcattgaatacaaaacaaataagccatcacgcctgcccttccttgatattgcacctttggacatcggtggtgctgaccaggaattctttgtggacattggcccagtctgtttcaaataaatgaactcaatctaaattaaaaaagaaagaaatttgaaaaaactttctctttgccatttcttcttcttcttttttaactgaaagctgaatccttccatttcttctgcacatctacttgcttaaattgtgggcaaaagagaaaaagaaggattgatcagagcattgtgcaatacagtttcattaactccttcccccgctcccccaaaaatttgaatttttttttcaacactcttacacctgttatggaaaatgtcaacctttgtaagaaaaccaaaataaaaattgaaaaataaaaaccataaacatttgcaccacttgtggcttttgaatatcttccacagagggaagtttaaaacccaaacttccaaaggtttaaactacctcaaaacactttcccatgagtgtgatccacattgttaggtgctgacctagacagagatgaactgaggtccttgttttgttttgttcataatacaaaggtgctaattaatagtatttcagatacttgaagaatgttgatggtgctagaagaatttgagaagaaatactcctgtattgagttgtatcgtgtggtgtattttttaaaaaatttgatttagcattcatattttccatcttattcccaattaaaagtatgcagattatttgcccaaatcttcttcagattcagcatttgttctttgccagtctcattttcatcttcttccatggttccacagaagctttgtttcttgggcaagcagaaaaattaaattgtacctattttgtatatgtgagatgtttaaataaattgtgaaaaaaatgaaataaagcatgtttggttttccaaaagaacatat

SEQ ID NO: 115073 - DNA, 1000 bp, Homo Sapiens
tggacgttggccctgtttgctttttataaaccaaactctatctgaaatcccaacaaaaaaaatttaactccatatgtgttcctcttgttctaatcttgtcaaccagtgcaagtgaccgacaaaattccagttatttatttccaaaatgtttggaaacagtataatttgacaaagaaaaatgatacttctctttttttgctgttccaccaaatacaattcaaatgctttttgttttatttttttaccaattccaatttcaaaatgtctcaatggtgctataataaataaacttcaacactctttatgataacaacactgtgttatattctttgaatcctagcccatctgcagagcaatgactgtgctcaccagtaaaagataacctttctttctgaaatagtcaaatacgaaattagaaaagccctccctattttaactacctcaactggtcagaaacacagattgtattctatgagtcccagaagatgaaaaaaattttatacgttgataaaacttataaatttcattgattaatctcctggaagattggtttaaaaagaaaagtgtaatgcaagaatttaaagaaatatttttaaagccacaattattttaatattggatatcaactgcttgtaaaggtgctcctcttttttcttgtcattgctggtcaagattactaatatttgggaaggctttaaagacgcatgttatggtgctaatgtactttcacttttaaactctagatcagaattgttgacttgcattcagaacataaatgcacaaaatctgtacatgtctcccatcagaaagattcattggcatgccacagggattctcctccttcatcctgtaaaggtcaacaataaaaaccaaattatggggctgcttttgtcacactagcatagagaatgtgttgaaatttaactttgtaagcttgtatgtggttgttgatcttttttttccttacagacacccataataaaatatcatattaaaattc

SEQ ID NO: 115074 - DNA, 1000 bp, Homo Sapiens
tgaattcaagcgtgggaaactgctctcctatgtggacgccgagggcaaccctgtgggtgtggtacagatgaccttcctgcggctgctgagcgcctctgcccaccagaacgtcacctaccactgctaccagtcagtggcctggcaggacgcagccacgggcagctacgacaaggccctccgcttcctgggctccaacgacgaggagatgtcctatgacaacaacccctacatccgcgccctggtggacggctgtgctaccaagaaaggctaccagaagacggttctggagatcgacacccccaaagtggagcaggtgcccatcgtggacatcatgttcaatgacttcggtgaagcgtcacagaaatttggatttgaagtggggccggcttgcttcatgggctaggagccgccgagcccgggctcccgagccgaattcagcaacctcgtacctcagcatgccattgcttcgtgagtgtcccgtgcacgtcctgatcctggacagtgaaggcttctccctcccctcccacctgacttcatctacgcctcggcaccacggggtgtgggaccccagcccggagagaacagagggaaggagccgcgcccccacctggagctgaatcacatgacctagctgcaccccagcgcctgggcccgccccacgctctgtccacacccatgcgccccgggagcggggccatgcctccagccccccagctcgcccgacccatcctgttcgtgaataggtctcaggggttgggggagggactgccagatttggacactatatttttttctaaattcaacttgaagatgtgtatttcccctgaccttcaaaaaatgttccaaggtaagcctcgtaaaggtcatcccaccatcaccaaagcctccgtttttaacaacctccaacacgatccatttagaggccaaatgtcattctgcaggtgccttcccgatggattaaaggtgcttatgtttttgtgagttttaagtaaatatttgt

SEQ ID NO: 115075 - DNA, 1000 bp, Homo Sapiens
gccacctggcagtgttggtcccagaggccccgaaggacttcagggccagaagggtgagcgaggtccccccggagagagagtggtgggggctcctggggtccctggagctcctggcgagagaggggagcaggggcggccagggcctgccggtcctcgaggcgagaagggagaagctgcactgacggaggatgacatccggggctttgtgcgccaagagatgagtcagcactgtgcctgccagggccagttcatcgcatctggatcacgacccctccctagttatgctgcagacactgccggctcccagctccatgctgtgcctgtgctccgcgtctctcatgcagaggaggaagagcgggtaccccctgaggatgatgagtactctgaatactccgagtattctgtggaggagtaccaggaccctgaagctccttgggatagtgatgacccctgttccctgccactggatgagggctcctgcactgcctacaccctgcgctggtaccatcgggctgtgacaggcagcacagaggcctgtcacccttttgtctatggtggctgtggagggaatgccaaccgttttgggacccgtgaggcctgcgagcgccgctgcccaccccgggtggtccagagccaggggacaggtactgcccaggactgaggcccagataatgagctgagattcagcatcccctggaggagtcggggtctcagcagaaccccactgtccctccccttggtgctagaggcttgtgtgcacgtgagcgtgcgagtgcacgtccgttatttcagtgacttggtcccgtgggtctagccttcccccctgtggacaaacccccattgtggctcctgccaccctggcagatgactcactgtgggggggtggctgtgggcagtgagcggatgtgactggcgtctgacccgccccttgacccaagcctgtgatgacatggtgctgattctggggggcattaaagctgctgttttaaaaggcaaaaaa

SEQ ID NO: 115076 - DNA, 818 bp, Homo Sapiens
cgcagcgggtcctctctatctagctccagcctctcgcctgcgccccactccccgcgtcccgcgtcctagccgaccatggccgggcccctgcgcgccccgctgctcctgctggccatcctggccgtggccctggccgtgagccccgcggccggctccagtcccggcaagccgccgcgcctggtgggaggccccatggacgccagcgtggaggaggagggtgtgcggcgtgcactggactttgccgtcggcgagtacaacaaagccagcaacgacatgtaccacagccgcgcgctgcaggtggtgcgcgcccgcaagcagatcgtagctggggtgaactacttcttggacgtggagctgggccgaaccacgtgtaccaagacccagcccaacttggacaactgccccttccatgaccagccacatctgaaaaggaaagcattctgctctttccagatctacgctgtgccttggcagggcacaatgaccttgtcgaaatccacctgtcaggacgcctaggggtctgtaccgggctggcctgtgcctatcacctcttatgcacacctcccaccccctgtattcccacccctggactggtggcccctgccttggggaaggtctccccatgtgcctgcaccaggagacagacagagaaggcagcaggcggcctttgttgctcagcaaggggctctgccctccctccttccttcttgcttctcatagccccggtgtgcggtgcatacacccccacctcctgcaataaaatagtagcatcggcaaaaaaaaaaaaaaaaaaaaaaaaaaaaaaaaaaaaaaaaaaa

SEQ ID NO: 115077 - DNA, 674 bp, Homo Sapiens
ccccttggttccgcccgcgcgtcacgtgaccccagcgcctacttgggctgaggagccgccgcgtcccctcgccgagtcccctcgccagattccctccgtcgccgccaagatgatgtgcggggcgccctccgccacgcagccggccaccgccgagacccagcacatcgccgaccaggtgaggtcccagcttgaagagaaagaaaacaagaagttccctgtgtttaaggccgtgtcattcaagagccaggtggtcgcggggacaaactacttcatcaaggtgcacgtcggcgacgaggacttcgtacacctgcgagtgttccaatctctccctcatgaaaacaagcccttgaccttatctaactaccagaccaacaaagccaagcatgatgagctgacctatttctgatcctgactttggacaaggcccttcagccagaagactgacaaagtcatcctccgtctaccagagcgtgcacttgtgatcctaaaataagcttcatctccgggctgtgccccttggggtggaaggggcaggattctgcagctgcttttgcatttctcttcctaaatttcattgtgttgatttctttccttcccaataggtgatcttaattactttcagaatattttcaaaatagatatatttttaaaatccttaaaaaaaaaaaaaaaaa

SEQ ID NO: 115078 - DNA, 1000 bp, Homo Sapiens
cccagtacatttaaattttttggcacttgccattccaaaatattatgccccaccaaggctgagacagtgaatttgggctgctgtagcctatttttttagattgagaaatgtgtagctgcaaaaataatcatgaaccaatctggatgcctcattatgtcaaccaggtccagatgtgctataatctgtttttacgtatgtaggcccagtcgtcatcagatgcttgcggcaaaagaaagctgtgtttatatggaagaaagtaaggtgcttggagtttacctggcttatttaatatgcttataacctagttaaagaaaggaaaagaaaacaaaaaacgaatgaaaataactgaatttggaggctggagtaatcagattactgctttaatcagaaaccctcattgtgtttctaccggagagagaatgtatttgctgacaaccattaaagtcagaagttttactccaggttattgcaataaagtataatgtttattaaatgcttcatttgtatgtcaaagctttgactctataagcaaattgcttttttccaaaacaaaaagatgtctcaggtttgttttgtgaattttctaaaagctttcatgtcccagaacttagcctttacctgtgaagtgttactacagccttaatattttcctagtagatctatattagatcaaatagttgcatagcagtatatgttaatttgtgtgtttttagctgtgacacaactgtgtgattaaaaggtatactttagtagacatttataactcaaggataccttcttatttaatcttttcttatttttgtactttatcatgaatgcttttagtgtgtgcataatagctacagtgcatagttgtagacaaagtacattctggggaaacaacatttatatgtagcctttactgtttgatataccaaattaaaaaaaaattgtatctcattacttatactgggacaccattaccaaaataataaaaatcactttcataatcttgaaaaaa

SEQ ID NO: 115079 - DNA, 1000 bp, Homo Sapiens
gtggtcacaggagacaacgtggggaacgtgatcctgctgaacatggacggcaaagagctttggaatctcagaatgcacaaaaagaaagtgacgcatgtggccctgaacccatgctgtgattggttcctggccacagcctccgtagatcaaacagtgaaaatttgggacctgcgccaggttagagggaaagccagcttcctctactcgctgccgcacaggcatcctgtcaacgcagcttgtttcagtcccgatggagcccggctcctgaccacggaccagaagagcgagatccgagtttactctgcttcccagtgggactgccccctgggcctgatcccgcaccctcaccgtcacttccagcacctcacacccatcaaggcagcctggcatcctcgctacaacctcattgttgtgggccgatacccagatcctaatttcaaaagttgtaccccttatgaattgaggacgatcgacgtgttcgatggaaactcagggaagatgatgtgtcagctctatgacccagaatcttctggcatcagttcgcttaatgaattcaatcccatgggggacacgctggcctctgcaatgggttaccacattctcatctggagccaggaggaagccaggacacggaagtgagagacactaaagaaggtgtgggccagacaaggccttggagcccacacatgggatcaagtcctgcaagcagaggtggtgatttgttaaagggccaaaagtatccaaggttagggttggagcaggggtgctgggacctggggcactgtgggactgggacacttttatgttaatgctctggacttgcctccagagactgctccagagttggtgacacagctgtcccaagggcccctctgtatctagcctggaaccaaggttatcttggaactaaatgacttttctcctctcagtgggtggtagcagagggatcaagcagttatttgatttgtgctcttttgatatggccaataaaaccataccg

SEQ ID NO: 115080 - DNA, 1000 bp, Homo Sapiens
ggactggtaggaaaaagctttactctttcatgccattttatttctttttgatttttaaatcattcattcaatagataccaccgtgtgacctataattttgcaaatctgttacctctgacatcaagtgtaattagcttttggagagtgggctgacatcaagtgtaattagcttttggagagtgggttttgtccattattaataattaattaattaacatcaaacacggcttctcatgctatttctacctcactttggttttggggtgttcctgataattgtgcacacctgagttcacagcttcaccacttgtccattgcgttattttctttttcctttataattctttctttttccttcataattttcaaaagaaaacccaaagctctaaggtaacaaattaccaaattacatgaagatttggtttttgtcttgcatttttttcctttatgtgacgctggaccttttctttacccaaggatttttaaaactcagatttaaaacaaggggttactttacatcctactaagaagtttaagtaagtaagtttcattctaaaatcagaggtaaatagagtgcataaataattttgttttaatctttttgtttttcttttagacacattagctctggagtgagtctgtcataatatttgaacaaaaattgagagctttattgctgcattttaagcataattaatttggacattatttcgtgttgtgttctttataaccaccgagtattaaactgtaaatcataatgtaactgaagcataaacatcacatggcatgttttgtcattgttttcaggtactgagttcttacttgagtatcataatatattgtgttttaacaccaacactgtaacatttacgaattatttttttaaacttcagttttactgcattttcacaacatatcagacttcaccaaatatatgccttactattgtattatagtactgctttactgtgtatctcaataaagcacgcagttatgttac

SEQ ID NO: 115081 - DNA, 1000 bp, Homo Sapiens
gtgccttcctcatcggggccctgctcactgctgcactctggtacatctactcgcacacgcgtgagtaccccaggcccccacagtgagcatgccgggcccctccatccacccgggggagcccagtgaagcctctgagggattgaggggccctggcaggaccctgacctccgcccctgcccccgctcccgctcccaggttcccccagcaagcgggagcccgtggtggcggtggctgccccggcctcctcggagagcagcagcaccaaccacagcatcgggagcacccagagcaccccctgctccaccagcagcatggcatagccccggccccccgcgctcgcccagcaggagagactgagcagccgccagctgggagcactggtgtgaactcaccctgggagccagtcctccactcgacccagaatggagcctgctctccgcgcctacccttcccgcctccctctcagaggcctgctgccagtgcagccactggcttggaacaccttggggtccctccaccccacagaaccttcaacccagtgggtctgggatatggctgcccaggagacagaccacttgccacgctgttgtaaaaacccaagtccctgtcatttgaacctggatccagcactggtgaactgagctgggcaggaagggagaacttgaaacagattcaggccagcccagccaggccaacagcacctccccgctgggaagagaagagggcccagcccagagccacctggatctatccctgcggcctccacacctgaacttgcctaactaactggcaggggagacaggagcctagcggagcccagcctgggagcccagagggtggcaagaacagtgggcgttgggagcctagctcctgccacatggagccccctctgccggtcgggcagccagcagagggggagtagccaagctgcttgtcctgggcctgcccctgtgtattcaccaccaataaatcagaccatgaaacctgaaaaaaaaaaaaa

SEQ ID NO: 115082 - DNA, 1000 bp, Homo Sapiens
ctccaagaaggggttcaactcggtggccaccgccaggatcttttacaagctgatgctgcggctgggcttccaggaattctacattcaaggaggggactgggggtccctgatctgcactaatatggcccagctggtgcccagccacgtgaaaggcctgcacttgaacatggctttggttttaagcaacttctctaccctgaccctcctcctgggacagcgtttcgggaggtttcttggcctcactgagagggatgtggagctgctgtaccccgtcaaggagaaggtattctacagcctgatgagggagagcggctacatgcacatccagtgcaccaagcctgacaccgtaggctctgctctgaatgactctcctgtgggtctggctgcctatattctagagaagttttccacctggaccaatacggaattccgatacctggaggatggaggcctggaaaggaagttctccctggacgacctgctgaccaacgtcatgctctactggacaacaggcaccatcatctcctcccagcgcttctacaaggagaacctgggacagggctggatgacccagaagcatgagcggatgaaggtctatgtgcccactggcttctctgccttcccttttgagctattgcacacgcctgaaaagtgggtgaggttcaagtacccaaagctcatctcctattcctacatggttcgtgggggccactttgcggcctttgaggagccggagctgctcgcccaggacatccgcaagttcctgtcggtgctggagcggcaatgacccacccctctccccccgcctgccacctccccccacaagtgccctccaggcttttcttggggaagataccccttttctgaggaatgagtttgcctccgtcccctgcccatgctgggagcccacgctcaccccctcacccctccaagctcactccccaacccccaactccgtgtggtaagcaacatggctttgatgataaacgactttactcta

SEQ ID NO: 115083 - DNA, 1000 bp, Homo Sapiens
gcctgtgtcgctgctgacgcctagcgacctggaccccctcatcctgacgctctccctcatcctcgtggtcatcctggtgctgctgaccgtgctcgcgctgctctcccaccgccgggctctgaagcagaagatctggcctggcatcccgagcccagagagcgagtttgaaggcctcttcaccacccacaagggtaacttccagctgtggctgtaccagaatgatggctgcctgtggtggagcccctgcacccccttcacggaggacccacctgcttccctggaagtcctctcagagcgctgctgggggacgatgcaggcagtggagccggggacagatgatgagggccccctgctggagccagtgggcagtgagcatgcccaggatacctatctggtgctggacaaatggttgctgccccggaacccgcccagtgaggacctcccagggcctggtggcagtgtggacatagtggccatggatgaaggctcagaagcatcctcctgctcatctgctttggcctcgaagcccagcccagagggagcctctgctgccagctttgagtacactatcctggaccccagctcccagctcttgcgtccatggacactgtgccctgagctgccccctaccccaccccacctaaagtacctgtaccttgtggtatctgactctggcatctcaactgactacagctcaggggactcccagggagcccaagggggcttatccgatggcccctactccaacccttatgagaacagccttatcccagccgctgagcctctgccccccagctatgtggcttgctcttaggacaccaggctgcagatgatcagggatccaatatgactcagagaaccagtgcagactcaagacttatggaacagggatggcgaggcctctctcaggagcaggggcattgctgattttgtctgcccaatccatcctgctcaggaaaccacaaccttgcagtatttttaaatatgtatagtttttttg

SEQ ID NO: 115084 - DNA, 1000 bp, Homo Sapiens
ggaacctctcctaaaattctcagaatggtggcatgaagctcaaaaaaatccaaagataagacctaatcctcatgacaccaaagtgaaaaaaaaattacggacattgcaactcacccctggctttcctaacccagctgttgccgaggcctacctcaaacccgtggtggatgactcgaagggatcctttctgtgggggaaacctgatctcgacaaaattagagaattttgtcagcggtatttcggctggaacagaacgaagacagatgaatctctgtttcctgtattaaagcaactcgatgcccagcagacacagctccgaattgattccttctttagattagcacaacaggagaaagaagatgctaaacgtattaagagccagagactaaacagagctgtgacatgtatgctaaggaaagagaaagaagcagcagccagcgaaatagaagcagtttctgttgccatggagaaagaatttgagctacttgataaggcaaaacgaaaaacccagaagagaggcataacaaataccttagaagagtcatcaagcctgaaaagaaagaggctttcagattctaaacgaaagaatacatgcggtggatttttgggggagacctgcctctcagaatcatctgatggatcttcaagtgaagatgctgaaagttcatctttaatgaatgtacaaaggagaacagctgcgaaagagccaaaaaccagtgcttcagattcgcagaactcagtgaaggaagctcccgtgaagaatggaggtgcgaccaccagcagctctagtgatagtgatgacgatggagggaaagagaagatggtcctcgtgaccgccagatctgtgtttgggaagaaaagaaggaaactaagacgtgcgaggggaagaaaaaggaaaacctaattaaaaaatatgtatcctctataattagttatgacagccatttgtaatgaatttgtcgcaaagacgtaataaaattaactggtggcacggtcaaaa

SEQ ID NO: 115085 - DNA, 1000 bp, Homo Sapiens
aacaatggtggatcttataatgcttggagtgtagaaaaacttgcagcagaatttgcctctaaaccttggatccaggtggacatgcaaaaggaagtcataatcacagggatccagacccaaggtgccaaacactacctgaagtcctgctataccacagagttctatgtagcttacagttccaaccagatcaactggcagatcttcaaagggaacagcacaaggaatgtgatgtattttaatggcaattcagatgcctctacaataaaagagaatcagtttgacccacctattgtggctagatatattaggatctctccaactcgagcctataacagacctacccttcgattggaactgcaaggttgtgaggtaaatggatgttccacacccctgggtatggaaaatggaaagatagaaaacaagcaaatcacagcttcttcgtttaagaaatcttggtggggagattactgggaacccttccgtgcccgtctgaatgcccagggacgtgtgaatgcctggcaagccaaggcaaacaacaataagcagtggctagaaattgatctactcaagatcaagaagataacggcaattataacacagggctgcaagtctctgtcctctgaaatgtatgtaaagagctataccatccactacagtgagcagggagtggaatggaaaccatacaggctgaaatcctccatggtggacaagatttttgaaggaaatactaataccaaaggacatgtgaagaactttttcaaccccccaatcatttccaggtttatccgtgtcattcctaaaacatggaatcaaagtattgcacttcgcctggaactctttggctgtgatatttactagaattgaacattcaaaaacccctggaagagactctttaagacctcaaaccatttagaatgggcaatgtattttacgctgtgttaaatgttaacagttttccactatttctctttcttttctattagtgaataaaattttatac

SEQ ID NO: 115086 - DNA, 889 bp, Homo Sapiens
gcagttcggcggtcccgcgggtctgtctcttgcttcaacagtgtttggacggaacagatccggggactctcttccagcctccgaccgccctccgatttcctctccgcttgcaacctccgggaccatcttctcggccatctcctgcttctgggacctgccagcaccgtttttgtggttagctccttcttgccaaccaaccatgagctcccagattcgtcagaattattccaccgacgtggaggcagccgtcaacagcctggtcaatttgtacctgcaggcctcctacacctacctctctctgggcttctatttcgaccgcgatgatgtggctctggaaggcgtgagccacttcttccgcgaattggccgaggagaagcgcgagggctacgagcgtctcctgaagatgcaaaaccagcgtggcggccgcgctctcttccaggacatcaagaagccagctgaagatgagtggggtaaaaccccagacgccatgaaagctgccatggccctggagaaaaagctgaaccaggcccttttggatcttcatgccctgggttctgcccgcacggacccccatctctgtgacttcctggagactcacttcctagatgaggaagtgaagcttatcaagaagatgggtgaccacctgaccaacctccacaggctgggtggcccggaggctgggctgggcgagtatctcttcgaaaggctcactctcaagcacgactaagagccttctgagcccagcgacttctgaagggccccttgcaaagtaatagggcttctgcctaagcctctccctccagccaataggcagctttcttaactatcctaacaagccttggaccaaatggaaataaagctttttgatgcaaaaaaaaaaaaaaaaaaa

SEQ ID NO: 115087 - DNA, 1000 bp, Homo Sapiens
gcagtgggtgacgctgccggcccccctggacaccatcaacgtccacctccgggctgggtacatcatccccctgcagggccctggcctcacaaccacagagtcccgccagcagcccatggccctggctgtggccctgaccaagggtggagaggcccgaggggagctgttctgggacgatggagagagcctggaagtgctggagcgaggggcctacacacaggtcatcttcctggccaggaataacacgatcgtgaatgagctggtacgtgtgaccagtgagggagctggcctgcagctgcagaaggtgactgtcctgggcgtggccacggcgccccagcaggtcctctccaacggtgtccctgtctccaacttcacctacagccccgacaccaaggtcctggacatctgtgtctcgctgttgatgggagagcagtttctcgtcagctggtgttagccgggcggagtgtgttagtctctccagagggaggctggttccccagggaagcagagcctgtgtgcgggcagcagctgtgtgcgggcctgggggttgcatgtgtcacctggagctgggcactaaccattccaagccgccgcatcgcttgtttccacctcctgggccggggctctggcccccaacgtgtctaggagagctttctccctagatcgcactgtgggccggggcctggagggctgctctgtgttaataagattgtaaggtttgccctcctcacctgttgccggcatgcgggtagtattagccacccccctccatctgttcccagcaccggagaagggggtgctcaggtggaggtgtggggtatgcacctgagctcctgcttcgcgcctgctgctctgccccaacgcgaccgcttcccggctgcccagagggctggatgcctgccggtccccgagcaagcctgggaactcaggaaaattcacaggacttgggagattctaaatcttaagtgcaattattttaataaaaggggcatttggaatc

SEQ ID NO: 115088 - DNA, 1000 bp, Homo Sapiens
tctgtgaacgtttttccaggtggctggaagaaggaagaaaacctgatatagccaatgctgttgtagtcgtttcctcagcctcatctcactgtgctgtggtctgtcctcacatgtgcactggtaacagactcacacagctgatgaatgcttttctctccttatgtgtggaaggaggggagcacttagacatttgctaactcccagaattggatcatctcctaagatgtacttactttttaaagtccaaatatgtttatatttaaatatacgtgagcatgttcatcatgttgtatgatttatactaagcattaatgtggctctatgtagcaaatcagttattcatgtaggtaaagtaaatctagaattatttataagaattactcattgaactaattctactatttaggaatttataagagtctaacataggcttagctacagtgaagttttgcattgcttttgaagacaagaaaagtgctagaataaataagattacagagaaaattttttgttaaaaccaagtgatttccagctgatgtatctaatattttttaaaacaaacattatagaggtgtaatttatttacaataaaatgttcctactttaaatatacaattcagtgagttttgataaattgatatacccatgtaaccaacactccagtcaagcttcagaatatttccatcaccccagaaggttctcttgtatacctgctcagtcagttcctttcactcccaattgttggcagccattgataggaattctatcactataggttagttttctttgttccagaacatcatgaaagcggcgtcatgtactgtgtattcttatgaatggtttctttccatcagcataatgatttgagattggtccatgttgtgtgattcagtggtttgttccttcttatttctgaagagttttccattgtatgaatataccacaatttgtttcctccccaccagtttctgatactacaattaaaactgtctacatttac

SEQ ID NO: 115089 - DNA, 1000 bp, Homo Sapiens
tcgctgcgggcctcagccacaggcatgatcatcatggacggtgtggaggtgccagaggagaatgtgctccctggtgcatccagcctggggggtcccttcggctgcctgaacaacgcccggtacggcatcgcgtggggcgtgcttggagcttcggagttctgcttgcacacagcccggcagtacgccctcgacaggatgcagtttggtgtcccactggccaggaaccagctgattcagaagaagctggcagacatgctcactgagattaccctgggccttcacgcctgcctgcagctcggccgcttgaaggaccaggacaaggctgcccccgagatggtttctctgctgaagaggaataactgtgggaaagccctggacatcgcccgccaggcccgagacatgctgggggggaatgggatttctgacgagtatcacgtgatccggcacgccatgaacctggaggccgtgaacacctacgaaggtacacatgacattcacgccctgatccttgggagagctatcacgggaatccaggcgttcacggccagcaagtgagccgctccatcaggggcccgaaactctcaagcccctttctggagagatgcctggctggaccgtaggagcgctgtgctctgagcttagaaagggaggtggcggatggagtgggaagtgagagacactgatttttaaatatcaaaatttcccttctgaagtcgttcagatgtgttccttaaaaagaagatggaattctctgtagagcgtctcaatccacttttaaccatggatgagagcagactccatttaccctgaaatagcagcttctcttgagaggagagtgacatggaagcaactccgtctgctgcagctgaccccctcacactgagttcacagtgcgccctccctccctcccatctgggggtagtgccttatgctgggtgttggagcagagtgagggagaggaaaataaagacctgcacatctgaaaaaaaaaaaaaaaaaa

SEQ ID NO: 115090 - DNA, 1000 bp, Homo Sapiens
aaagcaagcattcagaagaaaaagaagcaacctcagtaatttagaaatcattttgcaatcccttaatatcctaaacatcattcatttttgttgttgttgttgttgttgagacagagtctcgctctgtcgccaggctagagtgcggtggcgcgatcttgactcactgcaatctccacctcccacaggttcaggcgattcccgtgcctcagcctcctgagtagctgggactacaggcacgcaccaccatgccaggctaatttttttgtattttagcagagacggggtttcaccatgttggccaggatggtctcgatctcctgacctcgtgatccacccgactcggcctcccaaagtgctgggattacaggtgtaagccaccgtgcccagccctaaacatcattcttgagagcattgggatatctcctgaaaaggtttatgaaaaagaagaatctcatctcagtgaagaatacttctcattttttaaaaaagcttaaaactttgaagttagctttaacttaaatagtatttcccatttatcgcagaccttttttaggaagcaagcttaatggctgataattttaaattctctctcttgcaggaaggactatgaaaagctagaattgagtgtttaaagttcaacatgttatttgtaatagatgtttgatagattttctgctactttgctgctatggttttctccaagagctacataatttagtttcatataaagtatcatcagtgtagaacctaattcaattcaaagctgtgtgtttggaagactatcttactatttcacaacagcctgacaacatttctatagccaaaaatagctaaatacctcaatcagtctcagaatgtcattttggtactttggtggccacataagccattattcactagtatgactagttgtgtctggcagtttatatttaactctctttatgtctgtggattttttccttcaaagtttaataaatttattttcttggaaaaaaaaaaa

SEQ ID NO: 115091 - DNA, 1000 bp, Homo Sapiens
aatatttaccaggagaatttttttcttaacaagccaacatttaaaatttatgttttatgtcaataaaagaaaatatactttattgtgacttcaactatatttcttatcccttacatttttatttaattgtcttagcttaaaaaaagaagaaactgtggaatactacagtaaatattgttttcaaacacaagcaataattcaaatagttatttttcttttgaattaattttagacatattttggatcctattgaggggataagaggatgtcaaaaaagttaaatacctaagtagaaaaaaatatagaaataaagccaagaatctctttcagttcaaatgttatcaattgttaataagaaattgctatctgggatgacagaattacctctgcttagtatctcattataactgaaagaaggtttatcattacaaataccttccaatgaaaccaagaatttctcaaaatatttaatgtcacatattataagaagttacctaatcctgcttcttaacatcaatttttaaaaatatcttaaaattactttgttttgtagtaaacagtgaagaaaagattgcctcctaattatttttttcaatgagtgctgaatgggaaaacatttatatcttactataaaaggttctgttttgtttggaatcaatggtagctttattgactgttctgattgtgctgtttctaatttattgaatctgctaggttttattgatgcagccaccacttaagtgacataaatattatagaaaggtactgtgaaatgatcactttgtggcaggggtacttttaaacataaatgtttctacaaaagtaggttgagttcattgtaaataattgtgaaagccactgttcaaataattttaagattacattaatttttctataaattggaagatttataaatgtttgaaattgtacacattgatatttaatgacaaatttacttaaaataaattgaccccttgttcttaaaaaaaaaaaaaaaaaa

SEQ ID NO: 115092 - DNA, 1000 bp, Homo Sapiens
atctggtacatcaactgctttgggtgtgagacacacgccatgctgccctatgaccagtacctgcaccgctttgctgcgtacttccagcagggcgacatggagtccaatgggaaatacatcaccaaatctggaacccgtgtggaccaccagacaggccccattgtgtggggggagccagggaccaatggccagcatgctttttaccagctcatccaccaaggcaccaagatgataccctgtgacttcctcatcccggtccagacccagcaccccatacggaagggtctgcatcacaagatcctcctggccaacttcttggcccagacagaggccctgatgaggggaaaatcgacggaggaggcccgaaaggagctccaggctgcgggcaagagtccagaggaccttgagaggctgctgccacataaggtctttgaaggaaatcgcccaaccaactctattgtgttcaccaagctcacaccattcatgcttggagccttggtcgccatgtatgagcacaagatcttcgttcagggcatcatctgggacatcaacagctttgaccagtggggagtggagctgggaaagcagctggctaagaaaatagagcctgagcttgatggcagtgctcaagtgacctctcacgacgcttctaccaatgggctcatcaacttcatcaagcagcagcgcgaggccagagtccaataaactcgtgctcatctgcagcctcctctgtgactcccctttctcttctcgtccctcctccccggagccggcactgcatgttcctggacaccacccagagcaccctctggttgtgggcttggaccacgagcccttagcagggaaggctggtctcccccagcctaacccccagcccctccatgtctatgctccctctgtgttagaattggctgaagtgtttttgtgcagctgacttttctgacccatgttcacgttgttcacatcccatgtagaaaaataaagatgccacggaggaggt

SEQ ID NO: 115093 - DNA, 1000 bp, Homo Sapiens
cagaggaagtgatgcagatgtgtgaccgctatgggattgtggtcatcgatgagtgtcccggcgtgggcctggcgctgccgcagttcttcaacaacgtttctctgcatcaccacatgcaggtgatggaagaagtggtgcgtagggacaagaaccaccccgcggtcgtgatgtggtctgtggccaacgagcctgcgtcccacctagaatctgctggctactacttgaagatggtgatcgctcacaccaaatccttggacccctcccggcctgtgacctttgtgagcaactctaactatgcagcagacaagggggctccgtatgtggatgtgatctgtttgaacagctactactcttggtatcacgactacgggcacctggagttgattcagctgcagctggccacccagtttgagaactggtataagaagtatcagaagcccattattcagagcgagtatggagcagaaacgattgcagggtttcaccaggatccacctctgatgttcactgaagagtaccagaaaagtctgctagagcagtaccatctgggtctggatcaaaaacgcagaaaatatgtggttggagagctcatttggaattttgccgatttcatgactgaacagtcaccgacgagagtgctggggaataaaaaggggatcttcactcggcagagacaaccaaaaagtgcagcgttccttttgcgagagagatactggaagattgccaatgaaaccaggtatccccactcagtagccaagtcacaatgtttggaaaacagcccgtttacttgagcaagactgataccacctgcgtgtcccttcctccccgagtcagggcgacttccacagcagcagaacaagtgcctcctggactgttcacggcagaccagaacgtttctggcctgggttttgtggtcatctattctagcagggaacactaaaggtggaaataaaagattttctattatggaaataaagagttggcatgaaagtcgctactg

SEQ ID NO: 115094 - DNA, 1000 bp, Homo Sapiens
tctgcaatgttaatcatggcggaggaaaaggctctggccatgggttataagccgaaggcatatttgagggattttatgtatgtgtctcaggatccaaaagatcaactattacttggaccaacatatgctactccaaaagttctagaaaaggcaggattgaccatgaatgatattgatgcttttgaatttcatgaagctttctcgggtcagattttggcaaattttaaagccatggattctgattggtttgcagaaaactacatgggtagaaaaaccaaggttggattgcctcctttggagaagtttaataactggggtggatctctgtccctgggacacccatttggagccactggctgcaggttggtcatggctgctgccaacagattacggaaagaaggaggccagtatggcttagtggctgcgtgtgcagctggagggcagggccatgctatgatagtggaagcttatccaaaataatagatccagaagaagtgacctgaagtttctgtgcaacactcacactaggcaatgccatttcaatgcattactaaatgacatttgtagttcctagctcctcttaggaaaacagttcttgtggccttctattaaatagtttgcacttaagccttgccagtgttctgagcttttcaataatcagtttactgctctttcagggatttctaagccaccagaatctcacatgagatgtgtgggtggttgtttttggtctctgttgtcactaaagactaaatgagggtttgcagttgggaaagaggtcaactgagatttggaaatcatctttgtaatatttgcaaattatacttgttcttatctgtgtcctaaagatgtgttctctataaaatacaaaccaacgtgcctaattaattatggaaaaataattcagaatctaaacaccactgaaaacttataaaaaatgtttagatacataaatatggtggtcagcgttaataaagtggagaaatattggaaaaaaaaa

SEQ ID NO: 115095 - DNA, 1000 bp, Homo Sapiens
gaagtgcttctgccgaaattcaagctggagaagaactacaatctagtggagtccctgaagttgatggggatcaggatgctgtttgacaaaaatggcaacatggcaggcatctcagaccaaaggatcgccatcgacctgttcaagcaccaaggcacgatcacagtgaacgaggaaggcacccaagccaccactgtgaccacggtggggttcatgccgctgtccacccaagtccgcttcactgtcgaccgcccctttcttttcctcatctacgagcatcgcaccagctgcctgctcttcatgggaagagtggccaaccccagcaggtcctagaggtggaggtctaggtgtctgaagtgccttgggggcaccctcattttgtttccattccaacaacgagaacagagatgttctggcatcatttacgtagtttacgctaccaatctgaattcgaggcccatatgagaggagcttagaaacgaccaagaagagaggcttgttggaatcaattctgcacaatagcccatgctgtaagctcatagaagtcactgtaactgtagtgtgtctgctgttacctagagggtctcacctccccactcttcacagcaaacctgagcagcgcgtcctaagcacctcccgctccggtgaccccatccttgcacacctgactctgtcactcaagcctttctccaccaggcccctcatctgaataccaagcacagaaatgagtggtgtgactaattccttacctctcccaaggagggtacacaactagcaccattcttgatgtccagggaagaagccacctcaagacatatgaggggtgccctgggctaatgttagggcttaattttctcaaagcctgacctttcaaatccatgatgaatgccatcagtccctcctgctgttgcctccctgtgacctggaggacagtgtgtgccatgtctcccatactagagataaataaatgtagccacatttactgtgaaaaaaaaaaaaaaaa

SEQ ID NO: 115096 - DNA, 1000 bp, Homo Sapiens
tgggcctgcaattgcaaaatgcttaggagaaaaatggtctcaccctccatcatgcataaaaacagattgtctcagtttacctagctttgaaaatgccatacccatgggagagaagaaggatgtgtataaggcgggtgagcaagtgacttacacttgtgcaacatattacaaaatggatggagccagtaatgtaacatgcattaatagcagatggacaggaaggccaacatgcagagacacctcctgtgtgaatccgcccacagtacaaaatgcttatatagtgtcgagacagatgagtaaatatccatctggtgagagagtacgttatcaatgtaggagcccttatgaaatgtttggggatgaagaagtgatgtgtttaaatggaaactggacggaaccacctcaatgcaaagattctacaggaaaatgtgggccccctccacctattgacaatggggacattacttcattcccgttgtcagtatatgctccagcttcatcagttgagtaccaatgccagaacttgtatcaacttgagggtaacaagcgaataacatgtagaaatggacaatggtcagaaccaccaaaatgcttacatccgtgtgtaatatcccgagaaattatggaaaattataacatagcattaaggtggacagccaaacagaagctttattcgagaacaggtgaatcagttgaatttgtgtgtaaacggggatatcgtctttcatcacgttctcacacattgcgaacaacatgttgggatgggaaactggagtatccaacttgtgcaaaaagatagaatcaatcataaagtgcacacctttattcagaactttagtattaaatcagttctcaatttcattttttatgtattgttttactcctttttattcatacgtaaaattttggattaatttgtgaaaatgtaattataagctgagaccggtggctctcttcttaaaagcaccatattaaatcctggaaaactaaaaaaaaaaaa

SEQ ID NO: 115097 - DNA, 1000 bp, Homo Sapiens
tgtggcgcaggcatggctgcggttgtggataagatccgcgagaacagaggactggaccgtctgaatgtgactgtgggagtggacgggacactctacaagcttcatccacacttctccagaatcatgcaccagacggtgaaggaactgtcaccaaaatgtaacgtgtccttcctcctgtctgaggatggcagcggcaagggggccgccctcatcacggccgtgggcgtgcggttacgcacagaggcaagcagctaagagtccgggatccccagcctactgcctctccagcacttctctcttcaagcggcgaccccctaccctcccagcgagttgcgctgggagacgctggcgccagggcctgccggcgcggggaggaaagcaaaatccaactaatggtatatattgtagggtacagaatagagcgtgtgctgttgataatatctctcacccggatccctcctcacttgccctgccactttgcatggtttgattttgacctggtcccccacgtgtgaagtgtagtggcatccatttctaatgtatgcattcatccaacagagttatttattggctggagatggaaaatcacaccacctgacaggccttctgggcctccaaagcccatccttggggttccccctccctgtgtgaaatgtattatcaccagcagacactgccgggcctccctcccgggggcactgcctgaaggcgagtgtgggcatagcattagctgcttcctcccctcctggcacccactgtggcctggcatcgcatcgtggtgtgtcaatgccacaaaatcgtgtgtccgtggaaccagtcctagccgcgtgtgacagtcttgcattctgtttgtctcgtggggggaggtggacagtcctgcggaaatgtgtcttgtcttccatttggataaaaggaaccaaccaacaaacaatgccatcactggaatttcccaccgctttgtgagccgtgtcgtatgacctagtaaactttgtaccaattc

SEQ ID NO: 115098 - DNA, 1000 bp, Homo Sapiens
aaaactgcagaatctggtgatcccctgggctccagagaacctaacacttcacaaactgagtgaatcccagctagaactgaactggaacaacagattcttgaaccactgtttggagcacttggtgcagtaccggactgactgggaccacagctggactgaacaatcagtggattatagacataagttctccttgcctagtgtggatgggcagaaacgctacacgtttcgtgttcggagccgctttaacccactctgtggaagtgctcagcattggagtgaatggagccacccaatccactgggggagcaatacttcaaaagagaatcctttcctgtttgcattggaagccgtggttatctctgttggctccatgggattgattatcagccttctctgtgtgtatttctggctggaacggacgatgccccgaattcccaccctgaagaacctagaggatcttgttactgaataccacgggaacttttcggcctggagtggtgtgtctaagggactggctgagagtctgcagccagactacagtgaacgactctgcctcgtcagtgagattcccccaaaaggaggggcccttggggaggggcctggggcctccccatgcaaccagcatagcccctactgggcccccccatgttacaccctaaagcctgaaacctgaaccccaatcctctgacagaagaaccccagggtcctgtagccctaagtggtactaactttccttcattcaacccacctgcgtctcatactcacctcaccccactgtggctgatttggaattttgtgcccccatgtaagcaccccttcatttggcattccccacttgagaattacccttttgccccgaacatgtttttcttctccctcagtctggcccttccttttcgcaggattcttcctccctccctctttccctcccttcctctttccatctaccctccgattgttcctgaaccgatgagaaataaagtttctgttgataatcatc

SEQ ID NO: 115099 - DNA, 1000 bp, Homo Sapiens
gctgcaaatactgtatattcaggacttgaaagaaatggtgaatgcctatggaactagtggatccaaactgatccagtataagactactgaatctgctaccaaaacagttaatcagtgagtcgagtgttctattttttgttttgtttcctcccctatctgtattcccaaaaattactttggggctaatttaacaagaactttaaattgtgttttaattgtaaaaatggcagggggtggaattattactctatacattcaacagagactgaatagatatgaaagctgattttttttaattaccatgcttcacaatgttaagttatatggggagcaacagcaaacaggtgctaatttgttttggatatagtataagcagtgtctgtgttttgaaagaatagaacacagtttgtagtgccactgttgttttggggggggctttttttctttttccggaaaatccttaaaccttaagatactaaggacgttgttttggttgtacttggaattcttagtcacaaaatatattttgtttacaaaaatttctgtaaaacaggttataacagtgtttaaagtctcagtttcttgcttggggaacttgtgtccctaatgtgttagattgctagattgctaaggagctgatacttgacagttttttagacctgtgttactaaaaaaaagatgaatgtcggaaaagggtgttgggagggtggtcaacaaagaaacaaagatgttatggtgtttagacttatggttgttaaaaatgtcatctcaagtcaagtcactggtctgtttgcatttgatacatttttgtactaactagcattgtaaaattatttcatgattagaaattacctgtggatatttgtataaaagtgtgaaataaattttttataaaagtgttcattgtttcgtaacacagcattgtatatgtgaagcaaactctaaaattataaatgacaacctgaattatctatttcatcaaaaaaaaaaaaaaaaaaaa

SEQ ID NO: 115100 - DNA, 1000 bp, Homo Sapiens
tgtgcccagaatactgatggaattttttttgtacgacgtcagatgtttaaaacaccttctatagcatcacttaaaacacgttttaaggactgactgaggcagtttgaggattagtttagaacaggtttttttgtttgtttgttttttgtttttctgctttagacttgaaaagagacaggcaggtgatctgctgcagagcagtaagggaacaagttgagctatgacttaacatagccaaaatgtgagtggttgaatatgattaaaaatatcaaattaattgtgtgaacttggaagcacaccaatctgactttgtaaattctgatttcttttcaccattcgtacataatactgaaccacttgtagatttgattttttttttaatctactgcatttagggagtattctaataagctagttgaatacttgaaccataaaatgtccagtaagatcactgtttagatttgccatagagtacactgcctgccttaagtgaggaaatcaaagtgctattacgaagttcaagatcaaaaaggcttataaaacagagtaatcttgttggttcaccattgagaccgtgaagatactttgtattgtcctattagtgttatatgaacatacaaatgcatctttgatgtgttgttcttggcaataaattttgaaaagtaatatttattaaatttttttgtatgaaaacatggaacagtgtggctcttctgagcttacgtagttctaccggctttgccgtgtgcttctgccaccctgctgagtctgttctggtaatcggggtataataggctctgcctgacagagggatggaggaagaactgaaaggcttttcaaccacaaaactcatctggagttctcaaagacctggggctgctgtgaagctggaactgcgggagccccatctaggggagccttgattcccttgttattcaacagcaagtgtgaatactgcttgaataaacaccactggattaatggaaaaaaaaaaaaaaaa

SEQ ID NO: 115101 - DNA, 1000 bp, Homo Sapiens
ggtttttagtagcatccacactttctcctcaccagatgccagttgcaccctcccccaagttgagacaaccaaaaatgtctccagatattgccagctaccccttgagggatggtacctctggttgagaaccattgctagagaatgatctttactgaatttgccctttataagaaacccagtgaatttctagagcaagtcccaaaaactaagggacagctaagaagttattatggttgacttcaaaggcctaaactgtgttttttatgtccactaaacaacttgattaaaagacggaattttgactcgtgtctgtatcatacaagtacaaatactaattttgccctatgtatccgtaaatgtcatttgtgattttgacttatttatttaatgccctttcttatgccgtgggttttcaagtttactcatttctatggttgcaaataactctaaaacttattatataaactttcatattataggcagaacacaatggctaaatatctgttgcatgtactttaaagtttattataaaatataaacagatatataaagatgttgactcttacctgtgattttgcatggtcagactcggtgtcaggtacggagaggattctcatgactgtcttacctctactgaatattctagtgagttatatgatttacggagtgattaacagaggtctatataaagttacttttcccctttacttaattatattgtagtgtgcagataacaaaactgctaccttctcatccaagtggtctgtagaattcatgtcccttacagtggtcatttaaagtcaatatttatttatgtatgtaataaaaaaagttggatttttgtgtatgtctgtcacattatttagagagaagtaatcttgtaaaaatgttttgtaaaaaacaaaaaagtattgtaaatagtcttgatattctgtgactcattattttcatgttagagtttgtacatactggttcaataataaagtatccttaaaccaga

SEQ ID NO: 115102 - DNA, 1000 bp, Homo Sapiens
gagactggagccattacttcaagatcatcgaggacctgagggctcagatcttcgcaaatactgtggacaatgcccgcatcgttctgcagattgacaatgcccgtcttgctgctgatgactttagagtcaagtatgagacagagctggccatgcgccagtctgtggagaacgacatccatgggctccgcaaggtcattgatgacaccaatatcacacgactgcagctggagacagagatcgaggctctcaaggaggagctgctcttcatgaagaagaaccacgaagaggaagtaaaaggcctacaagcccagattgccagctctgggttgaccgtggaggtagatgcccccaaatctcaggacctcgccaagatcatggcagacatccgggcccaatatgacgagctggctcggaagaaccgagaggagctagacaagtactggtctcagcagattgaggagagcaccacagtggtcaccacacagtctgctgaggttggagctgctgagacgacgctcacagagctgagacgtacagtccagtccttggagatcgacctggactccatgagaaatctgaaggccagcttggagaacagcctgagggaggtggaggcccgctacgccctacagatggagcagctcaacgggatcctgctgcaccttgagtcagagctggcacagacccgggcagagggacagcgccaggcccaggagtatgaggccctgctgaacatcaaggtcaagctggaggctgagatcgccacctaccgccgcctgctggaagatggcgaggactttaatcttggtgatgccttggacagcagcaactccatgcaaaccatccaaaagaccaccacccgccggatagtggatggcaaagtggtgtctgagaccaatgacaccaaagttctgaggcattaagccagcagaagcagggtaccctttggggagcaggaggccaataaaaagttcagagttcaaaaaaaaaaaaaaaaaaa

SEQ ID NO: 115103 - DNA, 1000 bp, Homo Sapiens
ccaacgcccctggtgtccagatccgcgtccctggctttggcaagacctactctgtggagtacctggacagcagcaagctggcagggtacctgcacacactggtgcagaacctggtcaacaatggctacgtgcgggacgagactgtgcgcgccgccccctatgactggcggctggagcccggccagcaggaggagtactaccgcaagctcgcagggctggtggaggagatgcacgctgcctatgggaagcctgtcttcctcattggccacagcctcggctgtctacacttgctctatttcctgctgcgccagccccaggcctggaaggaccgctttattgatggcttcatctctcttggggctccctggggtggctccatcaagcccatgctggtcttggcctcaggtgacaaccagggcatccccatcatgtccagcatcaagctgaaagaggagcagcgcataaccaccacctccccctggatgtttccctctcgcatggcgtggcctgaggaccacgtgttcatttccacacccagcttcaactacacaggccgtgacttccaacgcttctttgcagacctgcactttgaggaaggctggtacatgtggctgcagtcacgtgacctcctggcaggactcccagcacctggtgtggaagtatactgtctttacggcgtgggcctgcccacgccccgcacctacatctacgaccacggcttcccctacacggaccctgtgggtgtgctctatgaggatggtgatgacacggtggcgacccgcagcaccgagctctgtggcctgtggcagggccgccagccacagcctgtgcacctgctgcccctgcacgggatacagcatctcaacatggtcttcagcaacctgaccctggagcacatcaatgccatcctgctgggtgcctaccgccagggtccccctgcatccccgactgccagcccagagcccccgcctcctgaataaagaccttcctttgctaccgt

SEQ ID NO: 115104 - DNA, 1000 bp, Homo Sapiens
ttttatttaaggggaattaacaattgccagggaaaccagccaacccaagtttattatatcattaaccttatcataaattcaaacctaagttgctggaccctggtgtgaggacataaatcttccaaagttttgcctatcctaagagctgcatttttctactgctctttaccttgcattttagctaatttaggagttttgagaatgtattggatacgctccagtacataaggagttgccgcatattatatcagactgctttgagaaatctcatccctagtctattgcagttgtttctattagcttactgattaactcagtcctgacacaccttttgggaaatgctgatttaaacttcttaactggcaacagttggaacagtaatcagtttgctaacatatttaaagtcttgaatgttgaagaactcatgtgatttacccttttcaactttttggaaaacgatttaatttattctaattagattaaccctattaatctatggattgggtatcaaaatgaatgccagtccagatgtgcctagacacgaaattggagctgaggactctcacgatatgcaagttcatccaacgtgaagataccataagctttttctctgaaccagagaaatgaaagtcagtttaagaggctgatagatcttggccctgttaaggcatccacttcacagttctgaaggctgagtcagccccactccacagttaggccaagaattagattttaaaacttcatctgtctgtcccagttaactgttaaataaggcctcatcctccactgaagagtatggattgaaggattgtgaactatgtttagtgtgattgtgaacttggtgcctaatgttccatgtctgaagtttgccccagtgctacacgttggagtatacctatgtgtgtgctttgccactgaagtaagattttgcctgtatggtactgttttgtttgttaataaagtgcactgccacccccaatgcaaaaaaaaaaaaaaaaaa

SEQ ID NO: 115105 - DNA, 1000 bp, Homo Sapiens
ttcagggttggcccctgcccggctgcggaatgaaccacatcttgctctgctgacagacacaggcccggctccaggctcctttagcgcccagttgggtggatgcctggtggcagctgcggtccacccaggagccccgaggccttctctgaaggacattgcggacagccacggccaggccagagggagtgacagaggcagccccattctgcctgcccaggcccctgccaccctggggagaaagtacttctttttttttatttttagacagagtctcactgttgcccaggctggcgtgcagtggtgcgatctgggttcactgcaacctccgcctcttgggttcaagcgattcttctgcttcagcctcccgagtagctgggactacaggcacccaccatcatgtctggctaatttttcatttttagtagagacagggttttgccatgttggccaggctggtctcaaactcttgacctcaggtgatccacccacctcagcctcccaaagtgctgggattacaagcgtgagccactgcaccgggccacagagaaagtacttctccaccctgctctccgaccagacaccttgacagggcacaccgggcactcagaagacactgatgggcaacccccagcctgctaattccccagattgcaacaggctgggcttcagtggcagctgcttttgtctatgggactcaatgcactgacattgttggccaaagccaaagctaggcctggccagatgcaccagcccttagcagggaaacagctaatgggacactaatggggcggtgagaggggaacagactggaagcacagcttcatttcctgtgtcttttttcactacattataaatgtctctttaatgtcacaggcaggtccagggtttgagttcataccctgttaccattttggggtacccactgctctggttatctaatatgtaacaagccaccccaaatcatagtggcttaaaacaacactcacatttaaaaaaaaaa

SEQ ID NO: 115106 - DNA, 1000 bp, Homo Sapiens
gaaatgactgcagcttgtaccccccggagaaggatcattaacctcactagtgttttgagtctccaggaagaaattaatgagcagggacatgaggttctccgggagatgttgcataaccactccttcgtgggctgtgtgaatcctcagtgggccttggcacagcatcaaaccaagttataccttctcaacaccaccaagcttagtgaagaactgttctaccagatactcatttatgattttgccaattttggtgttctcaggttatcggagccagcaccgctctttgaccttgccatgcttgccttagatagtccagagagtggctggacagaggaagatggtcccaaagaaggacttgctgaatacattgttgagtttctgaagaagaaggctgagatgcttgcagactatttctctttggaaattgatgaggaagggaacctgattggattaccccttctgattgacaactatgtgccccctttggagggactgcctatcttcattcttcgactagccactgaggtgaattgggacgaagaaaaggaatgttttgaaagcctcagtaaagaatgcgctatgttctattccatccggaagcagtacatatctgaggagtcgaccctctcaggccagcagagtgaagtgcctggctccattccaaactcctggaagtggactgtggaacacattgtctataaagccttgcgctcacacattctgcctcctaaacatttcacagaagatggaaatatcctgcagcttgctaacctgcctgatctatacaaagtctttgagaggtgttaaatatggttatttatgcactgtgggatgtgttcttctttctctgtattccgatacaaagtgttgtatcaaagtgtgatatacaaagtgtaccaacataagtgttggtagcacttaagacttatacttgccttctgatagtattcctttatacacagtggattgattataaataaatagatgtgtcttaacataa

SEQ ID NO: 115107 - DNA, 1000 bp, Homo Sapiens
agtgagaagatgatccacaacttgagaagacatttataatacaaataactgatgaaggattcataatcacaaatatagagaattcctatttaaaaaaatagaaaaatagtgaagactacacaagaggaaatagggcttttaaataaatagatgttctgtagcattggtcagggaaatatgaattaggaccacaatgagattccattttatatccataagatttgcaaaggttgggtctgacagtaccagttgttagatctgtagggacttgtacaacattgtggatgtgtaaacaggcaccactgctttaaaaaacaattatcccttacagacttgaacatttgcagacgttatgatcttgcttccaactcccacctgtatgtccagcaaactcttgcatgtggccactaggaggaatgtgtaagaatgttcatagttacatatttataatagttaataactggaaaaagtgaaatgtatgtctgtctacaggaaaataggtgaataattagatatatatattcattctacgggatattattcagtagtggaaatgagtgaactacagctatacctcacaataagaatgaatctcagaaaatattaaggaaaaaagcaagtttgaagagaccacatggggcgtactatttttattgggcccaaaaacaagcaaaaccaaagaatatgtagtctaagcatacgtatacaataaaactatgctattaaaaaaaaaaggtaactgataaaccaaaattgagcatagtaattacccacagaaggaggaagtggaagggacaggagcacataggtagatgccaagttatgcagctgttctggttcctcctggtaggcttacaagtgtttactatatgctattaatacattatactttataactaatagataacagttttttacatattaaatatgttctacttaaatatattataaaaaataaaggcaaagtggaatgtttaaaaaaaaaaaaaaaaaaaaaaaa

SEQ ID NO: 115108 - DNA, 1000 bp, Homo Sapiens
ggttcatatccccagatgtgtccacaaacctgtccaggagttgtgtcttaaaattgatttcctgtccctcttcctaaggacaggggtaacagtcaaagtgaaggaatgatgggttcttgcctgtcttgctttggtccgtatttcccaagccctcctcttttagccaaggctacagggcacttgtcttccctggtggctctcccctttggagagagctagtggcagagaacctagctaggtctccttgggctttgaatgcaggagcacccagtgccccaggccttgcactgtgctgcccaaggagtattttctgggtggatctcccatactcctcagggttctgaggtccttgtatttagggtatggtgtaaaaacttacatatgcacattttgttacatcatttaagatgattgaagctttactggttaagtacagggtcaccagagaaagttcctttccccagttgatgtcttgaggctgttgagaaacttaggacagaagcctacctcatcccaggcctgcccctccgtgcatagctctgcctttgggtcttgttcatagtgctgttcaggcaaaatggaatagtctcaggagggaacaccttctcttgctagctccaggaaggctttgtgggaaatgagttgagaccatggacttgggagttgggggccagagttgagcctggacttgaccaattaattcccttacctttcagcccaagatagctacatgtctttacttgctgtataagttttccttttgtcctgggggtgcctgattgatcctatctcttcacccttcattctttcaacaaacatgccatctatctcccaggacatttattcccttctattcaaggccagttaggaatgcaattattttttttttcagttaaatacagacttgtttggacgcaaggtaccctttctctttttaaaaactttttatcatgaaaactttcaaatacaaaaataaaatggtagagagtgaacctccatg

SEQ ID NO: 115109 - DNA, 1000 bp, Homo Sapiens
cgctgtccccacctcctcgacttcttcaaggtgcgccctgatgacctcaagctccccacagacaaccagacaaaaaagccagagacatacttgatgcccaaagatggcaagagtaccgcgacagacatcaccggccccatcatcctgcagacgtaccgcgccattgccgactacgagaagacctcgggctccgagatggctctgtccacgggggacgtggtggaggtcgtggagaagagcgagagcggttggtggttctgtcagatgaaagcaaagcgaggctggatcccagcatccttcctcgagcccctggacagtcctgacgagacggaagaccctgagcccaactatgcaggtgagccatacgtcgccatcaaggcctacactgctgtggagggggacgaggtgtccctgctcgagggtgaagctgttgaggtcattcacaagctcctggacggctggtgggtcatcaggaaagacgacgtcacaggctactttccgtccatgtacctgcaaaagtcggggcaagacgtgtcccaggcccaacgccagatcaagcggggggcgccgccccgcaggtcgtccatccgcaacgcgcacagcatccatcagcggtcgcggaagcgcctcagccaggacgcctatcgccgcaacagcgtccgttttctgcagcagcgacgccgccaggcgcggccgggaccgcagagccccgggagcccgctcgaggaggagcggcagacgcagcgctctaaaccgcagccggcggtgcccccgcggccgagcgccgacctcatcctgaaccgctgcagcgagagcaccaagcggaagctggcgtctgccgtctgaggctggagcgcagtccccagctagcgtctcggcccttgccgccccgtgcctgtacatacgtgttctatagagcctggcgtctggacgccgagggcagccccgacccctgtccagcgcggctcccgccaccctcaataaatgttgcttggagtgg

SEQ ID NO: 115110 - DNA, 1000 bp, Homo Sapiens
caccttctgggtgtggacaccctggtagtcaccaatgcagcaggagggctgaaccccaagtttgaggttggagatatcatgctgatccgtgaccatatcaacctacctggtttcagtggtcagaaccctctcagagggcccaatgatgaaaggtttggagatcgtttccctgccatgtctgatgcctacgaccggactatgaggcagagggctctcagtacctggaaacaaatgggggagcaacgtgagctacaggaaggcacctatgtgatggtggcaggccccagctttgagactgtggcagaatgtcgtgtgctgcagaagctgggagcagacgctgttggcatgagtacagtaccagaagttatcgttgcacggcactgtggacttcgagtctttggcttctcactcatcactaacaaggtcatcatggattatgaaagcctggagaaggccaaccatgaagaagtcttagcagctggcaaacaagctgcacagaaattggaacagtttgtctccattcttatggccagcattccactccctgacaaagccagttgacctgccttggagtcgtctggcatctcccacacaagacccaagtagctgctaccttctttggccccttgctggagtcatgtgcctctgtccttaggttgtagcagaaaggaaaagattcctgtccttcacctttcccactttcttctaccagacccttctggtgccagatcctcttctcaaagctgggattacaggtgtgagcatagtgagaccttggcgctacaaaataaagctgttctcattcctgttctttcttacacaagagctggagcccgtgccctaccacacatctgtggagatgcccaggatttgactcgggccttagaactttgcatagcagctgctactagctctttgagataatacattccgaggggctcagttctgccttatctaaatcaccagagaccaaacaaggactaatccaatacctcttgga

SEQ ID NO: 115111 - DNA, 1000 bp, Homo Sapiens
ctttccccgcaacggcaagttcactgcagaccagaaggccgtctatgaggcagtgctgctgagctcccgtgccgtcatgggtgccatgaagccaggtgactggtggcctgacatcgaccgcctggctgaccgcatccacctggaggagctggcccacatgggcatcctgagcggcagcgtggacgccatggtccaggctcacctgggggccgtgtttatgcctcacgggcttggccacttcctgggcattgacgtgcacgacgtgggaggctacccagagggcgtggagcgcatcgacgagcccggcctgcggagcctgcgcactgcacggcacctgcagccaggcatggtgctcaccgtggagccgggcatctacttcatcgaccacctcctggatgaggccctggcggacccggcccgcgcctccttccttaaccgcgaggtcctgcagcgctttcgcggttttggcggggtccgcatcgaggaggacgtcgtggtgatcgacagcggcatagagctgctgacctgcgtgccccgcactgtggaagagattgaagcatgcatggcaggctgtgacaaggcctttacccccttctctggccccaagtagagccagccagaaatcccagcgcacctgggggcctggccttgcaacctcttttcgtgatgggcagcctgctggtcagcactccagtagcgagagacggcacccagaatcagatcccagcttcggcatttgatcagaccaaacagtgctgtttcccggggaggaaacacttttttaattacccttttgcaggcaccacctttaatctgttttataccttgcttattaaatgagcgacttaaaatgattgaaaataatgctgtcctttagtagcaagtaaaatgtgtcttgctgtcatttatattccttttcccaggaaagaagcatttctgatactttctgtcaaaaatcaatatgcagaatggcatttgcaataaaaggtttcctaaaatg

SEQ ID NO: 115112 - DNA, 1000 bp, Homo Sapiens
ttaccttcctcagcgtgaaggggccagagctcattaacatgtatgtgggccaaagtgaggagaatgtgcgggaagtgtttgccagggccagggctgcagctccatgcattatcttctttgatgaactggactctttggccccaagccgggggcgaagtggagattctggaggagtgatggacagggtggtgtctcagctccttgccgagctagatgggctgcacagcactcaggatgtgtttgtgattggagccaccaacagaccagatctcctggaccctgcccttctgcggcctggcagatttgacaagctggtgtttgtgggggcaaatgaggaccgggcctcccagctacgcgttctaagtgccatcacacgcaaattcaagctagagccatctgtgagcctggtaaacgtgctagattgctgccctccccagctgacgggcgcggacctctactctctctgctctgatgctatgacagctgccctcaaacgcagggttcatgacctggaggaagggctggaacaaggtagctcagcactgatgctcaccatggaggacttgctgcaggctgccgcccggctgcaaccctcagtcagtgagcaggagctgctccggtacaagcgcatccagcgcaagtttgctgcctgctaggagccccccagggtctgggaccccgctcagcatggctgcaggtaccttgatagcccacagagagatctgggaaggaagggctcctcctcaggctgctgccaacccacctggaggccacctccctccaggagatcccagggtgcaaagtggcattgagacagcagcaacagctcaagagatatctcctgcctacttgcccctccttccaggccggctctaagagaaaggcccatctactcaggaagagggccagggccttgggttctggggattgggccctgagagggctagttctgtggctgaaaataaagcatgtcccgccccctaaaaaaaaaaaaaaaaaa

SEQ ID NO: 115113 - DNA, 1000 bp, Homo Sapiens
ttcaccattcgagacctgcaggcaaatgttgaacatctggtgcaaaagatgaaaacaactgtgaaaaggggcttggtgttaaggaatgaaaagtgcaatgagaactataccactgacttcattttcaacctgtactctgaggaggggaagggcatcttcgacagcaggaagaatgtgcttggtcacatgcagcagggtgggagcccaaccccatttgataggaattttgccactaagatgggcgccaaggctatgaactggatgtctgggaaaatcaaagagagttaccgtaatgggcggatctttgccaatactccagattcgggctgtgttctggggatgcgtaagagggctctggtcttccaaccagtggctgagctgaaggaccagacagattttgagcatcgaatccccaaggaacagtggtggctgaaactgaggcccatcctcaaaatcctagccaagtacgagattgacttggacacttcagaccatgcccacctggagcacatcacccggaagcggtccggggaagctgccgtctaaacctctctggagtgaggggaatagattacctgatcatggtcagctcacaccctaataagtccacatcttctcagtgttttagctgtttttttcattaggtttccttttattctgtaccttgcagccatgaccagttctggccaggagctggaggagcaggcagtgggtgggagctccttttaggtagaatttaacatgacttctgccccagctttatctgtcacacaaggctgggcacctctagtgctactgctagatatcacttactcagttagaattttcctaaaaataagctttatttatttctttgtgataacaaagagtcttggttcctctactacttttactacagtgacaaattgtaactacactaataaatgccaactggtcactgtgaaaaaaaaaaaaaaaaaaaaaaaaaaaaaaaaaaaaaaaaaaaaaaaaaaaaaaaaaa

SEQ ID NO: 115114 - DNA, 1000 bp, Homo Sapiens
tgacccgtgtctgattagctagtggggaaggtgtaggaagctctgttgagacacatgttctgaagtgtgttgtgtttcatgttcaagcttaatcaaggcagccattaatatacgaactgagcatgctggggaggtgaatgccacatccttggcggggttatggacctcttgcatgtcatagccaatctaacggtaatggtaaatgcttttaatcaagcaggaaaaagttctcatgattatgccaactataatagtaatcctcactgagtgataaaaatagtttatgaattgaaaatttgccgctgcatgttgtatgatcaaatagttcatcaaaatgaatctttgctctttggactgaattcttaccatactgccattaaaataaatttgccaactagtaatgcatactggaaatcaaaagatactgaaagaatggtgaacttctcttagtggtattgtcatgctaaaagatgttaatatacatcataaaagcaaagtcagccagctgatattttggttctcaaaaactgcattattaataatattttagtatacagagctattctacagtttttacattgtaaacatgactgtggttttgtatttgctaaatataggggttggactaaaatataataaatctgtaccttatcaaacattttctttgagctcctgctaaaaataggacatgtctatgattgttcaaaaatatgttaaatttaggctcagcacagtagctcacacctgaaatcttagcacttcgggaggctgaggcaggtggatcacttgaggttaggagttcaagaccagcccagccaacatggtgaaaaccctgtctctactaaaaatacaaaaattagccaggcatgatggtgcatgccttttaaacccagctactgaggaggctgaggcatgagaattgcttgaaccaggagacggaggttgcagtgagctgaaatcctgccactgcacaccagcctgggtgacagagcgagactcc

SEQ ID NO: 115115 - DNA, 1000 bp, Homo Sapiens
gggcaatgtggcgaaactccatctctacaaaaaatgcaaaaataaaaaatatagtactcaagtattcttgatcctgtgtttcaaaactagaatttgtaatgcaaatggagctcagtctaataaaaaagaggttttggtattaaaagttcatacattagacagtatcagccaaaatttgagttagcaacactgttttctttacgagagggtctcacccaaatttatggggagaaatctatttctcaaaaaaaaaaatcttcttttacagaaatgttgagtaaggtgacattttgagcgctaataagcaaaagagcatgcagtgctgttgaataaccctcacttggagaaccaagagaatcctgtcgtttaatgctatattttaatttcacaagttgttcatttaactggtagaatgtcagtccaatctccaatgagaacatgagcaaatagacctttccaggttgaaagtgaaacatactgggtttctgtaagtttttcctcatggcttcatctctatctttactttctcttgaatatgctacacaaagttctttattactacatactaaagtttgcattccagggatattgactgtacatatttatgtatatgtaccatgttgttacatgtaaacaaacttcaatttgaagtgcagctattatgtggtatccatgtgtatcgaccatgtgccatatatcaattatggtcactagaaagtctctttatgatactttttattgtactgtttttcatttcacttgcaaaattttgcagaattcctcctttctacccataaattacatatatttttcttctttagtcatggagaactccccccctcatctcttccctattatctttccctgtgtactggtattattaaaaagacattacatacgcaagtctttctcgacaatcaagaatgttattaatgtgtaatactgagcactttacttcttaataaaaacttgatatagtagcaaaaaaaaaaaaaaaaaa

SEQ ID NO: 115116 - DNA, 1000 bp, Homo Sapiens
gggcagtgtcctaagcacttagactacatcagggaagaacacagaccacatccctgtcctcatgcggcttatgttttctggaggaaagtggagacacaagtccttggctttagggctcccccggctgggggctgtgcagtccggtcagggcgggaggggaaatgcaccgctgcatgtgaaccttaccagcccaggcggatgccccttccccttagcactaccctggcctcctgcatcccctcgcctcatgttcctcccaccttcaaagaatgaagagccccatgggcccagcccctgccctgggaaccaggcagccttccagacctcaggggctgaggcagactattagggcagggctgactttggtgacactgcccattccctctcaggccagctcaggtcacccgggcctctgacccaggcctgtcactttgagaggggcaaaactgagaggggcttttcctagagaaagagaacaaggagcttgccaggcttcatgtagccgacacacgtctcaggattttaagtccacattggcctcacactaccagggccaatgcccaaaataaggagttccaatttggggccaaatgaggaaggacacagactctgccctgggatctcctgtgctagcggccaatgacaaatccagtcattggccaccagccacctctgcagtggggaccacactagcagccctgactccacactcctcctggggacccaagaggcagtgttgctgtctgcatgtccaccttggaatctggctgaactggctggcaggaccaagactgcggctggggtgggcagggaagggaagccgggggctgctgtgagggatcttggagcttccctgtagcccaccttccccttgcttcatgtttgtagaggaaccttgtgccggccaggcccagtttccttgtgtgatacactaatgtatttgctttttttggaaatagagaaaatcaataaattgctagtgtttctttgaaaaaaaaaa

SEQ ID NO: 115117 - DNA, 1000 bp, Homo Sapiens
cttctcagagaagaagtacctgtggggcttcacagtcttcggctggggtctgcccgctgtcttcgtggctgtgtgggtcagtgtcagagctaccctggccaacaccgggtgctgggacttgagctccgggaacaaaaagtggatcatccaggtgcccatcctggcctccattgtgctcaacttcatcctcttcatcaatatcgtccgggtgctcgccaccaagctgcgggagaccaacgccggccggtgtgacacacggcagcagtaccggaagctgctcaaatccacgctggtgctcatgcccctctttggcgtccactacattgtcttcatggccacaccatacaccgaggtctcagggacgctctggcaagtccagatgcactatgagatgctcttcaactccttccagggattttttgtcgcaatcatatactgtttctgcaatggcgaggtacaagctgagatcaagaaatcttggagccgctggacactggcactggacttcaagcgaaaggcacgcagcgggagcagcagctatagctacggccccatggtgtcccacacaagtgtgaccaatgtcggcccccgtgtgggactcggcctgcccctcagcccccgcctactgcccactgccaccaccaacggccaccctcagctgcctggccatgccaagccagggaccccagccctggagaccctcgagaccacaccacctgccatggctgctcccaaggacgatgggttcctcaacggctcctgctcaggcctggacgaggaggcctctgggcctgagcggccacctgccctgctacaggaagagtgggagacagtcatgtgaccaggcgctgggggctggacctgctgacatagtggatggacagatggaccaaaagatgggtggttgaatgatttcccactcagggctggggccaagaggaaaaacagggaaaaaaagaaaaaaaaaagaaaaaggaaaaggaaaaaaaaaaaaaaaaaa

SEQ ID NO: 115118 - DNA, 1000 bp, Homo Sapiens
gaccaaagcaccaatatcaccctgagcaggaagggaattgtcaagctcaacatctacttccaagaatttaactatcgcaccattgaagaatcagcagccaataacatcgtctggctgctctcgaatctgggtggccagtttggcttctggatggggggctctgtgctgtgcctcatcgagtttggggagatcatcatcgactttgtgtggatcaccatcatcaagctggtggccttggccaagagcctacggcagcggcgagcccaagccagctacgctggcccaccgcccaccgtggccgagctggtggaggcccacaccaactttggcttccagcctgacacggccccccgcagccccaacactgggccctaccccagtgagcaggccctgcccatcccaggcaccccgccccccaactatgactccctgcgtctgcagccgctggacgtcatcgagtctgacagtgagggtgatgccatctaaccctgcccctgtccaccccgggtgggtgaaactcactgagcagccaagactgttgcccgaggactcactgtatggtgccctctccaaagggtcgggagggtagctctccaggccagagcttgtgtccttcaacagagaggccagcggcaactggtccgttactggccaagggctctgaagaatcaacggtgctggtacaggatacaggaataaattgtatcttcacctggttcctaccctcgtccctacctgtcctgatcctggtcctgaagacccctcggaacaccctctcctggtggcaggccacttccctcccagtgccagtctccatccaccccagagaggaacaggcgggtgggccatgtggttttctccttcctggccttggctggcctctggggcaggggtggtggagagatggaagggcatcaggtgtagggaccctgccaagtggcacctgatttactctagaaaataaaagtagaaaatactgagaaaaaaaaaaaaaaaaaaa

SEQ ID NO: 115119 - DNA, 1000 bp, Homo Sapiens
tccacagccatcgcactcattggctgcccaccgctggtgctgctggatgagcccaccacagggatggacccccaggcacgccgcatgctgtggaacgtcatcgtgagcatcatcagaaaagggagggctgtggtcctcacatcccacagcatggaagaatgtgaggcactgtgtacccggctggccatcatggtaaagggcgcctttcgatgtatgggcaccattcagcatctcaagtccaaatttggagatggctatatcgtcacaatgaagatcaaatccccgaaggacgacctgcttcctgacctgaaccctgtggagcagttcttccaggggaacttcccaggcagtgtgcagagggagaggcactacaacatgctccagttccaggtctcctcctcctccctggcgaggatcttccagctcctcctctcccacaaggacagcctgctcatcgaggagtactcagtcacacagaccacactggaccaggtgtttgtaaattttgctaaacagcagactgaaagtcatgacctccctctgcaccctcgagctgctggagccagtcgacaagcccaggactgatctttcacaccgctcgttcctgcagccagaaaggaactctgggcagctggaggcgcaggagcctgtgcccatatggtcatccaaatggactggcccagcgtaaatgaccccactgcagcagaaaacaaacacacgaggagcatgcagcgaattcagaaagaggtctttcagaaggaaaccgaaactgacttgctcacctggaacacctgatggtgaaaccaaacaaatacaaaatccttctccagaccccagaactagaaaccccgggccatcccactagcagctttggcctccatattgctctcatttcaagcagatctgcttttctgcatgtttgtctgtgtgtctgcgttgtgtgtgattttcatggaaaaataaaatgcaaatgcactcatcacaaaaaaaaaaaaaaaaa

SEQ ID NO: 115120 - DNA, 1000 bp, Homo Sapiens
tacctacgccctaatggtctccaactacctcaactggatggtgaggaacctggcagacatggagctccagctgggggctgtgaagcgcatccatgggctcctgaaaaccgaggcagagagctacgaggggctcctggcaccatcgctgatcccaaagaactggccagaccaagggaagatccagatccagaacctgagcgtgcgctacgacagctccctgaagccggtgctgaagcacgtcaatgccctcatctcccctggacagaagatcgggatctgcggccgcaccggcagtgggaagtcctccttctctcttgccttcttccgcatggtggacacgttcgaagggcacatcatcattgatggcattgacatccgcaaactgccgctgcacaccctgccgtcacgcctctccatcatcctgcaggaccccgtcctcttcagcggcaccatccgatttaacctggaccctgagaggaagtgctcagatagcacactgtgggaggccctggaaatcgcccagctgaagctggtggtgaaggcactgccaggaggcctcgatgccatcatcacagaaggcggggagaatttcagccagggacagaggcagctgttctgcctggcccgggccttcgtgaggaagaccagcatcttcatcatggacgaggccacggcttccattgacatggccacggaaaacatcctccaaaaggtggtgatgacagccttcgcagaccgcactgtggtcaccatcgcgcatcgagtgcacaccatcctgagtgcagacctggtgatcgtcctgaagcggggtgccatccttgagttcgataagccagagaagctgctcagccggaaggacagcgtcttcgcctccttcgtccgtgcagacaagtgacctgccagagcccaagtgccatcccacattcggaccctgcccatacccctgcctgggttttctaactgtaaatcacttgtaaataaatagatttgattatttcct

SEQ ID NO: 115121 - DNA, 1000 bp, Homo Sapiens
gtctgcaggatggagccttccagaatgctctcatgatttcccagctgctgcccgttctgaaccacaagacctacattgatctgatcttcccagactgtctggcaccacgagtcatgttggaaccagctgctgagaccattcctcagacccaagagatcatcagtgtcacgctgcaggtgcttagtctcttgccgccgtacagacagtccatctctgttctggccgggtccaccgtggaagatgtcctgaagaaggcccatgagttaggaggattcacatatgaaacacaggcctccttgtcaggcccctacttaacctccgtgatggggaaagcggccggagaaagggagttctggcagcttctccgagaccccaacaccccactgttgcaaggtattgctgactacagacccaaggatggagaaaccattgagctgaggctggttagctggtagcccctgagctccctcatcccagcagcctcgcacactccctaggcttctaccctccctcctgatgtccctggaacaggaactcgcctgaccctgctgccacctcctgtgcactttgagcaatgccccctgggatcaccccagccacaagcccttcgagggccctataccatggcccaccttggagcagagagccaagcatcttccctgggaagtctttctggccaagtctggccagcctggccctgcaggtctcccatgaaggccaccccatggtctgatgggcatgaagcatctcagactccttggcaaaaaacggagtccgcaggccgcaggtgttgtgaagaccactcgttctgtggttggggtcctgcaagaaggcctcctcagcccgggggctatggccctgaccccagctctccactctgctgttagagtggcagctccgagctggttgtggcacagtagctggggagacctcagcagggctgctcagtgcctgcctctgacaaaattaaagcattgatggcctgtggacctgcaaaaaa

SEQ ID NO: 115122 - DNA, 1000 bp, Homo Sapiens
cctccagcctcctccctattggaatcccaatggctcctggagtaggaaaaaagtttaaactacattcatgttcttgttctgtgtcactcggccctgggtagtctaccatttacttcaccccaagtcctgctgcccatccagttgggaagccatgattttcctaagaatccagggccatgggagatacaattccaagttctcgcttcctcctttgggcatctcttctgcctcccaatcaaggaagctccatgctcaggctctcagctctcgggccagtgctctgctctgtccagggtaggtaatactgggagactcctgtcttttaccctcccctcgttccagacctgcctcatggtggcaacatggttcttgaacaattaaagaaacaaatgactttttggaatagccctgtctagggcaaactgtggcccccaggagacactacccttccatgccccagacctctgtcttgcatgtgacaattgacaatctggactaccccaagatggcacccaagtgtttggcttctggctacctaaggttaacatgtcactagagtatttttatgagagacaaacattataaaaatctgatggcaaaagcaaaacaaaatggaaagtaggggaggtggatgtgacaacaacttccaaattggctctttggaggcgagaggaaggggagaacttggagaatagtttttgctttgggggtagaggcttcttagattctcccagcatccgcctttccctttagccagtctgctgtcctgaaacccagaagtgatggagagaaaccaacaagagatctcgaaccctgtctagaaggaatgtatttgttgctaaatttcgtagcactgtttacagttttcctccatgttatttatgaattttatattccgtgaatgtatattgtcttgtaatgttgcataatgttcactttttatagtgtgtcctttattctaaacagtaaagtggttttatttctatcacaaaaaaaaaaa

SEQ ID NO: 115123 - DNA, 787 bp, Homo Sapiens
ctgaaggtcacccgggcggccccctcactgaccctccaaacgcccctgtcctcgccctgcctcctgccattcccggcctgagtctcagcatggcggatgggagcagcgatgcggctagggaacctcgccctgcaccagccccaatcagacgccgctcctccaactaccgcgcttatgccacggagccgcacgccaagaaaaaatctaagatctccgcctcgagaaaattgcagctgaagactctgctgctgcagattgcaaagcaagagctggagcgagaggcggaggagcggcgcggagagaaggggcgcgctctgagcacccgctgccagccgctggagttgaccgggctgggcttcgcggagctgcaggacttgtgccgacagctccacgcccgtgtggacaaggtggatgaagagagatacgacatagaggcaaaagtcaccaagaacatcacggagattgcagatctgactcagaagatctttgaccttcgaggcaagtttaagcggcccaccctgcggagagtgaggatctctgcagatgccatgatgcaggcgctgctgggggcccgggctaaggagtccctggacctgcgggcccacctcaagcaggtgaagaaggaggacaccgagaaggaaaaccgggaggtgggagactggcggaagaacatcgatgcactgagtggaatggagggccgcaagaaaaagtttgagagctgagccttcctgcctactgcccctgccctgaggagggccactgaggaataaagcttctctctgagctg

SEQ ID NO: 115124 - DNA, 1000 bp, Homo Sapiens
gggagatcagccctggcatgatcaaagactgcggagccacgtgggtggtcctggggcactcagagagaaggcatgtctttggggagtcagatgagctgattgggcagaaagtggcccatgctctggcagagggactcggagtaatcgcctgcattggggagaagctagatgaaagggaagctggcatcactgagaaggttgttttcgagcagacaaaggtcatcgcagataacgtgaaggactggagcaaggtcgtcctggcctatgagcctgtgtgggccattggtactggcaagactgcaacaccccaacaggcccaggaagtacacgagaagctccgaggatggctgaagtccaacgtctctgatgcggtggctcagagcacccgtatcatttatggaggctctgtgactggggcaacctgcaaggagctggccagccagcctgatgtggatggcttccttgtgggtggtgcttccctcaagcccgaattcgtggacatcatcaatgccaaacaatgagccccatccatcttccctacccttcctgccaagccagggactaagcagcccagaagcccagtaactgccctttccctgcatatgcttctgatggtgtcatctgctccttcctgtggcctcatccaaactgtatcttcctttactgtttatatcttcaccctgtaatggttgggaccaggccaatcccttctccacttactataatggttggaactaaacgtcaccaaggtggcttctccttggctgagagatggaaggcgtggtgggatttgctcctgggttccctaggccctagtgagggcagaagagaaaccatcctctcccttcttacaccgtgaggccaagatcccctcagaaggcaggagtgctgccctctcccatggtgcccgtgcctctgtgctgtgtatgtgaaccacccatgtgagggaataaacctggcactaggaaaaaaaaaaaaaaaaaaaaaaaaaaaaaaaaaa

SEQ ID NO: 115125 - DNA, 1000 bp, Homo Sapiens
caggctgtgattgcaccactgcacttcagcttgggcaacagagcaagaccctgtctccgaaacaaataaaaaatactgtaataaaagtacttataaacatactaatcctctttcaggaccctaaagttgcaggttagtaggtcttcaaggacaaatctgtaagtttcttatttctgtagtgcaagtaaaatttcactttttgaaactatagagagatccctttctgattagcctacagaacttaaagtgagggaaccatttcctctcacagacaaagaggcctgggatattaggactttggggtttgagagcatcatggggcagacagatggtggatggtctggacaagaagcgagtaagccactgcggttggtcatactgaagggaattgatggcaagaggatcccctgagcaagtcagaagttactctcatcagtcgttcatggtcacaacctgaggtactctgctgagtgggcaaggctgaagaagaggcctgtggaatgcagcattacctgctggacagagcagggcaggcagttctatgccttggagctcctgactgcagggactctgtccccacactcaaaaagactcagctcactcaatgagagaatgtgatttactttatagaacgtataatcaactttgttgaataatttgttctattaaggctgtctaaagtatgtgatgtcttcatcatagtatgaagtgttgaaaattaataacgagcctagtttaggaaaaagctgcttaaaactgtggctctaagagagtaatcataaaataccttagataaaattgcactatggaattttcattgagtatgtttaaattattggcttgtctactaatacacatctgcttcaaaatgaacatatttcataaaattggcatcaattttaatgacgctcctggtatggaacctcagatataccctattggagacaatcctttgatcataaattctccccaactataaatcattttatgtctttatcat

SEQ ID NO: 115126 - DNA, 1000 bp, Homo Sapiens
tggagaattcatggggtgaagaccatggccacaaaggttacctgtgcatgacagatgagtggttctctgagtatgtctacgaagtggtggtggacaggaagcatgtccctgaagaggtgctagctgtgttagagcaggaacccattatcctgccagcatgggaccccatgggagctttggctgagtgatactgccctccagctctttcctccttccatggaacctgacgtagctgcaaaggacagatccagggactgaagccaaagttatgcaagggactgtgtgttgccacaggacacagtcagatttccagtctccaccaggaacctcttcagaaagtgtgctttatgctgaaacagaatactgttaaaggaaaaaaaagaggggggaagatcaggtcatactatctactctcctcatctctaacagctcaggatctcttagcattttaattagatgtaattgtttgtctttaactgtcaaaaagtttggttctgtgtctgtgttttaataagacgagaggacgagcgattgaggtgtatggagagaaaacagacctaatgctccttgttcctagagtagagtggagggagggtggcctaagagttgagctctcggaactgcatgctgctggacagtatcactgtctttcctagatggcagtcactgaattccattttttcaaggtaatttcttgtgcctctaatagcccaagaatgggaggttgatcagatctgacatgattccttcctgttctgaactgtggggtgtgcacatctctgcttgagtcaggtttgagtagaggcttagagacagttgggtgagaacaaccaaaatcttatcatggtctcagtcataatcattagggggaactctagccaaatggtttaacttctgcctgtggaactggggattgggtgggcaggaaaaggtgatatccattctttctgataactagatggtgctgagaagcttttgaataaaaactttgctaaatgag

SEQ ID NO: 115127 - DNA, 1000 bp, Homo Sapiens
tcactgtcttgggcggtatggcaacactccatttttgtttcctttatatggccaaggagaactcccccagtgtttctgcaggatgtgtgctgtgtttggtggaatttattgtcttcgccattcagtacagtgccttgtagtggacaaagaatccagaaaatgtaaagcaattatagatcagtttggtcagagaataatctctgagcatttcctcgtggaggacagttactttcctgagaacatgtgctcacgtgtgcaatacaggcagatctccagggcagtgctgattacagatagatctgtcctaaaaacagattcagatcaacagatttccattttgacagtgccagcagaggaaccaggaacttttgctgttcgggtcattgagttatgttcttcaacgatgacatgcatgaaaggcacctatttggttcatttgacttgcacatcttctaaaacagcaagagaagatttagaatcagttgtgcagaaattgtttgttccatatactgaaatggagatagaaaatgaacaagtagaaaagccaagaattctgtgggctctttacttcaatatgagagattcgtcagacatcagcaggagctgttataatgatttaccatccaacgtttatgtctgctctggcccagattgtggtttaggaaatgataatgcagtcaaacaggctgaaacacttttccaggaaatctgccccaatgaagatttctgtccccctccaccaaatcctgaagacattatccttgatggagacagtttacagccagaggcttcagaatccagtgccataccagaggctaactcggagactttcaaggaaagcacaaaccttggaaacctagaggagtcctctgaataatggatatacaccaaactggatacccaactttggaaattctgactggtctcagagtctacttgatagaaggactgtttgagaaatgttagaaagcagcagcaattataaggcaaaataggtaat

SEQ ID NO: 115128 - DNA, 1000 bp, Homo Sapiens
gtggaaaatgaggcaccctgggtgactgataagaggcctccgccagattggcccagcaaaggcaagatccagtttaacaactaccaagtgcggtaccgacctgagctggatctggtcctcagagggatcacttgtgacatcggtagcatggagaagattggtgtggtgggcaggacaggagctggaaagtcatccctcacaaactgcctcttcagaatcttagaggctgccggtggtcagattatcattgatggagtagatattgcttccattgggctccacgacctccgagagaagctgaccatcatcccccaggaccccatcctgttctctggaagcctgaggatgaatctcgaccctttcaacaactactcagatgaggagatttggaaggccttggagctggctcacctcaagtcttttgtggccagcctgcaacttgggttatcccacgaagtgacagaggctggtggcaacctgagcataggccagaggcagctgctgtgcctgggcagggctctgcttcggaaatccaagatcctggtcctggatgaggccactgctgcggtggatctagagacagacaacctcattcagacgaccatccaaaacgagttcgcccactgcacagtgatcaccatcgcccacaggctgcacaccatcatggacagtgacaaggtaatggtcctagacaacgggaagattatagagtgcggcagccctgaagaactgctacaaatccctggacccttttactttatggctaaggaagctggcattgagaatgtgaacagcacaaaattctagcagaaggccccatgggttagaaaaggactataagaataatttcttatttaattttattttttataaaatacagaatacatacaaaagtgtgtataaaatgtacgttttaaaaaaggataagtgaacacccatgaacctactacccaggttaagaaaataaatgtcaccaggtacttgagaaacccctcgattg

SEQ ID NO: 115129 - DNA, 1000 bp, Homo Sapiens
agaatcttaaaaaaaaaaaacgtttctcactgtcttaaatagaatttttaaatagtatatattcagtggcattttggagaacaaagtgaatttacttcgacttcttaaatttttgtaaaagactataagtttagacatctttctcattcaaatttaaagatatctttctcctcttgatcaatctatcaatattgatagaagtcacactagtatataccatttaatacatttacactttcttatttaagaagatattgaatgcaaaataattgacatatagaactttacaaacatatgtccaaggactctaaattgagactcttccacatgtacaatctcatcatcctgaagcctataatgaagaaaaagatctagaaactgagttgtggagctgactctaatcaaatgtgatgattggaattagaccatttggcctttgaactttcataggaaaaatgacccaacatttcttagcatgagctacctcatctctagaagctgggatggacttactattcttgtttatattttagatactgaaaggtgctatgcttctgttattattccaagactggagataggcagggctaaaaaggtattattatttttcctttaatgatggtgctaaaattcttcctataaaattccttaaaaataaagatggtttaatcactaccattgtgaaaacataactgttagacttcccgtttctgaaagaaagagcatcgttccaatgcttgttcactgttcctctgtcatactgtatctggaatgctttgtaatacttgcatgcttcttagaccagaacatgtaggtccccttgtgtctcaatactttttttttcttaattgcatttgttggctctattttaatttttttcttttaaaataaacagctgggaccatcccaaaagacaagccatgcatacaactttggtcatgtatctctgcaaagcatcaaattaaatgcacgcttttgtcatgtcaaaaaaaaaaaaaaa

SEQ ID NO: 115130 - DNA, 1000 bp, Homo Sapiens
ttcgtcttctgagggccgggcacggtcacacggccacccgccccgcgcaccccacgccctgttcacgctcacccagtcacctccccacatcgcacactggggccccgggttcagcctggcctgcccgtgccctggtgaatcacctggctgagcagttcccctggagccccttcgggagcagggctgtgtcccagatgggccacggctgagccttcagagtacgtcctgcctggcacttactggtccttaccagagacgcccagccccatccctgtcctcatgacccctcgtccaccccccacacacactataaggctgagggctgccagcagccccgtctgcccaccattcccggccgtggaccatagtcgggatgtcagcagacacacatgggcagcccaaagctgcaggtgccagggcccaccccagcctcgcctgtcacccccactcccgcctcagggccaggcccaggcctcaccacctgacgctgcatgagacattgacaccagaaagccctcttgggggcactgctccctaccccagggccctggccagccgggagcttggctctcctctggctagagtgggaagagggggctggccatggggccctcccagaacctcagcatttccttccagcccatccaaacactgaggcagccttggggaaccccgagctggggggttggcagcccactgcaccgcctcagggttttggggtcctgggctggggccaccatccctgatggcagaactcccacaaccacatgtatttattcctctgtcctaaaccgtcccctccttccctcacccccagcacagggggattctgagcagtgcctcttgtctgagggacatatcagtgacctcgacgttgcctttagactacagttgtgttagcctcttgcgtattggctttttcagagtcatttatgagcagaaaaaaaaaaagtaaaactttgctaatattaaaaaaaaaaaaaaaaaaaaaaaaaaaaaa

SEQ ID NO: 115131 - DNA, 1000 bp, Homo Sapiens
tagaatgaatatccaagcacctcgagctatgcaacctctgttcttgtatttcttatgatctctgatgggttcttctcgaaaatgccaagtggaagactttgtggcatgctccagatttaaatccagctgaggctccctttgttttcagttccatgtaacaatctggaaggaaacttcacggacaggaagactgctggagaagagaagcgtgttagcccatttgaggtctggggaatcatgtaaagggtacccagacctcacttttagttatttacatcaatgagttctttcagggaaccaaacccagaattcggtgcaaaagccaaacatcttggtgggatttgataaatgccttgggacctggagtgctgggcttgtgcacaggaagagcaccagccgctgagtcaggatcctgtcagttccatgagctattcctctttggtttggctttttgatatgattaaaattattttttattcctttttctactgtgtcttaaacaccaattcctgatagtccaaggaaccacctttctcccttgatatatttaactccgtctttggcctgacaacagtcttctgcccatgtctgggaacacacgccaggaggaatgtctgataccctctgcatcaagcgtaagaaggtcccaaatcataaccattttaagaacagatgactcagaaacctccagaggaatctgtttgcttcctgattagatccagtcaatgttttaaaggtattgtcagagaaaaacagagggtctgtactagccatgcaaggagtcgctctagctggtacccgtaaaagttgtgggaattgtgacccccatcccaaggggatgccaaaatttctctcattcttttggtataaacttaacattagccagggaggttctggctaacgttaaatgctgctatacaactgctttgcaacagttgctggtatatttaaatcattaaatttcagcatttactaatactgcaaaaaaaaaaaaaaaaaa

SEQ ID NO: 115132 - DNA, 1000 bp, Homo Sapiens
gcaattctcctgcctcagcctcccaagtagcttggactacaggccctgccaccacgcccggctaatttgtgtatttttagtagagatggggtttcaccatgttggccaggatggtctcgatctcttgacctcgtgatctgtccaccttggccttgcaaagcgctggattacaggcatgagccactacacccagccgatttttcctttttgattaaagatgctattacaatgtaaatatttcttacacagaaagtcacagcacatgtgcccattgatacaaggctgctgaggcctggtctccagttggaaatataattaagggtggcaaggactggagtcagttggagagtgcatagccagtctgtgaagacaactgccagatactggcaatactccagcctggtgacagagtgagactctgtctcaaaaaaaaagtttcaatgtttactcctagagaagccaaaaatccagatttgtatatgaaatcttaccattttaaaagattggcagctaattatttttttaaaaagctgtgcagtgtgatgtgtcccaaacggactggctcatgggtggccacgtcacaacctctgatctcagaccgtgcatgccttgtcctcttaagacaactcctgtggcaccgtttctccctccacagggccaaagccatagtgtccggtcccaaggacaaggctcttccagtgctaggagaggtatgagcagcctctcacctgtgagctgtggggatcacaaggctgcctgcctcagtcttggagtcctgttgggtgaatgaggcagatgggaaagagcctcaccagcagctgcttttggagcaggggtccaaggaagagagggtggcctcgacatcaaactgcctggatttttctaccaccctgttacatcataacaacttctgaaacacacaccagccctgagttctgggctcatttgaagcctggaatagcaataaatctttttaacttgcggacagttaaaaaaaaaa

SEQ ID NO: 115133 - DNA, 955 bp, Homo Sapiens
agtaagccgggctgccgtcttctcgccatgggctccgggccgcgcggggcgctgagcttactgctcctgctgctggccccgccgagccgcccggccgcaggttgcccggcgccctgtagctgcgcggggacgctcgtggactgcgggcgccgcgggctgacttgggcctcgctgccgaccgccttccctgtcgacacaaccgagctggtgctgaccggcaacaacctgacggcgctgccgccggggctgctggacgcgctgcccgcgctgcgcaccgcacacctgggcgccaacccctggcgctgcgactgccgccttgtgccgctgcgcgcctggctggccggccgccccgagcgtgcgccctaccgcgacctgcgttgcgtggcgcccccagcgctgcgcggccgcctgctgccctatctggccgaggacgagctgcgcgccgcttgcgctcccggcccgctctgctggggggcgctggcggcgcagcttgcgctgctgggccttgggctgctgcacgcgttgctgctggtgctgctgctgtgccgcctgcggaggctgcgggcccgggcccgcgctcgcgccgcagcccggctgtcgctgaccgacccgctggtggccgagcgagccggaaccgacgagtcctgaggagagaaccggtgcgtcctgaggagagaaccggcgctgggcaacacgggcctgcaaactcgacaggaccctgcccgaggggccctcgcgccaacctggaccggtccccgcctcctccgctgcccaatctctcagacccaccccacctgcaggcccagaccacgtgggacagaactcctgcccaccctaccccgagggaggcgaacccgcacttccaggcttgggaggaccatggggcacaatgcggtccagaccctgctgcgtctcccttccaaactctggtgctgaataaacccttctgatctgg

SEQ ID NO: 115134 - DNA, 1000 bp, Homo Sapiens
ccattaacccctgcagcgataccaccatgactgcagaggagttcaccgatacagtgttctccaagattgacgtcaacggggatggggaactctccctggaagagtttatagagggcgtccagaaggaccagatgctcctggacacactgacacgaagcctggaccttacccgcatcgtgcgcaggctccagaatggcgagcaagacgaggagggggctgacgaggccgctgaggcagccggctgagtgcaccgcccggctgcttctgcactagcgggtggggtggtatggtggtgcctgttggtggtgttcttgtcttaaccctagatagaatctaatgaactcagaggcttagctcgcctctttagggtccatggtggcagcagagaggcagaagtgggagtccagagccaggaacagtgaaggatggttcctggcccctctgagtgacagctggtggcagcactccttgctggggggcactgttcaacatccctctgccgtcgggtgaccccctagcccttctgactcctctcccagcttttcccagctttccccactgagcttctccagtccatgctcttctggacgtggactctctgaggcagaactgagcttttccaggcctcttatggaatcctgcagatccagtggctgcagcttcaatcccagtgctgcaatcacacatccattctgccctgggggaccctggagcctacttgtgcgctttgcatttcattgattgacgcctcccttcaacaagcatttactgagcgcctactatgtactaatgctagatgttagatgtacaaagaagacagttttcatcctctaggaactcataggctaatggtgagacacacagacaaacatcattataataaaatatgctaagagaaaaaaaaaaaaaaaaaaaaaaaaaaaaaaaaaaaaaaaaaaaaaaaaaaaaaaaaaaaaaaaaaaaaaaaaaaaaaaaaaaaaaaaaaaaaaaaaaaaaaaaa

SEQ ID NO: 115135 - DNA, 1000 bp, Homo Sapiens
tggtgtgtaacgcaggcctgggcctgctggggccgctggaggcgctgggggaggacgccgtggcctctgtgctggacgtgaatgtagtagggactgtgcggatgctgcaggccttcctgccagacatgaagaggcgcggttcgggacgcgtgttggtgaccgggagcgtgggaggattgatggggctgcctttcaatgacgtttattgcgccagcaagttcgcgctcgaaggcttatgcgagagtctggcggttctgctgctgccctttggggtccacttgagcctgatcgagtgcggcccagtgcacaccgccttcatggagaaggtgttgggcagcccagaggaggtgctggaccgcacggacatccacaccttccaccgcttctaccaatacctcgcccacagcaagcaagtctttcgcgaggcggcgcagaaccctgaggaggtggcggaggtcttcctcaccgctttgcgcgccccgaagccgaccctgcgctacttcaccaccgagcgcttcctgcccctgctgcggatgcgcctggacgaccccagcggctccaactacgtcaccgccatgcaccgggaagtgttcggcgacgttccggcaaaggccgaggctggggccgaggctgggggcggggccgggcctggggcagaggacgaggccgggcgcagtgcggtgggggaccctgagctcggcgatcctccggccgccccgcagtaaaggcttcctcagccgctgtctcccgcgcccttctttgtcccctgggtctgtgtggtccctggggatggggcggcggtagcagctgtgggtggctaattaagatagatcgcgttagccagttttaccagcgcagctaggcgcgatggctgtcgcctgtaatgccagcgctttgggaggcggaggcaggaggatcgctcaagccccggagttggagaccagccagagcaacacagtgagacccccatctctacaaaaataaagaaaatttaaaaatc

SEQ ID NO: 115136 - DNA, 1000 bp, Homo Sapiens
aactttgtctccgtgggacccacatacatgagggtctcttaggtgcatgtcctcttgttgctgagtctgcagatgaggactagggcttatccatgcctgggaaatgccacctcctggaaggcagccaggctggcagatttccaaaagacttgaagaaccatggtatgaaggtgattggccccactgacgttggcctaacactgggctgcagagactggaccccgcccagcattgggctgggctcgccacatcccatgagagtagagggcactgggtcgccgtgccccacggcaggcccctgcaggaaaactgaggcccttgggcacctcgacttgtgaacgagttgttggctgctccctccacagcttctgcagcagactgtccctgttgtaactgcccaaggcatgttttgcccaccagatcatggcccacgtggaggcccacctgcctctgtctcactgaactagaagccgagcctagaaactaacacagccatcaagggaatgacttgggcggccttgggaaatcgatgagaaattgaacttcagggagggtggtcattgcctagaggtgctcattcatttaacagagcttccttaggttgatgctggaggcagaatcccggctgtcaaggggtgttcagttaaggggagcaacagaggacatgaaaaattgctatgactaaagcagggacaatttgctgccaaacacccatgcccagctgtatggctgggggctcctcgtatgcatggaacccccagaataaatatgctcagccaccctgtgggccgggcaatccagacagcaggcataaggcaccagttaccctgcatgttggcccagacctcaggtgctagggaaggcgggaaccttgggttgagtaatgctcgtctgtgtgttttagtttcatcacctgttatctgtgtttgctgaggagagtggaacagaaggggtggagttttgtataaataaagtttctttgtctctttaaaaaaaaaaa

SEQ ID NO: 115137 - DNA, 813 bp, Homo Sapiens
ttctcgggaggcagtctgggtccttccaccatggcacctaagaaagcaaagaagagagccgggggcgccaactccaacgtgttctccatgttcgaacagacccaaatccaggaatttaaggaggccttcactatcatggaccagaacagggatggcttcattgacaagaacgatctgagagacacctttgctgcccttgggcgagtgaacgtgaaaaatgaagaaattgatgaaatgatcaaggaggctccgggtccaattaactttactgtgttcctctcaatgtttggggagaaacttaagggagcggaccctgaggaaaccattctcaacgcattcaaagtgtttgaccctgaaggcaaaggggtgctgaaggctgattacgttcgggaaatgctgaccacgcaggcggagaggttttccaaggaggaggttgaccagatgttcgccgccttcccccctgacgtgactggaaacttggactacaagaacctggtgcacatcatcacccacggagaagagaaggactaggagggggctcgctcgtggaccctgggctcgtctttgcagagtggtccctgccctcatctctctcccccgagtaccgcctctgtccctaccttgtctgttagccatgtggctgccccatttatccacctccatcttctttgcagcctgggtggctatgggtacttcgtggccgcacatcctacagttggaaatccatccagaggccatgttccaataaacaggaggtcgtgtatttggtcacgacatttctctgaaaaaaaaaaaaaaaaaaaaaaaaaaaaa

SEQ ID NO: 115138 - DNA, 1000 bp, Homo Sapiens
ccggctggaacacactaagctgagctatcggcctcgggacagcaatgagctggtgcccctttcagaagacagcatgaaggatgcctggggccaggtgaaaaactactgcctgactctgtggtgtgagaacacagtgggtgaccaaggctttccagatgaacccaaggaaagtgaaaaagctgatgctaataaccagacaacagaacctcagcttaagaaaggcagccaagtggaggcactcttcagttatgaggctacccaaccagaggacctggagtttcaggaaggggatataatcctggtgttatcaaaggtgaatgaagaatggctggaaggggagtgcaaagggaaggtgggcattttccccaaagtttttgttgaagactgcgcaactacagatttggaaagcactcggagagaagtctaggatgtttcacaaactacaaagctgaagaaaatgaagccctattacttgtttgtaagatttagcacccttctgctgtatactgtactgagacattacagtttggaagtgttaactatttattccctgttaaaatttaacctactagacaatgatgtgagtacccaggatgatttcctggggcacagtgggtgaggagatggggacaggtgaatggaggagttaggggagaggaaaagtggatggaagtgtctggaaagggcacgagagagtcttccaggtactgatcctgtttcttgctctgagtgctagctagccagctgtgttcacactgtaaacattcatcaagctgtacatttggtgcacttttctgtgtcataccacaataaaaaaaaacctagcatcttacaaaaacaagacacccaagtccaggcccaaggagtaagtacaaatattcctgtttctgaaccattactgtaattggctcttaaggcttgaagtaaccttataggttactcataaggcatatacaaataaacttgtttgttttcttttttcaaaaaaaaaaaaaaaaaa

SEQ ID NO: 115139 - DNA, 1000 bp, Homo Sapiens
ctgcctcctttctttctctgtctcttccttccttttagtctttttcatcctcttctctttccaccaaccctcctgcatccttgccttgcagcgtgaccgagataggtcatcagcccagggcttcagtcttcctttatttataatgggtgggggctaccacccaccctctcagtcttgtgaagagtctgggacctccttcttccccacttctctcttccctcattcctttctctctccttctggcctctcatttccttacactctgacatgaatgaattattattatttttctttttctttttttttttacattttgtatagaaacaaattcatttaaacaaacttattattattattttttacaaaatatatatatggagatgctccctccccctgtgaaccccccagtgcccccgtggggctgagtctgtgggcccattcggccaagctggattctgtgtacctagtacacaggcatgactgggatcccgtgtaccgagtacacgacccaggtatgtaccaagtaggcacccttgggcgcacccactggggccaggggtcgggggagtgttgggagcctcctccccaccccacctccctcacttcactgcattccagattggacatgttccatagccttgctggggaagggcccactgccaactccctctgccccagccccacccttggccatctccctttgggaactagggggctgctggtgggaaatgggagccagggcagatgtatgcattcctttatgtccctgtaaatgtgggactacaagaagaggagctgcctgagtggtactttctcttcctggtaatcctctggcccagccttatggcagaatagaggtatttttaggctatttttgtaatatggcttctggtcaaaatccctgtgtagctgaattcccaagccctgcattgtacagccccccactcccctcaccacctaataaaggaatagttaacactcaaaaaaaaaaaaaaaaaaa

SEQ ID NO: 115140 - DNA, 1000 bp, Homo Sapiens
atgacgatgtcggaaaccatgcaatgaaaccaataaatgataataaagagcctctgaactcagacgtgcagtacacggaagttcaagtgtcctcagctgagtctcacaaagatctaggaaagaaggacacagagacagtgtacagtgaagtccggaaagctgtccctgatgccgtggaaagcagatactctagaacggaaggctcccttgatggaacttagacagcaaggccagatgcacatccctggaaggacatccatgttccgagaagaacagatgatccctgtatttcaagacctctgtgcacttatttatgaacctgccctgctcccacagaacacagcaattcctcaggctaagctgccggttcttaaatccatcctgctaagttaatgttgggtagaaagagatacagaggggctgttgaatttcccacatacactccttccaccaagttggaacatccttggaaattggaagagcacaagaggagatccagggcaaggccattgggatattctgaaacttgaatattttgttttgtgcagagataaagaccttttccatgcaccctcatacacagaaaccaattttcttttttatactcaatcatttctagcgcatggcctggttagaggctggttttttctcttttcctttggtccttcaaaggcttgtagttttgggtagtccttgttctttggaaatacacagtgctgaccagacagcctccccctgtcccctctatgacctcgccctccacaaatgggaaaaccagactacttgggagcaccgcctgtgaaataccaacctgaagacacggttcattcaggcaacgcacaaaacagaaaatgaaggtggaacaagcacagatgttcttcaactgtttttgtctacactctttctcttttcctctaccatgctgaaggctgaaagacaggaagatggtgccatcagcaaatattattcttaattgaaaacttgaaaaaaaaaaaaaaaa

SEQ ID NO: 115141 - DNA, 1000 bp, Homo Sapiens
tttttgcccttactgttgagactgcaatatcctagaccctagttttatactagagttttatttttagcaatgcctattgcaagtgcaattatatactccagggaaattcaccacactgaatcgagcatttgtgtgtgtatgtgtgaagtatatctgggacttcagaagtgcaatgtatttttctcctgtgaaacctgaatctacaagttttctgccaagccactcaggtgcattgcagggaccagtgataatggctgatgaaaattgatgattggtcagtgaggtcaaaaggagccttgggattaataaacatgcactgagaagcaagaggaggagaaaaagatgtctttttcttccaggtgaactggaatttagttttgcctcagatttttttcccacaagatacagaagaagataaagatttttttggttgagagtgtgggtcttgcattacatcaaacagagttcaaattccacacagataagaggcaggatatataagcgccagtggtagttgggaggaataaaccattatttggatgcaggtggtttttgattgcaaatatgtgtgtgtcttcagtgattgtatgacagatgatgtattcttttgatgttaaaagattttaagtaagagtagatacattgtacccattttacattttcttattttaactacagtaatctacataaatatacctcagaaatcatttttggtgattattttttgttttgtagaattgcacttcagtttattttcttacaaataaccttacattttgtttaatggcttccaagagcctttttttttttgtatttcagagaaaattcaggtaccaggatgcaatggatttatttgattcaggggacctgtatttccatgtcaaatgttttcaaataaaatgaaatatgagtttcaatactttttatattttaatatttccttaatattatggttattgtccgccattttgttgtatattgtaaataaagtttagattgt

SEQ ID NO: 115142 - DNA, 1000 bp, Homo Sapiens
caatcagaaaaagaaggcatctttgtaccagaaatctcagcaaaagccctaatattcacactgattaggcctgggtcacatgtccaccctgaccaatcactgtggccaggaggatgatacatgctaatttgcttattctatatcatggacaacacctttggggaaaagggtgggggtcagcctccccaaaatcacatggattccccaagtggaaactaggagcagggagttgcttgggtggccgctaacaccaggctactcttattttagcttgctaagttgagatcagctagacctgctttcttttctcctcagtcttgcatttccctcaatacaagctgtagcctctttcctcgtttctagtctcagaaggaaggagagggaagccattctcctctagggactcttcagtctcatttagatgatagtccctttttttctacctccatattagagatggagctccttccttttcctgtttcttaatttttgtcttctcattcctgcttccctctcaccctattgccagttccaccaactagagtgaaagacttcctagccatttcattaaatctattctgtatccaccaggtggcagcatcttgtcatacgtgtcaggacttaggactgcggggtttaggttagatgtcacggaaaaagctagttctgtggtcaggcggcaccaatgagaaaggaatgcagaccctccagatgtatccttgggaaaagcagtaaaccaactaatatttattgaagacctactttgtcctctacatagggtagcttctgtcagggaatcttggttcttcccaagaaacactgattttctttcagggagacttcatgtgttcatttatttccaccacagcagattttaagaaattataatatgtaatatttgatatctataaagagtatatctaacgtgaataaattatgaagcatactaatgagtacctatgacccataacacatatacattaaaacattttaaatacca

SEQ ID NO: 115143 - DNA, 981 bp, Homo Sapiens
gtttggggccagagtgggcgaggcgcggaggtctggcctataaagtagtcgcggagacggggtgctggtttgcgtcgtagtctcctgcagcgtctggggtttccgttgcagtcctcggaaccaggacctcggcgtggcctagcgagttatggcgacgaaggccgtgtgcgtgctgaagggcgacggcccagtgcagggcatcatcaatttcgagcagaaggaaagtaatggaccagtgaaggtgtggggaagcattaaaggactgactgaaggcctgcatggattccatgttcatgagtttggagataatacagcaggctgtaccagtgcaggtcctcactttaatcctctatccagaaaacacggtgggccaaaggatgaagagaggcatgttggagacttgggcaatgtgactgctgacaaagatggtgtggccgatgtgtctattgaagattctgtgatctcactctcaggagaccattgcatcattggccgcacactggtggtccatgaaaaagcagatgacttgggcaaaggtggaaatgaagaaagtacaaagacaggaaacgctggaagtcgtttggcttgtggtgtaattgggatcgcccaataaacattcccttggatgtagtctgaggccccttaactcatctgttatcctgctagctgtagaaatgtatcctgataaacattaaacactgtaatcttaaaagtgtaattgtgtgactttttcagagttgctttaaagtacctgtagtgagaaactgatttatgatcacttggaagatttgtatagttttataaaactcagttaaaatgtctgtttcaatgacctgtattttgccagacttaaatcacagatgggtattaaacttgtcagaatttctttgtcattcaagcctgtgaataaaaaccctgtatggcacttattatgaggctattaaaagaatccaaattcaaactaaaaaaaaaaaaaaaaaa

SEQ ID NO: 115144 - DNA, 1000 bp, Homo Sapiens
ggtgaacaccaccgggtatcaaaatgactcaccacttcacgatgcagccaagaatgggcacgtggatatagtcaagctgttactttcctatggagcctccagaaatgctgttaatatatttggtctgcggcctgtcgattatacagatgatgaaagtatgaaatcgctattgctgctaccagagaagaatgaatcatcctcagctagccactgctcagtaatgaacactgggcagcgtagggatggacctcttgtacttataggcagtgggctgtcttcagaacaacagaaaatgctcagtgagcttgcagtaattcttaaggctaaaaaatatactgagtttgacagtacagtaactcatgttgttgttcctggtgatgcagttcaaagtaccttgaagtgtatgcttgggattctcaatggatgctggattctaaaatttgaatgggtaaaagcatgtctacgaagaaaagtatgtgaacaggaagaaaagtatgaaattcctgaaggtccacgcagaagcaggctcaacagagaacagctgttgccaaagctgtttgatggatgctacttctatttgtggggaaccttcaaacaccatccaaaggacaaccttattaagctcgtcactgcaggtgggggccagatcctcagtagaaagcccaagccagacagtgacgtgactcagaccatcaatacagtcgcataccatgcgagacccgattctgatcagcgcttctgcacacagtatatcatctatgaagatttgtgtaattatcacccagagagggttcggcagggcaaagtctggaaggctccttcgagctggtttatagactgtgtgatgtcctttgagttgcttcctcttgacagctgaatattataccagatgaacatttcaaattgaatttgcacggtttgtgagagcccagtcattgtactgtttttaatgttcacatttttacaaataggtagagtcattcatatttgtctttgaatc

SEQ ID NO: 115145 - DNA, 1000 bp, Homo Sapiens
gggggtaaagaggcgctaccaggcgggcgggccacggcgcttctgtaccgctgctgcttttgcggtgaagaccacccgcagcagggcagcaccctctactgcgtgcccacgagcacaaatcaagcgcaggcggctccggaggagcggccgagggccccctggtgggacacctcctctggtgcgctgcggccggtggcgctcaagagtccacaggtggtctgcgaggcagcctcagcgggcctgttgaagacgctgcgcttcgtcaagtacttgccctgcttccaggtgctgcccctggaccagcagctggtgctggtgcgcaactgctgggcgtccctgctcatgcttgagctggcccaggaccgcttgcagttcgagactgtggaagtctcggagcccagcatgctgcagaagatcctcaccaccaggcggcgggagaccgggggcaacgagccactgcccgtgcccacgctgcagcaccatttggcaccgccggcggaggccaggaaggtgccctccgcctcccaggtccaagccatcaagtgctttctttccaaatgctggagtctgaacatcagtaccaaggagtacgcctacctcaaggggaccgtgctctttaacccggacgtgccgggcctgcagtgcgtgaagtacattcagggactccagtggggaactcagcaaatactcagtgaacacaccaggatgacgcaccaagggccccatgacagattcatcgaacttaatagtacccttttcctgctgagattcatcaatgccaatgtcattgctgaactgttcttcaggcccatcatcggcacagtcagcatggatgatatgatgctggaaatgctctgtacaaagatataaagtcatgtgggccacacaagtgcagtagtgcagttcaccatgagggaagaataaagagctgtgggcaaaagagtgtaaaatattttaaaataaactttcttaatatttttaaaaaaaaaaaaaaaaaaaa

SEQ ID NO: 115146 - DNA, 1000 bp, Homo Sapiens
aagatcccatggggcagcatcccagtactgatcttgctcctgctcctgggcctaatcgatatctcccaggcccagctcagctgcaccgggcccccagccatccctggcatcccgggtatccctgggacacctggccccgatggccaacctgggaccccagggataaaaggagagaaagggcttccagggctggctggagaccatggtgagttcggagagaagggagacccagggattcctgggaatccaggaaaagtcggccccaagggccccatgggccctaaaggtggcccaggggcccctggagccccaggccccaaaggtgaatcgggagactacaaggccacccagaaaatcgccttctctgccacaagaaccatcaacgtccccctgcgccgggaccagaccatccgcttcgaccacgtgatcaccaacatgaacaacaattatgagccccgcagtggcaagttcacctgcaaggtgcccggtctctactacttcacctaccacgccagctctcgagggaacctgtgcgtgaacctcatgcgtggccgggagcgtgcacagaaggtggtcaccttctgtgactatgcctacaacaccttccaggtcaccaccggtggcatggtcctcaagctggagcagggggagaacgtcttcctgcaggccaccgacaagaactcactactgggcatggagggtgccaacagcatcttttccgggttcctgctctttccagatatggaggcctgacctgtgggctgcttcacatccaccccggctccccctgccagcaacgctcactctacccccaacaccaccccttgcccagccaatggacacagtagggcttggtgaatgctgctgagtgaatgagtaaataaactcttcaaggccaaggaacagtggtctaattcaactctgtgtcccagcactggcacaccagaagtgccatgctcagaaatgttggttacatgaatgaatgaaccatgaatgaatg

SEQ ID NO: 115147 - DNA, 1000 bp, Homo Sapiens
gaagcacccagtttgagagtgtacccagccagactgtctttatctccatggattttcatcagggcaaagatcacagcagccagctcctggtggctgatgaggatcagagcatttgttcccccatgaaaggggaaatccctatggcatcattccagtggtggtcagtagatccaggacgccctgcaggactcagcctgtacagggagatgaagtgccccaggttgggagcacacctagctagagttatttgtgttaatctattcaggatgctctaagaaaacgccatagactgggttgctgacaaacatcagaattctatttctcatggttctgaaggcttagaaggctaagatcaaggtgtcagcaggttctgtgtctggtgaggacccacctcttgtttcatagataaaaccttcttgctgtgtcctcacatggtggaaaagggcaagacagctcacagagacctcttttataaggacgccagttccattcaagagggcactgcctgcattcccttcccccctcaaaggcccggccctgctattatcgtcaccttggtgactagatttcagcctatgaattctggaggcggacacaaaaattcagattaaactactctgcttctgtttctctaaaatctacatccttctcatatacaaaatacatgcatttctccccagtagccccaaatatcaactcattttagcatcaactttaaaattgtagtccaaagtgtgatttaaatgttatctgagtcaaacatgggtaagactcaaggtacaatttatcctgagtccaactgttcttgctgcgaacctatgaaatcaaacatgttatgtgcttccaaaatacagtggttggagaggcataggataaacattcccattccagaaaggagaaacaggaaagaagaaaggagtaacaagtttcaagcaactccaaaattgaatgtgacaaacagtattaaaccttaagcctcaagaaaaaaaaaaaaaaaaaa

SEQ ID NO: 115148 - DNA, 1000 bp, Homo Sapiens
tgttcccggagtcggaggtgtcccgggagttggcatttcccccgaagctcaggcagcagctgccgccaaggctgccaagtacggagtggggaccccagcagctgcagctgctaaagcagccgccaaagccgcccagtttgggttagttcctggtgtcggcgtggctcctggagttggcgtggctcctggtgtcggtgtggctcctggagttggcttggctcctggagttggcgtggctcctggagttggtgtggctcctggcgttggcgtggctcccggcattggccctggtggagttgcagctgcagcaaaatccgctgccaaggtggctgccaaagcccagctccgagctgcagctgggcttggtgctggcatccctggacttggagttggtgtcggcgtccctggacttggagttggtgctggtgttcctggacttggagttggtgctggtgttcctggcttcggggcaggtgcagatgagggagttaggcggagcctgtcccctgagctcagggaaggagatccctcctcctctcagcacctccccagcaccccctcatcacccagggtacctggagccctggctgccgctaaagcagccaaatatggagcagcagtgcctggggtccttggagggctcggggctctcggtggagtaggcatcccaggcggtgtggtgggagccggacccgccgccgccgctgccgcagccaaagctgctgccaaagccgcccagtttggcctagtgggagccgctgggctcggaggactcggagtcggagggcttggagttccaggtgttgggggccttggaggtatacctccagctgcagccgctaaagcagctaaatacggtgctgctggccttggaggtgtcctagggggtgccgggcagttcccacttggaggagtggcagcaagacctggcttcggattgtctcccattttcccaggtggggcctgcctggggaaagcttgtggccggaagagaaaatga

SEQ ID NO: 115149 - DNA, 1000 bp, Homo Sapiens
tggaaccggagaaaaggggtaaatatgtggtctgttttgatccccttgatggatcttccaacatcgattgccttgtgtccgttggaaccatttttggcatctatagaaagaaatcaactgatgagccttctgagaaggatgctctgcaaccaggccggaacctggtggcagccggctacgcactgtatggcagtgccaccatgctggtccttgccatggactgtggggtcaactgcttcatgctggacccggccatcggggagttcattttggtggacaaggatgtgaagataaaaaagaaaggtaaaatctacagccttaacgagggctacgccagggactttgaccctgccgtcactgagtacatccagaggaagaagttccccccagataattcagctccttatggggcccggtatgtgggctccatggtggctgatgttcatcgcactctggtctacggagggatatttctgtaccccgctaacaagaagagccccaatggaaagctgagactgctgtacgaatgcaaccccatggcctacgtcatggagaaggctgggggaatggccaccactgggaaggaggccgtgttagacgtcattcccacagacattcaccagagggcgccggtgatcttgggatcccccgacgacgtgctcgagttcctgaaggtgtatgagaagcactctgcccagtgagcacctgccctgcctgcatccggagaattgcctctacctggaccttttgtctcacacagcagtaccctgacctgctgtgcaccttacattcctagagagcagaaataaaaagcatgactatttccaccatcaaatgctgtagaatgcttggcactccctaaccaaatgctgtctccataatgccactggtgttaagatatattttgagtggatggaggagaaataaacttattcctccttaaaaaaaaaaaaaaaaaaaaaaaaaaaaaaaaaaaaaaaaaaaaaaaaaaaaaaaaaaa

SEQ ID NO: 115150 - DNA, 1000 bp, Homo Sapiens
acaacagagatgccctgaggggttgtgtaggttgttcactgcaggaagtcccctggttaagaaggcaagtggggtttaaacagacccacagtctactcatcaaaccaggtgtccttggcattgtgtccacccagagagctcactgttttcttttctttttcttttctttttttttttttgagatggagtcttgctgcatcccccaggctggagtgcagtggcatgatcttggctcactgcagcctccgcctcccaggttcaggcgattctcctgcctcagcctcccgagtggctgggattgcaggtgcgtgccaccacgcccagctaattttgtacgtttagtggaaatggagtttcaccatgttggtcaggctggtctcaaactcctgacctcatgatccgccttcctcggcctcccaaggtgctgggattacaggtgttagccactgcgcccggccctagagctcactgttttctagttagtccatctggaagtggagcctttttccagtttgcacaaatgtgccatattggcttgtagctggcatgcatccaagtccataggtcctgcctcttcaatcctggctttctagggcctgggatgatcattgctagaactgagagaccagcctggctgagtgaacttcagggcgttccgttcattctttcagtaaatggttgcagcacatgttttacatgtcaggcagtgaaaccccccacagcagccttccctctcagaggatacatttgtaaccattacacagtcatcaaaggaataattttttttaatcaccagtgtgcatacagtcatggagctgggtattcccagctaccagggaggctgaggtgggaggattgcttgatgccaggagttagggaatatagtgcaccgtgattggacttgcgaatagccactgcactgcggcctggacgacgtagtgataccctgactcttataaataaataaatgaataaacacaattatgactttgcggatggg

SEQ ID NO: 115151 - DNA, 1000 bp, Homo Sapiens
tttgtctcatgtttatacaccaaatgatgtccgtatggtgattgaatatgccagattacgaggaattcgagtcctgccagaatttgatacccctgggcatacactatcttggggaaaaggtcagaaagacctcctgactccatgttacagtagacaaaacaagttggactcttttggacctataaaccctactctgaatacaacatacagcttccttactacatttttcaaagaaattagtgaggtgtttccagatcaattcattcatttgggaggagatgaagtggaatttaaatgttgggaatcaaatccaaaaattcaagatttcatgaggcaaaaaggctttggcacagattttaagaaactagaatctttctacattcaaaaggttttggatattattgcaaccataaacaagggatccattgtctggcaggaggtttttgatgataaagcaaagcttgcgccgggcacaatagttgaagtatggaaagacagcgcatatcctgaggaactcagtagagtcacagcatctggcttccctgtaatcctttctgctccttggtacttagatttgattagctatggacaagattggaggaaatactataaagtggaacctcttgattttggcggtactcagaaacagaaacaacttttcattggtggagaagcttgtctatggggagaatatgtggatgcaactaacctcactccaagattatggcctcgggcaagtgctgttggtgagagactctggagttccaaagatgtcagagatatggatgacgcctatgacagactgacaaggcaccgctgcaggatggtcgaacgtggaatagctgcacaacctctttatgctggatattgtaaccatgagaacatgtaaaaaatggaggggaaaaaggccacagcaatctgtactacaatcaactttattttgaaatcatgtaaaataagatattagacttttttgaataaaatatttttattgattgaa

SEQ ID NO: 115152 - DNA, 1000 bp, Homo Sapiens
tgagctcaggcatttgaggctgtcgtgagctatgattatgccactgctttccagcctgggcaacatagtaagaccccatctcttaaaaaatgaatttggccagacacaggtgcctcacgcctgtaatcccagcactttgggaggctgagctggatcacttgagttcaggagttggagaccaggcctgagcaacaaagcgagatcccatctctacaaaaaccaaaaagttaaaaatcagctgggtatggtggcacgtgcctgtgatcccagctacttgggaggctgaggcaggaggatcgcctgagcccaggaggtggaggttgcagtgagccatgatcgagccactgcactccagcctgggcaacagatgaagaccctatttcagaaatacaactataaaaaaaataaataaatcctccagtctggatcgtttgacgggacttcaggttctttctgaaatcgccgtgttactgttgcactgatgtccggagagacagtgacagcctccgtcagactcccgcgtgaagatgtcacaagggattggcaattgtccccagggacaaaacactgtgtcccccccagtgcagggaaccgtgataagcctttctggtttcggagcacgtaaatgcgtccctgtacagatagtggggattttttgttatgtttgcactttgtatattggttgaaactgttatcacttatatatatatatacacacatatatataaaatctatttatttttgcaaaccctggttgctgtatttgttcagtgactattctcggggccctgtgtagggggttattgcctctgaaatgcctcttctttatgtacaaagattatttgcacgaactggactgtgtgcaacgctttttgggagaatgatgtccccgttgtatgtatgagtggcttctgggagatgggtgtcactttttaaaccactgtatagaaggtttttgtagcctgaatgtcttactgtgatcaattaaatttcttaaatg

SEQ ID NO: 115153 - DNA, 1000 bp, Homo Sapiens
tacctgtgggcgacacctgggggaaggaggtcatcagccgttttgacacaccgctggagacaaagggacgcttctacacagacagcaatggccgggagatcctggagaggaggcgggattatcgacccacctggaaactgaaccagacggagcccgtggcaggaaactactatccagtcaacacccggatttacatcacggatggaaacatgcagctgactgtgctgactgaccgctcccaggggggcagcagcctgagagatggctcgctggagctcatggtgcaccgaaggctgctgaaggacgatggacgcggagtatcggagccactaatggagaacgggtcgggggcgtgggtgcgagggcgccacctggtgctgctggacacagcccaggctgcagccgccggacaccggctcctggcggagcaggaggtcctggcccctcaggtggtgctggccccgggtggcggcgccgcctacaatctcggggctcctccgcgcacgcagttctcagggctgcgcagggacctgccgccctcggtgcacctgctcacgctggccagctggggccccgaaatggtgctgctgcgcttggagcaccagtttgccgtaggagaggattccggacgtaacctgagcgcccccgttaccttgaacttgagggacctgttctccaccttcaccatcacccgcctgcaggagaccacgctggtggccaaccagctccgcgaggcagcctccaggctcaagtggacaacaaacacaggccccacaccccaccaaactccgtaccagctggacccggccaacatcacgctggaacccatggaaatccgcactttcctggcctcagttcaatggaaggaggtggatggttaggtctgctgggatgggccctccaagcccaagcctcctgctccgggggcagaccagactctgactctcctcttggggctgctgccattaaaacgctactactaagactcaggtcaaaaaaa

SEQ ID NO: 115154 - DNA, 1000 bp, Homo Sapiens
cacacgccccagctgctgaccctggtgcccaggggctgggatgcccacaccacctgccaggccctcggggtgtgtgggaccatgtccagccctctccagtgtatccacagccccgacctttgatgagaactcagctgtccagctgcaaaggaaaagccaagtgagacgggctctgggaccatggtgaccaggctcttcccctgctccctggccctcgccagctgccaggctgaaaagaagcctcagctcccacaccgccctcctcaccgcccttcctcggcagtcacttccactggtggaccacgggcccccagccctgtgtcggccttgtctgtctcagctcaaccacagtctgacaccagagcccacttccatcctctctggtgtgaggcacagcgagggcagcatctggaggagctctgcagcctccacacctaccacgacctcccagggctgggctcaggaaaaaccagccactgctttacaggacagggggttgaagctgagccccgcctcacacccacccccatgcactcaaagattggattttacagctacttgcaattcaaaattcagaagaataaaaaatgggaacatacagaactctaaaagatagacatcagaaattgttaagttaagctttttcaaaaaatcagcaattccccagcgtagtcaagggtggacactgcacgctctggcatgatgggatggcgaccgggcaagctttcttcctcgagatgctctgctgcttgagagctattgctttgttaagatataaaaaggggtttctttttgtctttctgtaaggtggacttccagcttttgattgaaagtcctagggtgattctatttctgctgtgatttatctgctgaaagctcagctggggttgtgcaagctagggacccattcctgtgtaatacaatgtctgcaccaatgctaataaagtcctattctcttttatgaaaaaaaaaaaaaaaaaaaaaaaaaaaaaaaaaaaaa

SEQ ID NO: 115155 - DNA, 1000 bp, Homo Sapiens
ctgaagagctggagctggaattattaccgaattgtagccaggtatgagaacaccctggctgctcagttctttggccacactcatgtggatgaatttgaggtcttctatgatgaagagactctgagccggccgctggctgtagccttcctggcacccagtgcaactacctacatcggccttaatcctggttaccgtgtgtaccaaatagatggaaactactccgggagctctcacgtggtcctggaccatgagacctacatcctgaatctgacccaggcaaacataccgggagccataccgcactggcagcttctctacagggctcgagaaacctatgggctgcccaacacactgcctaccgcctggcacaacctggtatatcgcatgcggggcgacatgcaacttttccagaccttctggtttctctaccataagggccacccaccctcggagccctgtggcacgccctgccgtctggctactctttgtgcccagctctctgcccgtgctgacagccctgctctgtgccgccacctgatgccagatgggagcctcccagaggcccagagcctgtggccaaggccactgttttgctagggccccagggcccacatttgggaaagttcttgatgtaggaaagggtgaaaaagcccaaatgctgctgtggttcaaccaggcaagatcatccggtgaaagaaccagtccctgggccccaaggatgccggggaaacaggaccttctcctttcctggagctggtttagctggatatgggagggggtttggctgcctgtgcccaggagctagactgccttgaggctgctgtcctttcacagccatggagtagaggcctaagttgacactgccctgggcagacaagacaggagctgtcgccccaggcctgtgctgcccagccaggaaccctgtactgctgctgcgacctgatgctgccagtctgttaaaataaagataagagacttggactccaaaaaaaaaaaaaaa

SEQ ID NO: 115156 - DNA, 1000 bp, Homo Sapiens
ttcttgtcgcttacctgcagtatctttcccacccaggcatgccttattctttctaaaggaaagtatgaatggagaggggaaagcttgggaaactgatagatttccttggatgccaaaacacctccatagcctgtctgcccggccctatgtggaaacagcattgagtttcaagtcctttatgcctccacccagggatagccacttgtaatccacatggcaattgtgaaacaagcaggaaatgcgtaattgtcagaattttgtggggaaaggactagggaataaggaaaacaaagatcttccttgtgttttagagctgtcagctagaggagcacctgcttgagtctgatgccatctaatggtcccagaagaaactgggttttgaacctagagttccatggactcttaggaattagactactactactactaagcattcactggtgcttactatgtgctattgctgtgccaagtatctgaaacctgtcttcttaccttatttttcaagataattctatgtggcaggtattactatctcaattctaagagtgagaaaatggagttttagaaacatttactaacttgcctgggtcacatagctaaggaagaggtggacttgcccagctttgcataaaactcctcaaaagagttgcctatactccctgactccacttatcttcctactatcctctttttaaaatatattatttatttatttaaataagcaatatatgaatgtggtttgaaattcaaaagacacaaagaagtatacagaggaaagcctcactctcaatccttctcaaggtttgctaattcctcttgcataggcaatccgttcttccagctttgtgtttatctttccagagaagtttactgtgtattaagcaaatatgtatatctttattcttgctcagtattttcgcaaacagcagctgtctaagttcactgttctgaactttattttttaaattaaaaatatatggctatgtagtattctatttta

SEQ ID NO: 115157 - DNA, 1000 bp, Homo Sapiens
ggggagtaggacataccagcttagattttaaggtttttactgtgagggatgtttgggagatgtaagaaatgttcttgcagttaagggttagtttacaatcagccacattctaggtaggtaggggcccacttcaccgtactaaccagggaagctgtccctcatgttgaattttctctaacttcaaggcccatatctgtgaaatgctggcatttgcacctacctcacagagtgcattgtgagggttaatgaaataatgtacatctggccttgaaaccaccttttattacatggggtctaaaacttgacccccttgagggtgcctgttccctctccctctccctgttggctggtgggttggtagtttctacagttgggcagctggttaggtagagggagttgtcaagtcttgctggcccagccaaaccctgtctgacaacctcttggtcgaccttagtacctaaaaggaaatctcaccccatcccacaccctggaggatttcatctcttgtatatgatgatctggatccaccaagacttgttttatgctcagggtcaatttcttttttcttttttttttttttttttctttttctttgagactgggtctcgctttgttgcccaggctggagtggagtggcgtgatcttggcttactgcagcctttgcctccccggctcgagcagtcctgcctcagcctccggagtagctgggaccacaggttcatgccaccatggccagccaacttttgcatgttttgtagagatggggtctcacagtgttgcccaggctggtctcaaactcctgggctcaggcgatccacctgtctcagcctcccagagtgctgggattacaattgtgagccaccacgtggagctggaagggtcaacatcttttacattctgcaagcacatctgcattttcaccccacccttcccctccttctccctttttatatcccatttttatatcgatctcttattttacaataaaactttgctgcca

SEQ ID NO: 115158 - DNA, 1000 bp, Homo Sapiens
ggaggtctttatacaacaaaggaacgtctcctgcccccagctggaggtccctgtctgcccctcgggctttcagctgagctgtaagacctcagcgtgctgcccaagctgtcgctgtgagcgcatggaggcctgcatgctcaatggcactgtcattgggcccgggaagactgtgatgatcgatgtgtgcacgacctgccgctgcatggtgcaggtgggggtcatctctggattcaagctggagtgcaggaagaccacctgcaacccctgccccctgggttacaaggaagaaaataacacaggtgaatgttgtgggagatgtttgcctacggcttgcaccattcagctaagaggaggacagatcatgacactgaagcgtgatgagacgctccaggatggctgtgatactcacttctgcaaggtcaatgagagaggagagtacttctgggagaagagggtcacaggctgcccaccctttgatgaacacaagtgtctggctgagggaggtaaaattatgaaaattccaggcacctgctgtgacacatgtgaggagcctgagtgcaacgacatcactgccaggctgcagtatgtcaaggtgggaagctgtaagtctgaagtagaggtggatatccactactgccagggcaaatgtgccagcaaagccatgtactccattgacatcaacgatgtgcaggaccagtgctcctgctgctctccgacacggacggagcccatgcaggtggccctgcactgcaccaatggctctgttgtgtaccatgaggttctcaatgccatggagtgcaaatgctcccccaggaagtgcagcaagtgaggctgctgcagctgcatgggtgcctgctgctgcctgccttggcctgatggccaggccagagtgctgccagtcctctgcatgttctgctcttgtgcccttctgagcccacaataaaggctgagctcttatcttgctgcatgttctgctcttgtgcccttctgagcccacaat

SEQ ID NO: 115159 - DNA, 1000 bp, Homo Sapiens
ccagaactgtgtgtctcatggtatgtaactcttaaagcaaataaatgaactgacttcaactgggatacatttggaaatgtggtcatcaaagatgacttgaaatgaggcctactctaaagaattcttgaaaaacttacaagtcaagcctagcctgataatcctattacatagtttgaaaaatagtattttatttctcagaacaaggtaaaaaggtgagtgggtgcatatgtacagaagattaagacagagaaacagacagaaagagacacacacacagccaggagtgggtagatttcagggagacaagagggaatagtatagacaataaggaaggaaatagtacttacaaatgactcctaagggactgtgagactgagagggctcacgcctctgtgttcaggatacttagttcatggcttttctctttgactttactaaaagagaatgtctccatacgcgttctaggcatacaagggggtaactcatgatgagaaatggatgtgttattcttgccctctcttttgaggctctctcataacccctctatttctagagacaacaaaaatgctgccagtcctaggcccctgccctgtaggaaggcagaatgtaactgttctgtttgtttaacgattaagtccaaatctccaagtgcggcactgcaaagagacgcttcaagtggggagaagcggcgataccatagagtccagatcttgcctccagagatttgctttaccttcctgattttctggttactaattagcttcaggatacgctgctctcatacttgggctgtagtttggagacaaaatattttcctgccactgtgtaacatagctgaggtaaaaactgaactatgtaaatgactctactaaaagtttagggaaaaaaaacaggaggagtatgacacaaaaaaaaaaaaaaaaaaaaaaaaaaaaaaaaaaaaaaaaaaaaaaaaaaaaaaaaaaaaaaaaaaaaaaaaaaaaaaaaaaaaaaaaaaaaa

SEQ ID NO: 115160 - DNA, 921 bp, Homo Sapiens
cagttaaaaggaggcgcctgctggcctccccttacagtgcttgttcggggcgctccgctggcttcttggacaattgcgccatgtgtgctgctcggctagcggcggcggcggcggcggcccagtcggtgtatgccttctcggcgcgcccgctggccggcggggagcctgtgagcctgggctccctgcggggcaaggtactacttatcgagaatgtggcgtccctctgaggcaccacggtccgggactacacccagatgaacgagctgcagcggcgcctcggaccccggggcctggtggtgctcggcttcccgtgcaaccagtttgggcatcaggagaacgccaagaacgaagagattctgaattccctcaagtacgtccggcctggtggtgggttcgagcccaacttcatgctcttcgagaagtgcgaggtgaacggtgcgggggcgcaccctctcttcgccttcctgcgggaggccctgccagctcccagcgacgacgccaccgcgcttatgaccgaccccaagctcatcacctggtctccggtgtgtcgcaacgatgttgcctggaactttgagaagttcctggtgggccctgacggtgtgcccctacgcaggtacagccgccgcttccagaccattgacatcgagcctgacatcgaagccctgctgtctcaagggcccagctgtgcctagggcgcccctcctaccccggctgcttggcagttgcagtgctgctgtctcgggggggttttcatctatgagggtgtttcctctaaacctacgagggaggaacacctgatcttacagaaaataccacctcgagatgggtgctggtcctgttgatcccagtctctgccagaccaaggcgagtttccccactaataaagtgccgggtgtcagcagaaaaaaaaaaaaaaaaaaa

SEQ ID NO: 115161 - DNA, 1000 bp, Homo Sapiens
tacaaaatgactaggataacagaaagaacgtgatctcctgattagagagggtggttttcctcaatggaaccaaatataaagaggacttgaacaaaaatgacagatacaaactatttctatcctgagtagtaatctcacacttcatcctatagagtcaaccaccacagataggaattccttattctttttttaatttttttaagacagagtctcactttgttgcccaggctggagcgcagtggggtgatctcatctccctgcaacctccgcctcctgggttcaagcgattcttgtgcctcagcttcccaagcagctgggattacaggtgcccgccaccacgcccagctaatttttgcatttttagtagagatggggtttcaccatgttggccacgctcgtctccaactcctgacctcaggtaatccgcctgccttggcctcccaaagtgctgggattacagacatgaaccaccacgcctggctggaatacttactcttgtcgggagattgaaccactaaaatgttagagcagaattcattatgctgtggtcacaggggtgtcttgtctgagaacaaatacaattcagtcttctctttggggttttagtatgtgtcaaacataggactggaagtttgcccctgttcttttttcttttgaaagaacatcagttcatgcctgaggcatgagtgactgtgcatttgagaatagttttccctattctgtggatacagtcccagagttttcagggagtacacaggtagattagtttgaagcattgaccttttatttattccttatttctctttcatcaaaacaaaacagcagctgtgggaggagaaatgagagggcttaaatgaaatttaaaataagctatattatacaaatactatctctgtattgttctgaccctggtaaatatatttcaaaacttcagatgacaaggattagaacactcattaaagatgctattcttcagaaaaaaaaaaaaaaaaaaaaaaaa

SEQ ID NO: 115162 - DNA, 1000 bp, Homo Sapiens
gctgcggccaggggctgcgctgctatccccacccgggctccgagctgcccctgcaggcgctggtcatgggcgagggcacttgtgagaagcgccgggacgccgagtatggcgccagcccggagcaggttgcagacaatggcgatgaccactcagaaggaggcctggtggagaaccacgtggacagcaccatgaacatgttgggcgggggaggcagtgctggccggaagcccctcaagtcgggtatgaaggagctggccgtgttccgggagaaggtcactgagcagcaccggcagatgggcaagggtggcaagcatcaccttggcctggaggagcccaagaagctgcgaccaccccctgccaggactccctgccaacaggaactggaccaggtcctggagcggatctccaccatgcgccttccggatgagcggggccctctggagcacctctactccctgcacatccccaactgtgacaagcatggcctgtacaacctcaaacagtgcaagatgtctctgaacgggcagcgtggggagtgctggtgtgtgaaccccaacaccgggaagctgatccagggagcccccaccatccggggggaccccgagtgtcatctcttctacaatgagcagcaggaggctcgcggggtgcacacccagcggatgcagtagaccgcagccagccggtgcctggcgcccctgccccccgcccctctccaaacaccggcagaaaacggagagtgcttgggtggtgggtgctggaggattttccagttctgacacacgtatttatatttggaaagagaccagcaccgagctcggcacctccccggcctctctcttcccagctgcagatgccacacctgctccttcttgctttccccgggggaggaagggggttgtggtcggggagctggggtacaggtttggggagggggaagagaaatttttatttttgaacccctgtgtcccttttgcataagattaaaggaaggaaaagtaaa

SEQ ID NO: 115163 - DNA, 1000 bp, Homo Sapiens
aggatatgtctggcttccaagagaaaggaggctccgttttgcaaagtggaggagggacgagggacaggggtttcaccagccagcaacctgggccttgtactgtctgtgtttttaaaaccactaaagtgcaagaattacattgcactgtttctccactttttattttctcttaggcttttgtttctatttcaaacatactttcttggttttctaatggagtatatagtttagtcatttcacagactctggcctcctctcctgaaatccttttggatggggaaagggaaggtggggagggtccgaggggaaggggaccccagcttccctgtgcccgctcaccccactccaccagtccccggtcgccagccggagtctcctctctaccgccactgtcacaccgtagcccacatggatagcacagttgtcagacaagattccttcagattccgagttgcctaccggttgttttcgttgttgttgttgttgtttttctttttctttttttttttgaagacagcaataaccacagtacatattactgtagttctctatagttttacatacattcataccataactctgttctctcctcttttttgttttcaactttaaaaacaaaaataaacgatgataatctttactggtgaaaaggatggaaaaataaatcaacaaatgcaaccagtttgtgagaaaaaaaaaaaaaagccgaaaaaaaaaaaaaaaacacctgaatgcggaagagctcggctcccgtttagcattttgtacttaaggaaataaaaaaccaacaaaggatctcacattttcttaaaaagtgaagattgctgtatactatttattcaacttataatttatgttactccttgatctttgtcttttgtcatgacaaagcatttatttaataaagttatgcattcagttaaaaaaaaaaaaaaaaaaaaaaaaaaaaaaaaaaaaaaaaaaaaaaaaaaaaaaaaaaaaaaaaaaaaaaaaaaaaaaa

SEQ ID NO: 115164 - DNA, 857 bp, Homo Sapiens
ctgggactttggtggtgctacccttggcctcccagagtcctgccaccctgctgccgccaccatgctgccccctgggactgcgaccctcttgactctgctcctggcagctggctcgctgggccagaagcctcagaggccacgccggcccgcatcccccatcagcaccatccagcccaaggccaattttgatgctcagcagtttgcagggacctggctccttgtggctgtgggctccgcttgccgtttcctgcaggagcagggccaccgggccgaggccaccacactgcatgtggctccccagggcacagccatggctgtcagtaccttccgaaagctggatgggatctgctggcaggtgcgccagctctatggagacacaggggtcctcggccgcttcctgcttcaagcccgaggcgcccgaggggctgtgcacgtggttgtcgctgagaccgactaccagagtttcgctgtcctgtacctggagcgggcggggcagctgtcagtgaagctctacgcccgctcgctccctgtgagcgactcggtcctgagtgggtttgagcagcgggtccaggaggcccacctgactgaggaccagatcttctacttccccaagtacggcttctgcgaggctgcagaccagttccacgtcctggacgaagtgaggaggtgaggccggcacacagctccagtgctgagaagtcagtgccccgagagacgaccccaccagtggggtgcccgctgcctgtcctccgtgaaaccagcctcagatcagggccctgccacccagggcaggggatcttctgccggctgccccagaggacagtgggtggagtggtacctacttattaaatgtctcc

SEQ ID NO: 115165 - DNA, 1000 bp, Homo Sapiens
gtcattgatttggtgagaacagtaatggaaaatggtgttgaaggacttctcatttttggagctttccttccagagtcctggctgattggtgttcgctgttcatctgagcccccaaaagcattattactgatacttgcacacagtcaaaagcgcagactggatggatggtcttttataaggcatttaagggtacactactgtgtttcactgaccatacatttttcttagcccctcaagtaatatagcacagagttatgaatgacaattcccctaaccattcctcttcatatctgcctcttccccttaccatcgtaattctccaaactggtcataaaggcactctgtgaagatattggggactgacatcttaagctctcacctggctgcagtaggaaaggccaaactgacgacaaaaaaaaaattctttataaagatgatatggtaacatgtatctttgccctgggtctgggtgggtccagtcagtctcagatttacaagcatttaggagcctaggtaaaagctgctagtattcttttaaaagttatatttatgacttgcaatgatagaaaactccttccaattaaatggcattttataatattatgtgtgtacttcacagtgttaaaaataccctcatacgttattgcatttgatcttcacagaaagtgcattttaaccagtactctgggtgcaataaataatatgtagaaatttaagtcctccaattccagcatatccagtgagttttgacagtgtgtttatgtggaatgtttaaggatatacaattgtactttatataaattggttcttgttcttcttaaatgtgacatgaaataattgtgctgctacattatactggaaattaacaggggaaaagggaagagctcttggctcccttgaggttctgctagtggtgttaggagtggttacaactgagcttttagtaaccatttaaccgtatgtaaacttggtttctaattaaaaaaaaatttctttttcc

SEQ ID NO: 115166 - DNA, 1000 bp, Homo Sapiens
tatggtatatattttgaaaggagaaaaaaaaagccactaaggtcagtgttataaaatctgtattgctaagataattaaatgaaatacttgacaacatttttcattcctgctttttcatagataccattttgaaatattcacaaggttgctggcatttgctgcatttcaagttaattctcagaagtgaaaaagacttcaaatgttattcaataactattgctgctttctcttctacttcttgtgctttactctgaatttccagtgtggtcttgtttaatatttgttcctctaggtaaactagcaaaaggatgatttaacattaccaaatgcctttctagcaattgcttctctaaaacagcactatcgaggtatttggtaacttgctgtgaaatgactgcatcatgcatgcactcttttgagcagtaaatgtatattgatgtaactgtgtcaggattgaggatgaactcaggtttccggctactgacagtggtagagtcctaggacatctctgtaaaaagcaggtgactttcctatgacactcatcaggtaaactgatgctttcagatccatcggtttatactatttattaaaaccattctgcttggttccacaatcatctattgagtgtacatttatgtgtgaagcaaatttctagatatgagaaatataaaaataattaaaacaaaatccttgccttcaaacgaaatggctcggccaggcacggaggctcgtgcatgtaatcctagcactttgggaggctgagatgggaggatcacttgaggccaagagtttgagaccaacctgggtaacaaagtgagacctccctgtctctacaaaaaaaatcaaaaaattatctgatccttgtggcacacaactgtggtcccagctacaggggaggctgagacgcaaggatcacttgagcccagaagctcaaggctgcagtgagccaagttcacaccactgccatttcctcctgggcaacagagtgagaccctatcac

SEQ ID NO: 115167 - DNA, 1000 bp, Homo Sapiens
accccatctctatttatatatatatatataaaacttagagtttttatcttcccctaaaagaggccgtgatatttgcagcagcctcaaattgctcttaaggggtttaggtgtgcagaagctttcctttccctacccagtaaccatgtgactactaacgtggtatattgatttattttgtttgctgtctgtctcccctgccccactgctggaacagaggctccaagaaaacagggaccttattattcattactgcatccccagtaatgaaagtacttagaaaataattattgaatgaatgaaatctaaactgtgaacctgagggtgtttgtggcagtgtttgttttactgaattgtagaaggacataaccgtgttttcagtgtttctatggaacaaacttgtacattttatttcacttgtgttttgtcttaaaccctactgctggaaacaattttatgtaataagcaatgggcccaaaagtctaggagtttttttgtacttagtgaatttgtatgcaacagagatgctgcagctgatgcctttaaaaggtattcatcatggaagagctgaggcctgtgcttggtgttccagagcccagggttgagcatcctgaaggagccactgcagccgtcactgtccccagagcctgtggagatagagcctgtttgctgctttttcttcccgctcttaagacatggctggagctcagtcttcattgaatgaagtttgctgtggtattgcatagccttgctttcttgaactaaactgtttgcccttcacaagtagttcttctttcaggattagttcgttccaaggaggctcttcagtctcacagataagtagatctctcctgctgtctggacacatttcactcggaaattgaatacaatttgtattcaggctgggaacctgaacacacacttgtgtttttaagcttcccttttttacagtggacaaggacacaaataataaataaatcatccctaatgcccaagaaaaaaa

SEQ ID NO: 115168 - DNA, 1000 bp, Homo Sapiens
gaaaacttgcccatcgactttttgaatataaggaagattccaaattagattataacaacatcccaactgtggtcttcagccacccccctattgggacagtgggactcacggaagatgaagccattcataaatatggaatagaaaatgtgaagacctattcaacgagctttaccccgatgtatcacgcagttaccaaaaggaaaacaaaatgtgtgatgaaaatggtctgtgctaacaaggaagaaaaggtggttgggatccatatgcagggacttgggtgtgatgaaatgctgcagggttttgctgttgcagtgaagatgggagcaacgaaggcagactttgacaacacagtcgccattcaccctacctcttcagaagagctggtcacacttcgttgagaaccaggagacacgtgtggcgggcagtgggacccatagatcttctgaaatgaaacaaataatcacattgacttactgtttgagttttatgtatttctttattttaatcaggatcttctgatagtggaaatttttagtacataatagaacttatttatggagttagaaatttgtagtgttatccaggattgattttcatttgatcacatctcacagtaattaatattttcaagttttttttttattaacagctctgtgctagttttttttttctgttttagcctcatcccaaatataaagctttgtgaagtacaattaacttaatgtacttgaatgaatagaacttgctactttttttttttttttttttgagacagagttttgctctcattgcccaggctggagtgcggtggtgctatttcagctcaccacaacctctgcctcctgggttcaagtgattctcctgccttagcctcccgaatagctggaattacaggcacgcaccaccatgcctgactaattttgtatttttagtagacatggggtttctccatgttggtcaggctggtctcaaactcccaccttcaggtgatccgcccacc

SEQ ID NO: 115169 - DNA, 1000 bp, Homo Sapiens
ttgaaagctcgtgtaatttactttaagattatctgcctgctcttcttcaaagctgaccttgctttagaaatagttttaactagcttagttttctggtttccaaaactaaaatagattaaatcctacaaatttaaggacagttgtgacagtaatctgaccactatctataaatacattggacattggtttccaaatctccctttctcttcagttccttccttgttcaatatatacccttctctaaactgtgcgggtaaaaggaatgactgtccttgagagaaccattagtttatcaaaggtttatgtagttttgttgctgtaccctaactttgatattcagggaggtaggaaaggtaacagaaaaccagcatatttaatcaaagcaagaagtaatcgctgacagttaaatgtgaccaaaaaaattaaaagttcacaatttttttaatgtagccatttggggttatctctagtaaggcagatacccacgttggtaaatttttaggatattgtgttgcactagaaaactaagtggttcatatttctaatgaggaagattaatgaaagaacattgttatattctgcgtggtatattttaaagtttaagaaggcatgttaaacattatttcctctatggtagttaaaatacagaattagatttttaacaggtgtcatttgactaaacgtttcggtagaatgcttcatacttgagtgatgctggataaggtattgtatttcaacaatggactatgccttggtttttcactaatcaaaatcaaaattactctttaacatgataaatgaatttaccagtttagtatgctgtggtattttaataagttttcaaagataattgggaaaacatgagactggtcatattgatgaatattgtaacatgtgaattgtgatccatttctgatatgtcttgaactactgtgtctagtaggcaaatgtcattgttacctctgtgtgttaagaaaataaaaatattttctaaaggtcg

SEQ ID NO: 115170 - DNA, 1000 bp, Homo Sapiens
caagttaaaagtggagcagcacgtggagctgtaccagaaatacagcaacaattcctggcgatacctcagcaaccggctgctggcacccagcgactcgccagagtggttatcttttgatgtcaccggagttgtgcggcagtggttgagccgtggaggggaaattgagggctttcgccttagcgcccactgctcctgtgacagcagggataacacactgcaagtggacatcaacgggttcactaccggccgccgaggtgacctggccaccattcatggcatgaaccggcctttcctgcttctcatggccaccccgctggagagggcccagcatctgcaaagctcccggcaccgccgagccctggacaccaactattgcttcagctccacggagaagaactgctgcgtgcggcagctgtacattgacttccgcaaggacctcggctggaagtggatccacgagcccaagggctaccatgccaacttctgcctcgggccctgcccctacatttggagcctggacacgcagtacagcaaggtcctggccctgtacaaccagcataacccgggcgcctcggcggcgccgtgctgcgtgccgcaggcgctggagccgctgcccatcgtgtactacgtgggccgcaagcccaaggtggagcagctgtccaacatgatcgtgcgctcctgcaagtgcagctgaggtcccgccccgccccgccccgccccggcaggcccggccccaccccgccccgcccccgctgccttgcccatgggggctgtatttaaggacacccgtgccccaagcccacctggggccccattaaagatggagagaggactgcggatctctgtgtcattgggcgcctgcctggggtctccatccctgacgttcccccactcccactccctctctctccctctctgcctcctcctgcctgtctgcactattcctttgcccggcatcaaggcacaggggaccagtggggaacactactgtagttagatc

SEQ ID NO: 115171 - DNA, 1000 bp, Homo Sapiens
caggggaacacgggcctcccagacgtggagctccttagccatgagctcaagggagtgtgcccagagccccctggcctagatgaccccctggcccaggatggagcaggagtgtcctgatgattcatggagtttgccccttcctaagggaaggagatctttatctttctggttggcttgaccagtcacgttgggagaagagagagagtgccaggagaccctgagggcagccggttcctactttggactgagagaagggagccccaggctggagcagcatgaggcccagcaagaagggcttgggttctgaggaagcagatgtttcatgctgtgaggccttgcaccaggtgggggccacagcaccagcagcatctttgctgggcaggcccagccctccactgcagaagcatctggaagcaccaccttgtctccacagagcagcttgggcacagcagactggcctggccctgagactggggagtggctccaatagcctcctgccacccacacaccactctccctagactctcctagggttcaggagctgctgggcccagaggtgacatttgacttttttccaggaaaaatgtaagtgtgaggaaaccctttttattttattacctttcactctctggctgctgggtctgccgtcggtcctgctgctaacctggcaccagagcctctgcccggggagcctcaggcagtcctctcctgctgtcacagctgccatccacttctcagtcccagggccatctcttggagtgacaaagctgggatcaaggatagggagttgtaacagagcagtgccagagcatgggcccaggtcccaggggagaggttggggctggcaggccactggcatgtgctgagtagcgcagagctacccagtgagaggccttgtctaactgcctttccttctaaagggaatgtttttttctgagataaaataaaaacgagccacatcgtgttttaagcttgtccaaatgaaaaaaaaaaaaaaaaa

SEQ ID NO: 115172 - DNA, 1000 bp, Homo Sapiens
tgtggagcggagcgttgcccgggccaagtctcgggtggtcgggaacccctttgatagcaagaccgagcaggggccgcaggtggatgaaactcagtttaagaagatcctcggctacatcaacacggggaagcaagagggggcgaagctgctgtgtggtgggggcattgctgctgaccgtggttacttcatccagcccactgtgtttggagatgtgcaggatggcatgaccatcgccaaggaggagatcttcgggccagtgatgcagatcctgaagttcaagaccatagaggaggttgttgggagagccaacaattccacgtacgggctggccgcagctgtcttcacaaaggatttggacaaggccaattacctgtcccaggccctccaggcgggcactgtgtgggtcaactgctatgatgtgtttggagcccagtcaccctttggtggctacaagatgtcggggagtggccgggagttgggcgagtacgggctgcaggcatacactgaagtgaaaactgtcacagtcaaagtgcctcagaagaactcataagaatcatgcaagcttcctccctcagccattgatggaaagttcagcaagatcagcaacaaaaccaagaaaaatgatccttgcgtgctgaatatctgaaaagagaaatttttcctacaaaatctcttgggtcaagaaagttctagaatttgaattgataaacatggtgggttggctgagggtaagagtatatgaggaaccttttaaacgacaacaatactgctagctttcaggatgatttttaaaaaatagattcaaatgtgttatcctctctctgaaacgcttcctataactcgagtttataggggaagaaaaagctattgtttacaattatatcaccattaaggcaactgctacaccctgctttgtattctgggctaagattcattaaaaactagctgctcttaaaaaaaaaaaaaaaaaaaaaaaaaaaaaaaaaaaaaaaaaaaaaaa

SEQ ID NO: 115173 - DNA, 1000 bp, Homo Sapiens
ggcctgccgacgcatcgcctgggggaaattcatgaacagtggccagacctgcgtggcccctgactacatcctctgtgacccctcgatccagaaccaaattgtggagaagctcaagaagtcactgaaagagttctacggggaagatgctaagaaatcccgggactatggaagaatcattagtgcccggcacttccagagggtgatgggcctgattgagggccagaaggtggcttatgggggcaccggggatgccgccactcgctacatagcccccaccatcctcacggacgtggacccccagtccccggtgatgcaagaggagatcttcgggcctgtgctgcccatcgtgtgcgtgcgcagcctggaggaggccatccagttcatcaaccagcgtgagaagcccctggccctctacatgttctccagcaacgacaaggtgattaagaagatgattgcagagacatccagtggtggggtggcggccaacgatgtcatcgtccacatcaccttgcactctctgcccttcgggggcgtggggaacagcggcatgggatcctaccatggcaagaagagcttcgagactttctctcaccgccgctcttgcctggtgaggcctctgatgaatgatgaaggcctgaaggtcagataccccccgagcccggccaagatgacccagcactgaggaggggttgctccgcctggcctggccatactgtgtcccatcggagtgcggaccaccctcactggctctcctggccctgggagaatcgctcctgcagccccagcccagccccactcctctgctgacctgctgacctgtgcacaccccactcccacatgggcccaggcctcaccattccaagtctccacccctttctagaccaataaagagacgaatacaattttctaactcagcaaaaaaaaaaaaaaaaaaaaaaaaaaaaaaaaaaaaaaaaaaaaaaaaaaaaaaaaaaaaaaaaaaaaaaaaaaaaaaaaaaaa

SEQ ID NO: 115174 - DNA, 1000 bp, Homo Sapiens
gctgtaattcactttaacaaattacgcatttctatcacgttcactaacagcttatgataagtctgtgtagtcttccttttctccagttctgttacccaatttagattagtaaagcgtacacaactggaaagactgctgtaataacacagccttgttatttttaagtcctattttgatattaatttctgattagttagtaaataacacctggattctatggaggacctcggtcttcatccaagtggcctgagtatttcactggcaggttgtgaatttttcttttcctctttgggaatccaaatgatgatgtgcaatttcatgttttaacttgggaaactgaaagtgttcccatatagcttcaaaaacaaaaacaaatgtgttatccgacggatacttttatggttactaactagtactttcctaattgggaaagtagtgcttaagtttgcaaattaagttggggagggcaataataaaatgagggcccgtaacagaaccagtgtgtgtataacgaaaaccatgtataaaatgggcctatcacccttgtcagagatataaattaccacatttggcttcccttcatcagctaacacttatcacttatactaccaataacttgttaaatcaggatttggcttcatacactgaattttcagtattttatctcaagtagatatagacactaaccttgatagtgatacgttagagggttcctattcttccattgtacgataatgtctttaatatgaaatgctacattatttataattggtagagttattgtatctttttatagttgtaagtacacagaggtggtatatttaaacttctgtaatatactgtatttagaaatggaaatatatatagtgttaggtttcacttcttttaaggtttacccctgtggtgtggtttaaaaatctataggcctgggaattccgatcctagctgcagatcgcatcccacaatgcgagaatgataaaataaaattggatatttgaga

SEQ ID NO: 115175 - DNA, 1000 bp, Homo Sapiens
atccaaggccattcctgccctctctgagtctcagtttttccatttgttcagtggagagaattaaccattgatacctcctggctgggtgaggcggctcacacctgtaatcccagcactttgggaggccgaggcaggcggatcacctgaaatcaggagttcaagatcagcctggctaacatggcgaaaccccgtctctactaaaaatacaaaaattagcctggcgtggtggcgcatgcctgtaatcccagctactcaggaggctaaggcaggagaatcgcttgaacccgggaggtggaggttgccgtgagctgagattgcgtcactgaactccggcctgggtgacagaaggaggctctgccttaaaaaaaaaaaaaaaaaaaacctcctgggactgttgcaaggatgaaatgaaggattgagggattgagggattgctgagctggagctccaggtgtcctatctttctcagtggggtggcacggagcggggccgcctccctcttctctccaggcaggtggggctgtggttatgcgatagggtctcccttccctccagcccatgccagaggagcttgtaactctttatcctcatggtgcccactacgagtcatactcttccccatgctgctcatcctcctgggccccatccactcagccaaagcagaatgcagggtttcctgcctgacaacccttctcacctcccaagtcccacttttgaacaagctgatgattctgaaactggcccaatttcctaacaagccggatgcttgagaaacctacatttggacaatgagaggctgctcctgcggcctgcgggccacctcctcttccttggctcctgctttctttttagactatatcaacctacaactttagtcgggaagagggacaggggtggacctgagtttcgtctcctgtctctctggctgatgtcacctgaataaagccttcttccctggcaaaaaaaaaaaaaaaaaaaaaaaaaaaaaaaaaaaaaaaaa

SEQ ID NO: 115176 - DNA, 1000 bp, Homo Sapiens
cagctgacctactgctccctctgtcctcctgacgacctggctgaccggggcctgctgggactcccaggtgctctctatgcccatgatgctttacggctctgggagatcattgccaggtatgtggaggggatcgtccacctcttctaccaaagggatgacatagtgaagggggaccctgagctgcaggcctggtgtcgggagatcacggaggtggggctgtgccaggcccaggaccgaggtttccctgtctccttccagtcccagagtcaactctgccatttcctcaccatgtgcgtcttcacgtgcactgcccagcatgccgccatcaaccagggccagctggactggtatgcctgggtccctaatgctccatgcacaatgcggatgcccccacccaccaccaaggaagatgtgacgatggccacagtgatggggtcactacctgatgtccggcaggcctgtcttcaaatggccatctcatggcatctgagtcgccgccagccagacatggtgcctctggggcaccacaaagaaaaatatttctcaggccccaagcccaaagctgtgctaaaccaattccgaacagatttggaaaagctggaaaaggagattacagcccggaatgagcaacttgactggccctatgaatatctgaagcccagctgcatagagaacagtgtcaccatctgagccctagagtgactctacctgcaagatttcacatcagctttaggactgacatttctatcttgaatttcatgctttcctaaagtctctgctgctaaggctctatttcctcccccagttaaaccccctacattagtatcccactagcccaggggagcagtaaactttctctgcaaagactagatccttttttacgctttgcagaccgcatagtcactgtctcaactactcagctctcctgctgcagcatgaaggcagccacagacaacatggaaatgagtgtgactatgttccaataaaactttatggacac

SEQ ID NO: 115177 - DNA, 1000 bp, Homo Sapiens
accatcctctgcattgacttgggcactgacatggttcctgccatctccctggcttatgagcaggctgagagtgacatcatgaagagacagcccagaaatcccaaaacagacaaacttgtgaatgagcggctgatcagcatggcctatgggcagattggaatgatccaggccctgggaggcttctttacttactttgtgattctggctgagaacggcttcctcccaattcacctgttgggcctccgagtggactgggatgaccgctggatcaacgatgtggaagacagctacgggcagcagtggacctatgagcagaggaaaatcgtggagttcacctgccacacagccttcttcgtcagtatcgtggtggtgcagtgggccgacttggtcatctgtaagaccaggaggaattcggtcttccagcaggggatgaagaacaagatcttgatatttggcctctttgaagagacagccctggctgctttcctttcctactgccctggaatgggtgttgctcttaggatgtatcccctcaaacctacctggtggttctgtgccttcccctactctcttctcatcttcgtatatgacgaagtcagaaaactcatcatcaggcgacgccctggcggctgggtggagaaggaaacctactattagccccccgtcctgcacgccgtggagcatcaggccacacactctgcatccgacacccaccccctctttgtgtacttcagtcttggagtttggaactctaccctggtaggaaagcaccgcagcatgtggggaagcaagacgtcctggaatgaagcatgtagctctatggggggaggggggagggctgcctgaaaaccatccatctgtggaaatgacagcggggaaggtttttatgtgcctttttgtttttgtaaaaaaggaacacccggaaagactgaaagaatacattttatatctggatttttacaaataaagatggctattataatggaaaaaaaaaaaaaaa

SEQ ID NO: 115178 - DNA, 1000 bp, Homo Sapiens
gcccgagaggaagtttggcgtggtggtggttggtgttggccgagccggctccgtgcggatgagggacttgcggaatccacacccttcctcagcgttcctgaacctgattggcttcgtgtcgagaagggagctcgggagcattgatggagtccagcagatttctttggaggatgctctttccagccaagaggtggaggtcgcctatatctgcagtgagagctccagccatgaggactacatcaggcagttccttaatgctggcaagcacgtccttgtggaataccccatgacactgtcattggcggccgctcaggaactgtgggagctggctgagcagaaaggaaaagtcttgcacgaggagcatgttgaactcttgatggaggaattcgctttcctgaaaaaagaagtggtggggaaagacctgctgaaagggtcgctcctcttcacagctggcccgttggaagaagagcggtttggcttccctgcattcagcggcatctctcgcctgacctggctggtctccctctttggggagctttctcttgtgtctgccactttggaagagcgaaaggaagatcagtatatgaaaatgacagtgtgtctggagacagagaagaaaagtccactgtcatggattgaagaaaaaggacctggtctaaaacgaaacagatatttaagcttccatttcaagtctgggtccttggagaatgtgccaaatgtaggagtgaataagaacatatttctgaaagatcaaaatatatttgtccagaaactcttgggccagttctctgagaaggaactggctgctgaaaagaaacgcatcctgcactgcctggggcttgcagaagaaatccagaaatattgctgttcaaggaagtaagaggaggaggtgatgtagcacttccaagatggcaccagcatttggttcttctcaagagttgaccattatctctattcttaaaattaaacatgttggggaaacaagaaaaaaaaaaaaaaa

SEQ ID NO: 115179 - DNA, 1000 bp, Homo Sapiens
tctgccgatatggatggcgcaccaagcagtgctgtggggccggggctgcccccgggagaggggcctacaggctgccggcgggaacgagagcgccggcaggagcggggccggtcccaggagcggaggcagccctcatcctcctcctcggagaagcagcgcttctactcctgcgaccgctttgggggccgtgagcccccgaagcccaagccctccctcagcagccacccaacgtcgccaacagctggccaggagccgggaccccacccacagggcagtggttccgtgaatgggagccccttgctgtcaacatctggtgctagcacccccggccgcggtgggcggaggcagctcccccagacgcccctgactccccgccccagcatcacctacaagacggccaactcctcacccatccacttcgccggggctcagaccagcctccctgccttctccccaggccggctcagccgtgggctttccgaacacaacgccctgctgcagagagaccccctcagccagcccctggcccctggctctcgaattggctctgacccttacctggggcagcgtctggacagtgaggcctctgtccacgccctgcctgaggacacgctcactttcgaggaggctgtggccaccaactcgggccgctcctccaggacttcctacgtgtcctccctgacctcccagtctcaccctctccgccgcgtgcccaacggttaccactgcaccctgggactcagctcgggtggccgagcacggcacagctaccaccaccctgaccaagaccactggtgctagctgcaccgtgaccgctcagacgcctgcatgcagcaggcgtgtgttccagtggatgagttttatcatccacacggggcagtcggccctcgggggaggccttgcccaccttggtgaggctcctgtggcccctccctccccctcctcccctcttttactctagacgacgaataaagccctgttgcttgagtgtacgtaccgc

SEQ ID NO: 115180 - DNA, 1000 bp, Homo Sapiens
atatatcctctttcactcagcaggtgcctgggcttcttaaggctcctgggcaaggcgtgggagttgtcctgacttgcttgggatctcgccctcctacctacctgtttcttccttcatctcctcccacctcagcttctcaagtagctctggcactacagacatgtgccactatgcctgaatatttttatttttgtgtagacacgggatctcactatgttgcctaggctggtcttggactcctgtactgaagcgatcctcccaccttgacctcccaaagtgctgggactataggtgtgagccactgtaccaggctatatatggtattaaaattttttaaatttccaattgtttattactagtatataaaaatacaattaatttttgaatattaatcaaaacaaaaagcaaaactgctacactcacttattaattctagtaactttttgtaagaccgttgagtattctacatagacaatcatgttgtctgtgaacaaaaacagtttgttttctttcctatctgggtgctttttgtttctgtttcttggcttattgcactggctagaacctccagtacaatgttgaatagaagtggagagaggacatccttgtcttgttcatgatcttaggaggaaagcattgtctttcatctttaagtacattagctgtgggtttttcttagatgtcctttaacagattgagctagttcttttctttctagtttgctgagaatttttatcaaaaatagatgttgggtctcgtcaagtgcttaccctgcatccattgagatgataatatggttttacttttttagtctgttaatatggtacattacattgatggcacgatatgttaaaccaacctttcattcctgaaaaaaactctagtcatttggtattattcttttgatatgttattagattaaatttattaaaattttgttaagaaaaaaaaaaaaaaaaaaaaaaaaaaaaaaaaaaaaaaaaaaaaaaaaaaaaaaaaa

SEQ ID NO: 115181 - DNA, 1000 bp, Homo Sapiens
tagaaaaatgctgttcagaaatatgaaaagtcattcagttatcactacagatctcccagtaatttttcttatttagcccataatctctttgaaggtttatactaattcagcaatcccccatcgttacccatttcttaccatgcatttctcgttctttactgggtctaaagggctatgcctccatttcagagagcttcaactacttctcttgcatacttctaaattatactatgagaaatcatgcctagttattcattgttaatataactgtcttagtacaccataaactgggtggattataaacaacagaaacttctcagttttggaggttgggaggtccaaggtcaaggcaccagcaaatttggtgtctggtgagggtcctcttcctcaaagggtgccttctagctgtgtcctcacatgactgaagggactagctatctctgtggggtctattttataagggcactaaccccattcatgagagcagagcccccatggcctaatcacctttccaaggccccaccttctatctaagacaatcacgctgggaataggtttcaacatatgaattgggggaggacacatttggaccacagcatgaacctttagaacagggtttctcagccttagcactacggacattttgggctggataaatatgtgttggtacagaatgggggtatcctgtgcattgtaggatctttagcagtaccctagcctcaactcactagatgccaatgacataccttgcttcttcaccagttatgataaccaagaatgtctccattgttaaatgtccccttaggagcaaaattgcccctggttgagaaacattgctttagacaaattgttaagagtatcatgtactacacttctgaaacttaacgtgatcatcaccactgacagatgattcacagagagagactgtttgaatcttgtctcactagtttttcctgtgcaaaaataaaatggacagaattgcaaaaaaaaaaaaaaaaaa

SEQ ID NO: 115182 - DNA, 1000 bp, Homo Sapiens
ttcatcgccaagaaggtggagcacaaccagcgcacgctggatcccaattccccacgggacttcatcgactcctttctcatccgcatgcaggaggaggagaagaaccccaacacagagttctacttgaagaacctggtgatgaccaccctgaacctcttctttgcgggcactgagaccgtgagcaccaccctgcgctacggtttcctgctgctcatgaagcacccagaggtggaggccaaggtccatgaggagattgacagagtgatcggcaagaaccggcagcccaagtttgaggaccgggccaagatgccctacacagaggcagtgatccacgagatccaaagatttggagacatgctccccatgggtttggcccacagggtcaacaaggacaccaagtttcgggatttcttcctccctaagggcactgaagtgttccctatgctgggctccgtgctgagagaccccaggttcttctccaacccccgggacttcaatccccagcacttcctggataagaaggggcagtttaagaagagtgatgcttttgtgcccttttccatcggaaagcggtactgttttggagaaggcctggccagaatggagctctttctcttcttcaccaccatcatgcagaactttcgcttcaagtcccctcagtcgcctaaggatatcgacgtgtcccccaaacacgtgggctttgccacgatcccacgaaactacaccatgagcttcctgccccgctgagcgagggctgtgctggtgcagggctggtgggcggggccagggaaacggccggggcaggggcggggcttgtgggaggggcggggctaagaatgggggcagtgggggaaggaaggggagaggtggttagagggaacagaagaaacagaaggggctcagttcaccttgatgatgtccttcagagctgtgatgagaggaagggaaaccttacagtatgctacaaagagtagtaataatagcagctcttatttcctga

SEQ ID NO: 115183 - DNA, 1000 bp, Homo Sapiens
atcctacttcaagtttccatgaagaaaacctcatctgcagcaccctggacctcttctttgccggaaccgagacaacttccacaactctgcgatgggctctgctttatatggccctctacccagaaatccaagaaaaagtacaagctgagattgacagagtgattggccaggggcagcagccgagcacagccgcccgggagtccatgccctacaccaatgctgtcatccatgaggtgcagagaatgggcaacatcatccccctgaacgttcccagggaagtgacagttgataccactttggctgggtaccacctgcccaagggtaccatgatcctgaccaatttgacggcgctgcacagggaccccacagagtgggccacccctgacacattcaatccggaccattttctggagaatggacagtttaagaaaagggaagcctttatgcctttctcaataggaaagcgggcatgcctcggagaacagttggccaggactgagctgtttattttcttcacttcccttatgcaaaaatttaccttcaggcccccaaacaatgagaagctgagcctgaagtttagaatgggtatcaccatttccccagtcagtcaccgcctctgcgctgttcctcaggtgtaatattgttaagaaagaaaggggcaaggaaagtaagaagacatggcacgtgttctgaaaccactggtgtctgctcagatgtgttgggacaaaatgaaagtgactttcaagaaagatcagaggaatttgactcagagaaaactagatccaaatcccagctctactgtctcgtccgaattagccttgggaaaatcatttatatgctaaataatttacctttttatctaggagatgaaaagaggataatgtttccttccataaagaaagttcttgtaagaatcaaaagaaatggtgagctttaagtggtttgtaaaccataaaacacatcataaaagttctatctataaaaaaaaaaaaaaaaaaaa

SEQ ID NO: 115184 - DNA, 1000 bp, Homo Sapiens
tgctcctcactgcccgcacaccctcactctgccagggcagtgctagtgagctgggcatggtaccagccctggggctgggccccccagctcaggggcagctcatagagtcccccctcccacctccagtccccctatccttggcaccaaagatgcagccgccttccttgaccttcctctggggctctagggttgctggagcctgagtcagggcccagaggctgagttttctctttgtggggcttggcgtggagcaggcggtggggagagatggacagttcacaccctgcaaggcccacaggaggcaagcaagctctcttgccgaggagccaggcaacttcagtcctgggagacccatgtaaataccagactgcaggttggaccccagagattcccaagccaaaaaccttagctccctcccgcaccccgatgtggacctctactttccaggctagtccggacccacctcaccccgttacagctccccaagtggtttccacatgctctgagaagaggagccctcatcttgaagggcccaggagggtctatggggagaggaactccttggcctagcccaccctgctgccttctgacggccctgcaatgtatcccttctcacagcacatgctggccagcctggggcctggcagggaggtcaggccctggaactctatctgggcctgggctaggggacatcagaggttctttgagggactgcctctgccacactctgacgcaaaaccactttccttttctattccttctggcctttcctctctcctgtttcccttcccttccactgcctctgccttagaggagcccacggctaagaggctgctgaaaaccatctggcctggcctggccctgccctgaggaaggaggggaagctgcagcttgggagagcccctggggcctagactctgtaacatcactatccatgcaccaaactaataaaactttgacgagtcaccttccaggacccctgggtaaaaaaaaaaaaaaa

SEQ ID NO: 115185 - DNA, 1000 bp, Homo Sapiens
gcctccatcttcaacctgtgcgccatcagcgtggacaggttcgtggccgtggccgtgccgctgcgctacaaccggcagggtgggagccgccggcagctgctgctcatcggcgccacgtggctgctgtccgcggcggtggcggcgcccgtactgtgcggcctcaacgacgtgcgcggccgcgaccccgccgtgtgccgcctggaggaccgcgactacgtggtctactcgtccgtgtgctccttcttcctaccctgcccgctcatgctgctgctctactgggccacgttccgcggcctgcagcgctgggaggtggcacgtcgcgccaagctgcacggccgcgcgccccgccgacccagcggccctggcccgccttcccccacgccacccgcgccccgcctcccccaggacccctgcggccccgactgtgcgccccccgcgcccggccttccccggggtccctgcggccccgactgtgcgcccgccgcgcccagcctcccccaggacccctgtggccccgactgtgcgccccccgcgcccggcctccccccggacccctgcggctccaactgtgctccccccgacgccgtcagagccgccgcgctcccaccccagactccaccgcagacccgcaggaggcggcgtgccaagatcaccggccgggagcgcaaggccatgagggtcctgccggtggtggtcggggccttcctgctgtgctggacgcccttcttcgtggtgcacatcacgcaggcgctgtgtcctgcctgctccgtgcccccgcggctggtcagcgccgtcacctggctgggctacgtcaacagcgccctcaaccccgtcatctacactgtcttcaacgccgagttccgcaacgtcttccgcaaggccctgcgtgcctgctgctgagccgggcacccccggacgccccccggcctgatggccaggcctcagggaccaaggagatggggagggcgcttttgtacgttaattaaacaaattccttccc

SEQ ID NO: 115186 - DNA, 1000 bp, Homo Sapiens
aggttcagctccgcctgcagggacagaaagacatggtctggaaatggatgccacttctgctgcttctggtctgtgtagccaccatgtgcagtgcccaggacaggactgatctcctcaatgtctgtatggatgccaagcaccacaagacaaagccaggtcctgaggacaagctgcatgaccaatgcagtccctggaagaagaatgcctgctgcacagccagcaccagccaggagctgcacaaggacacctcccgcctgtacaactttaactgggaccactgcggcaagatggagcccgcctgcaagcgccacttcatccaggacacctgtctctatgagtgctcacccaacctggggccctggatccagcaggtgaatcagacgtggcgaaaagaacgcttcctggatgtgcccttatgcaaagaggactgtcagcgctggtgggaggattgtcacacctcccacacgtgcaagagcaactggcacagaggatgggactggacctcaggagttaacaagtgcccagctggggctctctgccgcacctttgagtcctacttccccactccagctgccctttgtgaaggcctctggagtcactcatacaaggtcagcaactacagccgagggagcggccgctgcatccagatgtggtttgattcagcccagggcaaccccaacgaggaagtggcgaggttctatgctgcagccatgcatgtgaatgctggtgagatgcttcatgggactgggggtctcctgctcagtctggccctgatgctgcaactctggctccttggctgagttcagtcctcccagactacctgccctcagcttggataaccaggctgggctcagctcagctcccacaaatgacagccccttaagcatgcttctattagtcacctaaccctctgtcacccagtctgttgctgctccatggtggggccaagagtcacttctaataaacagactgttttctaataaaaaaaaaaaaaaaaaaa

SEQ ID NO: 115187 - DNA, 1000 bp, Homo Sapiens
cggcatgtttcccgctccaagagaattcactttaccttcagcagttaccgaggagctaaacatgctgccaaccagcttgtccaacaactccaggaaaactgtttttcaaaacgccatgtcctaggggccaagggaaatgctgttggtgagaatcgacctcactgtcagcgtttctccacctgaagtgatgatggatgagaaaaaacaccaccaaatgacaagtcacaccctccccattagtatcctgttaggggaaaatagtagcagagtcattgttacaggtgtactatggctgtatttttagagattaatttgtgtagattgtgtaaattcctgttgtctgaccttggtggtgggagggggagactatgtgtcatgatttcaatgattgtttaattgtaggtcaatgaaatatttgcttatttatattcagagatgtaccatgttaaagaggcgtcttgtattttcttcccatttgtaatgtatcttatttatatatgaagtaagttctgaaaactgtttatggtattttcgtgcatttgtgagccaaagagaaaagattaaaattagtgagatttgtatttatattagagtgcccttaaaataatgatttaagcattttactgtctgtaagagaattctaagattgtacataaagtcatatatatggaaatcctgttacttaaatagcatctgctcttctcttacgctctctgtctggctgtacgtctggtgttctcaatgcttttctagcaactgttggataataactagatctcctgtaattttgtagtagttgatgaccaatctctgtgactcgcttagctgaaacctaaggcaacatttccgaagaccttctgaagatctcagataaagtgaccaggctcacaactgtttttgaagaagggaaattcacactgtgcgttttagagtatgcaagaagaatataaataaataaaaatattctccatggagaatttgaacaaaaaaaaaaaaaaaa

SEQ ID NO: 115188 - DNA, 1000 bp, Homo Sapiens
ccttgtggtatcaaaggagcagacagagcagattctgagggatatccagcagcacaaggaagaagcctgggtgattggcagtgtggttgcacgagctgaaggttccccacgtgtgaaagtcaagaatctgattgaaagcatgcaaataaatgggtcagtgttgaagaatggctccctgacaaatcatttctcttttgaaaaaaaaaaggccagagtggctgtcttaatatctggaacaggatcgaacctgcaagcacttatagacagtactcgggaaccaaatagctctgcacaaattgatattgttatctccaacaaagccgcagtagctgggttagataaagcggaaagagctggtattcccactagagtaattaatcataaactgtataaaaatcgtgtagaatttgacagtgcaattgacctagtccttgaagagttctccatagacatagtctgtcttgcaggattcatgagaattctttctggcccctttgtccaaaagtggaatggaaaaatgctcaatatccacccatccttgctcccttcttttaagggttcaaatgcccatgagcaagccctggaaaccggagtcacagttactgggtgcactgtacactttgtagctgaagatgtggatgctggacagattattttgcaagaagctgttcccgtgaagaggggtgatactgtcgcaactctttctgaaagagtaaaattagcagaacataaaatatttcctgcagcccttcagctggtggccagtggaactgtacagcttggagaaaatggcaagatctgttgggttaaagaggaatgaagccttttaattcagaaatggggccagtttagaaagaattatttgctgtttgcatggtggttttttatcatggacttggcccaaaagaaaaactgctaaaagacaaaaaagacctcacccttacttcatctatttttttaataaatagagactcactaaaaaaaaaaaaaaaaaaaaaaa

SEQ ID NO: 115189 - DNA, 1000 bp, Homo Sapiens
ctcctttcacagagcagagtctgaatagtcttcagagataggcctgtgggccagattgccatcccctatggaccagaagccaaggatctctctagtgatggtcagagggcccaaatggcagggatacccagtgatgtcaggaggaatagtacagacagaaggtgctaagcagacaattcaactgccatgttttgccaccccctgtgagcagggattaggtgttcaggccagtatcttgggcatgggggagcctttggccagaagaggtataaagctcagaagtttttcagtctgataactattgatataatttccatagtgtgagggagcggtatgctctacccttgtgtatttaaggcaggacagagaaattgaggatgcccctggggctagatcgatgatatgaccagaaatcaaaaagggaatgcattatttattgctgtgtaacactgttaagagaggaggtagttaagggatggataggcacatagagagggaaggtctcaggagaagggatagaaaggaactatgttcacaagaacaacggcaagacagtgcctatactgcctctacagttaataggaaaaacggaagaagttacccttaagctaggatgttgctcagaagtgaccatcccaactttggtgcgggcacaataaatcagcctaaatgtccctaatttaacccagctcattataatgtcattaaacatgacattagcattgtggttttagcacccccatgggttttgcttaggcactcatgggtaataaccaagatggagtccctttggcaaaacttaggcatgcacagctgtagtaccccaagaagaaaatgttacttctctcatctgggcaaaacccacagaagacttcccagcttctgccacataaaagacacagaacacagacgccttactggcaacctgctttcaagacccctgtctttgctgagagctttcctttttcccaataaattctactctgccctactcactctc

SEQ ID NO: 115190 - DNA, 1000 bp, Homo Sapiens
acatgtctttcagcattaggcttttaagaaacacagggttttgtattctttactaaagatatcagagctcttaatgttgcttagatgagggtgactgtcaagtacaagcaagactgggaccttagaaatcattgtagaaacacagttttgaaagatttttaccatgtctctaagccaactttaattgcttaaaagacatttttatttagttgaaaaatctagttttttttgtaaactgtaccaaatctgtatatgttgtaataaaacttatgctagtttattggaagtgttcaagaaataaaaatcaacttgtgtactgataaaatactctagcctgggccagagaagataatgttctttaatgttgtcaggaaaccctggcttgcttgccgagcctaatgaaagggaaagtcagctttcagagccagtgaaggagccacgtgaatggccctagaactgtgcctagttcctgtggccaggaggttggtgactgaaacattcacacagggctcttggatggacccacgaacgctcttagctttctcagggggtcagcagagttattgaatcttaattttttttaatgtacaagttttgtataaataataaagaactccttattttgtattacatctaatgcttaagtgttgctcttggaaagctgatgatgtctcttgtagagatgactctgaaaaacattccaggaaaccatggcagcatggagagcctcttagtgattgtgtctgcattgttattgtggaagatttaccttttctgttgtacgtaaagcttaaattacttttgttgtgactttttagccagtgactttttctgagcttttcatggaagtggcagtgaaaaatatgttgagtgttcaaaaaagtgactgtaattaatatcttgctggattaatgttttgtacaattactaaattgtatacattttgttatagaatacttttttctagtttcagtaaataatgaaaaggaagttaatacca

SEQ ID NO: 115191 - DNA, 1000 bp, Homo Sapiens
actgcccgacagacactcaggacacaaggccgagaacggccccggccctggggtgctggtcctccgcgccagcttcgacgagagacagccttacgcccacatgaacgggggccgcaagaacgagcgggccttgccgctgccccagtcttcgacctgctgatccttggatcctgaatctgtgcaaacagtaacgtgtgcgcacgcgcagcggggtggggggggagagagagttttaacaatccattcacaagcctcctgtacctcagtggatcttcagttctgcccttgctgcccgcgggagacagcttctctgcagtaaaacacatttgggatgttccttttttcaatatgcaagcagctttttattccctgcccaaacccttaactgacatgggcctttaagaaccttaatgacaacacttaatagcaacagagcacttgagaaccagtctcctcactctgtccctgtccttccctgttctccctttctctctcctctctgcttcataacggaaaaataattgccacaagtccagctgggaagccctttttatcagtttgaggaagtggctgtccctgtggccccatccaaccactgtacacacccgcctgacaccgtgggtcattacaaaaaaacacgtggagatggaaatttttacctttatctttcacctttctagggacatgaaatttacaaagggccatcgttcatccaaggctgttaccattttaacgctgcctaattttgccaaaatcctgaactttctccctcatcggcccggcgctgattcctcgtgtccggaggcatgggtgagcatggcagctggttgctccatttgagagacacgctggcgacacactccgtccatccgactgcccctgctgtgctgctcaaggccacaggcacacaggtctcattgcttctgactagattattatttgggggaactggacacaataggtctttctctcagtgaaggtggggagaagctgaaccggc

SEQ ID NO: 115192 - DNA, 1000 bp, Homo Sapiens
taccagtttgtccatcttgagatggtgaggctgtcagtgtatggggcagcttccggcgggatgttgaactggtcattaatgtgtcccctgagttggagctcattctgtctcttttctcttttgctttctgtttcttaagggcacacacacgtgcgtgcgagcacacacacacatacgtgcacagggtccccgagtgcctaggttttggagagtttgcctgttctatgcctttagtcaggaatggctgcacctttttgcatgatatcttcaagcctgggcgtacagagcacatttgtcagtatttttgccggctggtgaattcaaacaacctgcccaaagattgatttgtgtgtttgtgtgtgtgtgtgtgtgtgtgtgtgtgtgtgagtggagttgaggtgtcagagaaaatgaattttttccagatttggggtataggtctcatctcttcaggttctcatgataccacctttactgtgcttatttttttaagaaaaaagtgttgatcaaccattcgacctataagaagccttaatttgcacagtgtgtgacttacagaaactgcatgaaaaatcatgggccagagcctcggccctagcattgcacttggcctcatgctggagggaggctgggcgggtacagcgcggaggaggagggaggccaggcgggcatggcgtggaggaggagggaggccgggcggtcacagcatggaggaggagggaggcgctgctggtgttcttattctggcggcagcgcctttcctgccatgtttagtgaatgacttttctcgcattgtagaattgtatatagactctggtgttctattgctgagaagcaaaccgccctgcagcatccctcagcctgtaccggtttggctggcttgtttgatttcaacatgagtgtattttttaaaattgatttttctcttcatttttttttcaatcaactttactgtaatataaagtattcaacaatttcaataaaagataaattattaaaa

SEQ ID NO: 115193 - DNA, 1000 bp, Homo Sapiens
aaagttgcccattgtaaatgaagatgatgagcttgtggccatcattgcccggacagacctgaagaagaatcgggactacccactagcctccaaagatgccaagaaacagctgctgtgtggggcagccattggcactcatgaggatgacaagtataggctggacttgctcgcccaggctggtgtggatgtagtggttttggactcttcccagggaaattccatcttccagatcaatatgatcaagtacatcaaagacaaataccctaatctccaagtcattggaggcaatgtggtcactgctgcccaggccaagaacctcattgatgcaggtgtggatgccctgcgggtgggcatgggaagtggctccatctgcattacgcaggaagtgctggcctgtgggcggccccaagcaacagcagtgtacaaggtgtcagagtatgcacggcgctttggtgttccggtcattgctgatggaggaatccaaaatgtgggtcatattgcgaaagccttggcccttggggcctccacagtcatgatgggctctctcctggctgccaccactgaggcccctggtgaatacttcttttccgatgggatccggctaaagaaatatcgcggtatgggttctctcgatgccatggacaagcacctcagcagccagaacagatatttcagtgaagctgacaaaatcaaagtggcccagggagtgtctggtgctgtgcaggacaaagggtcaatccacaaatttgtcccttacctgattgctggcatccaacactcatgccaggacattggtgccaagagcttgacccaagtccgagccatgatgtactctggggagcttaagtttgagaagagaacgtcctcagcccaggtggaaggtggcgtccatagcctccattcgtatgagaagcggcttttctgaaaagggatccagcacacctcctcggtttttttttcaataaaagtttagaaagaaaaaaaaaaaaaaaaaaaaaaa

SEQ ID NO: 115194 - DNA, 1000 bp, Homo Sapiens
ggatgggcctgcttcctgtctttgggagaaaacgtcttgcttgggaaggggcctttgtcttgtcaaggttccaactggaaacccttaggacagggtccctgctgtgttccccaaaggacttgacttgcaatttctacctagaaatacatggacaatacccccaggcctcagtctcccttctcccatgaggcacgaatgatctttctttcctttctttttttttttttttcttttcttttttttttttttgagacggagtctcgctctgtcacccaggctggagtgcaatggcgtgatctcggctcactgcaacctccgcctcccgggttcaagtaattctgctgtctcagcctcctgagtagctgggactacaggcacacgccacctcgcccggcccgatctttctaaaatacagttctgaatatgctgctcatccccacctgtcttcaacagctccccattaccctcaggacaatgtctgaactctccagcttcgcgtgagaagtccccttccatcccagagggtgggcttcagggcgcacagcatgagaggctctgtgcccccatcaccctcgtttccagtgaattagtgtcatgtcagcatcagctcagggcttcatcgtggggctctcagttccgatttcccaggctgaattgggagtgagatgcctgcatgctgggttctgcacagctggcctcccgcgttgggcaacattgctggctggaagggaggagcgccctctagggagggacatggccccggtgcggctgcagctcacccagccccaggggcagaagagacccaaccacttctattttttgaggctatgaatatagtacctgaaaaaatgccaagacatgattatttttttaaaaagcgtactttaaatgtttgtgttaataaattaaaacatgcacaaaaagatgcatctaccgctcttgggaaatatgtcaaaggtctaaaaataaaaaagccttctgtgaaaaaaaaaaaaaaaaa

SEQ ID NO: 115195 - DNA, 1000 bp, Homo Sapiens
tccaggggctgacacctagagagaaccatcaccttgtccctcattccttccaccctgaggcttgctgtggactcagagaggagacttacctgatgagagctcaaacctctagtctgggatgagctcacagagccctcatgagttaagatccatccatatcacataggcaattccttttaaatcagataccaacgacccattactgagaggtacagagcgtacagcccttggtgttctctgctgttatctgccaaatgtgtgtgtttttcctctgctgtgttctgtgtgtccagtgtagcctattggagaatcggtctcattagagtgactcttagaaggtggcctgggactagacagcccctctgagcacatgcatagtggcatcagcagcttcctggcctactcccaatcacactgtgccctgcacctcccaccaagggggaaccccagcagctggggcttttcgagtgctttttggcccaagaatctcagagtgcttctaatcatcacagtagtttttgtgttttgttttgttttgttttgttttgttttgttttgttttgtttttttcacaatctcagccagcctgcggtgtgacctggggagaaagttgagtgtcaggggacatgatgagccagttggccctgaaacaggaatggggcaaagagaaaggagagccaggagcatttaaaaatcagcatctgggccaggcaagatggctcacgcctgtgatcccagcattttgggaggccgaggcgggtggatcatgaggtcaggagatcgagaccatcctggctaacacggtgaaaccccgtctctactgaaaatacaaaaaattagccaggcatggtggcaggtgcctgtagtcccagctactcgggaagctgaggcagaagaatggcatgaacctgggaggtggaggttgcagtgagccaagatcatgccactgcactccagcctgggcgacagagcgagactccatctcaaaaaaaaaaaaaac

SEQ ID NO: 115196 - DNA, 771 bp, Homo Sapiens
tcttcctctcctgggccgtcctctgagcagcagacggggctaagcgttccccagctcgccttcacacacagcccgtgccaccacaccgacggtaccatgaaggacgaggtagctctactggctgctgtcaccctcctgggagtcctgctgcaagcctacttctccctgcaggtgatctcggcgcgcagggccttccgcgtgtcgccgccgctcaccaccggcccacccgagttcgagcgcgtctaccgagcccagtgaggcgcggcgggagggcgcggggcggggagcgagccccaggcgggtccgggtcgcaggaccatcccggccggcgcgctcatcccacccgcccaccgcagggtgaactgcagcgagtacttcccgctgttcctcgccacgctctgggtcgccggcatcttctttcatgaaggggcggcggccctgtgcggcctggtctacctgttcgcgcgcctccgctacttccagggctacgcgcgctccgcgcagctcaggctggcaccgctgtacgcgagcgcgcgcgccctctggctgctggtggcgctggctgcgctcggcctgctcgcccacttcctcccggccgcgctgcgcgccgcgctcctcggacggctccggacgctgctgccgtgggcctgagaccaaggcccccgggccgacggagccgggaaagaagagccggagcctccagctgccccggggaggggcgctcgcttccgcatcctagtctctatcattaaagttctagtgaccgagaaa

SEQ ID NO: 115197 - DNA, 1000 bp, Homo Sapiens
caccaccacctttttggagagacatttgccctccgtgccaggcctgctcaggctgattggattgaccaccatcttttcagcaacggctcttggcttcctggcccacaaaagggggctacttgtgagagtctaaagagagagggtgtctgtaatcacactctcttcttactgtatttgggatatgagtttggggaaagagttgcagtaaagttccatgaagacaaatagtgtggagtgaggcggggagcatgaagataaatccaactctgactgtaaaatacatggtatctctttctccgttgtggcccctgcttagtgtcccttacctggcttagcgttctgtttcaccagtttccaagtttattgccctcaaaatctttagaatagttaaattggcttgtttaaggttcttgctgccccacaacacaccttgcccatgcacaaggaatgaattttttcctaccattatggctttgtgcttgttcttcctcttacctgtaatagcctcaccttccctagttctttgcattcgtccttagaatactgtattgttacagctgaaagacagtaaagaccatttagtcctcaccttctgttttagagttgagcaaactgaagcccacagaggtggaacttaattacctaagagccacaataagccactggtatctgggggactagaacacaaatccaacgcttttcccacctctttggatgttttccccaattatcctccttcactccctgtcatagttaccgatggtgtcccgttgtgtgggtttactctgtgctaagttgtcttacacttctcaaatgctactcagtatatagccttaagtcttactgttttgtgcggtgtgtctccagctgattttaacttttttgatggtagaaattttatctcttcttccttttgtatcctccattgtatcttcatacaaaggacagtacacacttgggtaattaaaaataaaagttgattgaccataaaaaaaaaaaa

SEQ ID NO: 115198 - DNA, 1000 bp, Homo Sapiens
aataagttttatacataaacagttttggagaaaaattacagatcatataagcaagacagtggcactaaaatgtttaattcattaatctgtttgtttggcactgatgcaatgtatggcttttctcttgccccaaatcacaaacatatgtatctttggggaaactaacaatatgattgcactaaataaactactttgaatagaggccaaattaatcttttaaaaatgatgataatcatcaggtttactcagtgaaatcatattaattattttccaaaatctaaaagctgtagctggagaagcccatggccacgaggaagcagcaattaattagatcaacacttttctccagggttcaccatgcaggcaacattaccttgtctttcaaaagacacctgccttagtgcaaggggaaacctgtgaaagctgcactcagagggaggagtctttcttacataatttgcaatttcaggaatttaatttataggcagatctttaaatacagtcaacttacggtgcacagtaatatgaaagccacactttgaaggtaataaatacacagcatgcagactgggagttgctagcaaacaaatggcttacttacaaaagcagcttttagttcagacttagtttttataaaatgagaattctgacttacttaaccaggtttgggatggagatggtctgcatcagctttttgtattaacaaagttactggctctttgtgtgtctccaggtaactttgcttgattaaacagcaaagccatattctaaattcactgttgaatgcctgtcccagtccaaattgtctgtctgctcttatttttgtaccatattgctcttaaaaatcttggtttggtacagttcataattcaccaaaaagttcatataatttaaagaaacactaaattagtttaaaatgaagcaatttatatctttatgcaaaaacatatgtctgtctttgcaaaggactgtaagcagattacaataaatcctttacttt

SEQ ID NO: 115199 - DNA, 976 bp, Homo Sapiens
cccggaacctggcgcaactcctagagcggtccttggggagacgcgggtcccagtcctgcggctcctactggggagtgcgctggtcggaagattgctggactcgctgaagagagactacgcaggaaagccccagccacccatcaaatcagagagaaggaatccaccttcttacgctatggcaggtaagaaagtactcattgtctatgcacaccaggaacccaagtctttcaacggatccttgaagaatgtggctgtagatgaactgagcaggcagggctgcaccgtcacagtgtctgatttgtatgccatgaactttgagccgagggccacagacaaagatatcactggtactctttctaatcctgaggttttcaattatggagtggaaacccacgaagcctacaagcaaaggtctctggctagcgacatcactgatgagcagaaaaaggttcgggaggctgacctagtgatatttcagttcccgctgtactggttcagcgtgccggccatcctgaagggctggatggatagggtgctgtgccagggctttgcctttgacatcccaggattctacgattccggtttgctccagggtaaactagcgctcctttccgtaaccacgggaggcacggccgagatgtacacgaagacaggagtcaatggagattctcgatacttcctgtggccactccagcatggcacattacacttctgtggatttaaagtccttgcccctcagatcagctttgctcctgaaattgcatccgaagaagaaagaaaggggatggtggctgcgtggtcccagaggctgcagaccatctggaaggaagagcccatcccctgcacagcccactggcacttcgggcaataactctgtggcacgtgggcatcacgtaagcagcacactaggaggcccaggcgcaggcaaagagaagatggtgctgtcatgaaataaaattacaacatagctacctgg

SEQ ID NO: 115200 - DNA, 1000 bp, Homo Sapiens
agaagaatcggcagtgacaggaattgtcgtgggggctttactaggagctggcttgctaatggccttctactttttcaggaagaaatacagaataaccattgagaggcgaacccagcaagaagaaagtaaccttggaaaacatcgggaattacgggaagattccatcagatcccatttttcagtagcttaaaggaagccccccactttttttttttctgcctgagattctttaaggagatagacgggttgaaagacatcaatgaaacagaaggggcgttcttgaagaattcataattttaagcagttagtaatttcattttaaaatttctgtagaagctcaggaattatgattaatcaccatctgcctccaggcctttcatctcatgacaaacaaatataataatgatatcgtgtcactctgttaaatgttcatactgtttcaagcccatatgattagatttatgtttttaaaatctgttgtctccatatcttgatggcttttgggagcatttcacacaaggatataaaatgcggttttcttaaatgaaatgttttgtagctagaataaaatcatttttacaagtacagcattcttggaaagaatttaacacccaaaaaggggaaaatgtaatgaaaaatctcaaggttggaaatacagccttactctctctagagctggaggacaggtttgtggttgaggacttctctgtccgatgtctacattcaggttctgacttcatatcttgaaaaaggatttcctccctgtctttttcagtgtctcataaacgctactctggattgttgtaaatattagtgagatgggaggatttacagaagaaaagcaagtcaaaaatatttcctttttgatgtaaaaaaaaaaagccctatttcgcactaacattttattttacaagtattttaatcttatattttggtattagaaaaatttgtctattttttcattttgaagattaaatgttgcttacattttaaaaaaaaa

SEQ ID NO: 115201 - DNA, 1000 bp, Homo Sapiens
ttttaagaaattcctggagagcggtggccaggatggggcaggggatgatgacgatctcgaggacctggaagaagcagaggagccagacatggaggaagacgatgatcagaaagctgtgaaagatgaactgtaatacgcaaagccagacccgggcgctgccgagacccctcgggggctgcacacccagcagcagcgcacgcctccgaagcctgcggcctcgcttgaaggagggcgtcgccggaaacccagggaacctctctgaagtgacacctcacccctacacaccgtccgttcacccccgtctcttccttctgcttttcggtttttggaaagggatccatctccaggcagcccaccctggtggggcttgtttcctgaaaccatgatgtactttttcatacatgagtctgtccagagtgcttgctaccgtgttcggagtctcgctgcctccctcccgcgggaggtttctcctctttttgaaaattccgtctgtgggatttttagacatttttcgacatcagggtatttgttccaccttggccaggcctcctcggagaagcttgtcccccgtgtgggagggacggagccggactggacatggtcactcagtaccgcctgcagtgtcgccatgactgatcatggctcttgcatttttgggtaaatggagacttccggatcctgtcagggtgtcccccatgcctggaagaggagctggtggctgccagccctggggcccggcacaggcctgggccttccccttccctcaagccagggctcctcctcctgtcgtgggctcattgtgaccactggcctctctacagcacggcctgtggcctgttcaaggcagaaccacgacccttgactcccgggtggggaggtggccaaggatgctggagctgaatcagacgctgacagttcttcaggcatttctatttcacaatcgaattgaacacattggccaaataaagttgaaattttaccaccaaaaaaaaaaaaaaaa

SEQ ID NO: 115202 - DNA, 1000 bp, Homo Sapiens
gagtgcctgttgttctcattacaacccttctggttattccggtggttgtcctgctggccattgccatatttattcggtggaaaaaatcaagggcctttggagcagattctgaacacaaactcgagacgagttcaggaagagtactgggaagatttagaggaaagggaagtggaggcttaaaccttggtaatttctttgcaagccgtaagggctacagtcgaaaagggtttgaccggcttagcactgagggcagtgaccaagagaaagaggatgatggaagtgaatcagaagaggagtattcagcacctctgcctgcgctcgcaccttcctcctcctgaaaaccaagctttgatttagattgagtaagatttacccagaatgtcagattcctttccctttagcacgtttaaagttctgtgtatttaattgtaaactgtactagtctgtgtgggactgtacacactttatttacttcgttttggttaagttggcttctgtttctagttgaggagtttcctaaaagttcataacagtgccattgtctttatatgaacatagactagagaaaccgtcctctttttccatcataattctaatctaacaatggaagatttgcccatttacacttttgagactttttggtggatgtaaataaccccattctttgcttgaacacagtattttcccaatagcactttcattgccagtgtctttctttggtgcctttcctgttcagcattcttagcctgtggcagtaaagagaaactttgtgctacatgacgacaaagctgctaaatctcctatttttttaaaatcactaacattatattgcaatgaaggaaataaaaaagtctctatttaaattcttttttaaattttcttcagttggtgtgtttttgggatgtcttatttttagatggttacactgttagaacactattttcagaatctgaatgtaatttgtgtaataaagtgttttcagagcaaaaaaaaaaaaaaa

SEQ ID NO: 115203 - DNA, 1000 bp, Homo Sapiens
taacagaacagtcaccgacaacatgctgtgtgctggagacactcggagcggcgggccccaggcaaacttgcacgacgcctgccagggcgattcgggaggccccctggtgtgtctgaacgatggccgcatgactttggtgggcatcatcagctggggcctgggctgtggacagaaggatgtcccgggtgtgtacaccaaggttaccaactacctagactggattcgtgacaacatgcgaccgtgaccaggaacacccgactcctcaaaagcaaatgagatcccgcctcttcttcttcagaagacactgcaaaggcgcagtgcttctctacagacttctccagacccaccacaccgcagaagcgggacgagaccctacaggagagggaagagtgcattttcccagatacttcccattttggaagttttcaggacttggtctgatttcaggatactctgtcagatgggaagacatgaatgcacactagcctctccaggaatgcctcctccctgggcagaaagtggccatgccaccctgttttcagctaaagcccaacctcctgacctgtcaccgtgagcagctttggaaacaggaccacaaaaatgaaagcatgtctcaatagtaaaagataacaagatctttcaggaaagacggattgcattagaaatagacagtatatttatagtcacaagagcccagcagggcctcaaagttggggcaggctggctggcccgtcatgttcctcaaaagcacccttgacgtcaagtctccttcccctttccccactccctggctctcagaaggtattccttttgtgtacagtgtgtaaagtgtaaatcctttttctttataaactttagagtagcatgagagaattgtatcatttgaacaactaggcttcagcatatttatagcaatccatgttagtttttactttctgttgccacaaccctgttttatactgtacttaataaattcagatatatttttcacagtttttcc

SEQ ID NO: 115204 - DNA, 1000 bp, Homo Sapiens
tacagcccaacctctccaagctactctccaacatcacccagctattccccgacctcaccaagttactccccttccagcccacgatacacaccacagtctccaacctataccccaagctcacccagctacagccccagttcgcccagctacagcccaacctcacccaagtacaccccaaccagtccttcttatagtcccagctccccagagtataccccaacctctcccaagtactcacctaccagtcccaaatattcacccacctctcccaagtactcgcctaccagtcccacctattcacccaccaccccaaaatactccccaacatctcctacttattccccaacctctccagtctacaccccaacctctcccaagtactcacctactagccccacttactcgcccacttcccccaagtactcgcccaccagccccacctactcgcccacctcccccaaaggctcaacctactctcccacttcccctggttactcgcccaccagccccacctacagtctcacaagcccggctatcagcccggatgacagtgacgaggagaactgagggcacgtggggtgcggcagcgggctagggcccagggcagcttgcccgtgctgccgtgcagttcttgcctccctcacggggcgtcacccccagcccagctccgttgtacataaataccttgtgacagagctcccggtgaacttctggatcccgtttctgatgcagattcttgtcttgttctccacttgtgctgttagaactcactggcccagtggtgttctacctcctaccccacccaccccctgcctgtccccaaattgaagatccttccttgcctgtggcttgatgcggggcgggtaaagggtattttaacttaggggtagttcctgctgtgagtggttacagctgatcctcgggaagaacaaagctaaagctgccttttgtctgttattttatttttttgaagtttaaataaagtttactaattttgacc

SEQ ID NO: 115205 - DNA, 1000 bp, Homo Sapiens
gttgtggagtacgagaccaaggccggccgcatcaacaagggcgtggccaccaactggctgcgggccaaggagcctgtcggggagaacggcggccgtgcgctggtgcccatgttcgtgcgcaagtcccagttccgcctgcccttcaaggccaccacgcctgtcatcatggtgggccccggcaccggggtggcacccttcataggcttcatccaggagcgggcctggctgcgacagcagggcaaggaggtgggggagacgctgctgtactacggctgccgccgctcggatgaggactacctgtaccgggaggagctggcgcagttccacagggacggtgcgctcacccagctcaacgtggccttctcccgggagcagtcccacaaggtctacgtccagcacctgctaaagcaagaccgagagcacctgtggaagttgatcgaaggcggtgcccacatctacgtctgtggggatgcacggaacatggccagggatgtgcagaacaccttctacgacatcgtggctgagctcggggccatggagcacgcgcaggcggtggactacatcaagaaactgatgaccaagggccgctactccctggacgtgtggagctaggggcctgcctgccccacccaccccacagactccggcctgtaatcagctctcctggctccctcccgtagtctcctgggtgtgtttggcttggccttggcatgggcgcaggcccagtgacaaagactcctctgggcctggggtgcatcctcctcagcccccaggccaggtgaggtccaccggcccctggcagcacagcccagggcctgcatgggggcaccgggctccatgcctctggaggcctctggccctcggtggctgcacagaagggctctttctctctgctgagctgggcccagcccctccacatgatttccagtgagtgtaaataattttaaataacctctggcccttggaataaagttctgttttctgtaaaaaaaaaaaaaaa

SEQ ID NO: 115206 - DNA, 1000 bp, Homo Sapiens
tggcaatcaaagcatgcacttgtaacaatgaaaaagaaaaagcattttatattactactcaataaaatgtgcatgaacttacagaattctcatccttccactgagtccgctgaagggatttatgtgcacaaccaccatgtgtcttctaggtgctggcccaccaccacacatcacaggctgatttccacaggcttcttcctaggggcctcgtgatctgaggggtggtgcctacttccactgtaagaaagaatcttggtggatttgtgtctcaaatcagataagagaagcctgtttaaagagcagatgccatcttctggcttcctcaaggagccagttaaaaaaccagagcattcctttttattgaaaaataaaattaatttgttatcaggttgtttcagttgtattggatgccctatctatctgctaaagcaaaaagtactaggctactaagtgcattttcatcacagaaaagagttgcatttgtattaacaagaaatttgtatacccacgcttcagctactatctaatcatcacccgaagatttaagatacaccaaatttcagtttgtttgtaacattgttcatctttagtgcactttgttttatataataaagtatgcctgttatattaaataataagaatatggcaattagcgatatagcatacccaaacaaagatgttctcgatacagtctggcaaagactatcccaaggttattttaatgaattcagacattttttcctgtggatatttctccatcctaaaaaaagtggcaaccaaggaaaatatttagatgcaacttactagagtgatgatgtgaaagaaatggtgattctggtatcatggtgtttattttctttcttataactgcagagaaaatatcctgactaaaaaaatttcatttttttggattcctttcttttacaaattgtgctgaggcaactatggcatagaaataaacatttgacattaaaataagtaaaaaaaaaaaaaaaaaaaa

SEQ ID NO: 115207 - DNA, 1000 bp, Homo Sapiens
gatggtgtgcacggtcttggcggtgttcatcatctgcttcgtgccccaccacgtggtgcagctgccctggacccttgctgagctgggcttccaggacagcaaattccaccaggccattaatgatgcacatcaggtcaccctctgcctccttagcaccaactgtgtcttagaccctgttatctactgtttcctcaccaagaagttccgcaagcacctcaccgaaaagttctacagcatgcgcagtagccggaaatgctcccgggccaccacggatacggtcactgaagtggttgtgccattcaaccagatccctggcaattccctcaaaaattagtccctgcttccaggcctgaagtcttctcctccatgaacatcatggactgagctgggggaagaagggatatctactgtggtctgggcaccacctctgtgggcactggtgggccattagatttggaggctacctcacctgggcagggatgatggcagagccaggctgttggaaaatccagaactcaaatgagccccttcatccgcctgtgggcgcatactacagtaactgtgactgatgactttatcctgagtcccttaatcttatggggccggaaggaatgtcagggccaggtgcagaccttgggggaagactttaaaccacctagttctccccgatggggcatcggtctaaagctttgggggagtgggcgcagtggctcacacctgtaatcccagcactttgggaggccgaggtgggcagatcatgggtcaagagatcgagaccatcctggccaacattgtaaaaccccatctctactaaaacatacaaaaattagccgggcatggtggcacacgcctgtagtcccagctactcaggaggctgaggcaggagaatcgcttgaacctgggaggcagaggttgcagtgaacctagattgcaccattgcactctagcctggcaacagagcgagattccatctcaaaaaaaaaaaaaaaaaaaaaaaaaa

SEQ ID NO: 115208 - DNA, 1000 bp, Homo Sapiens
accccttccaatgagctccttgtttttgccaaagtttctaggggtgcctctgtgttcatccccttcctgatctaaccggctccctcgccagtcccgggggcctgccctgctcccaccaggagagagggcaaagggatgagcctgggtttggactctaaaatctcagcactgccccatgggtcctagacttcccagggcaagaggaagaccctgccattccacagccccttcctctgccaggtgcttggctctctgagagcaaacaggaacactagagaccaaaaaggggacaaaggagaagggctgagcccaccttcttgctcctacccttggtgcctaatgctgtgtgatgcacctgcagggtgtgtgctagcctctgtgccccgtccttgtgccaggtcaaggtgggggcaggctgggccctgcatttctggggcaggaacagagggtgaaagggacagatagatgcaggtccattctgcacctcttggctcgggtgcagagttcaccctgtgccctccgttataagtccctcccccagccctgtcatgtgccttgggctcctcctgccctccatctcagccattggggcagggaccctcctacactacagaggggccaggggatccctctctccctagtgccttccaccctttactccccagagcagcttggcccagggaggggggatgctgcttagctgatcccgccctgacccagaggaagcctctatttatttattagcttttgtttacaccgtggaattgaccccttcctccaggggtcttgggtgggggagcccagggcccctgtgacccctcctttcttcctccaatccccagtttgtatttagctgccaaataagattcccattggctccctgtgttctcttggggggtcagggtgctgtcccctcccctctgtttacatctcccctctaccccgctgtatcgcatattgctgagttttctatttttgcaaaataaagtgatggaaactc

SEQ ID NO: 115209 - DNA, 1000 bp, Homo Sapiens
cctcgaggcctccggaccttcaagactgtctttgctgagcacatcagtgatgaatgcaagaggcgtttctataagaattggcataaatctaagaagaaggcctttaccaagtactgcaagaaatggcaggatgaggatggcaagaagcagctggagaaggacttcagcagcatgaagaagtactgccaagtcatccgtgtcattgcccacacccagatgcgcctgcttcctctgcgccagaagaaggcccacctgatggagatccaggtgaacggaggcactgtggccgagaagctggactgggcccgcgagaggcttgagcagcaggtacctgtgaaccaagtgtttgggcaggatgagatgatcgacgtcatcggggtgaccaagggcaaaggctacaaaggggtcaccagtcgttggcacaccaagaagctgccccgcaagacccaccgaggcctgcgcaaggtggcctgtattggggcatggcatcctgctcgtgtagccttctctgtggcacgcgctgggcagaaaggctaccatcaccgcactgagatcaacaagaagatttataagattggccagggctaccttatcaaggacggcaagctgatcaagaacaatgcctccactgactatgacctatctgacaagagcatcaaccctctgggtggctttgtccactatggtgaagtgaccaatgactttgtcatgctgaaaggctgtgtggtgggaaccaagaagcgggtgctcaccctccgcaagtccttgctggtgcagacgaagcggcgggctctggagaagattgaccttaagttcattgacaccacctccaagtttggccatggccgcttccagaccatggaggagaagaaagcattcatgggaccactgaagaaagaccgaattgcaaaggaagaaggagcttaatgccaggaacagattttgcagttggtggggtctcaataaaagttattttccactgaaaaaaaaaaaaaaaaaa

SEQ ID NO: 115210 - DNA, 890 bp, Homo Sapiens
tttcctttctctctcctcccgccgcccaagatgccgaaaggaaagaaggccaagggaaagaaggtggctccggccccagctgtcgtgaagaagcaggaggctaagaaagtggtgaatcccctgtttgagaaaaggcctaagaattttggcattggacaggacatccagcccaaaagagacctcacccgctttgtgaaatggccccgctatatcaggttgcagcggcagagagccatcctctataagcggctgaaagtgcctcctgcgattaaccagttcacccaggccctggaccgccaaacagctactcagctgcttaagctggcccacaagtacagaccagagacaaagcaagagaagaagcagagactgttggcccgggccgagaagaaggctgctggcaaaggggacgtcccaacgaagagaccacctgtccttcgagcaggagttaacaccgtcaccaccttggtggagaacaagaaagctcagctggtggtgattgcacacgacgtggatcccatcgagctggttgtcttcttgcctgccctgtgtcgtaaaatgggggtcccttactgcattatcaagggaaaggcaagactgggacgtctagtccacaggaagacctgcaccactgtcgccttcacacaggtgaactcggaagacaaaggcgctttggctaagctggtggaagctatcaggaccaattacaatgacagatacgatgagatccgccgtcactggggtggcaatgtcctgggtcctaagtctgtggctcgtatcgccaagctcgaaaaggcaaaggctaaagaacttgccactaaactgggttaaatgtacactgttgagttttctgtacataaaaataattgaaataatacaaattttccttc

SEQ ID NO: 115211 - DNA, 1000 bp, Homo Sapiens
gcgcgtggccacgtggttcaaccagccggcccgtaagatccgcagacgtaaggcccggcaagccaaggcgcgccgcatcgccccgcgccccgcgtcgggtcccatccggcccatcgtgcgctgccccacggttcggtaccacacgaaggtgcgcgccggccgcggcttcagcctggaggagctcagggtggccggcattcacaagaaggtggcccggaccatcggcatttctgtggatccgaggaggcggaacaagtccacggagtccctgcaggccaacgtgcagcggctgaaggagtaccgctccaaactcatcctcttccccaggaagccctcggcccccaagaagggagacagttctgctgaagaactgaaactggccacccagctgaccggaccggtcatgcccgtccggaacgtctataagaaggagaaagctcgagtcatcactgaggaagagaagaatttcaaagccttcgctagtctccgtatggcccgtgccaacgcccggctcttcggcatacgggcaaaaagagccaaggaagccgcagaacaggatgttgaaaagaaaaaataaagccctcctggggacttggaatcagtcggcagtcatgctgggtctccacgtggtgtgtttcgtgggaacaactgggcctgggatggggcttcactgctgtgacttcctcctgccaggggatttggggctttcttgaaagacagtccaagccctggataatgctttactttctgtgttgaagcactgttggttgtttggttagtgactgatgtaaaacggttttcttgtggggaggttacagaggctgacttcagagtggacttgtgttttttctttttaaagaggcaaggttgggctggtgctcacagctgtaatcccagcactttgaggttggctgggagttcaagaccagcctggccaacatgtcagaactactaaaaataaagaaatcagccatgaaaaaaaaaaaaaaaaaaaaaaaaa

SEQ ID NO: 115212 - DNA, 493 bp, Homo Sapiens
cttttttcttttttccggcgttcaagatgtcgaagcgaggacgtggtgggtcctctggtgcgaaattccggatttccttgggtcttccggtaggagctgtaatcaattgtgctgacaacacaggagccaaaaacctgtatatcatctccgtgaaggggatcaagggacggctgaacagacttcccgctgctggtgtgggtgacatggtgatggccacagtcaagaaaggcaaaccagagctcagaaaaaaggtacatccagcagtggtcattcgacaacgaaagtcataccgtagaaaagatggcgtgtttctttattttgaagataatgcaggagtcatagtgaacaataaaggcgagatgaaaggttctgccattacaggaccagtagcaaaggagtgtgcagacttgtggccccggattgcatccaatgctggcagcattgcatgattctccagtatatttgtaaaaaataaaaaaaaactaaacccatt

SEQ ID NO: 115213 - DNA, 648 bp, Homo Sapiens
ctttccggacctggccgagcaggaggcgccatcatgggagtggacatccgccataacaaggaccgaaaggttcggcgcaaggagcccaagagccaggatatctacctgaggctgttggtcaagttatacaggtttctggccagaagaaccaactccacattcaaccaggttgtgttgaagaggttgtttatgagtcgcaccaaccggccgcctctgtccctttcccggatgatccggaagatgaagcttcctggccgggaaaacaagacggccgtggttgtggggaccataactgatgatgtgcgggttcaggaggtacccaaactgaaggtatgtgcactgcgcgtgaccagccgggcccgcagccgcatcctcagggcagggggcaagatcctcactttcgaccagctggccctggactcccctaagggctgtggcactgtcctgctctccggtcctcgcaagggccgagaggtgtaccggcatttcggcaaggccccaggaaccccgcacagccacaccaaaccctacgtccgctccaagggccggaagttcgagcgtgccagaggccgacgggccagccgaggctacaaaaactaaccctggatcctactctcttattaaaaagatttttgctgacaaaaaaaa

SEQ ID NO: 115214 - DNA, 618 bp, Homo Sapiens
cttttgcgggtggcggcgaacgcggagagcacgccatgaaggcctcgggcacgctacgagagtacaaggtagtgggtcgctgcctgcccacccccaaatgccacacgccgcccctctaccgcatgcgaatctttgcgcctaatcatgtcgtcgccaagtcccgcttctggtactttgtatctcagttaaagaagatgaagaagtcttcaggggagattgtctactgtgggcaggtgtttgagaagtcccccctgcgggtgaagaacttcgggatctggctgcgctatgactcccggagcggcacccacaacatgtaccgggaataccgggacctgaccaccgcaggcgctgtcacccagtgctaccgagacatgggtgcccggcaccgcgcccgagcccactccattcagatcatgaaggtggaggagatcgcggccagcaagtgccgccggccggctgtcaagcagttccacgactccaagatcaagttcccgctgccccaccgggtcctgcgccgtcagcacaagccacgcttcaccaccaagaggcccaacaccttcttctaggtgcagggccctcgtccgggtgtgccccaaataaactcaggaacgccccggt

SEQ ID NO: 115215 - DNA, 748 bp, Homo Sapiens
gcagataatgggaggagccgggcccgagcgagctctttcctttcgctgctgcggccgcagccatgagtatgctcaggcttcagaagaggctcgcctctagtgtcctccgctgtggcaagaagaaggtctggttagaccccaatgagaccaatgaaatcgccaatgccaactcccgtcagcagatccggaagctcatcaaagatgggctgatcatccgcaagcctgtgacggtccattcccgggctcgatgccggaaaaacaccttggcccgccggaagggcaggcacatgggcataggtaagcggaagggtacagccaatgcccgaatgccagagaaggtcacatggatgaggagaatgaggattttgcgccggctgctcagaagataccgtgaatctaagaagatcgatcgccacatgtatcacagcctgtacctgaaggtgaaggggaatgtgttcaaaaacaagcggattctcatggaacacatccacaagctgaaggcagacaaggcccgcaagaagctcctggctgaccaggctgaggcccgcaggtctaagaccaaggaagcacgcaagcgccgtgaagagcgcctccaggccaagaaggaggagatcatcaagactttatccaaggaggaagagaccaagaaataaaacctcccactttgtctgtacatactggcctctgtgattacatagatcagccattaaaataaaacaagccttaatctgcaaaaaaaaaaaaaaaa

SEQ ID NO: 115216 - DNA, 1000 bp, Homo Sapiens
cattggagacccttttcacaagatggcgccgaaagcgaagaaggaagctcctgcccctcctaaagctgaagccaaagcgaaggctttaaaggccaagaaggcagtgttgaaaggtgtccacagccacaaaaagaagaagatccgcacgtcacccaccttccggcggccgaagacactgcgactccggagacagcccaaatatcctcggaagagcgctcccaggagaaacaagcttgaccactatgctatcatcaagtttccgctgaccactgagtctgccatgaagaagatagaagacaacaacacacttgtgttcattgtggatgttaaagccaacaagcaccagattaaacaggctgtgaagaagctgtatgacattgatgtggccaaggtcaacaccctgattcggcctgatggagagaagaaggcatatgttcgactggctcctgattacgatgctttggatgttgccaacaaaattgggatcatctaaactgagtccagctgcctaattctgaatatatatatatatatatcttttcaccatatacatgcctgtctgtcaatttctggttgggctgggaggccacacacacacactgacatgacagggcttgggcaagactcctgttctacttatccttttgaaatacctcaccctgccactccaccatgtatgatcattccagagatctttgtgactagagttagtgtcctaggaaaaccagaactcagaacttgcctccatggttgagtaacaagctgtacaagaaccccttttatccctggaagaggctgtgtatgaaaccaatgcccagggtttgaagggtgttagcatccatttcaggggagtgtggattggctggctctctggtagcattttgtcctcacacacccatctactatgtccaaccggtctgtctgcttccctcaccccttgcccaataaaggacaaggacttcagaggaaaaaaaaaaaaaaaaaaaaaaaaaaaaaaaaa

SEQ ID NO: 115217 - DNA, 737 bp, Homo Sapiens
ttccggcgttgttgaccctatttcccgtgctgcaccgcagcccctttctcttccggttctaggcgcttcgggagccgcggcttatggtgcagacatggccaagtccaagaaccacaccacacacaaccagtcccgaaaatggcacagaaatggtatcaagaaaccccgatcacaaagatacgaatctcttaagggggtggaccccaagttcctgaggaacatgcgctttgccaagaagcacaacaaaaagggcctaaagaagatgcaggccaacaatgccaaggccatgagtgcacgtgccgaggctatcaaggccctcgtaaagcccaaggaggttaagcccaagatcccaaagggtgtcagccgcaagctcgatcgacttgcctacattgcccaccccaagcttgggaagcgtgctcgtgcccgtattgccaaggggctcaggctgtgccggccaaaggccaaggccaaggccaaggccaaggatcaaaccaaggcccaggctgcagccccagcttcagttccagctcaggctcccaaacgtacccaggcccctacaaaggcttcagagtagatatctctgccaacatgaggacagaaggactggtgcgaccccccacccccgcccctgggctaccatctgcatggggctggggtcctcctgtgctatttgtacaaataaacctgaggcaggaaaaaaaaaaaaaaaaaaaaaaaaaaaaaaaaaaaaaaaaaaa

SEQ ID NO: 115218 - DNA, 1000 bp, Homo Sapiens
ggacactcagtccttgaacaggggaatgtggcctcaagtgcacagactagccttagtcatctccagttgaggctgggtatgaggggtacagacttggccctcacaccaggtaggttctgagacacttgaagaagcttgtggctcccaagccacaagtagtcattcttagccttgcttttgtaaagttaggtgacaagttattccatgtgatgcttgtgagaattgagaaaatatgcatggaaatatccagatgaatttcttacacagattcttacgggatgcctaaattgcatcctgtaacttctgtccaaaaagaacaggatgatgtacaaattgctcttccaggtaatccaccacggttaactggaaaagcactttcagtctcctataaccctcccaccagctgctgcttcaggtataatgttacagcagtttgccaaggcggggacctaactggtgacaattgagcctcttgactggtactcagaatttagtgacacgtggtcctgattttttttggagacggggtcttgctctcacccaggctgggagtgcagtggcacactgactacagccttgacctccccaggctcaggtgatcttcccacctcagccttccaagtagctgggactacagatgcacacctccaaacctgggtagtttttgaagtttttttgtagaggtggtctagccatgttgcctaggctcccgaactcctgagctcaagcaatcctgcttcagcctcccaaagtactgggattacaggcatcttctgtagtatataggtcatgagggatatgggatgtggtacttatgagacagaaatgcttacaggatgtttttctgtaaccatcctggtcaacttagcagaaatgctgcgctgggtataataaagcttttctacttctagtctagacaggaatcttacagattgtctcctgttcaaaacctagtcataaatatttataatgcaaactggtcaaaaaaaaaaaaaaaaaa

SEQ ID NO: 115219 - DNA, 1000 bp, Homo Sapiens
gtaggaaaaatcccattctaataaggttatatttatgtagctctgcaaataaacatctagcaaatgtaaaaagtattttctttgccttaaaaatgattaaaattatttgaactcctgaggagtgttatatgaataaaattagtaagttatttggaggaaagttattttttaaaaagacaactggtaaaacagtacaggagaaaggccagcttcctcaagtgaggacagttgtttagaattgactgaggagcggccgggtgcggaggctcacatctgtaatcccacacgccttgggaggctctgaggcgggtagatcacctgaggtcaggagtttgagaccagcctggccaacatggcgaaaccccgtctccactaaaaatacaaaaattagccaggtgcagtggcacacacctgtaatcccagctactccgaaggctgaggcaggaggatcacctgagcccaggaagttgagactgcagtgagctgagattgcaccactgcactccagcctcagtgacagcgagactgtctcaaaaaaagaaaaaagtgactgaggaggaagaggccaggtggcaaatggaacagaatcaccaaagggtgaacaggactaaggcaatgtagtgtatggctcagctacgtcagagtggaaaaggtgttattagagcagaaactatggtccctgcgtcacagggaagcaacctacagagaagcagcagctccccaagagaggagagataagaagccagaagcctcagagtgaacaattgtcctattagggattgctctagagagagaaacctctgggaacgtacccctgtgaggcagcacagcacaatgcttttagaattgtatgagagttgatatatctccatttgttttgcaaaggcaaaaactaagatacagagattatctgttaaagttatgtatttctttggtaataaagatgctgacagtgttgctggaatgcatttctttaataaagatattgtacaatgaaata

SEQ ID NO: 115220 - DNA, 1000 bp, Homo Sapiens
gagatggttttccactccttctagatattcccaaaaagaggctgagacaggaggttattttcaattttattttggaattaaatacttttttccctttattactgttgtagtccctcacttggatatacctctgttttcacgatagaaataagggaggtctagagcttctattccttggccattgtcaacggagagctggccaagtcttcacaaacccttgcaacattgcctgaagtttatggaataagatgtattctcactcccttgatctcaagggcgtaactctggaagcacagcttgactacacgtcatttttaccaatgattttcaggtgacctgggctaagtcatttaaactgggtctttataaaagtaaaaggccaacatttaattattttgcaaagcaacctaagagctaaagatgtaatttttcttgcaattgtaaatcttttgtgtctcctgaagacttcccttaaaattagctctgagtgaaaaatcaaaagagacaaaagacatcttcgaatccatatttcaagcctggtagaattggcttttctagcagaacctttccaaaagttttatattgagattcataacaacaccaagaattgattttgtagccaacattcattcaatactgttatatcagaggagtaggagagaggaaacatttgacttatctggaaaagcaaaatgtacttaagaataagaataacatggtccattcacctttatgttatagatatgtctttgtgtaaatcatttgttttgagttttcaaagaatagcccattgttcattcttgtgctgtacaatgaccactgttattgttactttgacttttcagagcacacccttcctctggtttttgtatatttattgatggatcaataataatgaggaaagcatgatatgtatattgctgagttgaaagcacttattggaaaatattaaaaggctaacattaaaagactaaaggaaacagaaaaaaaaaaaaaaaaa

SEQ ID NO: 115221 - DNA, 1000 bp, Homo Sapiens; identical to SEQ ID NO: 115220

SEQ ID NO: 115222 - DNA, 1000 bp, Homo Sapiens; identical to SEQ ID NO: 115220

SEQ ID NO: 115223 - DNA, 1000 bp, Homo Sapiens
atgcttcatggttaggagtcttcaagttccatgttccccagatttgagatatactaaagaaagaaattcaaaagtagctatttggggcccacaaaaataactattattttagccttagagccttacacttgtttcatgaagagaaaggacttgcataaccaaaataaacaaagcaagacaaattaaaaatatgtgggggagagatcagtgaaaagtggttttcttaatgcagccctgctggtccccattaacaattgcttgaaattcacatggatgtaaaattataattgtcaggatcttattcagatgatcttttaaggtttaactggttttgcttttgtttatctatatgtcaaaatacttgtaaattgggaacaaacttctctcagcttcttgaagttgttcaactatccttgccactggaagaccaaacaaggttttcactgctttttcttttacataatatgctgagaattatttcttatgctttttactacaaacaaaattactcacctggattaaagattaaggccttaatctgtttagattatctttaatctccatgaaatcgtgaaataagacaagaatagtgtttcagctgtaggccattttacagctaattgcccataaattgtagcatttattgacctgaagtactaagctaattgtcttgactactcaaagcccctgaattgttgtcaactttcccctttgtgttgtgtagccctaacgtcatttagcttgttgtctgatgcctccagtaggacacctccgatggagctttgatttctgagcagcgaaagctcccttcctaagatgcatctcgcataggctgcctatgatgaaggaccgtgcacctccactccaacagagtgctgagtttaaaagttgacctgtgtttgtaatttcactttcatcttgcttaataaatatctgctggattctttcattcacttttttacatttggatttatgtttttaataaaaggggtgttacact

SEQ ID NO: 115224 - DNA, 1000 bp, Homo Sapiens
cggcccgggcccggcggcgctgccctgcacgctggccatgtgggagttgggccactgcgacccccggcgctgcacgggccgcaagctggcccgcctggggctggtgcgctgcctgcgcctgggccacagattcggcggtctggtgctgagccccgtgggcaagcagtacgcgtcccccgcagacagacagctggtggcgcagtctggggtcgccgtcatcgactgctcctgggccaggctggacgagacaccgtttgggaagatgcgagggagccacttgcgcctgttgccctacctggtggccgccaaccccgtgaactatggccggccctacagactttcctgcgtggaagcgtttgctgccaccttctgcatcgtaggctttccagaccttgctgtcattttgctgcggaagtttaaatggggcaagggcttcttggacctgaaccgccagctcctggacaagtacgcggcctgcggcagcccggaggaggtgctgcaggcggagcaggagttcttggccaatgccaaggagagcccccaggaggaggagatcgatcccttcgatgtggattcagggagagagtttggaaaccccaacaggcctgtggccagcacccggctgccctcggacactgatgacagtgatgcgtctgaggacccagggcctggcgccgagcgcggaggagccagcagcagctgctgtgaagaggagcagacgcagggacggggggctgaggccagggccccggctgaggtttggaaaggaatcaagaaacggcagagagactgagggttgcagacacatatatttttgaggctgggtgacgagaaaatctagagacatgagggacataaatgggcctggcagcctcggctctttgcggctgctggcaggactgagctgtccgggttctccccacacttccagcacagctgtgctctgtgtcctgcctcggcgctctcgcaaatgaagctgcaggccaagaaaaaaaaaaaa

SEQ ID NO: 115225 - DNA, 1000 bp, Homo Sapiens
acagagtgacaatatttatcaagcctttgttatattggattatcttctctcttaaaatacaactgtattataattgaaatgacagcccaaaattggatggtttaccaaaaccaatgaaagggatttcacacatcaatttttatttctgttttgaagagcacatgctatataataattgctagtagcaactgcagtaaaacaggtgataagttattttctctgaaaagatccagtcctagagcaggattcttcgatcattcatggcagagtgaaaaaggtttgtatggttcttgtccaaataactcagttcttaaaattcttaaaatgatcgtaaaccattatcctttaaaggtttatttgaagatgctgttaaagtacagaattttgtgtacaggtagatttttccgtccctcattaatagtgccttcttaattaatacagactggtgttagctataacaaaactccagtaaggccaaagaatcccaagttctttgtggaaaaaaaaaaaaaatcttttagggtcagattttcccttctaatatcattgaagatgatgttgcattgatttattcataaagtattttaactataggaactctagaagataatggttaggcaagtgattttttttttaaatatggttggcgtaagttgtattttgaaattcacttattttaaaatcgaagaggattgtaatcatggaaatagaatgtttgtatctacctgcccacattttcttaaaaagatatttcatatacagataatgaagaccaagctagtggctgcactgtaggtctgctgcttatttgtatttgttgtgcttctgtttatgttgtagaagctgaaattctagcaacatgcttcaattctgttattttgatacttatgaaaatgtattaggttttactatattgtgcttttgaaagccataactcttaagaactttgtttttgcatattgtttgctaattctttactttaataaacctcaaaacctgc

SEQ ID NO: 115226 - DNA, 1000 bp, Homo Sapiens
tttcgtgttttcagtcgccttggcagaaataaatagaaaaattatcaatcaaagacttattctctgatacttgtttgcaaaatctgctgaaacttctgtcaggataacatcagcaaattctcaaacagttatggactctcaggagcattctgactgcatcaataagggccatcgattgtttctttctcgcctgtcgtttagcctgtgccacacttcgggagcaaagctgtgtaggcttggactgttctgggatttccttgtttaccaaggagtattgtcagtgttttgtgtttgggatataagtaagtgtatttgccaacaacaaaaaaaaaccaacaaaaatgctggatggatgttaaaggataaaaagtgatggggtatggggtaggtatgaaaactagggtaataagatgcttgattgttttcaggtttgccaccagagatgcaatattttaaatactgtcagaaagagtgatttttaaaaatatatatttcagattttcagtgctaacagattgcatatatacagttcatttacttttattaaattggcaatcgatattttattgaatggggaattaagaatataaactgtaaattttgtcttaaattgattttttttcttggcctttatttttattacttaaggtatgagttatattttaggagatactttctagacagtttgaagtttgggtgctatatgaagaaaaacatttaatgatatactcagatataaacaccttgttttcttgaatgtaatttatttattagctaaaaaaaaaaaacaaactgctctcaagatggtgcctgttaacctaaacatgaaatatatttattacatgcaaaatatttcttagccacttttaagcagtaatgttttatctgaatggatatttgtttctatatcctgataattatttaaattgttactttcaatctggaagaaaaaataaaccttaatattgaaaccaaaaaaaaaaaaaaaaaaaaaaaaaaa

SEQ ID NO: 115227 - DNA, 1000 bp, Homo Sapiens
agcaagcaaatttttaaaatctctgtttttgaaatctactcgtcaaagagttttcagaggcaatgaaaggggaacagatttttcattgtaatagtggaagttgtgtgatagttaggagatatcaacatgcatttttaatcttttccttagatgaaagagatggcttttggcagtgtgttctaaccagaaagaaaggatttgtattactctccaaatctactgtactgtcagcttcactccacctgagaaaaaagaaaaaaaaattgatagctcaaatgcatgtaattcataaacactgcaaaggagagccacttggtgtctgcagtcctcatattaacagtctgtcacagaatgcagttaaagtattgattggcatatggtaatagagcaaccatagccttaacttacagacctgtgaaataaagggcattttgacctaatacaattaattttctggataactcttaaagagaagtcattttaactgtttttgctactccatatattgtcattcaaaatatattttaacccaaaataagttaaataatttgtgcatgtttgtgtgtgtatatatgcatacacttttttatattaaaattttgaggctatacagccactgtgccctgtggaataaagccatatatataaatgttttatatgtatatgttttatacataaataaaacatttcatctaatatatatatgtgtgtgtgagtatatgtgtgcatgtttagcagatatttgtataaaatataaacactctgttgtcatataggctatatgcgaaattgttaattttaaaataacctcaggccacagacttgtagtaatcatttgaaggcctcacctagtgtccccttggtgacgtatgcagcagctcaaattaaacctttgtgcattgggttatgaataatcttttcttccaaagatggcaaaagcctcggtttgatttgatactaaagaataaatttctctgactttcaaaaaaaaaaaaaaaaa

SEQ ID NO: 115228 - DNA, 1000 bp, Homo Sapiens
tcctgatgtttcagaacctattgatggattaaacccaaatgaagaagaacataggacatacttggatattgaacctataactggattcactttacaatttgcaaaacggctgcaggtcaacctattggtcaagccatcagaaaaaattcaagtattaaagaatctgaagaggaactatattgtgcctattctttggcttaatgagactgggaccattggtgatgagaaggcaaacatgttcagaagtcaagtaactggaaaaataaacctccttggcctgatagaaatgatcttactcagtgttggtgtggtgatgtttgttgcttttatgatttcatattgtgcatgcagatcgaaaacaataaaataaacctggctcaagcacaaaccaatttgtgttgttctgattcaataattggtttctgggtggccaattcagaagaagagtgtacatgctcaacaaatcctaggccctgcattcctgtcatcctcatccgggggaaacaccatcatcccagtagctgccctattcaactgcaacagtctccaggaccatcagtatactgcatttcatgtgcaccaaatattttgaaagacatttataaataattggcttatgactcatatttctctatgaataccttcatacagcaggtataactcttttctttatgggcttaaatattttgtcactgatcctgcaaatggacatcattttagcacactagcggtttatattttaaggaccttcattctctgttctgcacctcttctggaaattgagtaaattttgcttttttttttttactcagttgcaacttacgcttggcatcttcagaatgcttttctagcattaagagatgtaaatgataaaggaattattgtatgaaatattacaaagcgtagactatgcattgttattcattataatattttttgctgtcataatcgcctcataaagacaggtttcaaccattaaaatatgttcttccttaaaaaa

SEQ ID NO: 115229 - DNA, 1000 bp, Homo Sapiens
cttcctcttcactggctcgaggtaaacccttttcaaggaaaaacaactctaggatttcttttttctgtgtacgtagaccagtcccatcagtgtataatctctctctcacacgcctctctccaatagacagcttgtatttgcagtatttcatatttataaatatgcgtttatttaaaaggagaacaaaagcttgactctgattcacagttttgtatgtagctggtttgacgtagtcttttgtattttccctgccgaagtgaattgttggagaatgtaaaccgcctccacgtggcggcagacttcctaaggccccagctcgctggcctcgcgctgggcggctgggaattccacctgagaacaagtcccgcaaaccggggacggaaggacatttgacttttatttttgtatttaattgacatgaatgtaaaggggacagctcagggttgttttggagcctgttgactttgtatctctgcctgtgattttcttttctaaatgaaactccatgtagcaaccaggacgaagttgagaaggaaaacgccaaatgctttggttattagagtttaataggtaagctctgttacactaggtgttagagttccagaatgttcttttgtttgctaaaccttgaagaaacatgtgcctcagcctagatgttttgtcttctcttttctgcacttaatacctgacagtatgaccgatctctgcgcctttctgggggcgggcaagctggcggtagatttgtgatgtcacagtgcaaactgcagtgactgtaaattggcctggcgtgtataaacgttttcagggaatgcagaaggtattaatgaagagacaaaacctttattccatgtgctttgcttcattctgtacatagctctttggctcgtgaacctaattgtaaactttcaggtatttttgtacaaataagggactgatgttctgtttcttgtaattagaaataaacattaatacagtgttcttcaaaaaaaaaaaaaaaaaa

SEQ ID NO: 115230 - DNA, 1000 bp, Homo Sapiens
gccaacccccagaaggagaaggttcgcctccgctacaagctcaccttcaccatgggtgaccagacctacaacgagatgggggatgtggaccagttccccccacctgaaacctggggtagcctctagaacagaggggctggggagaggaaggggcagagggaccggtcactgtccagcctggagggaggcattggtggccaaggacaccctttgttgcccatggccattcacccccaggcctggtgcttctccccacacccctgtaggcctcaagtgactcttccccctcctgctccggccccgcccctgctgagccaaacccagtaggaggctgggcctgggtttgtgccgctggggtctccatcaccgggacctggagagggaggggctgtgtagccttggaagaacttgggtcatggggaggaagcacagctgttggggaagggccaggacctcaggcccagccccaaccccagctggggtggggtcttccccacctgtctcttatgccttatgggaaggcccagccataactcgggggccatgctggagctggggaccagcttaggcctcctccataggaacccagtgactggggggtgacgcctacacccccagctatttgcactctggtgtgtggtttgactctgcttttcttccggattggccctgtggtcacagcctcagggggccaggctgggggaacctcacctggcccgtactcctgggggtttccctttgccattgggccccctgagggactgtgggggctcaagggtaatgccagaggcccatggccccagcgaggggctgtggggcacctagagttctcggtgtgtctccttcattcattggcctctgctggggcctcctatgggtgtcttacgtctgtccatccatctgtccgtggtcagaagtggggtcagtgtgtgagtgagagcaggagtatttatgaaaataaaacgtcgtttttcctggaaaaaaaaaaaaaaaaaaaaaa

SEQ ID NO: 115231 - DNA, 1000 bp, Homo Sapiens
accacttgtccaataaagtacatcccagacgccacacctgctgtgtcccgagagtctccagatgggggcatcagggtgaggtccgggactcttgggtcatcgtcccacagtggctgatcggctgccaagcacagtgggggtgctttgttggatcagagcagatttttcaccctggtctcggaatctaaaaaccctcgctgtgtcttcctgtgtgttgcgtgatctgtgaaaaatacatctccctctgaccacagactcctcatctgtggagaagggaagagaggatggcacttggctttaaagacaggtagctgccaggctactgtggagagaatgtgttatgggcctagtgggcctctggtggaccagagattacccctctcaacaggccagctgctggttggctccagccagtgtggccctggggtaaagggggcctggagttgcttgacacgccagttgttcaaaagaagcaagaacttgggaatattttttttttttttttgagacagggtctcactgttgcccaggctggagtgcattgatgtgatcttagcttacaacagccttgacctcccggctcaagtgatctccaagtgaccctcctgcctcagcctcctgagtaccctcctggggactacaggtgcgtgctaccatacccagctaatttaaacaaattttttttttgtagagatggggtcttggtgcccaagctggtctcaaactcctagtcttaagcaatcttcctgctttggcctcccaaggcgctgggattccaggtgtgagctactgtgcccagctaaaatagggatttttatattaaatctccctattttaaaatgttggctcctagcggggcgcagtggctcacgcctgtaatcccagcactttgggaggctgaggtgggtggatcgcctgaggtcaggagttcaagaccagcctcaacatggagaaaccccatctctgctaaaaatacaaaattagctgggcgtggtggagc

SEQ ID NO: 115232 - DNA, 861 bp, Homo Sapiens; identical to SEQ ID NO: 29148

SEQ ID NO: 115233 - DNA, 1000 bp, Homo Sapiens
aaggcgttggtcgcagtgattggtgaacacagcgggggtgggtggtagcgctgggggtgattttaggcagcaagaattggagaactcacactgcgaaaagaaaaccttgggtggcagtgatttgaacaccggcagtgctggggcaggacccgagccagcggtggggagagatatagtcagagaacccagcaatacagatccgtccttgggcaaggcgcggtgctggatgatgggtgcggaggaatttgggtaaaggcagagggaaggggtggaggagggccagctcagttgccgaaactctggagtggcggctggctagaaattggtctgtagaaatgaccttgaaaatggagttctggccaggtgcggtggctcacgcctgtaatcccagcactttgggaggccgaggcaggcagatcacgaggtcaggagttcgagaccagcctggccaacatggcaagaccctgtctctactaaaaatacaaaaattagctgggcgtggtggcgcatgcctataatcccagctacttgggaggctgaggtaggagaattgcttgaacctgggaggtggaggttgcagtgaacctagatcacgccactgcattccagcctgggcaacagagcgagactccatcttaaaaaaaaaaaaaaaaaaaagaaagaaaagaaaatggagttctgagagctaggaaactgggaggttgagccaggagcaggggaacttgggctttgaggcgagacctaattcttagggtgctctatgaggacatgggtggtgggcaaagtgacagccgcctgagcccctctgcctggtcccctttgcccccaggatgaatacgacgacattgtggttcacagcagccgcagccaaacccggctgcctcccaccccagcctcaaaacctcttcctgacgacccccgccccgtgtgatttgtttcattgttaatataatttccagtttaataaacaaaaccctagttctgacaaccagaaaaaaaa

SEQ ID NO: 115234 - DNA, 1000 bp, Homo Sapiens
agattcaagcttgaatggctgggaaattgctctggattaaatgatgaaacttatggctacaaagagggcaaaccgtgcattattataaagctcaaccgagttctaggcttcaaacctaagcctcccaagaatgagtccttggagacttacccagtgatgaagtataacccaaatgtccttcccgttcagtgcactggcaagcgagatgaagataaggataaagttggaaatgtggagtattttggactgggcaactcccctggttttcctctgcagtattatccgtactatggcaaactcctgcagcccaaatacctgcagcccctgctggccgtacagttcaccaatcttaccatggacactgaaattcgcatagagtgtaaggcgtacggtgagaacattgggtacagtgagaaagaccgttttcagggacgttttgatgtaaaaattaaattttaagtgacactacagaaaaacacaaaaaggtgatgggttgtgttatgcttgtattgaatgctgtcttgacatctcttgccttgtcctccggtatgttctaaagctgtgtctgagatctggatctgcccatcactttggctagtgacagggctaattaatttgctttatacattttcttttactttccttttttcctttctggaggcatcacatgctggtgctgtgtctttatgaatgttttaaccattttcatggtggaagaattttatatttatgcagttgtacaattttatttttttctgcaagaaaaagtgtaatgtatgaaataaaccaaagtcacttgtttgaaaataaatctttattttgaactttataaaaagcaatgcagtaccccatagactggtgttaaatgttgtctacagtgcaaaatccatgttctaacatatgtaataattgccaggagtacagtgctcttgttgatcttgtattcagtcaggttaaaacaacggacaataaaagaatgaacacattcaaaaaaaaaaaa

SEQ ID NO: 115235 - DNA, 939 bp, Homo Sapiens
atggcagcggccgccagccccgcgttccttctacgcctcccgcttctgctcctgctgtccagctggtgcaggaccgggctggccgaccctcactctctttgctatgacatcaccgtcatccctaagttcagacctggaccacggtggtgtgcggttcaaggccaggtggatgaaaagacttttcttcactatgactgtggcagcaagacagtcacacccgtcagtcccctggggaagaaactaaatgtcacaacggcctggaaagcacagaacccagtactgagagaggtggtggacatacttacagagcaactgcttgacattcagctggagaattacatacccaaggaacccctcaccctgcaggccaggatgtcttgtgagcagaaagccgaaggacacggcagtggatcttggcagctcagtttcgatggacagatcttcctcctctttgactcagaaaacagaatgtggacaacggttcatcctggagccagaaagatgaaagaaaagtgggagaatgacaaggatatgaccatgtccttccattacatctcaatgggagactgcacaggatggcttgaggacttcttgatgggcatggacagcaccctggagccaagtgcaggaggcacagtctgacccaaagccatggccaccaccctcagtccctgcagcctcctcctcatcctcccctgcttcatcctacctggctgctgaggagagtcctttggagtgacagctaccaaatagcgaagcgccccttgtctggtggacacgtgactcgcgtgactttacctatcattggagacgactcacactccttaccctgccctcttgccttgtatacaataaataacggcgcagccaggtattcggagccactacaggtctccatatcttgatggttccctgggcccagctgtcttttcttccgtc

SEQ ID NO: 115236 - DNA, 1000 bp, Homo Sapiens
tagcttaaccatgtataaccaattgctcttcaatgttgttcgtgtacaccaatgagaattcctggcaaacaactttgtagcagccaactccctgcctcttgtttttaaaaatccacgtctacctgcgctctttggattgtagattcaggacaacttgaatctatgctctcgggttgcaatcctcaagcttggccaaataaattatctgcttggattaattttgccccaccttcttcctttcaggtaggcaatcttcacaaacagccccttgaagcaggcatgtctgagatcagcaaggttaagtaagcccccaaggtcatctttttactcggcaggagaatgacagtttgaatccaggcagccttagctctgatgtctttctgccttggacaaggtgcccgagcctgtccctgctgtctggagaggtgcagctggggtggtccccggcaggagctggacatgcagatccggttgtaattggtctgggaccatctacataggagctatgggcccagggaaagacaagaccatgttgaggacttggtttcccctttttcttaaagctgagacccctgcctatgtcaagtcacacatttgaaaaggcaaccacatttcacatcacatgcatatgtatttgggcataaaataatttgaaatgattttatcaatttatttaaaaacataagtaggctggacgtggtgcctcacgcctataatctcaacactttgggaggccgagacgggtggatcacctgaggtcaggagttcaaggccagcctgaccaatatggtgaaaccttgtctctactaaaaatacaaaaaattagccaggcgtggtggcgtgtgcctgtaatcccagcaactcaggaggctgagacaggagaatcccttgaacctaggaggcggaggttgcagtgagccgagatcacgccactgcactccagcctgggtgacaagagcgaaactccatctcccccataaaaaaaaaaaaaaaaaaaaaa

SEQ ID NO: 115237 - DNA, 1000 bp, Homo Sapiens
acgtccagcagcgagagcttgtgaggagctgcacctgactgggagctaggggaccacctgccttggccagacctgggacgcccccagaccctgactttttcctgcgtgggccgtctcctcctgcggaagcagtgacctctgacccctggtgaccttcgctttgagtgccttttgaacgctggtcccgcgggacttggttttctcaagctctgtctgtccaaagacgctccggtcgaggtcccgcctgccctgggtggatacttgaaccccagacgcccctctgtgctgctgtgtccggaggcggccttcccatctgcctgcccacccggagctctttccgccggcgcagggtcccaagcccacctcccgccctcagtcctgcggtgtgcgtctgggcacgtcctgcacacacaatgcaagtcctggcctccgcgcccgcccgcccacgcgagccgtacccgccgccaactctgttatttatggtgtgaccccctggaggtgccctcggcccaccggggctatttattgtttaatttatttgttgaggttatttcctctgagcagtctgcctctcccaagccccaggggacagtggggaggcaggggagggggtggctgtggtccagggaccccaggccctgattcctgtgcctggcgtctgtcctggccccgcctgtcagaagatgaacatgtatagtggctaacttaaggggagtgggtgaccctgacacttccaggcactgtgcccagggtttgggttttaaattattgactttgtacagtctgcttgtgggctctgaaagctggggtggggccagagcctgagcgtttaatttattcagtacctgtgtttgtgtgaatgcggtgtgtgcaggcatcgcagatgggggttctttcagttcaaaagtgagatgtctggagatcatatttttttatacaggtatttcaattaaaatgtttttgtacataaaaaaaaaaaaaaaaaaaaaaaaaaaaaaaa

SEQ ID NO: 115238 - DNA, 1000 bp, Homo Sapiens
gagagcctttgcccagattggcccagcaaggagcggttttagattagagacactggctggattgaggagtagaaggctcaaacaacccaaggctttctgcctccgagatgtggcaccatagtgcggtgccctgtggcttcaccgccctacttccacctccgcccagcctgtaatgtttatataagcagcctcaaggaccaagaaccatctgcgaaaggacacacacaggaaattcataaaagaaatctgaatggataaaaccatgaaaaaaagtatgcttcattagtaattaaagaaaggcaaatagagctggaagcatttttcccttagcaaaccataacagaaaaaaataagacccaatattggcaaagagactactgaaaaaacattcccatacattgcgtgtgggagtatacatcggtgcaggcttcctggatgacagttgggtgatatgtgtcatgtggcctaaaagcctccatgtcatttgacctacgaattctatctttgggaatttatcctaagaaaatacttaaggatttagttagtgataagatgttcatcccagcattgcaatggagaaaaatgggaagcaatggtttggttgggaatttattccttttctgctgtaacgaaagtttgcaataggggattgcttaagtaaattattgtatctccatccagatggtggagtaccgcgcagacattaaaagtcatgtaaaagaacatctgactgaaagaaaaatgctccttgaatattaaaaggttgtaaaaatagtgcatgttatgtgatttcaattttgttttttaaaatatgggtgtatgcttgtatacgtagagcagataaaaaagacggaaggcatactaaaaaatgttgagtggttatctttgtatggtggaacaaagtcactgtaattttcatctttggtttttctgtaatttccaaattttccacattttgtatttcatataatataatttaagaaaaaaaaaaaaaaaaaaa

SEQ ID NO: 115239 - DNA, 1000 bp, Homo Sapiens
ctccctggtatcacatcccaggaaccaggcttagaggagggaaacatggacctgttggagggagctacctaccaggtgccagatgccctcgagtgggaacagcagaatcaaggcctggtgagaagctggatggaaaaattaaaagacaaggctggttacatgtctgggatgctggtgcctgtaggggttgggatagctggagccttgttcatcttgggagccctctacagcattaaggttatgaatcgccgaaggagaaatggcttcaaaaggcataaaagaaagcagagagaattcaacagcatgcaagatcgagtaatgctcttagccgacagctctgaagatgaattttgaattggactgggttttaattgggatattcaacgatgctactattctaatttttattttggagcagaaaaaaaaaaagaacaacctgccacattgctgctatcaggccgttagtcctagtgtctgctgggtgctgggtagtagatttttcttgtactgagcagaaatggcatgttgtatactaaacgtatcatgcagtatttggttttattctgtagtgaattttccacaaccgtgggctacaactcataaatatgcaacatatatgtttttcagtaggagttgctacattaggcagagtaaatattttgtagttttccacagtgtcttttccttggtttgaattacctgcattgagaataatgattgttgccaccaaggcatgcttgactctgagatataaatcttaacaaagaataacttctcaagatatactctacctacttgaaaccacagggttgtgggccatggtacatactgcatttgcatcaaactagcagtaactcagaatgaaatcattttcattaagaagctctctcagcatattaggattatatgtagatttgtatgtattttgcattatgtacttcagtctcctagttttattattctcaccttccgttttattcttggcgaggaaaaaaatgca

SEQ ID NO: 115240 - DNA, 1000 bp, Homo Sapiens
aacaaaatgcctttttgtttaccgtagcgtatacatttgttttgggatttttgtgtgtttgttgggaattttgtttttagccaggtcagtattgatgaggctgatcatttggctctttttttccttccagaagagttgcatcaacaaagttaattgtatttatgtatgtaaatagattttaagcttcattataaaatattgttaatgcctataactttttttcaatttttttgtgtgtgtttctaaggactttttcttaggtttgctaaatactgtagggaaaaaaatgcttctttctactttgtttattttagactttaaaatgagctacttcttattcacttttgtaaacagctaatagcatggttccaattttttttaagttcactttttttgttctaggggaaatgaatgtgcaaaaaaagaaaaagaactgttggttatttgtgttattctggatgtataaaaatcaatggaaaaaaataaactttcaaattgaaatgacggtataacacatctactgaaaaagcaacgggaaatgtggtcctatttaagccagcccccacctagggtctatttgtgtggcagttattgggtttggtcacaaaacatcctgaaaattcgtgcgtgggcttctttctccctggtacaaacgtatggaatgcttcttaaaggggaactgtcaagctggtgtcttcagccagatgacatgagagaatatcccagaaccctctctccaaggtgtttctagatagcacaggagagcaggcactgcactgtccacagtccacggtacacagtcgggtgggccgcctcccctctcctgggagcattcgtcgtgcccagcctgagcagggcagctggactgctgctgttcaggagccaccagagccttcctctctttgtaccacagtttcttctgtaaatccagtgttacaatcagtgtgaatggcaaataaacagtttgacaagtacatacaccataaaaaaaaaaaaaaaa

SEQ ID NO: 115241 - DNA, 1000 bp, Homo Sapiens
gctgatttagaccaaaagattcaaatctcctctttgtgaaatcccatctgcatttgattttttattattttatgttcccccgttagattgttttaagtgtttgcttttcatcttttatagatgtaatctgattttcaaaaatcattaacactttttaattagtatcgactaagactttttccccctggaatcgaggctgtgtgtccgtcatcccagcccccggttggagcctgctctttgaactccgctgccttccttagcagcttctgtcctcttctgtgagtcagtcagcgagtgcttgggatccgcatccagccgtgctgagcacacaacaggctgtgtgtggaaatggccaccaccattctccttccccaccccaccacaaaaagagaagctgtgtctttagacaaccctgaggtatctgtgttacaatcgttctgtgtttgatatttgtgtaaagtatgcatgcagtcttgtactgtgacctaagaacaaaactgtaactgcattagaaaccatgaaaaaattagatattgttttgtgacttttagacagtggtaaatatagaaccatgaattctggtcacattccatttctctccaacatgaaggatcaaaaaatgtttttcaatgtgttctttgttccactggaaacttagagtcatgagtttatgagctgatttggtcaccttcctctgcctttgttcactgtgagttctgatgtcttagtgacttagttcttagaagctcacgccttagtttgaaacagattctccacggtggtccccaaaacactgtctgcatatccataagaattgagcgctatgggtgttaacgtgcatgaggatcagtttgcagcagcaagtacaaaaggagaagaggaacatccgttgaatgagtgtgttttgtacataacttcagatacttgtgaacatgccttatatttgtccaacaactgtcagaataaagaacattctaaaatgagaaaaaaaaaaaaaaaa

SEQ ID NO: 115242 - DNA, 1000 bp, Homo Sapiens
acacagctcttcatttctcctgagccatgcagaatttactttcaatgtggaaatctgttccctttaccacactgtatatgcacagagcacaagagaggctatctctagtcacttccaccagcgaggccttagactccgtattagaggccaccgatttcatacaacagtgtttcgctaaagacccttcactattcttgtttagtaaatagctgtctgctcttcagggaactgttacctatgggttattaccaaagaacgctggcaattggaaatgtcctgatggaaattctttgcacgtgccggttctctggcatcctccaggtggcccaacccaaagcagaaagcagaaaccacagaccccgtgagtctccccataccttgtttccaataacttggcaaaacttcttggtgcatattggttacaccctctgggattcataatgccattaggctaaaaccctaagagagagggttgacagaaacacacgcgagaatgaggcagatcccagagcaaggactgggcccagactctccacatgtgctctactagtgagtgccttatactctcagtattttggggcttacagcttcttatttgtgctaaaaaggtgcagttccaaagtaggaactgccacacaggccccagcatcctctctccaacttcatacctctctcctggtggggggagcgggcatccaggacctccggaatcaaggatgtgcagagaagagcgaaagtaatttttctagtcacatgaactgattggttccaggcaattagaaaatggctataaaataaccttaattttaaaaaaaaatcttgggtcttcgttttcctattaggagactgaactgaccacatgtattgatttatatcctgaatatatgggaacttctgtgtttgggatgtcctactgtaagactgatgaatgtacagagttaatttcagggtacagttttgccttaatggttttaaaaaataaactattttttaaaatttt

SEQ ID NO: 115243 - DNA, 1000 bp, Homo Sapiens
gttgtatttagggatgttctgtgtttctttcttttttgaagttgtcatcaattgctttactaagatttttaaatagtgaaaacctcctgtttagactttggtggaagatgaatcaaggaagcagggccctgtcttatgggtcacgtgtctttggtgagtgagaagacctaaactcctggccatcatctcttatccaatacttagcagttggggattaaaccatccttgccttcagttctctccaatattaccaggcccaactcagtcttcagtgattttaaacagcattgacatcatctgtaaaaccatcatctgtaaaaccatctatgacatgagttttgagaaacaataatggggaaaatatttgggaccaagctgaagcactaatcccactaagttaaagacttctttccagtccaaggcaggcctgaatcaactgtctttaaataaaattttaagtgatgctgtattatatataggaaaaaatgcttaaaatcctgtcatttagaacagtgaaaagtatcttttgagattaaagtgactctttactgtaggaaaaatattactctgtgtttacagattcattgctgtggtcaggccatttttaagggaagagttatttaatataaatagtctctgattttaagttctgtttaatgttcattctccttccaagaacaaagtggtgatttttggttagggtgatcgccctcttaaaattggcagtgctgttccttgtgctgcccctgtcttttcctctgatggcatttttttttttttttttttaacacaggttgaaacatttcatctattatctctgcctcatttctggagggttgtgtatcagttctctaacacttgttcctgagaactaaatgtcttttttattcttatttcctctctcataaacatttggtgaccttttaccaagtggtgagttagttaggttttttaaaataaaatgttcattgtatttgaaaaaaaaaaaaaaaaaaaaaaa

SEQ ID NO: 115244 - DNA, 1000 bp, Homo Sapiens
tgaagtacaccattgtggtgtcggctacggcctcggatgctgccccacttcagtacctggctccttactctggctgttccatgggagagtattttagagacaatggcaaacatgctttgatcatctatgacgacttatccaaacaggctgttgcttaccgtcagatgtctctgttgctccgccgaccccctggtcgtgaggcctatcctggtgatgtgttctacctacactcccggttgctggagagagcagccaaaatgaacgatgcttttggtggtggctccttgactgctttgccagtcatagaaacacaggctggtgatgtgtctgcttacattccaacaaatgtcatttccatcactgacggacagatcttcttggaaacagaattgttctacaaaggtatccgccctgcaattaacgttggtctgtctgtatctcgtgtcggatccgctgcccaaaccagggctatgaagcaggtagcaggtaccatgaagctggaattggctcagtatcgtgaggttgctgcttttgcccagttcggttctgacctcgatgctgccactcaacaacttttgagtcgtggcgtgcgtctaactgagttgctgaagcaaggacagtattctcccatggctattgaagaacaagtggctgttatctatgcgggtgtaaggggatatcttgataaactggagcccagcaagattacaaagtttgagaatgctttcttgtctcatgtcgtcagccagcaccaagccttgttgggcactatcagggctgatggaaagatctcagaacaatcagatgcaaagctgaaagagattgtaacaaatttcttggctggatttgaagcttaaactcctgtggattcacatcaaataccagttcagttttgtcattgttctagtaaattagttccatttgtaaaagggttactctcatactccttatgtacagaaatcacatgaaaaataaaggttccataatgcatagttaaaaa

SEQ ID NO: 115245 - DNA, 1000 bp, Homo Sapiens
aaagatatcaccaggagactaaagtccatcaaaaacatccagaaaattaccaagtctatgaaaatggtagcggcagcaaaatatgcccgagctgagagagagctgaaaccagctcgaatatatggattgggatctttagctctgtatgaaaaagctgatatcaaggggcctgaagacaagaagaaacacctccttattggtgtgtcctcagatcgaggactgtgtggtgctattcattcctccattgctaaacagatgaaaagcgaggttgctacactaacagcagctgggaaagaagttatgcttgttggaattggtgacaaaatcagaggcatactttataggactcattctgaccagtttctggtggcattcaaagaagtgggaagaaagccccccacttttggagatgcgtcagtcattgcccttgaattactaaattctggatatgaatttgatgaaggctccatcatctttaataaattcaggtctgtcatctcctataagacagaagaaaagcccatcttttcccttaataccgttgcaagtgctgacagcatgagtatctatgacgatattgatgctgacgtgctgcaaaattaccaagaatacaatctggccaacatcatctactactctctgaaggagtccaccactagtgagcagagtgccaggatgacagccatggacaatgccagcaagaatgcttctgagatgattgacaaattgacattgacattcaaccgtacccgccaagctgtcatcacaaaagagttgattgaaattatctctggtgctgcagctctggattaatgaaaatcaagttccatcctcagacaagaggtaaagaaggaaaattcagccagttgattttgtttttagcttactgctgcctttgtccgaagaaactgttcctccattatttgaattactgaagacagcaagatatttgtaaattatcttaaaataaacaacttaaaataaaaaaaaaaaaaaaaaa

SEQ ID NO: 115246 - DNA, 788 bp, Homo Sapiens
aacctcacgaggccttacgtgcctagagcggttcctctccgtggcgccctaccgccttcggcgcgaaggtggctggtgcgtaccgtcccgaaccctaggagccgagatcccacccgcaggaccccaaaacccaatgatcctgcagcagcccttgcagcgaggcccccagggaggggcccagcgcctcccgcgggccgccttgggggtgacttggggcctggacgccagctcccctctccgaggagctgtgcccatgagcaccaagcggcgcctggaggaggagcaggagcctctgcgcaagcagtttctgtctgaggagaacatggccacccacttctctcaactcagcctgcacaatgaccacccctactgcagcccccccatgaccttctccccagccctgcccccactcaggagcccttgctctgagctgcttctctggcgctatcctggcagcctcatccctgaggccctccgtctgctgaggctgggggacacccccagtcccccctaccctgcaaccccagctggggacataatggagctctgagtgctggtggacagtgcccctcccaccttccttcttccccacaacagaagagaccagcgactcccgcaaagggacaaggttcctccctctcctgcagagtaggcatctgggcaccaagaccttccctcaacagaggacactgagcccaacggagttctgggatgggaggggtgggagcatgggaagggaggcatcccacccccaagaagaactgaataaagattgctgagcaaaggaa

SEQ ID NO: 115247 - DNA, 1000 bp, Homo Sapiens
tccaagaacagatgtgatgccaggacctattgctacctgctgcccacgtttgcctttgcgcacaaggaccgggacgttcaggatgagacctaccgcctgagcgccgagacgctgcagcaggtcaacaggctcctggcctgctacaagggcacgcacaacttccacaatttcacctcgcagaaggggccgcaggatcccagtgcctgccgctacatcctggagatgtactgcgaggaaccctttgtgcgggagggcctggagtttgcggtgatcagggtgaagggccagagcttcatgatgcatcagatccggaagatggtcggcctggtggtggccattgtgaagggttatgcccctgagagcgtgctggagcgcagctggggcacagagaaggtggacgtgcccaaggcgcccggactcggcctggtcctggagagggtgcacttcgagaagtacaaccagcgctttggcaacgatgggctgcatgagccgctggactgggcgcaggaggaaggaaaggtcgcagccttcaaggaggagcacatctaccccaccatcatcggcaccgagcgggacgaacgctccatggcccagtggctgagcaccttgcccatccacaacttcagtgccaccgctctcacggcaggtggcacgggcgccaaggtgcccagtcccctggaaggcagtgaaggggacggagacactgactgaggcgatgggagctgcccaccagagtgcctctgagcagctcacagtgtgtgcccagatgtgccacccctgtgggcagcaagaagctgggatcgctgcagccatgttttcccggccatgccggcgttgtaacctcaggaccttcccttgtaggaacagcctttctcgaatctgttttcagctcttgcattgcatagatgaacctcagcatgtaaagaactatttttttaaagaagtgattttcttattaaacaagtacaaattttgcttagtcaaaaaaaaaaaaaaaaaa

SEQ ID NO: 115248 - DNA, 1000 bp, Homo Sapiens
cctggtgctgcggaacgagaagtgccatgactactacaccacggagttcctgtacaacctgtactcatcagagggcaagggcgtcttcgactgcaggaccaatgtcctgggccacctgcagcagggtggcgctccaaccccctttgaccggaactatgggaccaagctgggggtgaaggccatgctgtggttgtcggagaagctgcgcgaggtttaccgcaagggacgggtgttcgccaatgccccagactcggcctgcgtgatcggcctgaagaagaaggcggtggccttcagccccgtcactgagctcaagaaagacactgatttcgagcaccgcatgccacgggagcagtggtggctgagcctgcggctcatgctgaagatgctggcacaataccgcatcagtatggccgcctacgtgtcaggggagctggagcacgtgacccgccgcaccctgagcatggacaagggcttctgaggccagccatgcccacgcccctccccagcccccacccatgccagcgcagcgccagggctcagatggggcctgggctgttgtgtctggagcctgcaggcaggtgggggctgcgtccctgctcagcccatcccctgcctctatccctggccacctgccaggcctccctcgggctggtgtcttgagaccagcctgccaggccctccagcaggaggacagagtgccctggggcatccaccttcctgcccaggggacgtggcgctgtcggtgtttggaggctgctgccccctggctttggcgccccatgggccctcagcgtctccccatgctgggctcactacatgggccagcccttgctctacctggccggtaggctgctggcgcctaggttgtgttgagagggggatgcccctggccctgcctcactgtgacctgctcctgcccacgtgcagcacctgtcaccttttctagaaataaaatcaccctgactgtggggtgcatcggtctccggagaaaacaaaaaaa

SEQ ID NO: 115249 - DNA, 1000 bp, Homo Sapiens
aggctggcctcaaactcctgcactcaagcaattcttctaccctggcctcccaagtagctggaattacaggtgtgcgccatcacaactagctggtggtcagttttgttactctgagagctgttcacttctctgaattcacctagagtggttggaccatcagatgtttgggcaaaactgaaagctctttgcaaccacacaccttccctgagcttacatcactgcccttttgagcagaaagtctaaattccttccaagacagtagaattccatcccagtaccaaagccagataggccccctaggaaactgaggtaagagcagtctctaaaaactacccacagcagcattggtgcaggggaacttggccattaggttattatttgagaggaaagtcctcacatcaatagtacatatgaaagtgacctccaaggggattggtgaatactcataaggatcttcaggctgaacagactatgtctggggaaagaacggattatgccccattaaataacaagttgtgttcaagagtcagagcagtgagctcagaggcccttctcactgagacagcaacatttaaaccaaaccagaggaagtatttgtggaactcactgcctcagtttgggtaaaggatgagcagacaagtcaactaaagaaaaaagaaaagcaaggaggagggttgagcaatctagagcatggagtttgttaagtgctctctggatttgagttgaagagcatccatttgagttgaaggccacagggcacaatgagctctcccttctaccaccagaaagtccctggtcaggtctcaggtagtgcggtgtggctcagctgggtttttaattagcgcattctctatccaacatttaattgtttgaaagcctccatatagttagattgtgctttgtaattttgttgttgttgctctatcttattgtatatgcattgagtattaacctgaatgttttgttacttaaatattaaaaacactgttatcctacagtt

SEQ ID NO: 115250 - DNA, 1000 bp, Homo Sapiens
catggagccggtttgccatccagtgatgccagagtcccggcgcgacagaaagcaggactcccaagatcttcctcctgctgcattttaggcactgaaccccaatcccgaccgtatgttaacactgaattctgagtaggagttttgttttggcagtgtgacgactgcgcatgctcggaaaggggacgcaagtccgagatcccaaacgcggtacagaccaaaccgcagtccacgttacggatcggcttactccgcggagttggcctcatttctgcagtcggcgctccctgtagtttctcctctcgaacgccaggtggagcaaccggccggataccgccacagccctggcaggcggcgctgtgatgcctgagctgatcctctctcctgccacagctcctcaccccctgaaaatgttcgcctgctccaagtttgtctccactccctccttggtcaagagcacctcacagctgctgagccgtccgctatctgcagtggtgctgaaacgaccggagatactgacagatgagagcctcagcagcttggcagtctcatgtccccttacctcacttgtctctagccgcagcttccaaaccagcgccatttcaagggacatcgacacagcagccaagttcattggagctggggctgccacagttggggtggctggttctggggctgggattggaactgtgtttgggagcctcatcattggttatgccaggaacccttctctgaagcaacagctcttctcctacgccattctgggctttgccctctcggaggccatggggctcttttgtctgatggtagcctttctcatcctctttgccatgtgaaggagccgtctccacctcccatagttctcccgcgtctggttggccccgtgtgttccttttcctatacctccccaggcagcctggggaacgtggttggctcagggtttgacagagaaaagacaaataaatactgtattaataagatgtttaaaaaaaaaaaaaaaaaa

SEQ ID NO: 115251 - DNA, 1000 bp, Homo Sapiens
cagggcgcgcgctgcacgcacagtactaggtcaggtggtgctcccgggtgaggagctgctcctgccggaacaggaggacgcggaaggccctgggggtgcagtggagcgaccgttgagcctgaatgctagagcgtgctcgcgggtgcgcgttgtatgcggtccgggccttcggcgctgtggggaccgcctgctggtcaccaagtgcggccgcctccgtcacaaggagcccggcagtggcagcggcggcggtgtttactgggtggactctcagcagaagcggtatgttccagtaaaaggagaccatgtgattggcatagtgacagctaaatctggagatatattcaaagttgatgttggagggagtgagccagcttctttgtcttacttgtcatttgaaggtgcaactaaaagaaacagaccaaatgtgcaggctattagctccagattgtgaaatcatacaggaagtgggaaaactctatccactggagatagtatttggaatgaatggaagaatatgggttaaggcaaaaaccatccagcagactttaattttggcaaacattttagaagcttgtgaacacatgacgtcagatcaaagaaaacagatcttctccagattggcagaaagttgatataggtggacttttttacaggtcagttgaggcaaaaaactatgggttttttcaggtgaacctcccccatttaaatactcagaagataaggtgtgaatgtatgtattattagagtccgaaagtatttttataagttactggttttcacccacgcttttgtgggagagaaaatcattgcaaaatcattttttttgttcggtacaataaagtttactaaaaaacagtattagggtttatttggagttaactcccttagtaattgctacagcttccataattaactggaggtcagcagtaaaataattttgtgattataacagtaagccaggttcaccagaggaaatgtggaatacctaagtataaagcag

SEQ ID NO: 115252 - DNA, 1000 bp, Homo Sapiens
actgtccctgaggactcagttttgggggaggggttatctgggagaagctttagcctgttctgagccattaggagacattagtgaattggagcactggagaatcctacaaatggcctatgtctcagaagagctgggacctccttccagctgctgcagatgctgacaggccctgggaggctgctgtgctctggagaagctggagcagctcatttcttggcctagcctggctgcctcagaaagagcagtcaggacttgagggaagcatcaaattctatacccataaactgcagttggaagtcagctttttgaaatgtccagcctttgcccaattgtttcagatcatctcattcctcaggctttggcaggtatcctgccctccatcttattccagtgtgttcacctcatcaaggcagcagagtggatgaaggagtaagtctgccctttgccatactgaacagctgtggaccccgattggtgagggctctgcatatgcctgtatgaaggagatacaggtgtgtgtgcacatgccggtatgaagaagacacaggcatgtgcttctcagttttgctaacagtgggagctcaacggggcagagggaggaaggtccatgatgctcagccacatactgtagagagaggcaatttaatgttaaatgacgcaccatcctccctcccacccttctcccagtcaactttttttctttttctagaactactaattatctctcaaggctgaaaaattaattgccttaggtggagaacttaattcctagtatccaccaaacttaactccgtatctccatatggtgtctccatatctactgtgtgagctacttaactgacgccctcttcctccaactgaaggatcgcccaacgtttttggattatagaattattatttcctgctttctttctttgggacttttgaatttctttggtttcgtttttaagaagtaacccaacatttcctacaacactaaataaaatggtacttacctttc

SEQ ID NO: 115253 - DNA, 1000 bp, Homo Sapiens
ctttttttcattgttcggttgactttcagctttctggagtgacaaagcagcagtgatgggtgctattcctggttctgtggtggtttactttgtctactaagtgatttactttcaaacctcattacagataatcttactaaaagacttaacatgcacactgctaaaaggtgttttactgttttccattaacgctgttgtatgaacaatatttggtgacatgttgtctttttgtcctgtagattgtcatatctgttatgtagttatccttttggcaagtcctttgatttttttttcctctagaaaatcctcagactgtcaatcttccatattttgaatattataatgctgtggccatttctatagaaagattacttgcaagtgtgtgtcttgaaaataacctcttgtatttgtgtgtttatgtgagttctgtctaagagatcagataagctctggaagcttcatcatctgtacctacatgtaactgtatctgggttacatgggcaggcggtaccaagtcctgctcttcgatggggtggctgagagataaaggttcctgaactctccttgctgtgtatgcaccacatctgtacttcagagaggtggaaaatcatctacaacactgcgtttcttgtggttgtgctgttactggtataaagtcaagtgccttcaatgctaaaggctcagaaatttttcttaaactgatttcatgtcctatgcaagtgttttctacaacctgcataaccagtactttgtaaaacttgtttacgcttcaattgtacatagtgatttttaaagaaatatatagtatttttatttaggtacctccaaacttgaattcgtctgtgtgaagcattgtaaaacgatacatttctcttttgagtaccattacagttgtacagaggttttcactgcttctatttttctactgttactgataagcatgtaacactgactttatcctacatatagttggcatttcaaataaatggcttgtatagaa

SEQ ID NO: 115254 - DNA, 1000 bp, Homo Sapiens
acctgttccgactctttctgcggcagaacactcagggcgcccaggccgagttcctcttccgcacggagactcaaagtgaaaagcttcggtggatctcagccttggccatgccaagagaggagttggaccttctggagtgttacaactccccccaggtacagtgccttcgagcctacaagccccgagagaatgatgaattggcactggagaaagccgacgtggtgatggtgactcagcagagcagtgacggctggctggagggcgtgaggctctcagacggggagcgaggctggtttcctgtgcagcaggtggagttcatttccaacccagaggtccgtgcacagaacctgaaggaagctcatcgagtcaagactgccaaactacagctggtggaacagcaagcctaagtcttctctgagaggagtttcgtgagctgaagaacaagctgctcatggcaagggctggccccagaaccctgcaagagaggccttctgtggatggagaactaggccttctcaaagctcaaggacaaaatccagctaacccagtccctcggcccaggcctcctttcgtgctttgtgcttggtgggggggatttcgagggactttgcactggactctgggaacctttcatcattaaaaaaagggggaccattggggcctgagccaaggaactttccttctactgccttatagtgcttaaacattctccgcctccagggtgcagattcagagctggccagagtttcagtgatagccgtatgttaaacagaatctcacctcagtctcctggagggagatgtttaagaggggttaacacatcagatgggagggtcagcccggtgacctctaaggtatcttctaacctagaaattcaccataattatggtgcaaggtcagtgtgtctctgagatctatgtctgttggtggcaatgtgagggtgatactctctcactctaataaacttggcacttctccgagtaaaaaaaaaaaaaaaaaa

SEQ ID NO: 115255 - DNA, 1000 bp, Homo Sapiens
aagaaagatggcaaatttatgctattcctggaaaaatacattgtggcttagcaaataagcaagttcccacgttacttttgttttgcttcaagtaatacttctgccagttgtgttttatgaattaaacagggaacggcatgctgaacttgaaactagatttgttcctgcttttttcacaatgtgagtagttttgaaaagtcagatctggccatttgtctttcctagaatagcataactttgttcattgttttttttgtttgtctttctgacacagaaagactgatgatggtgtccactatgtattcttcaaaacatttggcacatgctgcactaacctagtctatcttttctatcttggaatttgctcatacaaaccctatagcctagactagatcccttaccctctctccagttcctatcattcacccatttcactgtgcaagacacctcactagtcaccagtgatacagaaatgacttttaagcagtttctgctcttaagggcttaccgttttgtctataagatacacaagtataaatgacaagtacaaataacaatgaatgtttaatgctttacgtttagtgtttaagcttgttgttggaagagcagcattttgacccttggagaagaaaaactagctgtggcattccaggtggagaacctgacagaggactaagaagttatctaatgtaaaagacctcaggcaccaccttcgcataaactttttccagacaaggctaaatgtgcatgcttcataaccataattcttatttttctttaataaatatttttctacttgtaacactgtgcattatttcaaactgtttacctgtttgtaaagcttgtctcttaatcaaatttgtcttgaccaaataagtttcctgagggctggaattatgccttaactatatctatagtatttaacagtgaatcctttgtataatgaaagcatcaacagataattttaaattgataaataaaaagcacagtttcaaatggt

SEQ ID NO: 115256 - DNA, 512 bp, Homo Sapiens
cctttcctcagctgccgccaaggtgctcggtccttccgaggaagctaaggctgcgttggggtgaggccctcacttcatccggcgactagcaccgcgtccggcagcgccagccctacactcgcccgcgccatggcctctgtctccgagctcgcctgcatctactcggccctcattctgcacgacgatgaggtgacagtcacggaggataagatcaatgccctcattaaagcagccggtgtaaatgttgagcctttttggcctggcttgtttgcaaaggccctggccaacgtcaacattgggagcctcatctgcaatgtaggggccggtggacctgctccagcagctggtgctgcaccagcaggaggtcctgccccctccactgctgctgctccagctgaggagaagaaagtggaagcaaagaaagaagaatccgaggagtctgatgatgacatgggctttggtctttttgactaaacctcttttataacatgttcaataaaaagctgaacttt

SEQ ID NO: 115257 - DNA, 1000 bp, Homo Sapiens
agaagatgctgcaaccttctcatccctgagagcaatgtttgcaacaagatgtgatgaatatgtcacccagttggatgagatgcagagacagttagcagctgcagaggatgagaagaagactctgaacactttgttacgaatggctatccagcaaaaactcgccctgacccagaggctggaggacttagagtttgaccatgagcagtcccgacgcagcaaaggcaaacttggaaagagcaagatcggcagccctaaaattgtcagcagcctgctgcctccgtaccgccacagtgctcacaactagccgggaggcaagactgcccaactgtcagtcctgacacagctctccctgaggagcagccacattccagctcccagtgcgcccctctccactgtctctccaagcctcctcacccctagtcttcatctcctgtggacgaacatctggggtggaagttttgtagccacacacaggatactgcccaagatccagcgggtgttttcttctcggttgttagatgtacaattggattaatgtccatcgttttggaagacgagagaaagttgagaagaacacgaagcacagaccctgatgtgataaaacattttgtggtttctctgagtcacagataaacttctgccatcaaatggctacagttcatttaaatttaaaaaaaagaaaaaagaaacagaaaacgtgtctcagatggctggctttacctcgatagcataagagagacctaagacatgtaaaatacgtatattgcagtatcatctttcctcacactccaaattcagctagggaagttgattccaatatgtttgtcattgatatttattttgtactttatttgctacatgatttatgtctatacaaataatttctctgaggtgaatttaattcatttattttcaaataagcataatttgctcaattaagtatgagtttgaatttagtttgaaatctggaattggccagactgtggtcatttttcttgca

SEQ ID NO: 115258 - DNA, 1000 bp, Homo Sapiens
atattatcagcttattctgccaccagagtagagtctaataaattccaaagtttttatttgctccatggtgtatgttctgactttgaaaatgtcagattctataatcatacccctaacatccaggaaacaaatgacagattatctttaaactgaaattgactctacaatgcaacccttaatgctgaatggattaaaaaagtcagcccttttagtatctgtttgaaagggccgtaaaaagttgacacttttgttgttgtggatcctgcgtgtctagacccacgtgttgtttccatcgtatactgtagggtgcaccccttgggattcatcattaagaactgaggctcactgttgtcagaaacaaagctcccaccccccaggttcaaccttgtgggagaactgttgagcatgagaatgttctagactcagaggtactaaaatttgttaccacatcattgcttcctttctacaggacgaattgaggcttaaactttactgttaatgatactggttcattttaatgtgcttgttggtatgttgctatttttcatttcatagctttcaaaaatcatgctaattgtatacttgtctagtttaaggctattttaaaatatgtacaatactattcacagcatttagttcgtttaatttttattataaagcaatctactaaaaaagtacaactgtatttgaacttttcaatagttgtttgtgagctatgataatcaaaagtcattaaagtcttttttaacaaacattcgtgcttacttttcaacataattcccagttatatacagaaaaagatttccacctgtcacgtatctgcctcttttacctgagcaatggtgtagttcttagacctaaggtctgtaattgcaatacttttaaagaaagatgttgctctaagtgctgtttgttagttatgaaatcagatttttctgcttgttcttaatgctgtggtcaaaccatagcacaaaatcattaaaaataatcagcggcatac

SEQ ID NO: 115259 - DNA, 1000 bp, Homo Sapiens
taaatttatccaaagatgactggagggatcttcggaacctagtgattgaaatggttttatctacagacatgtcaggtcacttccagcaaattaaaaatataagaaacagtttgcagcagcctgaagggattgacagagccaaaaccatgtccctgattctccacgcagcagacatcagccacccagccaaatcctggaagctgcattatcggtggaccatggccctaatggaggagtttttcctgcagggagataaagaagctgaattagggcttccattttccccactttgtgatcggaagtcaaccatggtggcccagtcacaaataggtttcatcgatttcatagtagagccaacattttctcttctgacagactcaacagagaaaattgttattcctcttatagaggaagcctcaaaagccgaaacttcttcctatgtggcaagcagctcaaccaccattgtggggttacacattgctgatgcactaagacgatcaaatacaaaaggctccatgagtgatgggtcctattccccagactactcccttgcagcagtggacctgaagagtttcaagaacaacctggtggacatcattcagcagaacaaagagaggtggaaagagttagctgcacaagaagcaagaaccagttcacagaagtgtgagtttattcatcagtaaacacctttaagtaaaacctcgtgcatggtggcagctctaatttgaccaaaagacttggagattttgattatgcttgctggaaatctaccctgtcctgtgtgagacaggaaatctatttttgcagattgctcaataagcatcatgagccacataaataacagctgtaaactccttaattcaccgggctcaactgctaccgaacagattcatctagtggctacatcagcaccttgtgctttcagatatctgtttcaatggcattttgtggcatttgtctttaccgagtgccaataaattttctttgagcagctaaaaaa

SEQ ID NO: 115260 - DNA, 1000 bp, Homo Sapiens
attcagacttttagcaggactttgtgtacagttaaaggagagatggccaagccagggacaaattgtctattagaaaacggtcctaagagattctttggtgtttggcactttaaggtcatcgttgggcagaagtttagcattaatagttgttctgaaacgtgttttatcaggtttagagcccatgttgagtcttcttttcatgggttttcataatattttaaaactatttgtttagcgatggttttgttcgtttaagtaaaggttaatcttgatgatatacataataatctttctaaaattgtatgctgaccatacttgctgtcagaataatgctaggcatatgctttttgctaaatatgtatgtacagagtatttggaagttaagaattgattagactagtgaatttaggagtatttgaggtgggtggggggaagagggaaatgacaactgcaaatgtagactatactgtaaaaattcagtttgttgctttaaagaaacaaactgatacctgaattttgctgtgtttccattttttagagatttttatcatttttttctctctcggcattcttttttctcatactcttcaaaaagcagttctgcagctggttaattcatgtaactgtgagagcaaatgaataattcctgctattctgaaattgcctacatgtttcaataccagttatatggagtgcttgaatttaataagcagtttttacggagtttacagtacagaaataggctttaattttcaagtgaattttttgccaaacttagtaactctgttaaatatttggaggatttaaagaacatcccagtttgaattcatttcaaactttttaaatttttttgtactatgtttggttttattttccttctgttaatcttttgtattcacttatgctctcgtacattgagtacttttattccaaaactagtgggttttctctactggaaattttcaataaacctgtcattattgcttactttgattaaaaa

SEQ ID NO: 115261 - DNA, 1000 bp, Homo Sapiens
agccagcccagcgtttctctaccaccaccaccatgcctccacctgactttggcttggagactgatcctctctgtgtaaattctgcccggtgctgtgaaggctggacggtggaggacctgctggggtctcctgggacccgcctgttgcttctgccctcccctgtggaaaggtctatatgacgggccgcctgaggccccagaactcgtctgtgaaccaccttttccagccagagttcccaaagctggaacgctagctgcctgctcttccttaagatggcctccccccgacccgccacggccctcagttgccagggatggggccaccactgtcacactgtggaatacaagacagtgaactctgtctgcctgaacgagccatgtaaattaagttctagagcagctctctgagcaggataaggtcccctgacagtgagttgtgtggtgggggcagcctctgcctcaaaaattcaccaagcagaatgcctctcagcctcatgtgttggtcctctgctcctcctagctccccagggatgttggggacccagcttgtctcggcagctaagaagcagtgaccaggatgtggattttggcgacctgtgtggtggccttgagctgctttctgtgtttgtgaggactgactcccatttcctaaaggaaatgcccccggggaggacattgggaggaagatggcctgagtgtgcactttggctctgctacctgctcctgaagccccgctaaaaataattcatccaagattcctttgtagttaaagggtccagttctgactggagcctctagagagctgggcttgtatgttcttttggccttttgttcctacctaaatgaagaaaccatgcctggaggggccgtgaacacagaaccctcaagacaaggatgacagagctggaggacacatctagctgccattgcaacctcactgggctccccagactctgtgtgtgagaaattaaaccccctgcttgcttgaaaaaaaaaaaaaa

SEQ ID NO: 115262 - DNA, 1000 bp, Homo Sapiens
tgtcaaaatttaagaaaacaaatgtataaaattccattttttccagtgtttagcatttctagtaagcagtgaggttgtttgacatacagtgatgatggcattattgataagccatacatgagactgcagattatattgaatcatattaaatgtacagaaataaaatattagatttatatcaaattttccaatttgaaccagtggggaaaatcccacagaaatcagtaagtttacatttcaatttctatcttatttgactaagtggaaagagattctttaaaatgtataacctgccattatgtaatttggtttcattttattctacctgttgtgtgagtttagtatatttaatttactttttgttactctttacatactgtttatttttgttagtttttaattgaagatggactgttgaaattgtataggaccagtgtcttattaatatgattaatatatttagaagagccacgtgaaacccatgacaaaatgaatgtgaatattctttctaaaaatttagaaaatgttatctttttgcatttattatgtaaaactgttttacagtatcaaaatttttcacttaaagaaaaaaaatgccatgaaacatttgaactgatgagccacagaacttcagttgaaatttttttcactttttagcatgctaaatatacatctgagtttaaatgttctgtttaatggccattcataaattcaagcactaccactggtcagttttgtgtgatagaataaaaatatgttacctgcagtgtaagtacagcacactgtcaaattcttttccttaaggtgcacagtaaatgtacagatagttataggccactgttttgtaatgtagtacatttctaatctattattcctaacctattataactgtttgcagaaagaaaagaatttttctaataatctgtaaaattatgctaacttctacaagtaggcttctaaataaaatttttaaaaagagcaaaaaaaaaaaaaaaaaaaa

SEQ ID NO: 115263 - DNA, 494 bp, Homo Sapiens
gcagccctcgcgcggtccggcacagcggacaccaggactccaaaatggcgtcagttgtaccagtgaaggacaagaaacttctggaggtcaaactgggggagctgccaagctggatcttgatgcgggacttcagtcctagtggcattttcggagcgtttcaaagaggttactaccggtactacaacaagtacatcaatgtgaagaaggggagcatctcggggattaccatggtgctggcatgctacgtgctctttagctactccttttcctacaagcatctcaagcacgagcggctccgcaaataccactgaagaggacacactctgcacccccccaccccacgaccttggcccgagcccctccgtgaggaacacaatctcaatcgttgctgaatcctttcatatcctaataggaattaacctccaaataaaacatgactggtacgtgtgctgattgcctgcctgtctgccgtagccaaaaaaaaaaaaaaaaaa

SEQ ID NO: 115264 - DNA, 1000 bp, Homo Sapiens
ggagaggagattttcatgggtcacaaaattcttggaggtcccttagtagatttggtagttccttaagagatccacgtgataaaataaatggagttggcctttcttgttttttgcaaaagtgataaaaggtctttagcacttggtctcctcccttgtctctagtgtctttcagaaagttggcaataccttaacaaatgcactctgagctggagggagcccaccatttgcacccacctacccaccctcacccctgttcagatgaatttccagaaagagctaaggctcataaggttcccttttaagtattatttaatagttgaggccagatacttacatgcaagtctgggttatggttgttttgcctttctcagcttgtgaagtcattctaaagctagaggaagtatgtgatatacacatggactaaggctcaggtgacactatggctagattaacatctgggattaggactggaaacacatgtcattttgaactaagggaaactctttgtcatcctaatttggaatttggtccctggatggctagggatccatgaaccaggcaggtaccttttttgtttttgttttgttttgtttcttttctgtttgaattaagatgggctaagatggggcttgcaacattaaacatgagctgagcatccataagcattgaattgggattaaataaagatgttgggcaggaactgaacactgctaatatgatgataaatatgcctgactaaagccactacagaaatccagagattggctgttaaaatttgttttgtggaaagactaattctctttgatactgcagaggcagtggccatggatctgttcctctgtgctaaatgtcttgtggcagggtgtgtttgtgggggagtgttcactggtactcttgagtggcctgaagtgacccattctatgaattgttaattaaggtgccaaaaaaaattaataataaagcttggttttttgaaaaacccattgctgataaaaaaaaa

SEQ ID NO: 115265 - DNA, 1000 bp, Homo Sapiens
agaatcagaaaacatgattatgtgtcactttaatacaggaaatttaggtgttttttggtgtttttgtttttgtttttgttttctttccaaagctcacctcggggacaattccttgggcttctcctgaggtaatgatttacccccccacccacagctgagtctgtgaggccccatcctttccctacgttttctcccatcttttttcctcttcagtctcccagtcatctggtttgtttgtttctttgttcgttctgagacggagtctcgctctgtcgccaggctggagtgcagtggcgcagtctcggctcgctgcaacctctgactccctggttcaaacgattctcctgcctcagcctcccgagtggctggcatcaccacgcccagctaatttttgtatttttagtagagacggggtttcaccatgttgcccaggatggtctcgatctcctcacctcgtgatccgcccgcctcggcctcccaaagtgctgggattacaggcatgagccaccgcgcccggccccaatcatctgtttttaaacaatcgtttttgagcagatagctattcattccagattttcgtgtacccattctgtttcaggagctcttctaggtaaagctgagatcacaggaacagcaggtgacaggcctagctatagttaggaatacacaagccgtaaaatcgagtccttacagccataccacaaggtacgtccatttggactacaagaagagcttcctttaaagttcctatttcagcataaagaggctgtccttttttttgaggaatagtttggaccttgtgcctcctgtgggaggctgaggactgcaagaggagagctagcagatatgcctgttcacccctctctggtacttgtggcttgctagtatgtttttatgataatctcgggcattgtttgcattgtgtttattaatagggttttgtttttgttgtttccttttttacagtaaaggctgaattacataaacattgagtaaatgt

SEQ ID NO: 115266 - DNA, 1000 bp, Homo Sapiens
catcaccattccccaaattgaatatcagcatgcggcctgaccagggactctttagatgcatgaatttatttatatgaaggctctcacagagacacacacagcacttcagtagcatttgcattcctggttaaagaatcaccaatatttaaaataaaaactttcctgaaattgggactgtcatgttatccagaagggctggtacatccgcccaccatgtccccctgctgggtcaggagccaacacaggaccctgcgtgtgagcgtgcctgacatctcacgcacggccactccagagccggtccctgtccttggaaagctgtgaagccttgcgttgagttccttctcgatactgacggctccgtgctgacattctgagctctggagtcacaccagcgcaggggcgtggaggaactgaggtttggaaggaatgccaggtctcgcacagcttggcctcgagaaggtgagaggaaggcaaaggccagggaggggacccagagaggcctggcacacaaggcccaagcaccaccgtcaacacagcccagtccatacagaaatgggtttcatgcctgaaaagctttttacagaaagatgccgcctgtagccagtgacagccgcaaccctacaggcctcagttccttgcagaggtgaggggtagagagtcagcctccctcccttccagcagcgacccagcttccctccacttccaggtggtgctgggctcaccgagggagcactggtgggtgctctgaaaacccacaggatcccacctccaggcccacctgggtcccatctcactctcttcttctttcaccaattgctaacatagaccttgttgggatcacgatggcttcacaagccagctgttgggtttgctatgtcactgtggctcagtcacatccctgcgtgtatactgtctgcggggcacatatgtatccatttagagctaaaggaatcagtgtacactacagctaatcctaataaatccgatgttttcggaaaaa

SEQ ID NO: 115267 - DNA, 1000 bp, Homo Sapiens
tgcttctcaatttacccgagatttcattcgagattcaggtgttgtctcacttattgaaaccttgcttaattatccatcctctagagttaggacaagttttttggaaaatatgattcacatggctccaccttatccaaatctaaacatgattgagacattcatatgtcaagtgtgtgaggaaacccttgcacatagtgtggattcccttgagcagctgactggaataaggatgcttagacacctcactatgactattgactatcacacactgattgccaactatatgtccgggtttctctccttattaaccacagccaatgcgagaacgaagtttcacgttctgaaaatgctattgaatttgtctgaaaatcctgctgtggcaaaaaaactattcagtgccaaagctctttcaatatttgtgggtctctttaacatagaagagacaaatgataatattcaaattgttattaaaatgtttcagaatatcagtaacattataaaaagtggaaagatgtccttaattgatgatgatttcagtcttgagccgcttatttctgcatttcgtgaatttgaggagttagctaagcaactacaagcccaaatagacaaccaaaatgatcctgaggtgggacaacaaagttaatatgattaaccacctgccgctgatcagccttatgttcccaaagagccctgagtagtgctttggtgttcacagtctgtttttttgttgtaacttatattttttaatgctgatgttaactttgtcaaactcttgttttgagctggatcattttgtggatgccaaatgaatatcaaaactgaaaacacatttgttgatatttgtcttgctgtccagattgcggtatttttcagtattaagttttcaatgaactgtgtcacctaagtaagctaccctgctattcgttgtttaaatatatggttctctatttgagtctgtgttttcaataaagttctatgttaaaattggcaaaaaaaaaaa

SEQ ID NO: 115268 - DNA, 1000 bp, Homo Sapiens
gcctggcttggcgctgccggcgggccccgggagcgctccgtgcgccgggtgggcgggggtgtgcgccgggtgagccccagggcgtcgccccagcccgaacccccggcccagggtcctggcgcgcaacgacatgagcatcgccgaggagctgctgtacctgcgcgtggtgcgtggcctaatggccgccatgggcaacacggaccacagcaacagccagcggctggccagcctcacgctggagatgttccccttggtggcggagcacgtgcgcaagtgcatgggggaggaactctaccagctcttcctggtaagtgcgcccttcctgccccgccgcaatgagcagatggcggctcggacagtgtgatgccccttcagacagtccccatcctggagcgcgccacatgcagagtggacctggccaccagctgcaggagggactgctctggcgtaggctcctccacccgccaccttcctgttccctttcctgccctttcggtcaggctgccgacccgcaccccacctgcaacatccctctgccaagcccaactccaagtccagactgccctggcaccccagccgggtcccccttgctcctgtcctcagagcaacgctgaggacttgtacatgaaaatagacagcattcaggcggacatcttggcggccaacacagtcaatgttaccaaagccctgtgcctccatggcagctcctacagcatgaacactctctatggctcgcgcgattcggctcagatggcctacctcacacacttcgaggaggatgtagaatcaaaggagtaacagcccctgtggcaaaccaggaaggccaaggctgcggggcagggaagcctggcaagaggaaggcgcctggggtcaagctcagagccactccacttggctccaggggggagacggggattaggcatcccagaggggcagaggaagagccgctggctgcgaagagtcaataaacagccttgatacctgaaaaaaaaaaaaaaaa

SEQ ID NO: 115269 - DNA, 1000 bp, Homo Sapiens
aacttgggtatttgaatctaattttccaattgcaaattttatgatacctaaatacagataaagtatttccaatgaaaatttagtgtccaaatgagtggggctataaatgtaaaatacactggattttaaagacatggtagaaaaagaacagaaaatattttttgtattgattacatgttgaaacaatattttggctataatgggttaaatatactattaaagttgattttatctgtttctgtttacttttatttacgtggcttacattgcatttctgttggacagtcctgtatttaagtatctagatggcaacattttacatacacaagcatcaaactctgtggtcagatactgttttttctgatctaggaaagagatctgggaaatacttcactcaaaaagaacgagtagtgccttccacaggttaggagagtgtaaatgagtctggtagtttgtctatttttattgtctttattactatagtaaatattctataaatatttgttaaaggaggtatgtgtattttgtttttgttattggcacagtggccactgaatggtgagaaattatctaagattaagacttgaatgagtaaaaagggggaaaacaaatctagttgatattaaaacagtcaaagtgaaacttaagggtcagtaaaatacacataaaggatttgagttttccagtgtatattttgcttacatatttgtggcttttataactcctttagtattaataaactactgaagtcacatgcaaaaaaaaaacagactcatttgcaaattccctgtgggctctatccattgaccaagtcatgtttacttctgtgcttaaagacagtaatgttcaagatgtgctttcatcatgtatgcctctcccatatcagactacgaaattatgtgactattcatagtctctttcgcatcttcagttaagcatataaaaggcacttttggtggaatagtcttttgaagagtattaatgaaattgaatttaagta

SEQ ID NO: 115270 - DNA, 1000 bp, Homo Sapiens
gaagttctaaaatagatgacaactacttgaaggaattgaatgaggacttaaagctaaggaagcaggaactgctagagatgctcaaacctctagaagataaaaacaacctcttatttcaaaagttaatgtctaacttggaggaaaaacaaaggagtcttcagatcatgagacagatcatggcagggaaggggtgtgaggaatcctcggtcatggagctccttaaggaagcagaggagatgaaacagaacttggaaaggaaaaacaagatgcttcggaaggaaatggagatgctatggaacaagacattcgaggcagaagaacttagtgatcaacaaaaagcaccacagacaaaaaacaaggcagacttgcaggatggaaaggaaaagcaacagaggaaaatggaatgggtcaagtatcaggaacaaaataacatccttcagaatgattttcatggcaaagtgattgagctgagaattgaagccttgaagaactaccagaaggccaatgacctgaaattatcactgtatttgcagcagaattttgagccaatgcaagcatttttaaatcttcctgggtcccaaggaattagaattgtttaatcttattaatcttgctggaatagactctgctacttcaaagcagaaggccaaggagacagacatctgacaaagcatttccttgagctcttctgagaaaaacctgaacgttggatgtactatgggcattacaactatggacagagtgactactggcagaaatgaacaccatgtgagaattctgggaacaaagatctacacagaacaacaaggaactaaaggaagtcagcttgataatacaggagggagactctttttttctgaggtcattgccagatgaagcactgaagaattagcaggctttcgctccatttgctttggacagatttaaagactaggcacagccatttgtgttaattaaaatctctcgcaccttgaaaaaaaaaaaaaaaaaaaaaaaaaaa

SEQ ID NO: 115271 - DNA, 1000 bp, Homo Sapiens
aaggaccagcttagccccagagccaagtctccaggaagctgagtctcagtcttcgtccttaactgaagactcaggccaagtggcttttgaagctcagtatgaagaattcacccctcccactgtctatccttgggattgggagtaacagccttattaggtgaggtcaaacacagagctagctttcaggagccaaggccctttccaagtccaggtgttcccaaagagctgaatcaaagacagcttggccacttcccctccttgagaagaccagaagtcaacccatcccaaagacaaactgcatgaaaagggtacagcttagaccccaatgggaaggcccaccctctctttacttctaacttttcttcctgtttgaggaaacaaagactggacactctacttctaaggacgcctcccatccacctacagtactcacaacacaaaccacccgagtctggacactcacccacaaagccactgttagggatgaaaaaagtcagttgtgcccagcctaccttctctcacagggggacccaattctctgaagtctacgatggagcattttttgagaagaaactaaaccatacaaagtgttggcaacgtagggatggtggaccacagaaggctataaaggccaccatagaaagctgaagagccatttaattgaagcggaagataaattgggggaaaagctaaaatgactcaaaataggggcctgaaaatgctttaaggaccttgtcattttgactttgaatctcctgtttctgctttattgcttctcatacctgccctgcttgactgctgaagcagaaacaatcaggcacgctgacacccttatcagcatctggcatccaaagcaacatcagagagagagaacacagaagaaaagcaattgccccaggtcctccccacagtcaagggagctcttccttccagacatccttgtgtgcctcttgctagttttttagggggtctccccctcttcctgccctagctctcacca

SEQ ID NO: 115272 - DNA, 1000 bp, Homo Sapiens
tgtctggacacgcacacacatgcagatatgctgcctggacacacacttccagacacacgtgcacaggcgcagatatgctgcctggacacacgcagatatgctgtctagtcacacacacacgcagacatgctgtccggacacacacacgcatgcacagatatgctgtccggacacacacacgcacgcagatatgctgcctggacacacacacagataatgctgcctcaacactcacacacgtgcagatattgcctggacacacacatgtgcacagatatgctgtctggacatgcacacacgtgcagatatgctgtccggatacacacgcacgcacacatgcagatatgctgcctgggcacacacttccggacacacatgcacacacaggtgcagatatgctgcctggacacacgcagactgacgtgcttttgggagggtgtgccgtgaagcctgcagtacgtgtgccgtgaggctcatagttgatgagggactttccctgctccaccgtcactcccccaactctgcccgcctctgtccccgcctcagtccccgcctccatccccgcctctgtcccctggccttggcggctatttttgccacctgccttgggtgcccaggagtcccctactgctgtgggctggggttgggggcacagcagccccaagcctgagaggctggagcccatggctagtggctcatccccactgcattctccccctgacacagagaaggggccttggtatttatatttaagaaatgaagataatattaataatgatggaaggaagactgggttgcagggactgtggtctctcctggggcccgggacccgcctggtctttcagccatgctgatgaccacaccccgtccaggccagacaccaccccccaccccactgtcgtggtggccccagatctctgtaattttatgtagagtttgagctgaagccccgtatatttaatttattttgttaaacatgaaagtgcatcctttccctcca

SEQ ID NO: 115273 - DNA, 1000 bp, Homo Sapiens
aggctaagtttttcatgcatttcccagactacttatggagaattgcagtttaagttgctgaaaagtattaacatggtattaagcttaaataatacgtaatgggactagatggcccactaagccactgttattttccttcctctctggcagggcacttgatccattccaaagtcaaaaactggactgaagctaaatttgtacttttcataatatacattctgcttctggcttatcttcttggtacatcaatatattaattgtaaagtttattgtatagtatttaaccgctgaagttcctattttatgttgtgcttatgtgaaccccttggtgaaggtcccttttccttggatgtgtagttatatgatctttttaaatgtacagatattttgctataaaatcggtgcagttttttatggtttttacacttctctttaattcccacctaagcctctgggtaatattgtaaatattgttttaaaatgcatcagcctatgctatacaatctgaatgttattttaacttatagttttttttaatatatatatttaactataaggacagtttagggaacaagttacctaccacatttcactttagtgtacctatttacagaaagattaaactgccacctgcgggcacattcccataaatgtgtactttactttaaaaagaacatgccacgattttgtctttctgtggactcaacattcacttcgattaaaaatagcaatttgaccaagttggacttccactacaaagcagctgttttccaaagttcaatgctgacatatatgtatattaaaataattgcctatttattaatctacaaatagacaacgttggcatgttcttttctgtttgtctattaatgggcctgcttcttagcaatattagaatgttttataaaagcaattcatgttacttttctggtcttttcatggcatatgagcaaataataaactatttacactactattctgtaaaaaaaaaaaaaaaaaa

SEQ ID NO: 115274 - DNA, 1000 bp, Homo Sapiens
cctgtgacctgtgtggatgtcttccgtcccagcaacccctgggagctggccaagactgtttttggggccaaggaactgggcaagatggtggtggactgttgcacggatccagacgggcgggctgtggaccgggcacgggcctggtgcgagatggtcggcatccagtacttcagattgaacccccagctggggacggacatcatgctggatgaggtcagtgacacagtgctggtcaacgccctctgggagaccgaggtctacatctatgagcaccgcgaggagttccagaagctcatccagctgctgctctcaccctgagggtccccagcctctcaccggccccagctgacctcgtccattcagcccctgccaggccaagcccagccactgccctcccgggcagatctgggcccaggcacctctgagtccatagaccaggcctgggagaatgccaagctgcctgcccgaggctggtcctgaaggcctgtctcccactaaccccgccttccagcactttctgtcattccaggctgggaaagtctagagccccctttggcccctttccctgactgtcaaggacaactgactcccccatcagctcaaacattaagggtacccgggcacaaccgtacccctgcccccagccccagcctccctgagggcctgccgggctgcctctgccccagcccccagcaagggcactcccaggcttcctggtgggtgcagcccactccctctgccctctgctccgttccctgggggctgggactaaagaaatgggtgtcccccaccccatcagctgggaaagcccaggccgcaggagtgggatgcccgttggactttgcccctcacactggcccagcccctcacactgccccaccccgagaaccctcagctctcaaaggtcactcctgggagtttcttcttcccaatggaagtggcttaagagccaaaactgaaataaatcatttggattcaagttcaaaaaaaaaaaaaaaaa

SEQ ID NO: 115275 - DNA, 945 bp, Homo Sapiens
atgcgaggtttcaacaaaaccactgtggttacacagttcatcctggtgggtttctccagcctgggggagctccagctgctgctttttgtcatctttcttctcctatacttgacaatcctggtggccaatgtgaccatcatggccgttattcgcttcagctggactctccacactcccatgtatggctttctattcatcctttcattttctgagtcctgctacacttttgtcatcatccctcagctgctggtccacctgctctcagacaccaagaccatctccttcatggcctgtgccacccagctgttctttttccttggctttgcttgcaccaactgcctcctcattgctgtgatgggatatgatcgctatgtagcaatttgtcaccctctgaggtacacactcatcataaacaaaaggctggggttggagttgatttctctctcaggagccacaggtttctttattgctttggtggccaccaacctcatttgtgacatgcgtttttgtggccccaacagggttaaccactatttctgtgacatggcacctgttatcaagttagcctgcactgacacccatgtgaaagagctggctttatttagcctcagcatcctggtaattatggtgccttttctgttaattctcatatcctatggcttcatagttaacaccatcctgaagatcccctcagctgagggcaagaaggcctttgtcacctgtgcctcacatctcactgtggtctttgtccactatggctgtgcctctatcatctatctgcggcccaagtccaagtctgcctcagacaaggatcagttggtggcagtgacctacacagtggttactcccttacttaatcctcttgtctacagtctgaggaacaaagaggtaaaaactgcattgaaaagagttcttggaatgcctgtggcaaccaagatgagctaa

SEQ ID NO: 115276 - DNA, 1000 bp, Homo Sapiens
tctttatgttcaggtcgcttggtcggttcgtctcccatttgccatccaggcctcacacccacactcgagcccacccggccggccagctttagaggaggggaggagcagggcgagttcacattattccttttccatcggaagtggcgctcgtgcattcaactcgttcccgctcatggaacccctctttaaaaagacgcagggcacctgtgagcgcaggagcgagcctaaggccacccagcggcagcgcccgtgtcctgggcactcagcgtgctgggcagagcaggtgcgatggccccagtcctagcagccctcgcccatgtcctgtgcccttacatggctcccggactgtgcagggagccgatacgtttgctgatagcaatactggaaccaccgggtgcgatggcagtgaggagactgcccagtgcctttggggctgtgcttgcaataaagaatttcctggaaaggcagtctgcaaaagagggaaccggtgactcagaaagacagatgttttggtaatttaccccaaatgtgccatccacatagtgctttttcctcttgcccttcggcttgtttgaatctcacaattatgtatttaattctcaaagaaatatgtatctgtagccgtttgttgacactaatacagatgattaaggaaaacagctgatctttggggaagggagctaccaacactttatacacacacacacgtgcacacacacacacacacacactatatatatatatattatttacagggaaatttttcagggtttacaaaagagtatgtgattggtagtaagagacacacagaatgtttatgaagaaattgcattttctttttcctttacatttgaacttctttatagtttaaatataacgtcttgagatggcacattcctacgattgaagaaggggtcttgagatcccctaaacttgcatacccagttttttggatattgtaataaaaaaaagtattatgacaaaaaaaaaaaaaaaaaaa

SEQ ID NO: 115277 - DNA, 1000 bp, Homo Sapiens
cagaggtccccgggctcctcccaggcctgggccaccagatcctgcttatcggcgcaggccagtgcccatcaaacgcttcaatggagacgtcctctccccgagctatatccagagcttccgagaccggcagaccgggagctccctgagctccttcatggcctcacccacagatgcggactatgagtatgggtcccggggacctctgacagcctgctcaggccccccagtgcgggtatagccatatctgtctgtctagactctgcagtcaccagctctgccagctcgaggaggcctgctaggctgccactcagcctcctggctttggctgtccctctccccagcctggagagggctggcctggtcactagaagggaggattgtctcaggcgagtcttggcctgagaggaaagccccctcccaagctcccaagaggctcctgaggaactcggggtgtgaaccccattggggtgtgctcagggttgtgagtgtgttgcccgtgtgtctgtgtgtatgtgtgtgggggtgggcaggcttggaggggacgctgggacccttgccttagatttctgactggtagggtttctccaggctcagccccacctcttcactccctgccaaggtcccatgggccacctcctgcatgtctccgcggaggggctaccttccttcccatcgccctgcctcgcagccagactcatctaagggttcttgtccttgtctatggggcaaactgtagcatccctcaccctggtcccctggcctctgtaaagccaccagcctgagggcagtggcaggagatgggggtgggggggtgctgctctgggctgggttgggaagggagttggggaggggtttaaatgcacggtgcatgtctggtgtctgtcatgccaacctagacacctcatgcttctgtctcccccaccccactctgttttacatcttttataaatgtgccaaactgtgtggcctctgccaggaaaaaaaaaaaaaaaaaaaaaaa

SEQ ID NO: 115278 - DNA, 1000 bp, Homo Sapiens
agcagcaggccccaggcttccgcccttgagctgcgtggcttccaacgggacctgagcagcctgaggcggctggcacagagcttccggcccgccatgcggagggtgttcctacatgaggccacggcccggctgatggcgggggccagccccacacggacacaccagctcctcgaccgcagtctgaggcggcgggcaggccccggtggcaaaggaggcgcggtggcggagctggagccgcggcccacgcggcgggagcacgcggaggccttgctgctggcctcctgctacctgccccccggcttcctgtcggcgcccgggcagcgcgtgggcatgctggctgaggcggcgcgcacactcgagaagcttggcgatcgccggctgctgcacgactgtcagcagatgctcatgcgcctgggcggtgggaccactgtcacttccagctagaccccgtgtccccggcctcagcacccctgtctctagccactttggtcccgtgcagcttctgtcctgcgtcgaagctttgaaggccgaaggcagtgcaagagactctggcctccacagttcgacctgcggctgctgtgtgccttcgcggtggaaggcccgaggggcgcgatcttgaccctaagaccggcggccatgatggtgctgacctctggtggccgatcggggcactgcaggggccgagccattttggggggcccccctccttgctctgcaggcaccttagtggcttttttcctcctgtgtacagggaagagaggggtacatttccctgtgctgacggaagccaacttggctttcccggactgcaagcagggctctgccccagaggcctctctctccgtcgtgggagagagacgtgtacatagtgtaggtcagcgtgcttagcctcctgacctgaggctcctgtgctactttgccttttgcaaactttattttcatagattgagaagttttgtacagagaattaaaaatgaaattatttataatctggaaaaaa

SEQ ID NO: 115279 - DNA, 1000 bp, Homo Sapiens
cgagtatggccctcacgccgacagccctgtgctcatggtctatggcttggatcaatctaagatgaactgtgaccgagtcttcaatgtcttctgcttatatggcaatgtggagaaggtgaaattcatgaaaagcaagccgggggccgccatggtggagatggctgatggctacgctgtagaccgggccattacccacctcaacaacaacttcatgtttgggcagaagctgaatgtctgtgtctccaagcagccagccatcatgcctggtcagtcatacgggttggaagacgggtcttgcagttacaaagacttcagtgaatcccggaacaatcggttctccaccccagagcaggcagccaagaaccgcatccagcaccccagcaacgtgctgcacttcttcaacgccccgctggaggtgaccgaggagaacttctttgagatctgcgatgagctgggagtgaagcggccatcttctgtgaaagtattctcaggcaaaagtgagcgcagctcctctggactgctggagtgggaatccaagagcgatgccctggagactctgggcttcctgaaccattaccagatgaaaaacccaaatggtccatacccttacactctgaagttgtgtttctccactgctcagcacgcctcctaattaggtgcctaggaagagtcccatctgagcaggaagacatttctctttcctttatgccattttttgtttttgttatttgcaaaagatcttgtattccttttttttttttttttttttttttttaaatgctaggtttgtagaggcttacttaaccttaatggaaacgctggaaatctgcagggggagggagaggggaactgttatctcccaagattaaccttcacttttaaaaaattattgtacatgtgatttttttttttcctgttcatacatttgtgctgcccatgtactcttggcacatttcaataaaattgtttggaaaataaacacagcaaaaaaaaaaaaaaa

SEQ ID NO: 115280 - DNA, 1000 bp, Homo Sapiens
cagcggcgcgacgagatgctgcgcatgtaccacgcactgaaggaggcgctcagcatcatcggcgacatcaacacgaccaccgtcagcacgcccatgcccccgcccgtggacgactcctggctgcaggtgcagagcgtaccggccggacgcaggtcgcccacgtccagccccacgccgcagcgccgagcccccgccgtgcccccagcccggcccgggtcgcggggccctgctcctgggcctccgcctgctgggtccgccctggggggggcgccccccgtgccctccaggccgggggcttcccctgaccctttcggccctccccctcaggtgccctcgcgccccaaccgcgccccgcccggggtccccagaatcactatcagtgacccctgaggagcgtcagccatgccgatcgggtcaggcaagtccatcccgtcctgagagccccaggccccccttcgacctctaaacagatccctcctcttctcggagacctccctttccaagcctgcctggacggctgttctgtgacttgacagtggctcccccagccccaaagccagcccccttcatctgtgacttaatctgttgtagtggtgagctgatacattcaggtgtgaccgttggtgaaaacttgtgccccttctgtggtatgcccttgccctgttctataaatatctataaatactcatatatatacacacctacacatggccaaccgcctcgcctctagcgctgggaatcagtcactgtgctatccttgtggagtcttgtggcccaactaccagagaacgctgtcccccgacatcccactccaaagtgtgccacctccagtgagcctccttgtcatgcccggcctgtggacagccagcccccgccatccctcccaccccctaccaagcatgggggtgctgtgcaggcagccgtgtggcctgacagtttctaccagtcctgctgtccctcggctgagaataaaacccatttctggatgatggggaatgtc

SEQ ID NO: 115281 - DNA, 1000 bp, Homo Sapiens
gactgtcatggaagatatgcccagaatgtagcgttcttcaatgtgatgactgaagcccaccacaaatatgaccactctgaggctacaggatcctcaagctgggatatccaaaattctttcagaagagagaagctggaacaaaaatccccagattcgaagacactacaggaagattcacctggagtgagacaaagggtctatgagtgccaggagtgtggaaaatccttccggcaaaaaggtagtctaacgttacatgagagaatccacactggtcaaaagccttttgagtgcacccactgtggaaaaagcttcagggccaaaggcaatcttgttacacatcaacggatacacacgggagagaagccttatcagtgcaaggagtgtgggaaaagcttcagtcaacgaggtagtctcgctgtccacgagagactccacactggacagaaaccctacgagtgtgctatttgtcagagaagcttcaggaatcagagtaaccttgctgttcacaggagagttcacagtggtgagaagccctatagatgtgatcagtgtggaaaagccttcagtcagaaaggaagcttaattgttcacatcagagtccacacaggcctgaagccctatgcctgtacccagtgcaggaagagtttccacaccagggggaattgtattctgcatggcaaaatccacacaggagagacaccctatctgtgcggccagtgtggaaaaagcttcacccagagagggagtctggctgtgcaccagcgaagctgctcacagaggctcaccctttgaccactttcctgaagagaagttctctttatgaattaagagtacaaaatcctctgagatgaagcaacctatccagttctatggaatgaatggagaatctttcagaaagaccatcattgggtagggcaaactgatttttttcctttcccccaaaagagtatgaaaaataaatgtcttgtttattatcattatcaaaaaaaaaaaaaaaaaa

SEQ ID NO: 115282 - DNA, 1000 bp, Homo Sapiens
cctatcccagcatgccagtgggaattacaggctggagagaccttccttctgcaggagaagaaattcttgaagtagaatctgagccaagggcacgtgaagttgttgactggaggaaatatgaacaagaacaggagaaaggtcaggaggatctgaaaataatagaagaaaagcgaaaggaacacaaagaagcacatcagaaagcccgtgagaagtatggccatctactgtggaagaagagatcaattctacggtttttagaaagaaaagaacaaatacccttaaagccaaaagagaaaagggaaagagattcaaatgtactttctgtgattattaaaggtgatgttgatggttctgttgaggccattttgaacattatagatacctatgatgcttcacacgagtgtgaactagaattagtacattttggagtgggtgatgtaagtgcaaatgatgttaaccttgctgaaacatttgatggtgttatatatggctttaatgtgaatgcaggcaatgttatccaacagtcagctgcaaaaaaaggagtaaaaattaaacttcacaaaataatttaccgtcttgttgaagatttgcaagaggaactgagcagcagattaccctgtgctgtggaagagcacccagtaggtgaggcatctatactagctaccttctctgtaacagaagggaagaaaaaagttcctgtggctggctgcagagtccaaaagggacagttagaaaaacaaaaaaaatttaaactaacccgtaatggacatgtaatttggaagggctcattaacctcattgaaacaccataaagatgacatttcaattgtcaaaacgggaatggattgtggtctcagtttagatgaagacaatatggaatttcaagtgggagacagaattgtttgttatgaagaaaagcaaattcaagccaagacttcttgggatccaggattttaaaattacattaaaaatgtaaataactcaaaaaaaaaaaaaaaaaa

SEQ ID NO: 115283 - DNA, 1000 bp, Homo Sapiens
ctggtggagaaaagctgtacccactcagagaagaccaacaggaccctgagctatcggactggcttgaagatcaccagccttaccgaggttgtgtgtgggttagacttgtgcaaccagggcaactctggccgggctgtcacctattcccgaagccgttacctcgaatgcatttcctgtggctcatcagacatgagctgtgagaggggccggcaccagagcctgcagtgccgcagccctgaagaacagtgcctggatgtggtgacccactggatccaggaaggtgaagaagtcctggagcttgaaaatctgccgcagaatggccgccagtgttacagctgcaaggggaacagcacccatggatgctcctctgaagagactttcctcattgactgccgaggccccatgaatcaatgtctggtagccaccggcactcacgaaccgaaaaaccaaagctatatggtaagaggctgtgcaaccgcctcaatgtgccaacatgcccacctgggtgacgccttcagcatgaaccacattgatgtctcctgctgtactaaaagtggctgtaaccacccagacctggatgtccagtaccgcagtggggctgctcctcagcctggccctgcccatctcagcctcaccatcaccctgctaatgactgccagactgtggggaggcactctcctctggacctaaacctgaaatccccctctctgccctggctggatccgggggacccctttgcccttccctcggctcccagccctacagacttgctgtgtgacctcaggccagtgtgccgacctctctgggcctcagttttcccagctatgaaaacagctatctcacaaagttgtgtgaagcagaagagaaaagctggaggaaggccgtgggccaatgggagagctcttgttattattaatattgttgccgctgttgtgttgttgttattaattaatattcatattatttattttatacttacataaagattttgtaccagtgg

SEQ ID NO: 115284 - DNA, 1000 bp, Homo Sapiens
ctcagagaggggatggaaggaaccctggctcctattaagaatgacctttcctccccttgactcaccacccatctgttctataaattggctttttttcagcctgaatctcattaggatcctgtgtcccagggaaggagaaaggaagagaggcattttccctaaccgtgtcccagagaatggggagaggaggggcctgggcagaagcagcacccacatgagagagttccagaggtgggcgctcagcaggacaacagtgtaactgccaataccactagcaagggtcagaagcgaggagcagggagaggctgaagatgggtggcactggtagggacccccatggccctaaagcactttgggcttccctaaaatcccaaggatacctcaagatccttcagcccctagccaggcacaatgactcacacctgtaatcccagcacttcgggaggccaaggtgagcaggtcacttaaggtcaggagtttgaggccagcccaaccaacatgacgaaactccgtctctactaaatatacaaaaattagctgggtgtggtggcaggtgtcggaggtcccagctattcaacaggctgaggtgggaggattacctgagcctggagaggtcaaggctgccatgaggcgtgattgtgccactgcactccagcctgggtgacagagaccctgtctcaaataaataaaattttttaaaagatcctccaggccgggcgcagtggctcacacctgtaatcccagcactttgcgaggctgaggcaggcagatcacttgaggtcaggagttcgagaccagcctggccaacatggtgaaacccaatctctaccaaaaatacaaaaaattagctgggtgttttggcacgtgcctataatcacagctactcaggaggctgaggcaggagaatcacttgaacctgggaggcagaggttgcagtgagccgaaatcgtgccactgcactccagcctgggcggcagagcaagactccgtctcaaaaaag

SEQ ID NO: 115285 - DNA, 1000 bp, Homo Sapiens
cgcgcacacgtgtgtaaaaagcactttcgattgtgcctcctgttttctcgagtggggacactttaactacagtttacacctcgggcgcataaagtttttcttctctttctctctggttgtttctgtttctgagtggaccaacagcagaacccacgaggatttgttttgagtatggagctgttgcgggtttgctcctttttcttgctttgcgtgctcagtttttacagactgtaaaggagatgtgttgtttgtgaagatggagcagagtcaaatctgtgcttctaactgagatgagagtgtattaatcacgtatcgcagggctccagctgttttagaagccacatcatgttaaacattaactggtttggattaaaagaacattaatattataatacacatatcttagtggtaaacagctttttttttttaaggtcagattgcctcaggtttagaaagaggctgagaaatcaaatcttgaacacaatcaacttacatattttaaaggaatctgcctcaaatgagaaaatatgctagttatctagatagaggaaagagatatttacttttttaaaaattaaaatagttatgaaatctggcagaaaaggtaaagcctagaagaaactatgaaagctattctcatgttaccaaattctatctgcgcatatgtttttgtataacatttcggtgacagtgggagtcggttccctttcccaacctgcagagactatcttccaatacagaatctgtctatttatgcttgtgtttacaaactgtatttgttgggtttgggtttttgttttctttggtggcatttttcaggtcactttgcttctataacaaaggtaattgttttcaaataatttgtcttcaccttttcctgtatttgtacatagtgattcagtattagagaaaagtgcattgtttctgtcatatttccaatctgtgttggtgctcatttgagaaaataaaagttttcaaatattaactcttaaaaaaaaaa

SEQ ID NO: 115286 - DNA, 1000 bp, Homo Sapiens
atccccgcctggaggctgggacactaaccaagaagtggcacatggcatatcacgggagcaatgttgccgctgtacggagagtgctggaccgaggggagctgggagcaggtactgcctccatcctgagctgccgtcctttgaagggagaacctggggtagggttcgaggagcctggcgagaactgtgcacctcctcgggaggagcagccccctcctgtgctgctttccccctcccttcaatatgctggggcggagaccctggcctccaaagtgcaattccgggaccccaaatcccagcggacgcaccaggctcaggtggcgttccaggtgtgtgtgcgccctggctcctacaccccgggacccccttccgctgcccttggagaacctcctgaccctcacttcagtccagccgaacttgagtgggtcactaaggagaagggggccacactcctctgtgccctgctggtacgggtggaatgaggggtgagacaccactactacaagcacagtcgggccgcgggcccatggactctgagtggcgactgcctccacctcattcccgtgactcgtggcatgcgcaggtgctggagcttggcagccgcgcaggagcatgtaggcaggctctcagatgtaggtggcaagtggcacagctccatgtccggaggcccagcactccgtctgatgggaggagtcgtgggagcccagctccaggccctggtacccctcttcatgcactgatttggggaacatgactcccttttactcccctaccccacatcacttaatttatttccgtttttgtttctggttactgtgaatcccagaggagtctctccctgtgcccacatgaagctgctttttccggggccaccgggcgggagtggggaagggtgggcgcacggaagatgggggcctctgtacagttgttactgactctgatttctaaggagccaataaacaccgtctcagagaaaaaaaaaaaaaaaaaaaaaaaaaaaaaa

SEQ ID NO: 115287 - DNA, 1000 bp, Homo Sapiens
gagggtcaggagacctggggagtctcatattccaagttcttctttctttctgggagcagtgggcagttcatggtgttagggcactcacccccacagactggcaaaccctgcaggacttccgtggctgaggctgtgaccggaggccaggaatgccgttgggtggattgtgagtgaatgggccctttgagctgccctctagagagcaaatccagtttcctggagctcctgaatgaatatctgtactggctcgctcagatgcagaagctccattgaccatgaggccttgtgaacatcagtggccacaggcccagtgtgctgcttggcactgcactagtttaggacctgcagcatgtaggtagcgtcctagtgtttataatacaaagctgctctgcacagcttttctgattcttcttgcaatctcctgaggattatctgccccatttttaaaacgaggtggaatacccaaggtcatgtagccagtgagtgctctggaaagccaaagcagctcatcccttcctggggaccacactgctctgctccaccagaccacactatgaaataggaataagtgctcctgttgcaggactgctgggaaaacaggtggtgtgggacttaagtcaccataattttgaagacttgcatgcagagggctccaggaattgtagacattaaggaatttcactttcagttctacccactacttaagtacttgtcatgtactcttagaggaggccagtaatgatcagaaccattttactttaaaattaataatattgtattagagaatatattaaatggttatattgggttatgttaggatatatacttgaatggaaatacatgtactattagcaatcatatttcatttatccctgtaattagacaagaaagcataatatagctctactcatgggtacacataccagtgtataagatttttagaagtttactttttaaaaataaaagcaaaatgtaagatcttaaaaaaaaaaaaaaaaaa

SEQ ID NO: 115288 - DNA, 1000 bp, Homo Sapiens
ctgatgttttaattaaaatgtttgccacattaacttttctgatgccttaaaagtgaacttctttaaagaacctttgtgctattttatcacaggcttacactacaattgttaataaatacttcatttggagatgtatggtgtaaaacacacaaacacacacaaaaaagcacaagcccgctgcatgacccgtctctcctttctgggactatttctgctgcgtcctgcaccctcctgggcccacctccgattcacagaggtttcagggggacccaaatcactgctggttttcaatttttttttaacaatacatttttgtggtcagttccaacagcactgtccgtacttttaaaactggaatgacctccttcagatatcgtgcctcttagtgccaaacccacagtgagaccaaaagtgtcaggtgtttttttttttttctttctcctttgcactaagtgctttgcagacacggcacagcaaacattttgcaaactgcagcagaaatcgaatttaaaacaaaaaggagggactttaaaataccttcttgacaaaaatcaacaatgcacaacttacaaagtgttcattctagggacaaaattaaataaacagaatgtccccaggagtcagcaggtcacagtctggctttgtgatggttgacaaggtctagctacatgggaaagcctgagaagtcactttggaactaaattgcctccattttattttgtacgagtaagggtttgatctacaaaagagctcacatggacgcactgagaacgcctgccagcttccccatgccctcacttggtttgtgttttaggttaagtagtcaatgcccacatcacttcactgtctcaagactgagcacttcactaaatggtagattttactgttaaagaccctacaataagattgttttatctgtacattttttcagatatttaactgtataaaaatgttcattttacacaatatttaattaaagtatttcttgtctgtgaatttc

SEQ ID NO: 115289 - DNA, 1000 bp, Homo Sapiens
aagcagatgacagaggtttgaaggagaatggcatggcaggagtctctgccagttacttgggcttcaacagccaagctggcacaaaagacagctggcggaggctgctcggctactggttacctggagaagtagtatttgcctatttcccccttcatccatcctgagccaaatttcttttgctgaacaggaaagagctaggaaccctggaggtaaacaaagactttgatccatgtatgagtgtatgtgtttatgtaacttcctgtggatgcaaatagattcagagaaatttagagctaaaaaggcccttagagggaatctagcccaacctacattccaccctgttacttatgtagaaactgaggcccagagagggaagatgacctgccccaagtggtgagcaagcaccaacctccagactcagcagagtgagggggtaaagcagttcctgtcccacatggccatcttctttcttccacccacaaactccaggctggaagtacttggcccccttcaggagcctggccaggcagggagagagtagctgcagccttcatcagaactcttcctcctcccaaggcattctcccagctctagcctctggactggaaagcacaagactggcccagtgccagcaagtccttaggctactgtaatgctgcctcaggacccatccctgcctggaggctcctctaggccctgtgagcacaaagaagaaagctgatttttgtcttttaatccatttcaggactctctccaggagggctcggggtgtgtcatttctatattcctccagctgggattggggggtgggctttgttgtgagaatggcctggagcaggcccaatgctgcttttgggggtcagcatccagtgtgagatactgtgtatataaactatatataatgtatataaactgggatgtaagtttgtgtaaattaatggtttattctttgcaaataaaacgctttccccgtctgttcttgaaaaaaaaaaaaaaaaaa

SEQ ID NO: 115290 - DNA, 938 bp, Homo Sapiens
attccctcggcgggccgagcctcccctctctcccgcccctcctcctccctttcccacccctcggagtagagctgcacatgcggctgctccctgctccgtcccgcccagccactgtcgcgcaggaacgggtccctgcagcccccagccgatggcaggacagtagccgcctgtcagaggtcgtgaacggctgaggcagacgcagcggctcccgggcctcaagagagtgggtgtctccggaggccatgggctacccggaggtggagcgcagggaactcctgcctgcagcagcgccgcgggagcgagggagccagggctgcgggtgtggcggggcccctgcccgggcgggcgaagggaacagctgcctgctcttcctgggtttctttggcctctcgctggccctccacctgctgacgttgtgctgctacctagagttgcgctcggagttgcggcgggaacgtggagccgagtcccgccttggcggctcgggcacccctggcacctctggcaccctaagcagcctcggtggcctcgaccctgacagccccatcaccagtcaccttgggcagccgtcacctaagcagcagccattggaaccgggagaagccgcactccactctgactcccaggacgggcaccaggactttgactacatcatttcattctcttatggcctacaaggtttctgctgagaaatccactgatattctaatggatattcctttggacaccaatgagttgtgtcttccctctgtccactctcagcaccttcactctgaagatctgttaaaagcacacgagtcgtctcagtccctcagtgggagctgtttcacctggcgtcatctagtcagccatcttcaataataactgttaaatgaacatttatatccactgaaaccactaagtgaaataaagatgtgtttaggcaaaaaaaaaaaaaa

SEQ ID NO: 115291 - DNA, 1000 bp, Homo Sapiens
ctgcccagacctcggtggtggtggaagacctcctgcccaaccactcctacgtgttccgcgtgcgggcccagagccaggaaggctggggccgagagcgtgagggtgtcatcaccattgaatcccaggtgcacccgcagagcccactgtgtcccctgccaggctccgccttcactttgagcactcccagtgccccaggcccgctggtgttcactgccctgagcccagactcgctgcagctgagctgggagcggccacggaggcccaatggggatatcgtcggctacctggtgacctgtgagatggcccaaggaggagggccagccaccgcattccgggtggatggagacagccccgagagccggctgaccgtgccgggcctcagcgagaacgtgccctacaagttcaaggtgcaggccaggaccactgagggcttcgggccagagcgcgagggcatcatcaccatagagtcccaggatggaggacccttcccgcagctgggcagccgtgccgggctcttccagcacccgctgcaaagcgagtacagcagcatcaccaccacccacaccagcgccaccgagcccttcctagtggatgggctgaccctgggggcccagcacctggaggcaggcggctccctcacccggcatgtgacccaggagtttgtgagccggacactgaccaccagcggaacccttagcacccacatggaccaacagttcttccaaacttgaccgcaccctgccccacccccgccacgtcccactaggcgtcctcccgactcctctcccggagcctcctcagctactccatccttgcacccctgggggcccagcccacccgcatgcacagagcaggggctaggtgtctcctgggaggcatgaagggggcaaggtccgtcctctgtgggcccaaacctatttgtaaccaaagagctgggagcagcacaaggacccagcctttgttctgcacttaataaatggttttgctactgctaaaaaaa

SEQ ID NO: 115292 - DNA, 1000 bp, Homo Sapiens
tttttcaggccattcacctgcctcctgtcagtagtggcctgtattagagatcaagaagagtggtttgtgctcaggctggggaacagagaggcacgctatgctgccagaattcccaggagggcatatcagcaactgcccagcagagctatattttgggggagaagttgagcttccattttgagtaacagaataaatattatatatatcaaaagccaaaatctttatttttatgcatttagaatattttaaatagttctcagatattaagaagttgtatgagttgtaagtaatcttgccaaaggtaaaggggctagttgtaagaaattgtacataagattgatttatcattgatgcctactgaaataaaaagaggaaaggctggaagctgcagacaggatccctagcttgttttctgtcagtcattcattgtaagtagcacattgcaacaacaatcatgcttatgaccaatacagtcactaggttgtagttttttttaaataaaggaaaagcagtattgtcctggttttaaacctatgatggaattctaatgtcattattttaatggaatcaatcgaaatatgctctatagagaatatatcttttatatattgctgcagtttccttatgttaatcctttaacactaaggtaacatgacataatcataccatagaagggaacacaggttaccatattggtttgtaatatgggtcttggtgggttttgttttatcctttaaattttgttcccatgagttttgtggggatggggattctggttttattagctttgtgtgtgtcctcttcccccaaacccccttttggtgagaacatccccttgacagttgcagcctcttgacctcggataacaataagagagctcatctcatttttacttttgaacgttggccttacaatcaaatgtaagttatatatatttgtactgatgaaaatttataatctgctttaacaaaaataaatgttcatggtagaagcttttaaa

SEQ ID NO: 115293 - DNA, 1000 bp, Homo Sapiens; identical to SEQ ID NO: 115292

SEQ ID NO: 115294 - DNA, 1000 bp, Homo Sapiens
taaataattatttttttaaatcagttgtaggttcacagcaaaagtggacaaaaagaaatttctcatatatcccctgccctcacacatgcatagcctcccaccactatcagtatcccacaccagagtggtacatttgttacaatcaataaacctccattgacacatcattatcacccaaagtccatagtttacatgaagattcactctggtgttgtacattgtatgggcttagacaaatgtatgatgatatctacaattatagaatcatacagaatagtttcactgccctaaaacttctctatgcttcacctgttcatccctttcttccctaatcccctggcaaccactttaaaaaaaaaattaggttcagggggtacatgtgcaggtaaactcgtgacaagggggtttgttatacagattatttagtgacccaggtactaagcctagtacccaatagttacttttctggtcctgtcccttttcccaccctccaccctcaggtaggccccagtatgttattcctttgtgtccatgttatttcactcccacttgtgagaacatggaatatttggtttcctgttcctatgttagtttgttaaggataatggcctccagccccatccatgttcctgcaaaggacatgatctttctttggcaaccactttttactgtcgccatagttcttccttttctagaatgtcatattggaatcatatagtatgtagccttttcagactggcttctttcacttaataatatgcaattaaggttcctccatgtcatttcatggcttaatagtgcatttatttttagcactgaataatactccattgtctagatgaatagtttatccattcacctattgaaagacttcttggtggtttccaagttttggcaattatgaataaagctgttgtaaacatctttgtgcaggtttttctatgggcatgtttttaattcatttgaataaataccaagagcttcagtgctggatcataaa

SEQ ID NO: 115295 - DNA, 1000 bp, Homo Sapiens
gatgtcatattattttgaaagtacaaaatatactaaaagagtgtgtgtgtattcacgcagttactcgcttccatttttatgacctttcaactataggtaataactcttagagaaattaatttaatattagaatttctattatgaatcatgtgaaagcatgacattcgttcacaatagcactattttaaataaattataagctttaaggtacgaagtatttaatagatctaatcaaatatgttgattcatggctataataaagcaggagcaattataaaatcttcaatcaattgaacttttacaaaaccacttgagaatttcatgagcactttaaaatctgaactttcaaagcttgctattaaatcatttagaatgtttacatttactaaggtgtgctgggtcatgtaaaatattagacactaatattttcatagaaattaggctggagaaagaaggaagaaatggttttcttaaatacctacaaaaaagttactgtggtatctatgagttatcatcttagctgtgttaaaaatgaatttttactatggcagatatggtatggatcgtaaaattttaagcactaaaaattttttcataacctttcataataaagtttaataataggtttattaactgaatttcattagttttttaaaagtgtttttggtttgtgtatatatacatatacaaatacaacatttacaataaataaaatacttgaaattctcttttgtgtctcctagtagcttcctactcaactatttataatctcattaattaaaaagttataattttagataaaaattctagtcaaatttttacagatattatctcactaattttcagacttttgccaaagtgtgcacaatggctttttgttaataaagaacagattagttttgaagaaggcaaaaatttcagttttctgaagacagcatgttattttaacaatcaagtatacatattaaaaattgtgagcaatctcaaaaaaaaaaaaaaa

SEQ ID NO: 115296 - DNA, 1000 bp, Homo Sapiens
ccccctgacctgcagcccccagcctgaatatgtgaaccagccagatgttcggccccagcccccttcgccccgagagggccctctgcctgctgcccgacctgctggtgccactctggaaaggcccaagactctctccccagggaagaatggggtcgtcaaagacgtttttgcctttgggggtgccgtggagaaccccgagtacttgacaccccagggaggagctgcccctcagccccaccctcctcctgccttcagcccagccttcgacaacctctattactgggaccaggacccaccagagcggggggctccacccagcaccttcaaagggacacctacggcagagaacccagagtacctgggtctggacgtgccagtgtgaaccagaaggccaagtccgcagaagccctgatgtgtcctcagggagcagggaaggcctgacttctgctggcatcaagaggtgggagggccctccgaccacttccaggggaacctgccatgccaggaacctgtcctaaggaaccttccttcctgcttgagttcccagatggctggaaggggtccagcctcgttggaagaggaacagcactggggagtctttgtggattctgaggccctgcccaatgagactctagggtccagtggatgccacagcccagcttggccctttccttccagatcctgggtactgaaagccttagggaagctggcctgagaggggaagcggccctaagggagtgtctaagaacaaaagcgacccattcagagactgtccctgaaacctagtactgccccccatgaggaaggaacagcaatggtgtcagtatccaggctttgtacagagtgcttttctgtttagtttttactttttttgttttgtttttttaaagatgaaataaagacccagggggagaatgggtgttgtatggggaggcaagtgtggggggtccttctccacacccactttgtccatttgcaaatatattttggaaaacagcta

SEQ ID NO: 115297 - DNA, 1000 bp, Homo Sapiens
ccttcagggccatggatgtggagccccgcgccaaaggcgtccttctggagccctttgtccaccaggtcggggggcactcatgcgtgctccgcttcaatgagacaaccctgtgcaagcccctggtcccaagggaacatcagttctacgagaccctccctgctgagatgcgcaaattcactccccagtacaaaggacaaagccaaaggccccttgttagctggccatccctgccccattttttcccctggtcctttcccctgtggccacagggaagtgtggcctgaataccccaccccggctcctctgcacccagagctgggggccacctcagaagtgtcatctctctctgagcacgcattcccctgcagcagtcgaggactgagcagattgagtgatgctggggcagagaggcctgggaggaaaggtgttcagccagtcgtttgtaaggcgctcgtcggcacctgctgaaacgcccccacctgacagccccatcctcaaagactgtcttaattactcatggcaggttctagagacttaaggggaaaagctgctttcaaggccaccacatgtctgtgctccccaaccagctctatctgccttgtgttcattttgttattttgtgacgtgagactgcaaagaccaataaaaacatattttataagaacaaaaggcctgggtgcctacccgtgtgggggcactgtgggaagcctttgctagggtgtcttgtgctgtgtggtttgttttgtttgcccctttattttgctttgcttacccagtcttcccttactcttggatgcttcttaaccctcaggcaaacctgtgttccccctgtattcaggctctgctttaaagcaagccatgaggctgttggagtttctgtttagggcattaaaaattcccgcaaactataaagagcaatgttttcagtcttttaggattagaagaattacataaaaattaataaacattttcaatgatggaaaaaaaaaaaaaaaaaaaa

SEQ ID NO: 115298 - DNA, 1000 bp, Homo Sapiens
acagcctccctgagcctgcattctgcacgctgcccaggggcttcagaaaaggagtggccacagcaccccgaagggagcatctgtttacctggcagtggctctcagagcagcagaacgggttcagttttagactctgaagttggttgtgattgacagaaccctttgggagcaaactagtagagttggattaaattctgggtgaaacccttttctcccacacaaaatagttttagtgatttttttcattgtccattacttgccaggggcagttttagcagcacttttgatagattacgtctaatcctcccaaccaaccagcagggtagctattactgtccacattttacaggcaaggaaacaggctccaagaggctgaggactttgcccaggatgacatagccaatggacaagcagtgtctgtcagctgtgaaggcttcactcttattgtccttctaccttgaatagaagttttcctgataagaataaacgaggaaaaggtccttgcctcctggaagaacaaatctaccaggtgatctattcattgtttcaactcagaatgcacttgattcaggaggtcatctgaccttcaccttggatggttagtttcactttttacatatagtttttgcagggttttattttataaaatccaagcgcgctgttgattgtgttttccttgttttcagcccccccactccagcccgcagcacatttccgctgtccgtcagtaattgtgtcctctctttatgcttgcttggggaatgttgttttctgactaggctgatcattatctaaagaatctaattctgttgatttttaaaacttttaggaccataaacgttgtgttcatatatggacatggaaatatttatataattttatagaaaataaccttttagatggtcaaagtgtaaggagtttttttgtcagataatcatttctacttcaaaaacatttcatgcaatattagaataaagttcctgtcattcctctaaaaaaa

SEQ ID NO: 115299 - DNA, 1000 bp, Homo Sapiens
atgctgagaggggaaacagtccagagtccaacagcagaacttgggggaagcggtcggggtggccaggaacataaactatgtataggggccgggggcttctgcccagggctcccctggaccaggacgccaggtagggcagggaacctcagtagtcctccacccagccattctcagagatgaatgcgtcaataacctccttcatagccaagttggggatgagctgttcctgggtcagggggctccgggtcacggggtcaaaatgacccacacgctgcagtgacaagaagggcagagggcagtcatggggcccaggaccatgccactggccctgctcccccagccgcaggcctcacctgcaggtgctcctcgatgtccttgcggtcgtaggtgatgccactgggcgtgatgcacggctcccgcatcagctcaaagctgatcttgccacacaggtagtcggggatgtctcgcttctgtggcacaggggcacacggtcagaggctgaaaaggggcactgcacgagcacctgccagccatcggcagcaagcgacacacactcaccttcctcttctcatccacctgagaaaaaagctcgtccatgtccgccatgtacttgtcctgtgaagagttgagtgctgtgcttgggggagacaccccacctccctcctccatggggcacagacccaacacaaggcggggatgctcccacgccacgtgcacacacacagacccacatgtgggtggggggcaccctcacgtgcttggcctcaatgcaggcctgctgggcccggacgtggctgtcgtcctcatcaccctcgtggtttcgctggcactcttccagctccctgggggttgaccaggagccggtcagagatggacctggccagatgtctgaccacaccccaatctcagagctaacatccacacttccccacatttcctgcttgccagtaaagccttcgataaacgctaaaaaaaaaaaaaaaaaaaaaaaaaaaaaaaa

SEQ ID NO: 115300 - DNA, 930 bp, Homo Sapiens
aagttctcgcgcgactcccacttccgcccttttggctctctgaccagcaccatggcggttggcaagaacaagcgccttacgaaaggcggcaaaaagggagccaagaagaaagtggttgatccattttctaagaaagattggtatgatgtgaaagcacctgctatgttcaatataagaaatattggaaagacgctcgtcaccaggacccaaggaaccaaaattgcatctgatggtctcaagggtcgtgtgtttgaagtgagtcttgctgatttgcagaatgatgaagttgcatttagaaaattcaagctgattactgaagatgttcagggtaaaaactgcctgactaacttccatggcatggatcttacccgtgacaaaatgtgttccatggtcaaaaaatggcagacaatgattgaagctcacgttgatgtcaagactaccgatggttacttgcttcgtctgttctgtgttggttttactaaaaaacgcaacaatcagatacggaagacctcttatgctcagcaccaacaggtccgccaaatccggaagaagatgatggaaatcatgacccgagaggtgcagacaaatgacttgaaagaagtggtcaataaattgattccagacagcattggaaaagacatagaaaaggcttgccaatctatttatcctctccatgatgtcttcgttagaaaagtaaaaatgctgaagaagcccaagtttgaattgggaaagctcatggagcttcatggtgaaggcagtagttctggaaaagccactggggacgagacaggtgctaaagttgaacgagctgatggatatgaaccaccagtccaagaatctgtttaaagttcagacttcaaatagtggcaaataaaaagtgctatttgtgatggtttgcttctgaaaaaaaaaaaaaaaaaaaaaaaaaaa

SEQ ID NO: 115301 - DNA, 1000 bp, Homo Sapiens
ggtaagacatagggtctggaactgtttgggaccttttggggatgtcctgtgcctcccagattcctcgattctgggaggagaggctgccgcattctgctgctcctcacagcgagcaaagctgcacccacttacattcagtattttcctggcactacaaagagtgggaaggcctgggatttgctgctgctcccttagagcagggcccctcttttcagcactttggacacctggagacccagccctgttatttaatggtagtgggcaagtgtgtgtgcatactgtctgccactgctttctccctgccccatgccagagagccctgtccctgccaggcccagccttcttagccccaacttgggaacaaagtgcaacatgggatcatgggttggggtgctcaggtgagccctctctatagtgcttccctgggccaagctgacaccagcccctgagggtggggtgggacgggtggtgcttaaaagaggaaggggaccagtgtagcaacttgccagggaccccacccctccctctctgggcctgtgcagtgagcatggggattcccatcaaggggcctggcacctgtgctagttacgtagccgctgctcacgcgctcactcctgaccacatgcacgttccctagatgcagactgctttgaactttaaagctgtacaatttggttatgtttgtgctgacttaaaatatattttaatgaggaaaaaataatggagaaccctgggaaggacctggttcttttgcttctcggggaactgtaagccctcgcgttctgggaatcgctctctgctgctctttcctggaagctaagcctgtctccaccgcccgaggcctgcgccggtggctcccgccgcagttgcgtttgctttggaccttgcgtgcgggggagggggtgctcggtccgagcccgctcctttctgtacacctagcgctgcccgccccgcttgtgtctgaggtcgtgtatgtcaaaaataaagccgctagaaacgg

SEQ ID NO: 115302 - DNA, 1000 bp, Homo Sapiens
actgcaagaaatgcctttgaagaaaatgattttatggaaaacactaacatgccagaaggaaccatctctgaaaacacaaactacaatcatcctcatgaggcagattccgctgggactgcattcaacttagggccaactgttaaacaaactgagacaaaatgggaatacaacaacgtgggcactgacctgtcccccgagcccaaaagcttcaattacccattgctctcgtccccaggtgatcagtttgaaattcagctaacccagcagctacagtcccttatccccaacaacaatgtgagaaggctcattgctcatgttatccggaccttgaagatggactgctctggggcccatgtgcaagtgacctgtgccaagctcatctccaggacaggccacctgatgaagcttctcagtgggcagcaggaagtaaaggcatccaagatagaatgggatacggaccaatggaagattgagaactacattaatgagagcacagaagcccagagtgaacagaaagagaagtcgcttgagctcaaaaaagaagttccaggatatggctatactgacaaactcatcttggcattaattgttactggaatactaacgattttgattatacttttctgcctcattgtgatatgttgtcaccgaaggtcattacaagaagatgaagaaggattctcaaggggcattttcagatttctgccacggaggggatgctcttcgcgaagggagagtcaggatggactttcctcatttggacagccgctctggtttaaagatatgtacaaacctctcagtgccacaagaataaataatcatgcatggaagctgcacaagaagtcatctaatgaggacaagatcctcaacagggaccctggggacagcgaagccccaacggaggaggaggagagtgaagccctgccataggaggagaacacagcccacctcaggcctcctgcaaaaatacatagaataaacaacaacagttactaaatcc

SEQ ID NO: 115303 - DNA, 1000 bp, Homo Sapiens
aaggcacccatctgtctgccaacctaaaactctttcggtaggtggaagctagacacatgaaggtaaataaaaagaaaggctgttaaatacaggaaacagttgcatgtagtaacactaatatatttaaaaataagtcaacagtaaaccactgaaaaaatatatgtatatacacccaagatgggcatcttttgtattaagaaaggaagcattgtaaaataattctgagttttgtgtttgttgtagattgattgtattgttgaaaaagtttgtttttgcgtgggagtgtgtgcctgcgtgggtgtgtgcgtgtttgggtttttttcctttaactgacaagccatcttgagtggtcatgggccactgcttttccctttgtgagtcaatacatagtgctgctgtgtgctttttttgtgtgtatttgctaatttttattaattttagtttttcattaaataaatttgacttttctgtaattcaggtttttcctttttttgtaccattttaaagttagtatcttttgatatgcatatttgtttatggtaaaaaatttataacgtgttcaatattttcttttcccccattaatcagttcattagaaatattttaaaatcagctattttgtgaagccatgagttccagaaagtaaaggtgacatcggaaaaataatcaaaagctatttaaagcatctataaggtgctctctttctgtcttctacagatgagtcacacctttgagcttaatctttgaaaggttagagaataaattgatttttataaatactgcaaatcaggcttttgtttcctttttcagatatcttggacaaatcacatattttaaaatttgttcttgtatttattggttttgcagaagaaggcatcgtcatgcacagtatttgtaattaaaagcaaatcatttgtttaaaaaggcagtttgcaaaaaatgtttttggtcttttataattctcattaaaagaatatctggcaaattaaaaaaaaaaaaa

SEQ ID NO: 115304 - DNA, 1000 bp, Homo Sapiens
aacatcaccatggctacagaaattggttctcctcctcgttttttccatatgccaaggttccagcaccaggcacctcgacagctgttttataagcgacctgattttgcacaacagcaagcaatgcaacagcttacttttgatggaaaacgaatgagaaaagctgtgaaccgaaaaaccatagactacaatccatctgtaattaagtatttggagaacagaatatggcaaagagaccagagagatatgcgggcaattcagcctgatgcaggttattacaatgatctggtcccacctataggaatgttgaataatcctatgaatgcagtaacaacaaaatttgttcggacatcaacaaataaagtaaagtgtcctgtatttgttgttaggtggactccagaaggaagacgcttggtcactggagcttctagtggggagtttaccctgtggaatggactcactttcaattttgaaacaatattacaggctcacgacagcccagtgagggccatgacgtggtcacataatgacatgtggatgttgacagcagaccacggaggatatgtgaaatattggcagtcgaacatgaacaacgtcaagatgttccaggcacataaggaggcgattagagaggccaggtttatacacaatataccattttctgtagtccctattgtcatggttaaattattctctaagtgtattctgggtgcagagatgcatgggctctgtcagtttctgggaaactttctgcaccctataaacacaatatttttctttgttttcacacattcaccattttgctggcacctttctgaagtagtgttgtcccggtatcagcctttgcaatatgttagagatgtactgtctgccgcattttgcactggttttctcttttcatttatgattaataatgtgtatacgttattcctttttattatctactgtgtaagacaagaatatttcattccaaataaagaattcagtctttaattatgaaaaa

SEQ ID NO: 115305 - DNA, 1000 bp, Homo Sapiens
caagcttccccaaagccagctgtcccaccaggacctacagcttgtgaagggagccatggctgccacgtactccgcactcaacagctccaagcccaccccccagctgaagcccatcgagtcatccatcctggcccagcggcgagtgaggaagttgccatccaccaccctgtgaggcaccagggcattcgggccacagggcggtgctagcttgacacagtcagcatgcttcccagagggagcaggccggaaccacagggccagagggagctggaacccgaggggccggggaagctgccagcccagaacacccctaatgagggtgtgagaagtgccttctccttccccaggatggactcttctcggctcaggctctgctggtggaaagcgattcactgtataaacttttttttatgaaaaaaatggcatcaaccaccatggatttttacaagatccatttgcctttctgggagcagaaacagccattgcggccccaggaggggaactgagtcacgctggggctctctgagactctttagagcagctttgggatcccaccctggggacccccacgattggccacctgtagccatctgcacacacctccgagacagtccagtgtcacctctctcagagcatctggctgtttagcagaactcattctatccccaatcagctccttttccgttctgttctgctgggagttctagaaccacttcctgctacaggaggggtctcatgtcctgctggcttccagcttcaggcaccagcatccaccttggctctgccagtggatcccctgcggtcaggctgggcagccccagagagaggatgtggaaagcactttttggctgacttcatctggggttggcaacaggacagagttcacaggaggccagtgggcgggccatgagggacagggtcttttttcatttcttcctcagctggttactcagggttcatctgtccatggcctttctaataaactgttgagttgaagcac

SEQ ID NO: 115306 - DNA, 977 bp, Homo Sapiens
gggcggagcagctgaaaatccggcgcgcgcagtctccagccccaatttctacgcgcaccggaagacggaggtcctctttccttgcctaacgcagccatggctcgtggtcccaagaagcatctgaagcgggtggcagctccaaagcattggatgctggataaattgaccggtgtgtttgctcctcgtccatccaccggtccccacaagttgagagagtgtctccccctcatcattttcctgaggaacagacttaagtatgccctgacaggagatgaagtaaagaagatttgcatgcagcggttcattaaaatcgatggcaaggtccgaactgatataacctaccctgctggattcatggatgtcatcagcattgacaagacgggagagaatttccgtctgatctatgacaccaagggtcgctttgctgtacatcgtattacacctgaggaggccaagtacaagttgtgcaaagtgagaaagatctttgtgggcacaaaaggaatccctcatctggtgactcatgatgcccgcaccatccgctaccccgatcccctcatcaaggtgaatgataccattcagattgatttggagactggcaagattactgatttcatcaagttcgacactggtaacctgtgtatggtgactggaggtgctaacctaggaagaattggtgtgatcaccaacagagagaggcaccctggatcttttgacgtggttcacgtgaaagatgccaatggcaacagctttgccactcgactttccaacatttttgttattggcaagggcaacaaaccatggatttctcttccccgaggaaagggtatccgcctcaccattgctgaagagagagacaaaagactggcggccaaacagagcagtgggtgaaatgggtccctgggtgacatgtcagatctttgtacgtaattaaaaatattgtggcaggattaatagcaaaaaaaaaaaaaaaaaaaaaa

SEQ ID NO: 115307 - DNA, 1000 bp, Homo Sapiens
ccaatctgggaagatttgaaaacaaacttctcgcaactgaaggaaggctgaaggctgctgcaagtcattgagtgactttaggatgagcaaaacattgggccacttcctaatgccctatgtgtatagtaccagaagcaaggtctcagacttaacagacccagctctgttccaaggtgagtctgaaccaatagaaagcaaacatgtgcagatatccaaacaagactgctcatgcaagtcggggctggctacccgtcttaggcagcaacagcagagctccagggagcttattcaatatttactgagacttcgaagacccagcagatgtttaatgaagtcactattttggctcaaaccctccacttctccccctcccctcaaaaagccaacaggtaaacacataaatgaaagaaacccacagaaggggatgggaaataaagaaaattctctcaagacttctccaggcccatgtcactggtcagcgtggtttttatgtgtattaggattgggggatgtgaagaaataagtatccagtactttataaccaaagcaattaaatgatattgggtagggaatgttggccagttttgtttagttttgcatcacattgtcaccagactcactagcccaagtaatcgggcgcccgaagagggagacagagatgtgcagagttgaccagtgtgcggatgataactactgacgaaagagtcatcgactcagttagtggttggatgtagtcacattagtttgcctctccccatctttgtctccctggcaaggagaatatgcgggacatgatgctaagagtcctgggtaaatgtggtgagaatgcacgcgtgcatatgctacacatatgtgcttctcagttgcagaaaatgaactgctttgggagattatcagtagaaagagtgttatcatattggtgctgagtgctatgtgtgcttatacaatttgttcttgtattttaataaactttgaataaaagaataaagctaaaaaaaaa

SEQ ID NO: 115308 - DNA, 1000 bp, Homo Sapiens
agttcttccaaggaagttaaaaggcttggtatggatgttggtgtcagataggtctgactaacctctccgtgctgcagcctatactaaggtgacccagggccacatgtagacagctaggccagtgctttttcctcttagggtttctttgcagaaagaaacctccagcaagggaagagaggtgtgtgtccacaggaaggggctccgtggggatcccatgaagggatttgagctctttcagctccatgtcatttaacttttttgtttaaccaccttggctttctctccttttttgctgtcctccttacggaccagttaccagattcagaggctaacagttagttacttgttaatgctagtcacagccaggaggtcagaaggaattttctacttctggatccaaatgttacctcttaggggaagttatgccccctcaactattgtcttattataatgaatctttcctttttggtccttttaagtaaccactcaaaacttttcatttcactgaaaaaatatgaaaaaccatgacaatagggctgggtgcagtggctcacgcctgtaatcttagcactttgggagaccaaggcaggcggatcgtttgaggccaggagtttgagaccagcctgggcaatgtagcaagactctgtctctgcaaaaaaaattaaaagatacctgagagctcactttaatatcaaggtatttgcatccattcccaccctgttagctcttaagggaggagggaaatcaattccaaccatactttcctgtgatggaagatgtttcctcttgaaaaaatgccaatacagatttttaaaacctattgttttccaaatgcactttgtaagtttttgcttttaaaatagcttcttggaaccaattttattgtatttgtacttaatttttgttctcatctaaatgtgcattttctgactgtatagaagaagctttggtatgtaatttaataataaattagaaatctaaatgaaaaaaaaaaaaaaaa

SEQ ID NO: 115309 - DNA, 1000 bp, Homo Sapiens
tgctcaatgtgactccccatcaccaccagcactcccacatccactcgcacctgcacctgcaccagcaagatgctatccatgcagcctctgcctcggtgcaccctctcattgaccccctggcctcagggtctcaccttacccggatcccctacccagctggaactctccctaaccccctgcttcctcaccctctgcacgagaacgaagttcttcgtcaccagctctttgctgccccttaccgggacctgccggcctccctttctgccccgatgtcagcagctcatcagctgcaggccatgcacgcacagtcagctgagctgcagcgcttggcgctggaacagcagcagtggctgcatgcccatcacccgctgcacagtgtgccgctgcctgcccaggaggactactacagtcacctgaagaaggaaagcgacaagccactgtagaacctgcgatcaagagagcaccatggctcctacattggaccttggagcacccccaccctccccccaccgtgcccttggcctgccacccagagccaagagggtgctgctcagttgcagggcctccgcagctggacagagagtgggggagggagggacagacagaaggccaaggcccgatgtggtgtgcagaggtggggaggtggcgaggatggggacagaaagcgcacagaatcttggaccaggtctctcttccttgtcccccctgcttttctcctcccccatgcccaacccctgtggccgccgcccctcccctgccccgttggtgtgattatttcatctgttagatgtggctgttttgcgtagcatcgtgtgccacccctgcccctccccgatccctgtgtgcgcgccccctctgcaatgtatgccccttgccccttccccacactaataatttatatatataaatatctatatgacgctcttaaaaaaacatcccaaccaaaaccaaccaaacaaaaacatcctcacaactccccaggaaaaaaaaaaaaaaaaaa

SEQ ID NO: 115310 - DNA, 1000 bp, Homo Sapiens
cattatggctgggaatcttactctttcatctgataccttgttcagatttcaaaatagttgtagccttatcctggttttacagatgtgaaactttcaagagatttactgactttcctagaatagtttctctactggaaacctgatgcttttataagccattgtgattaggatgactgttacaggcttagctttgtgtgaaaaccagtcacctttctcctaggtaatgagtagtgctgttcatattactttagttctatagcatacttgcatctttaacatgctatcatagtacatttagaatgattgcctttgattttttttttaaattctgtgtgtgtgtgtgtaaaatgccaattaagaacactggtttcattccatgtaagcattaaacagtgtatgtaggtttcaagagattgtgatgattcttaaattttaactaccttcacttaatatgcttgaactgtcgccttaactatgttaagcatctagactaaaagccaaaatataattattgctgcctttctaaaaacccaaaatgtagttctctattaacctgaaatgtacactagcccagaacagtttaatggtacttactgagctatagcatagctgcttagttgtttttgagattttttagtcaacacataatggaaacttctttcttctaaaagttgccagtgccacttttaagaagtgaatcactatatgtgatgtaaaagttattacactaaacaggataaacttttgactccccttttgttcatttgtggattaagtggtataatacttaattttggcatttgactcttaagattatgtaacctagctactttgggatggtcttagaatatttttctgataacttgttccttttcctgactcctccttgcaaacaaaatgatagttgacactttatcctgatttttttcttctttttggtttatgtctattctaattaaatatgtataaataaagttacattttagtctgtctaaaaaaa

SEQ ID NO: 115311 - DNA, 1000 bp, Homo Sapiens
cagctatcctgagcaaaaggaatcaaactggaggaatcatattacctgacttccaattattcaacagagctacagtaaccaaaacagcatgatactggcataacaacagacacataggaacagtatagacaacccagaaacaaattcatacatctatggtgaccacttttgacaaaggaatgaagaacatacactggggaaaagataatgtctttaataaatggtgctgggaaaactggatatccatatgcagaagaatgaaactagacccccatctcttagcatatacaaaaatcaaaattaattaaaaagttaaatctaagacctcaaactatgaaacagctaaaagaaaacatcggggaatctctccaggacattggagtgggcaaagatttcttgtgtaatacctgacaaacaggcaaccaaagcaaaagtggacaaatgggatcacatcaagttaaaaatcttctgcattgcaaaggaaataacaaagtgaagagacaacccatagaatgtgagataatatttgcaaactatccatctgtattaggccatttttgaagtactacaaagaaatacttgagactgagtaatttataaagaagaggtttaattggctcacggttttgcaggctgtacaggaagcatggtgctaacatctgatcagcttgtagggaggcatcaggaagtttccaaccatggtggaaggcaaaaggggaataagtatctcacatggcaggtgcagggcaaagagaggggggaagggaagtgccacacaaccagatcttgtgagtactcagattttgtgaggggtgcttgaggtcatggatacccatttaccctgatgtgtttatacacatttcatacctgtattaaaatatctcatgtaccccataaacatatacacctactttgtacccacaaaaatttaaaaataaagttaatttcaatgtttaaagacttgttattaaaaaaaaaaaaaaaaaaaaaaaaaaaaaaa

SEQ ID NO: 115312 - DNA, 1000 bp, Homo Sapiens
gttttgtctagactccagatacagagggacagctggactgaggacaagcaattccatctagcatagggtctctcagggttggtgcatccagccacatgggcagggccagtcacatctagtctatgtccccagagcccttggagttgcgcagcttagctgacttgactccaaggaaattagtacagaagtaaccactctattaagtgtgttctgctatgttcacatgcctgtagtacctgcaaaccatgccaggttcatctaaagacataggggaagattaaggactcttttggacagaccatgaattgaatttgctgccaggtgctgccagactgaatttggctgacagaactcccagcccaggaaagttccatgacaatgactgtcgcagaaggaaatttcccactaaagtcagtccattttcaagttttggtcttcagagacaaaagaacgtcccagccacctgattttgatggtgaggtaactctaagttgaattcaggctagtgttgcagtatagctttggcatgttcatgagtgagcacccagaatgtgttgaaccaacccccacccctaactactgactatgactgcagtgggtttttatggggaaaaaaagtgtgaaaagcaaaaagaaaggaacagagattttttatcacctttattgtaagacagtccatttatgaattgagtataaacacatacaaagtaacaagagattcctaagaaacgcaaatccttgagtttcacgcacttcatgttcaaccatttgctgtaatccagaggcagcctgtgaatcattctcatgccctgttttttttttttttttcctataatgttctgggtttaaaagccatcttttccacattttctgtaaataatggataatcattttaaaaatttttatttttagtgctgttttaacaatgtagatagatcataaatgtacttgctgaattcaatcatttttaacaagccaataaagtttgataattcatctc

SEQ ID NO: 115313 - DNA, 1000 bp, Homo Sapiens
ggaaccctcccctctccctcggtgacatcttgcccgcccctcagcaccctgccttgtctccaggaggtccgaagctctgtgggacctcttgggggcaaggtggggtgaggccggggagtagggaggtcaggcgggtctgagcccacagagcaggagagctgccaggtctgcccatcgaccaggttgcttgggccccggagcccacgggtctggtgatgccatagcagccaccaccgcggcgcctagggctgcggcagggactcggcctctgggaggtttacctcgcccccacttgtgcccccagctcagcccccctgcacgcagcccgactagcagtctagaggcctgaggcttctgggtcctggtgacggggctggcatgaccccgggggtcgtccatgccagtccgcctcagtcgcagagggtccctcggcaagcgccctgtgagtgggccattcggaacattggacagaagcccaaagagccaaattgtcacaattgtggaacccacattggcctgagatccaaaacgcttcgaggcaccccaaattacctgcccattcgtcaggacacccacccacccagtgttatattctgcctcgccggagtgggtgttcccgggggcacttgccgaccagccccttgcgtccccaggtttgcagctctcccctgggccactaaccatcctggcccgggctgcctgtctgacctccgtgcctagtcgtggctctccatcttgtctcctccccgtgtccccaatgtcttcagtggggggccccctcttgggtcccctcctctgccatcacctgaagacccccacgccaaacactgaatgtcacctgtgcctgccgcctcggtccaccttgcggcccgtgtttgactcaactcagctcctttaacgctaatatttccggcaaaatcccatgcttgggttttgtctttaaccttgtaacgcttgcaatcccaataaagcattaaaagtcaaaaaaaaaaaaaaaaaa

SEQ ID NO: 115314 - DNA, 1000 bp, Homo Sapiens
gctccccaatatattcctcttttcctttcttcaagctgcgtagcagggggcctttagctagtttctcccgagaggggcgggaagtacagctggtggagacagtgctgggagatgatcagaaatctcagggcacagcctcaggtctacctggacactcatccactgttggagatgctcaacagctagacacagatgctcacagccgacctgtggcctcttgctctgaagccatcccccatcttccctagacacagcagacatctgagaaagcttcagcatttctcttgctaacagattcagaaaagtgtctcaaagcagagcacagagttatttggtgtttgctgaagacagcctttgtgccacaatcacttattaaataagcgatcaatttcccattgaactgaacatgcaacatttatcatacattcagttctcattcacactccttaagatttggtcagaatttttatttctgttcatgtcttctacttttctactcctgtatgaataaaatattgatttgattacagtggctttgactataatgtgggagccaatttttgcctcagtcttcatttttatatttaccttgttattctcaggcatttttttcttctatgtgagagttaaaatcattctgtaatttccccccaaaatcatattggtattctagttggcaatgtcttacatttatgttaagtttgagggaattggtagttcaagtataagttaattaaggccattttatttctaagtgaacagacttgaaactccagagctactgaagtaaaagttagaatcatttgcattttcattcagataggagataattttgtaaattttgatgctattattttaactctattagcttaagtaatgtcataatagaaaacacaagcatttgaccaaatgagatccattcagcgactaactggcaaggcactcaaaacatgtcattcattaaatgttgtttttatttacctcaaaaaaaaaaaaaaaa

SEQ ID NO: 115315 - DNA, 1000 bp, Homo Sapiens
attttctgacagacacacagacctgccttttctcccccaagtataccgtaccctcctgtgagacagtgtgtgcaggcaccaccaccttaatcctgctgttgcctgacatgctgattctcatttattatgctgcatcaacacattagaggtacaggagcggctcagtcatgaaaaaagaaggtcttttgccccatttctttatttcagagatgtgggctttcagtgggaatttgctgactcctactttataggctgagtcaatgagggaagatgactggcgtttcctctgtctaaatgggaggttgccagagcgctggctgggactaggatgtgtaactaagatttcagtttgaaatcttagatttcagttcacggcgataaagaagtaggtgctgcacacaaatatgtaaagcaattgtaggaaatttgaaaggaaaaaaagaaaccgaagccagtattttaataattgctttttctgtgtattttgtattgggctgggggatagcatcaaaggttgaactttttgagctttctatgaaaaaccccaggaccttctttctttggccatttctatggaaatgcgatgtcagatggatggtaatggtgccctccagtggctgtgagacctcattgcgcattgtctactggagctttagtcttctgagacggaggaaaactgctgaatactctggattcatctatgtctacaatgttgcatttatgaaaaactacactgtgctaggcgcattctaggacatgaatatgaccacaccctctttcaccgggtgtttctgtagcaagttttcatattcttttcaaacaatggtttctctgcgttaattattgaggaaaaaaaaagatggggtaagaaaactacccatgcatgatgtagagagctgttgatttgtttctgtttttttaaaggaaaactatttgtaagatgttgcactaaaacattttatatacacttcagagacctgtagtaaattatgttgaaaat

SEQ ID NO: 115316 - DNA, 1000 bp, Homo Sapiens
gtttaaaagatacaggaaggcctattacaagtgtgtttgtctttagtgaactcatagtggtgacatacctttccttttgagtataactattgagggaaatattttggccagagagatgtcttagtatctgataatttatactaactagaaacagaattgtccctgtgaaatctttttatggcaggtaatcacttgtcatccaaagaattatattaaagattcacccagtttagagccttacactgtacctgagaataatcgaggggagagacctggtggttaacatgcatttaggtaaaatgtcaggaacaactttcctcttattaatactataaatccatctcaagcatattttaaaataatgagagatggaggaaacaatctagaagataaaagaaaaagatgtgcataacttgttttcagtttccctgtttatgacagtttgtcatttggcgggttgggggatggagcagggaataagacattgaaaaagtctcatcccctttgtgtgttttacatatatatatctctaagtccagagccaggagagttggaccattgagggcagctctgccaacatttagtaaaagtattcattgttccaaaactgtcatctctacccttgagggagtgtgtctttgtgagaaatataaaggcttgagtcatgaaatacttaacacatgtgcacatgtacacatgtacatttatatgcagtgaattgttactcgtggtagttaggttctgtgaattttctgtgcacactgaattagtgaatgctgaatgattgttgctaggggaaatacagcgttagcttctgtgagcctctgatccaaacatttttatcaaccagtcaacacataaccttcttctatgggtatttgtttgtttgtttgtttaaagacactttatcagtgtttcttgaataattataattattctttataataaaaatattttaattataaaaaaaaaaaaaaaaaaaacaaaaaaaaaaaaaaaa

SEQ ID NO: 115317 - DNA, 1000 bp, Homo Sapiens
attgccagcgtaatggagaggaaaccagattggatatggactcttttttatgcctattctggtgttgcgtttgtatatccaaatggacgttatcctctcagattcttatctggcactaatttataactattatattatcagagactatgtagcaatatatcagtgcacaggcgcatcccaggcctgtacagatgtatgtctacacgtaagtataaatgaatttgcataccaggttttacacttgcatctctaatagagattaaaaacaacaaattggcctcttcctaagtatattaatatcatttatccttacattttatgcctccccctaaattaatgactgagttggtggaaagcggctaggttttattcatactgttttttgttctcaacttcaaaagtaatctacctctgaaaaatttgtagtttaatatttgtttggtgaatttgtgccactttaatccttccactatcattcccattttgttacatttctgttatggggactttatgttgaaatattgtataaagcatttgtagcaatttaaaaataaaatatttaaaattatttaaattgttttggacgcttcaattgtattatatgtgatttacatttcactttttttgttggcgttgttaacccggagagtgctcctgtattgaactttgctgttagttattttattgcttctttttggagagtgctataaaagactattctaatgaaaacattaaaatttacaatttgacatacaaaaaggggttgtccattgattttaaccaatgtagcactgagagagagagaggttaattatagatagacaagagtggtgtttgttgtttttcccctcccagcattgaaatcattggggcttgtcagatgtattaaaaaaagatttgttgtgctattgctgcaaacacttaataactagaggagaatttaaacaatgcattttatattattgtaaccaataaaaaactttctaaaaaaaaaaaaaaa

SEQ ID NO: 115318 - DNA, 1000 bp, Homo Sapiens
ctaggggacacacagcttccaggaggagggaatgtcctctaagcatgctcctggcctctcaaggtggcgcttgtctaattattcacttgggaagaatgactagctcagccagcggctctttctgctttgttctggcgactttcctgggcaggcctttccacctggggagctggctcatcctgcacagctgggccgtggtgggcctgtctgcttgattctggggttcagtgtaggtcagctgatggcgaaccatggtggtggtttggcttctgttcttattcttgagttttgataccacgcagaccttgggtggggagagcttcctgcacagctctcagcggcctgtggccttggaactgcctgcgtaagtaacggaggggctgctggtcctgttcaggcccgtgctggggacgccgcttagacaatgttgcccagagtcctgtttaccctcccagggttcattcttcccaagaactcaaattcctttctcattggagcctagtgaaaccaaatgaacgggacctgctggcctcaggaggcaggcagagtttaaaataaaactttctcatgatttcttgaacatctttccctgtttgtatatacactttgtgtttatttttcagtagctgcagtatattttttttcaatattcagtataatgcagtgtatttcatcatatgctgtatggagagtgggcagacttctgtggagggcccgatagtaaccatttgaagctttctggacctgtggtcttagtcccagcgattctgcagagcggccatcggcagcatgtcaaccatttgcatggctgggctccagggaaactactgacaacgacaggtggtgggccatagtttcctgacccctgtgctatgccagaatttctttttcctcttccctatgagtggacctaaatatgttaattccttttcacctttcaaaacggacagccccttgaacattaaaaacttcgcagaccctaaaaaaaaaaaaaaaaaaa

SEQ ID NO: 115319 - DNA, 1000 bp, Homo Sapiens
gccatgttacacggtcttcaaattgaaaaggtttcttgaaaaggaaagtttggcccagcaactggagaaggagtccatggtgtcgctgtgtgcctgtatcatttggccaagtcaatggttgtaagcaaagttagtggagacaaaaatgtgtccaaaatgtcgtttgagttcctgggatttctgtaatagcacacaactcagaactcttcagcatttgtgtgattccttacctctggctgataaaactctaatgggttgtggcttactttgtttccattttctttggctttgtgcaatttttgtgtaactttacttgtacctatattttctgtttacagttctttttaaggggaggggtagggttctaagatcttgttgtttattgtagataaaaattttttcgtgttgtagaaaagcatgggttatgcgtttgactgaaaaagacactgtattatttaccaaaggggtattgtttttgcatttgtttataaatgcattattttggtactgtaaatttggacataatttctgagtttattactactggcattttctttttcccttttttttttttttaaccgtaagtgcacgatgcaggtgcataggccccagaccaaactagaccaccagcatgttcatgtccagacctcggcagtggcgtgcactgcttgtgcacctcagttcctccagtgttggtttgtttgttttttaattcagcatcctgctggttttactttccaagcaagatctgttgcgactcccaaatgcgttttaatgagctcatccttatttgcctttcttcttacgtattttgtgtattagattgtgcaggagatattctagaaggcattaatggtttgcattcaaaacgatgtggtttgtccaagttattttctgtctttattactgagacggattaatctccttatttttttcttgatgatttgaagttgtaagagttgtccagctattgcttaataaaattttgcagatcaaaaaa

SEQ ID NO: 115320 - DNA, 1000 bp, Homo Sapiens
cacccttgagaccaagaggccacaggcttctcggcctctgggagctctgggccgcctggctgctgaggagccccacgccctggagctcaacactgcccactcagcgaggaagcagccgcgacgcccacacttcctgttggagcctgcgcagagccagaggcctcagaagccacaggaacatggcctaggcatggctcagccagcagccccctccctgacgcggcccttcctggcagaggccccgacagcactggtcccacacagccccctgcctggggccctgtcaagcgcccctggcccgaagcagcccccgacggcaagcacaggcccggagctgctgctgctgcctctttcctccttcatgccctgcggggcggctgcaccagccagggtgtcagcacagcgggctactcctagggataagcccccggtcccctcatccctggccagtgtccctgacccccatctactccttcctggggacttctcagccaccagggctgggcctggactttcaactgcaggcagcctggaccttgaggctgaacttgaggagatccagcagcaactactgcactaccagaccaccaagcagaacctctggtcctgtcggcggcaagcgagcagcctgcgcaggtggctggagctgaacagagaggagccggggcctgaggaccaggaagtagagcagcaggtgcagaaagagctggaacaggtggaaatgcagatccagctgctggcagaggagctccaggctcagcgccagcccattggcgcctgcgttgcccgcatccaggccctgcggcaggccctgtgctagcgtgttcgcaccaggaacgcaggtgctgggctgtcggggaggcctcaggccacctccaggaacagaacacagttttaagtttgattttttttatttcaaaatgctttgcaattaaatgaattactgttcaaaaaaaaaaaaaaaaaaaaaaaaaaaaaaaaaaaaaaaaaaaaaaaaaaa

SEQ ID NO: 115321 - DNA, 1000 bp, Homo Sapiens
gttttcgccattaaaaatattaaaaataatggcaaaaactggctgggcacagtggctcacacctgtggtcccagctctttggaaggccgaggcaggtggatcacctgaggtcaggagtttgagaccagcctggacaacatggtgaaacccttctctactaaaaatacaaaaatcagccaggcatggtggtgagtgcctgtaatctcagttactcaggaggctgagtcaggagaatcacttgaacccgggaggcggaggttgcagtgagctgagattgtgccactgcactccagcctgggtgacagagcaagactccatctcataataataataataatggcaaaagcctcggtggctcacgcctgtaatcccagcactttgggaggctgaggcgggtggatcacttgaggccaggtgttcaagagcagcctggtcaacatggtgaaactctgtctctactcaaaaatacaaaaattagcctggtgtggtgacgtacacctgtaattccagctacttgggaggctgaggcaggagaatggcttgaacccgggaggcggaggttgcagtgagccgagatcgcaccactgcactccagcatgagtgacagagactctgtctccaaaaaaaaaaaaaaaaaaaaagtaatggcaaagaccacagttaattttgcatcaatctaataatttaggattcttctgccattttcatttaactgatttaactgaagagcccaattaaattgtgaagggagccctgaaaaaattagctactctttgccactgcttctctgtgaatcaagggcttacccaatgcagaaataaagtagatgttgagaccaattaagatttcacctacaaattctgattttaaatgcctgtgtccatctccacagcctcagtgagaattgattgttttgtagataaatcctaatttaaacattggaaatgcctttttactaataaaatgctacaacaaaaaaaaaaaaaaaaaaaaaaaaaaa

SEQ ID NO: 115322 - DNA, 1000 bp, Homo Sapiens
tgatataacacaaagagatatttaggaaaatgcttattgatgaggtttattctatctgtttttaaagcaccgaggttgcattctagataaccttgtttattagcatggcatattttaatcattatttgagactgtcctgtgcctgattattttagctaaattcagggagattgcgtggggcaggaaagcatgcattgaaaaatttctaaccacggttatttaagcataatctgaaaacatctagcccaaaggtaagttgctattttcatcacagttgcctatgcccagggaataagatgtattctttataattgaattggtttttcccacgtctaactggaaacaaaacagaaggggcgtcataaatttgaataagcagaacatactgttctcaacatactgtaatcaaaaggaggaatttcagtgggtctctgtgtgtgtatgagagagagagtgtgtgtttgtgtgtttcaaggtcagaacaggtttttttgtttttgttttttgttctttgtttttttttttgagatggagtcttgctcttgtcgcccaggctggagtgcagtggcgcaatctcagctcactgcaacctccgcctcccaggttcaagcagttctcctgcctcagcctcctgagtagctgggatgacaggcacccgccaccacacccagctaatttttgtacttttagtagagacgaggtttcgccatgttggccaggctggtctcgaactcctgacctcaggtgatccacccgcctcggccttccaaagtgctgggattacaggcgtgagccaccgtgcctggccagaataggttttttctttcaacttgatcagtagaaaatggacatcaagtttgaacagataaatcatggacagccttattgtgattgaaatgcttgtaggttctgtgccaattttccaccactgtgtactttgttgctatttaaaactgtatcaactctaacggaagaataaattatttgtgattttaaaaaa

SEQ ID NO: 115323 - DNA, 1000 bp, Homo Sapiens
cgcggcagacgaggacgccggccgcacggactgggacccgcgctcgcaggcagcgctgtcactgccgcacctgccccgtgtgcgcaccacctacggcttctgcgcgctgctcgagagcccgcacacgcgccgcaaggagtcgctcctgctcgggggcccgcccgcgccccggccccgggcccacagctgcggcggcggcggaggcccggacgcccccctggggaccctgtgcggcccgcgaggtccgggcccggccacccccgcggcccccggcggtccccgcctgccccaggacgcgctcgctgcggggccccgccgctgccgcctcctgcgcgtccccgacgggctgctgagtcgcgcgctgcgggctggaaggagtcgccgcctggcccgcgtccgctccgtctccagcgggaacgaggacgaggagcgccgcgcgggatccgagtccccggcccgggccccctcctcgagcccgctgtcatccagggccccgcttcctgagcgcctggaggccaagggcaccgtggctctgggccgcgccggcgacgccctgcgcctggctgctgagtactgtccgggaacccggcgtctccgcctccggctgctccgcgcggagagcctggtcggaggcgcccccgggccccgcgccgtccgctgccgcctcagcctcgtcctgcggccgccgggcactgcgcgttggcaatgcagcgctgtggtggggcgcagccgcaaggcctcctttgaccaggacttttgcttcgacggcctctcggaagacgaggtgcgccgcctggccgttcgcgtcaaggcccgggatgagggtcgcggccgggatcggggccgcctgctgggccagggtgagctgtccctgggcgccctcctgctgctctgagggcccagccctccccggggcgctctgccctggagactccggacactgacagccgcgtggtacagaataaacgttatttatttttttaaaaaaaaaaaaaaaaaa

SEQ ID NO: 115324 - DNA, 910 bp, Homo Sapiens
gcaccggaaaagaacagattctcttccgtcgcagagtttcgccatggcccggggccccaagaagcacttaaagcgtgttgcagcgccgaagcattggatgcttgacaaactaacgggtgtatttgcacctcgtccatcgacaggtccccacaagctgagggaatgtcttcctctgatcgtcttcctcaggaatagactcaagtatgcgttgactggagatgaggtaaagaagatatgtatgcaacgtttcatcaaaattgatggcaaggttcgagtggatgtcacataccctgctggattcatggatgtcatcagcatcgagaagacaggtgaacatttccgcctggtctatgacaccaagggccgttttgctgttcaccgcatcacagtggaagaggcaaagtacaagttgtgcaaagtgaggaagattactgtgggagtgaagggaatccctcacctggtgactcatgatgctcgaaccatccgctacccagatcctgtcatcaaggtgaacgatactgtgcagattgatttagggactggcaagataatcaactttatcaaatttgatacaggcaatttgtgtatggtgattggtggagccaacctcggtcgtgttggtgtgatcaccaacagggaaagacatcctggttcttttgatgtggtgcatgtgaaggatgccaatggcaacagctttgccacgaggctttccaacatttttgtcattggcaatggcaataaaccttggatttccctgcccaggggaaagggcattcgacttactgttgctgaagagagagataagaggctggccaccaaacagagcagtggctaaattgcagtagcagcatatctttttttctttgcacaaataaacagtgaattctcgtttcttaaaaaaaaaaaaaaa

SEQ ID NO: 115325 - DNA, 1000 bp, Homo Sapiens
tcgaaagaaagaaagaaaaaaaggaaggaaggagaaggaaggaaggagaagaaaaggtacctgttctacgtagaacacctttggtggagttccatcaactcgcaaagtagaatccttacctactactcttctgataataattttaatattttttatgtttggttgatgcgagcagctgcactgctcatgcagttagctagcatgtgacatcatgtgacaaagttcatgtaattagatggaagaaacctcactgattaattttaagaaccttttagggatgcaggaacaatgaagtggccacagtatgtgctgtttttgaagcatttttaaaaacgaattgtagttgtttttcttcatttaaaatggatctgttggaggttatgtgtgtatgttgtagttttattgcagccacaataattttaccaaagttttcacataggcagttagcctttacttaatatcaagacaagtgaaaaaatattggcatcgatgaaaccgataacattggcctcattggatttctttacccattcacagtgtaaagaagttaccttcatgctttcattgtacctgcaggcctgtgggcttgtacagtagataattaatttctaaaaagaacagctgcctattttcttcctaggttaggttatatcttcataatcacaagaattagtgatggcaaaataaaattttgcttatgaatcttttacattgtttatatatgattaatatcatcatatatattttctgtattaagctcatttggcttcatttaagctgtatacttagtcatatatctttcattagttctatggatatgagcagatccctttactggagcccagtatgtgctgtgtgagttagaagtcattcttgctgagaaggtgaataggtagggatttgccttgttttgtaagtctacaatttgccaagagtaaataacactggaccagctgtaaaagtaaacagtgtgtttatgcattgagatactaaagcattt

SEQ ID NO: 115326 - DNA, 1000 bp, Homo Sapiens
gtctgttgggaaagtttaggataaaactttttctttagttcagtcttttcctgtctagttctaaaatgaattgtgtttgattccttagagaagaaatacttcatttgtgctctgattcactgaagtaataacctcagcactttaatagcgtccacaggcatagctgatgctaggccccagattgtgttgcccaggctctttaccatcatcttcggactgtttttgtttcctggttacattttcagtctggcccgctctacataatgggccagtgtcagctccaagtccacatccttattatccatgattcaaaagggagagagagaacttcctttttcagggtccacaaatcaaatctataaaaggactctggtcttcccaggatcacctgcccttgcattggaccagtccctgtggaagaggggatgggggcctgtgatcttggccaggcctgggctatctatctgcactgtcattgctaactcctgtcagaatcacatggatgagtagtgggctgaatcccaaaaggaaaggggtttagagcaagtggaaacaacagatgttcactatagaaagcaagaatgaaaaccatgaagtggttgaagattagccttacagtaattttattctgatcacttaatacagtagagtcaaacaggaatccaagtttccaactttattatttttggcactgaagaattacaaagaactctagcgtctttatacctccgtggttcactggagttaaagcaatcggggcgttgtacagctcacttgagtttttaaaggttctactaaaaagtgagaattccacagcaatatgggtcattgttgcagaatatcacaaaggtctgttgtgtatactccttttcaccaggaaagggacaataatagtttttttcaatgtatatatatataagtgatctaactttttattaataaaagtaaacaactctaaaatgtaaaaaaaaaaaaaaaaaaaaaaaaaaaaaaaaaaaaa

SEQ ID NO: 115327 - DNA, 1000 bp, Homo Sapiens
tgatatatatgcactatggaatactaagccataagaaggaatgaaataatggcatttgcagcaacctagatggagttggagaccattattctaagtgaagtaactcaagaatggaaaaccaaatattgtatgttctcactcgtaagtgggagctaagctgcgaagatgcaaaggcataagaatgatatagtggactttgaggactcaagggttgaaggatgagactacacattgggtacagtgtgcactgcttgggtgatgagtgcaccaaaatctcagaactcaccactgaagaacttccccatgtaaccaaaaaccacctgttccacagaaactatcgaaataacacttttaaaactttactatttctgaataaaatttacatgcatttctcagaaaaaaaaatatttggaattgaggtatctaatagagaactgagttaaattattgccacttaaaaacacaaagtgatatagccactttgtgaattaatcagtcagcagtggctaggttatgcttagtggtttataaccaaatcttagtttataacaacaaatgtgtattgttaattcccactacaagtttataacgacattgctggatgctacactccatgtctctttgtgggacccaggctcatgggacttctgttatctgcattagagagagagaagacaacaaaatatgcactggttcttgaagctttggcccagaagtaaaatatgtcttttacctgttcacattgcattgggccagggcaattatcatggctgcaagtaacttcaaaaggatggggaagtgcgatcttggcatgtgtcagaagaaatgaaaacatttggtgaagagcattaatgactgtctttacaggaaaaaagcaatcaaatagacatgatttcttgtttcagtttcatcatttcctactgtgttacctaaactttctgagccccagtttcttattactaaaataaaataatgataaagatgaaaaaaaaaaaaaaaa

SEQ ID NO: 115328 - DNA, 1000 bp, Homo Sapiens
tgtcaagcctcttattctgacttcaaagaattaatgtatcttccaacaataaaatcacttctgattttaatctaggaaaacctaaattgtggctatggatccaaagctgtttgtttctttgaatatcaatattttcaacaggatcttgtatttaaaattcccacctacattgttaaatatgttattttttcatatctcttttggttttgataatctgaagtgtttttttctcgttttggccttccaaactgcatttggttaggtgaattaagaaaaatattgccatcaagaattacttgtgttttcacagagatagactctttgctttatagagattgttgtgtatttaatatgaatatcccagctttagaaaagaagtaaactggatacaaaaagttccattgaggaacagttatttacagtataaaagatttgtttactttacaaaaggcttgtgtctgtgtgtgtgtgtgtgtgtgtgtgtgtgtgtattttaaactgactcagtgacagctggggtggaatggcaagaacacttacaaccaaactcatgggctgctgcaatttgaagatcaattggtaataaacataagacattaattcatattaaaatagttcagtgttcaaaattgtgtttatgtggatatttttctctttttaacactataaaccattaaaatacagtcatcccttgtatacgctagggactggttccagggccacacatataccaaaatctgcccatactcaagtcccacagaaagtcttgcagaacccatatgtagaaaagttggccctccagttgaccctccgtacacatgagtttcacatcccatgcacaaatgctgatctgtgtgacctcacctgcatttgattgaaaaaagtatgcgcgtaagtgtacccacccagttcaaacccgtgtgtaagggtcaactgtacaaaaaagtttgtgaaataaacgtactggagaatctttaaaaaaaaaaaaaaaaaaaaaaaa

SEQ ID NO: 115329 - DNA, 1000 bp, Homo Sapiens
atttgaatttgtttcttaaccttgaaaaatcattaaagccaaggtattaaaacctttgtgcattaataccttctaggggtttggttcatttggtttttgtcatgtgcaaggaaggacaatagtcctctttccaagtgtgttagcatagacttctctatatgtttctactagacctaggggatgacgtcttttaataatactggccctaaacatgtaaataatcttgtaggtgagactttttcttttgtgtttcggaaatttcctatgtggctttcagttgtctgtttgtatagcctggatttttttgaggtaaatgaaactttctcatttgtatatttggcttgatatggtcttaatattatctttccacgaaatggatatatttctagaaaatatatatttactaccataatttctaccaccacccccattttgctctgcattatacacagtagagaagaactgaagacactgctgtgacagtattgcagtccaaggcatcatgtgctcttggtgggatactctgattatcagcatcaacagtactttactgagcaagactttgaaggcctgagaagagagcaaagttatggaaagtatttaactcttattttatattgaacaaacaaggtttaatcatgtcatacatttttggttttctaagcagagactaatacaaatgcagccacataaaggcagtgtactgggggtgggagggaaggaaacaatcacataaaatcagctgactcaaaattgaggatagttaataggttgaaagggaaaaagtatgttgaaaatttagacataaatgaaccaagaatattccttatctggtgatgattaaagttaggaaaacatacattttttattttttaattagtagctgctatcagagacattatagcacagtggttatgagcacagattccaaagccagattacctaggttcggagacccgcttctctacctactactaatagttgggtcatgttgggccgg

SEQ ID NO: 115330 - DNA, 1000 bp, Homo Sapiens
acagcctgagccctggccctgctgcttggtgaatcatgggggccaaaaggggctgctgcctgagggctaactaggaaaagggggaccccgtggcgtgagatcggacatggggggcacagcgggcggccccgccacactagtcagcacagccctcctgtctcctgtgttgggtccatgtgagattttattagaaagaggattcgactgctaacagttgaggctccccaggctcacccaaagacccctccctcgtcccagcaggaactcctgctgctgctagggcctggcccggccatcaccgtgtgcaccctcttgaggagggggacacactgcccgtgttcaaggggctgctcggaggaggcaaacccagccttttgcgattatggcttgtggggaatccagacctcgaaaccccacggggagggaagggtctggttgtcaaggtgggtccctttgatgtgaggtgccatcctctgagcccaggtctgacccccctacccagccccgtgagtctggagaggccccagggaaggacccctcatcaggggcggcttcaggtgtagaagccgaggggacagcaaggggcccagacacccccgaccttcagaacagccatctgtgcccagctctgcaggccaggcacacccagctgagcccggggccagccagcaccacccaccagctggggcctgtgggtcccggagaccgtctgtggttgtggctttgtcgccggattgcagagctgaagggagccctgtggatgacaaacaccaggggcctctccagaccctacgtggggggagggctgaacaaagcagggaggcccacggttagacaccaggcagaactgcccaggagagacacagggacaatcagaccagcgtcctcgaggttagcctgaggcgggtgggcacggccgaccatccacccggtggttcctgtttgtcccaccacttaactgggagacactgttttattaaaacacaccgtggcttccttc

SEQ ID NO: 115331 - DNA, 1000 bp, Homo Sapiens
tcctgtcccattccaagactcactctctcagaccttcccatctccctggctttccatgctcctctccctccacctcctggcttcaactgggtgagggccgtattcctgccactctgctccgcctcagccttgagaactccacgtgggctgggtgggaaggtgctgacgattttcacactgtgtttaccactccatcacctctcaacctttgcttcgacaggtcttcactcacgatttattcctccaggtctttgattggagagagtaactttttaattctgttgttttgcagtttggctctgtaggagtgagtggcgattcaaagatgccggcgtcccgcagtgtgcggttcgtgcccttaaccacccgcttctttgtttcccgcccctctgctttcgcaggagctcttgtgcttgagttcagtgttagtggtagcgtggctcactccacttggaggtggcggccgtctgaccgtgtgttactgctttgccgacggggcctcccggccctgatgcgtgtacactctgcgggctgcaccgggtggctctggttgggggcgaagctgtgttgactgggagagcgttggaaattgagacatggagagatgacgggagtgcgtttctctgggtttgatctccatcctgttttctcccagacacaccacatctaccttgggggaatgccgttgcctgttccacccctttgttcacttcgcgttaactgctgtggtaactttttcaggatctgtgtgaagaatggtaatgacgtagttgaaaggaaaatgtactgttgtgtgtttcatttgtgtgatttcgtaccaaaaaaatgtgtttgaactatattgtatgtaatttggaagtcgtgttaataaaaccctgcagtttccaaaaaaaaaaaaaaaaaaaaaaaaaaaaaaaaaaaaaaaaaaaaaaaaaaaaaaaaaaaaaaaaaaaaaaaaaaaaaaaaaaaaaaaaaaaaaaaaaaaaaaaaaaaaaaaaaa

SEQ ID NO: 115332 - DNA, 1000 bp, Homo Sapiens
tgggagctgagccagaaaccggaaaaccctgggctcatgggcaggacagcttcgggagttgagtgtcaagcccgaagggaagacttttggaaggaaaatactggcaaatccaagaagtgaaccagccgactttaggaaagccagaagccaggctactctagaccttctgccttcagagcatgaggacttctcccactcatccctgtacctgaggcacaccaacccagacaggtccaggcatggactccaggttccctatttccagaaggaatgcgattagctttttttggcccagcacccaccctgccagggaggaaggggcaattttccagtgatgaaattgtgaatcaggcagtcacactggacaacatctagcaaggtgaattctgcaactccctactttatttacattttaaaataagcaatatattcatacggtttaaaatccaaagtttacaaaagggtatagggtgacatctccttccctcccacctgtgccccccaaccctgcaggtgctgttctgagggaatcacactgtgcttgcacaaaaattattagcttataagacaccagccttccccttgctttcctcacttgatgtatcttggagcttgttccttattcttgattatagttgtatggtattgcactatctggagctaacacctgtgacccacactcatgttttaaaagtttctgcattagtcaaaaatatttaaaaggagattcaactttacaacccatatgtctagcttctcttgaaaacacgtaagaactggccatgacagcctgtgtttctatgtaactatgagccagagccaaggagcggggggaccaggagaggtgtgcccctgccatgctgccatttgttatcacccgcctgtcaaatcacaggtttatttcaaggcaagaaccatgttcataggttgtattctaaatggagtggcgtgcccttactgaaggactagatgaggcaaataaagactagttgctgctatt

SEQ ID NO: 115333 - DNA, 1000 bp, Homo Sapiens
ctgagcagggaaccttctcaactgtggggttgcgtgcccggggagctgccctcgccagggaaggtgcgcagcgggacttcggggaagccaggtgacaagggaaatggcgatgcctcccccgacggcaggaggagggtgcaccggtgccactttaacggctgcaggaaagtttacaccaaaagctcccacttgaaagcacaccagcggacgcacacaggagaaaagccttacagatgctcatgggaagggtgtgagtggcgttttgcaagaagtgatgagttaaccaggcacttccgaaagcacaccggggccaagccttttaaatgctcccactgtgacaggtgtttttccaggtctgaccacctggccctgcacatgaagaggcacctctgagggagcagagaggtggatcctgtaggctaaaaggcttccaggctgagagccggccgtggaaggagggatgcgtgttccagccaaagcatgccgttctgcaccctacccagttgcctccagggcctctccttggaaggtcttttgagggctaaaaaggtcctgtaagaagcggcatagcacccgtggtgcatgcctgtcctgggagctggagaggatgtcagcgagcctgacattgccctccctgaatgcatcaaatactcttctccaaggactgacaaaaacaaccccccggctgtgggcacagtagggaaccatgccggtttgatcttccattgctcaagccagggaatgcattgcagaggcacctgcacaacgacaaacttgagtgtttccctgccacttctgtgcctccacagcctgctccagttccgcagctagagctgggcctaccttccccagccagccctgccacacacctggctgaggcatgtctgggaggggtggaggaggcagagggactccaggccagagggctgttctcacaacctcagcccactctcagtcaaggagggcagaaaataaaagatgacatcactgccaaaaaaaa

SEQ ID NO: 115334 - DNA, 1000 bp, Homo Sapiens
cactctggcgcctggtcactgtgcccttcaccttctgggttcaagtgattctcctgcctcagcctccctagtagctgggattacaggcatgcaccaccatacccagctaatttctgtatttttagtagagatggagtttcaccatgttggccaggctggtctcgaactcctgacctcaggtgatccacctgcctcggcctcccaaagtgctaggattacaggcgtgagccaccatgcccagctgggagcgttctttcagcaaaaagtctaattcagagactcaccttccatcctggcactaaacaatagtactagaggtaagatctgccaagaatttctctcacttaagcaggatacttactttaaatataattaggcaagacttatttgagtacttgcctaattgtatttaattagaactatgctggatgctgtagacagaagaaataaaatactcaacttggtccctatcttccagcaggttagaggcctttagggaagaaaagcctgtgtgcagggaaagagaacctcaccagaaagtattcaataaaatgccaaagtgatcttacagaacagtgcctgtgacaccggaggggattgttctgtctttgtgagtgaacatacaatgatggggataactggtcctcataccatgcaggtcccatttctgatcaccccactggcaggacaattcacagttcttgagcaaactgagttagggagggtatgctaacgacagaacctatgcaagttcttagaaatattttttgtttgctgaaataaagctcaatcaacacactaccttaaaaaaaaagtggagcagtggcatttccatgcctcatgctcaccatcatgaggttaacttcccgccgtcgcctcttgcctgccaggggtttttcgggagcccctctctgttccactctgattccttttgtttcttgctgaccattcactctctgtgtctgttgttggatccaaatacgagtgtttttctttcaaa

SEQ ID NO: 115335 - DNA, 1000 bp, Homo Sapiens
atgcagtttcagggtatgaaacgcaaagccagttctcccgtccccctacctccagtcacacaccttgacctcacccccagccctgatgtgcctctcaccatcatgaaaaggaaactgatgaacaccaatgatctggaggagtccaggcagctcacggaggagatccagcggcatctggatgccaggcacctcattgagaagtcagtgcgtaagatcgtctccttgctggcagcgtccgaggctgaggtggagcagctcctgtccgagagagccccgctcacggggcacagctgctacccagaggccctgctgcacttccggacccactgcttcaactggcactcccccacgtacgagtatgcgttgagacatttgtacgtgctggtcaacctttgtgagaagccgtatccgcttcacaggataaaattgtccatggaccacgtgtgccttggtcactactgaagagctgcctcctggaagcttttccaagtgtgagcgccccaccgactgtgtgctgatcagagactggagaggtggagtgagaagtctccgctgctcgggccctcctggggagcccccgctccagggctcgctccaggaccttcttcacaagatgacttgctcgctgttacctgcttccccagtcttttctgaaaaactacaaattagggtgggaaaagctctgtattgagaagggtcatatttgctttctaggaggtttgttgttttgcctgttagttttgaggagcaggaagctcatgggggcttctgtagcccctctcaaaaggagtctttattctgagaatttgaagctgaaacctctttaaatcttcagaatgattttattgaagagggccgcaagccccaaatggaaaactgtttttagaaaatatgatgatttttgattgcttttgtatttaattctgcaggtgttcaagtcttaaaaaataaagatttataacagaacccaaaaaaaaaaaaaaaaaaaaaaaaaaaaaaa

SEQ ID NO: 115336 - DNA, 675 bp, Homo Sapiens
ctgaagagaagctagcacttgcaaacattccatctggcaatctgagagaagctactgagagaatcctgagacatccccagccacctaccactgctcctgttccaagcaaagaagatctgctcactccggaaaaagaaaatgagtgagactcaaaattcaacaagccagaaagcaatggatgaggataacaaagccgcaagccaaacaatgccgaatacacaagacaagaactacgaggatgaattgactcaagtagctctagctctggttgaggatgtcatcaattatgctgttaagattgtggaagaggagcgaaaccctttgaaaaacatcaagtggatgactcacggtgaattcactgtggaaaagggtcttaaacaaattgacgaatatttttcggatgcacccattgttgtttcttatgtaggtgaccaccaagcattagttcacagaccaggaatggttcgctttcgagaaaactggcagaagaatcttactgatgccaaatatagtttcatggagtcattccccttcttattcaatcgtgtctgatacttacaggatgtcttaggattgtttttctcatcaggatacattaaaaatacaatacagcacgtcaaaccacagaatatttattgagtaataaacttgtggcacacaaaaaaaaaaaaaaaa

SEQ ID NO: 115337 - DNA, 1000 bp, Homo Sapiens
aagccttgtggcaaggcccagggaaagggcatcttccttatcaacaagctctcacagatcaaaaagtggtcccgggacagcaagacatcttcgtttgtgtctcaatctaataaggaagcctacgtgatctctctctatattaacaacccgttactaattggcgggaggaagttcgacctgcgcttgtacgttctggtgtccacgtaccgtccactgcgctgttacatgtacaagcttgggttttgccggttctgcacagtgaaatacaccccgagtaccagtgagctggacaacatgttcgttcatctcaccaacgtcgccatccagaaacacggggaggactacaaccacatccatgggggcaagtggacagtgagtaacctgcggctctacctggagagcacccgcggcaaggaggtgaccagcaagctgttcgacgagatccactggatcatcgtgcagtccctgaaggctgtggcgccggtgatgaacaatgacaagcactgctttgaatgctatggctacgacatcatcatcgacgacaagctgaagccctggctgatcgaggtgaatgcgtccccgtctctcacgtccagcactgccaatgaccgaatcctcaagtacaacctgattaatgacaccctcaacatcgccgtcccgaatggtgaaatcccagactgcaaatggaacaagtcgccacctaaggaagtcctcggcaattacgagattctgtatgatgaagaattggcccagggtgacggggctgaccgggagctgagaagccgtcagggtcagtctctggggcccagagcaggccgatcgagagactcggggagagcggtcctcaccacctggaagtgagtcccacctggaccttatcaaaactactcactccacctgggcccctgctgaagccctattttgaaatttcccttttgtagagcttttttcctttcctaagccctgtaaataaacgaaggcacttctttggaaggttaaa

SEQ ID NO: 115338 - DNA, 1000 bp, Homo Sapiens
gagagcagcaggaagggctgggagagccgcaagcggaagctatcgggagaccagccagctgccaggacccccaggagcaagaagaagaagaagctgggggccggggaaggtggggaggcctctgtttccccagaaaagacctccacgacttccaaggggaaagcaaagagagacaaagcaagtggtgatgtcaaggagaagaaagggaaggggtctcttggctcccaaggggccaaggacgagccagaagaggagcttcagaaggggatggggacggttgaaggtggagatcaaagcaacccaaagagcaagaaggagaagaagaaatccgacaagagaaaaaaagacaaagaaaaaaaagaaaagaagaagaaagcaaaaaaggcctcaaccaaagattctgagtcaccgtcccagaagaaaaagaagaaaaagaagaagacagcagagcagactgtatgacgagcaccagcaccaggcacagggatttcctagccgagcagtggccatccccatgcctctgacctccaccgacctctgcccaccatgggttggaactaaactgttaccttccctcgctccacagaagaagacagccagcttcaggggtccctgtgctggccaagccagtgagcctgcggggaggctggtccaaggagaaagtggaccagctcccatgacctcaccccactcccccaacacaggacgcttcatatagatgtgtacagtatatgtatttttttaagtgacctcctctccttccacagaccccacatgcccaaaggcctcgggacttcccaccaccttgctccacagatccagctaggcctgacctgtgcctcatcccgtgccgctcggtctctggctgatcccgaggctttgtcttcctctcgtcagttcttttggttgtgttttttgttttttttttaataactcaaaaaaaaaataaaagacttggaggaagggtgcaagctcccagtgcaaaaaaaaaaaaaaaaaa

SEQ ID NO: 115339 - DNA, 1000 bp, Homo Sapiens
cacacagctggaagaaatcatagagaagccgggcgtggtggctcatgcctataatcccagcacttttggaggctgaggcgggcagatcacttgagatcaggagttcgagaccagcctggtgccttggcatctcccaatggggtggctttgctctgggctcctgttccctgtgagctgcctggtcctgctgcaggtggcaagctctgggaacatgaaggtcttgcaggagcccacctgcgtctccgactacatgagcatctctacttgcgagtggaagatgaatggtcccaccaattgcagcaccgagctccgcctgttgtaccagctggtttttctgctctccgaagcccacacgtgtatccctgagaacaacggaggcgcggggtgcgtgtgccacctgctcatggatgacgtggtcagtgcggataactatacactggacctgtgggctgggcagcagctgctgtggaagggctccttcaagcccagcgagcatgtgaaacccagggccccaggaaacctgacagttcacaccaatgtctccgacactctgctgctgacctggagcaacccgtatccccctgacaattacctgtataatcatctcacctatgcagtcaacatttggagtgaaaacgacccggcagatttcagaatctataacgtgacctacctagaaccctccctccgcatcgcagccagcaccctgaagtctgggatttcctacagggcacgggtgagggcctgggctcagtgctataacaccacctggagtgagtggagccccagcaccaagtggcacaactcaaatatttgctgagttcctcctacatggctagccctgtgctagacactggggaatcggcgatgaacaaagcagatagaaatccccactcttgtggagctgacattctggagggagagacaaaaagcaaacatataaagaaagaaagaaatcacatggatctggatgacagtgagtgctgggaagaaaataaaa

SEQ ID NO: 115340 - DNA, 1000 bp, Homo Sapiens
tctggtagaaaggcctaacccattacaccagaagaccatgggtgaagtctagatggggaggagaagtgaggccagggacagtcttgccagacgactctgaggagggcaagggacagttccatggcccttcccggactgcactaggctgggagctctgttgtgtggaggggtggtcagaggtctgtgaagagcgggcaggaggcatgagcaggcgaggagctggcctgtcccgggaagcagcccagcctgtggctgcccccgacaccaggaggagggccaggagagttccagggggctgaggcacacagagaggccaacttcctccctgcccagccttccttgtatctctccagactcggacaatcaaagggagagagggtgtatcgggtcctgttccagccggcatcgccgggtggcttccaggcctcagagctgtgtggcagggccccctgctggggctggacatcactgcagtccagtgcaaagccgcccccagagcccaggtgtccccccaacctaaccagacctggtgccttgacgcccccaccccagctgggacggtacagagaagggtcttggtttcctctcctactcccttccttaggctcctgaactcgtttgctcctaaatcttgttaattctttttctctggattttggtttcttttggctttcccttgccttcccctttctctgtctccaacactctttccccatgtctttctggctgtctctatgttcctcttctcttatcctcaactttctgtccattcgggcctcctccccacctcccacgccccagcccctccctccttggtctccttttcgatatgccaaaccaattttgggtcgagtgcatttaacgagaacaaaacaaaaggctcataacaacaagaacgtttcagaaaaaaacaaaaagttttaaaaaaattgttgagtcaaaaagtcaaacaataaagaaattaagatttcttggaatgacaaaaaaaaaaaaaaaaaaa

SEQ ID NO: 115341 - DNA, 1000 bp, Homo Sapiens
cctatggcttattcacaactgggcaagaaaacatcattggtaagaactgctgagtgtgcccttagaaagccctagtagctccagctgtgactatatcaactgtgtgccaagtgtgactttgtacagttttatgtttccactctcctgtatgtgtagccactcgatgcctaacctaccttccacaagccagccccgcatccctgctcccgcagtgtaagtgcagagcctgcctcactggtaagggaaaaccttggcttgggaggccagccctggcccttgaaggggttggctgtgcccagcccacctggctgcagtgggcagctcatgtctgtatctccaaagtgatgtttgtttgcaaaacaccggctgaactgagctggtgttgccaactcttggcagcactgggccaaaccgaccacataccatgagctcccaaatggcgtgtgctcactgtgagacgtcctgccacaccccacaggagacggaggcagtgggcatttggaaccaattctattcagacttcgtcaaagccaaagtcagtctggtgttgtcagttgacacatctccagagttcatgacagctcaacctctccccttgtacagaagccatttttgtaaaaccacactgacctaaattcagctgccaaacacagtctttcctattgatccgctcggcttatgttgaaaatttcaatgtcatgattacctggttggtttgggtttttgttttgttattttccattagaaatataaagatgtcaagaagcttttaaaggtcaacacaaaaaaccaaggccaggagtgaggggctctttcttaccgtaaataaggggaaaaggcagttagctcaaggacttgtgacggatccactttggtgttcaaggacctgcttatgccctcagtgccaatcggctcttggtgagatgactgtactcctaaggaaaatagccacttctgcagtctattatgcttttataactgtttaaaggtacttttctat

SEQ ID NO: 115342 - DNA, 1000 bp, Homo Sapiens
cacaccccgccactgaccccagcacagtctggttcccagggcttcaggatcctcctggggacctctcagcatgattgacacaggcagacgggacctgaaggggctgctggtccttctgaaaatgttcaccaggtagtgtgagtgtggggaagccatgaacaatgtgtgggactctaccctgcacctgctcagagcctcagcccttcagagccactactaatgatttgctgtgggtggggtcaccctgatacttctctgaggtggctttttcttgcagtttttctgagtaactgacaggaatccttgactgcatgccgcctaaactagggtgtgcacagccctcgttctgtgcaaagagggtgcaaagcagcagagtgtctgtgacccatttgccacctaatgttactacaagatttgcaagaaccggtcacttatcagtaaccatttttatttaaaaagataaaatagagctttgcaggaaagtgctgcaggctcccacgttgccgggcagacgacaacctgggcgcctcgcccagctcctccccacagccattggcatccactgtcaggtttcaatgttcttggacctcagggccttcgtcctctccaatctaaatgcagagagacatttgacatggactctctcaggtgttttgcaaaatgcaacacattctcattgactctggtcactctgctgtgcactacatgtcaaaacctcttcctcctccctgagactttggtcctttaactgacaacccccctcccattccctccctctgccactctctgacccctggtcaccatcgatctacttgctacttctatggggtcaacttgtttagatcaacacttctgggacctcacgtggaattggtctctctgaggtagtggagatgctaagtagtgggatttcctcattccacattgtaccccatgaatgaatacaagcatgatttgccaattgaagcaatacaataaagacagaagaaatgtaaaatgc

SEQ ID NO: 115343 - DNA, 1000 bp, Homo Sapiens
tcaagcattaattgacattagagtcaaatcagccttgacctgagtttgttgatttaacattgatttcaagcattaattgccattaaactgtttatgttaagaggattgcactgggggccatggctcatgcctgtaattccagcactttgagaggcaaagacaggtaggtcactggagctcacgagtttgagaacagcctagccaacagatgggagctacttttcccagcctttattttctttttcttgttttttttttgagatggagtcttgctctgtcgcccaggttggagtgcagtggcacgatctcagctcactgcaacctcctcctcccaggttcaagcaattctcctgcctcagtctcccaagtagctgacactacagttgtgtgccaccacacctgggtaattttttgtgtttttagtagagactgggtttcaccgtgttagccagaatggtctctatcttctgactttatgatccacccgactccacctcccaaagtgctgagattacaggagtgagccactgtgcctggcctgttttttgtttctttaacaaaaagttatagagacttctatgagtattgtaccgaatctaaatcacaattgagtatataatcattgagcgatattcatttttccaatcagtatgggatttatatctatttatacatgtttttaatcattttgatcaatgtttatagatttcaaggtacaaacctcactttttatgtttattcctaaatatttcttactttaagttctttagcaaatggaattggtttttaattttcttttaaaattatttattgttaatgtatggaaattcaactaatttttggtgctgttattctattctgcaaataaactgaatgtgtttgttagttccagttgcattttggctgactctttgtgattttctttacagaaggtcatgtcatctacaaacaaataaaatttgacttctttctttctgaaaaaaaaaaaaaaaaaaaaaaa

SEQ ID NO: 115344 - DNA, 1000 bp, Homo Sapiens
aacatgtcttcggctccggggtcccgctccggctcccgctcgggatctcgctccggatctcgctccgggtcccgcagtgggtcccggagaggaagctttgacgccacagggaattcttcctactcttattcctactcatttagcagtagttctattgggcactagtagtcagttgggagtggttgctataccttgacttcatttatatgaatttccactttattaaataatagaaaagaaaatcccggtgcttgcagtagagtgataggacattctatgcttacagaaaatatagccatgattgaaatcaaatagtaaaggctgttctggctttttatcttcttagctcatcttaaataagcagtacacttggatgcagtgcgtctgaagtgctaatcagttgtaacaatagcacaaatcgaacttaggatttgtttcttctcttctgtgtttcgatttttgatcaattctttaattttggaagcctataatacagttttctattcttggagataaaaattaaatggatcactgatattttagtcattctgcttctcatctaaatatttccatattctgtattaggagaaaattaccctcccagcaccagcccccctctcaaacccccaacccaaaaccaagcattttggaatgagtctcctttagtttcagagtgtggattgtataacccatatactcttcgatgtacttgtttggtttggtattaatttgactgtgcatgacagcggcaatcttttctttggtcaaagttttctgtttattttgcttgtcatattcgatgtactttaaggtgtctttatgaagtttgctattctggcaataaacttttagacttttgaagtgtttgtgttttaatttaatatgtttataagcatgtataaacatttagcatatttttatcataggtctaaaaatatttgtttactaaatacctgtgaagaaataccattaaaaaactatttggttctgaattcttact

SEQ ID NO: 115345 - DNA, 1000 bp, Homo Sapiens
tggcgaatggatgacgcaccctagccactggcccctctctgtttcatgtatttccaaaagttgtaaactttgatggctgatttttcgtaagtcaggtttctaagtgagctccctgaggtgccaaggccatggtgtccgccctgctgcgtctgttcgtcagctgagttccttgtgaatctctgttttagggtttggggctagtgtgtttgtgtttccattctaagattgagtctggcagtccctgtttttttgcattggggtaactgctctttgattttttttaattgcagtatttgtgtgattgcaataataaagtttggtttggtttttacagtcatgcgcagggacgatccttgttctctgctgtaaactgtaaaaagtttatggagacttaaagtcttgatgttgtgaagcagaggttattttgtggaaagattaaaaggattttgttggtacctggttttgtgttgtgtatatatacatgaggttgaacagtgaaaggaaagttcagtagtgatgttagaagggtaactatgacaaagatacttttgagataacatttaaaagtactttatattttacataatagcatgtttcattttgattaaaagctaccaaaggaattttgatcatggcataagtgtttaaagcaatattttctggaatataccaagtttatataatttgattttgtgctaaattattaagagtctctttttgaaacatgcgggtttgaaatatgacaccttgtgggtttccatattaaaatcctcactctttaattgtcatttctatctttgaaaattttcatttatgagttccatgatatgtggtctaagaaagaccaaacagatttctattttttttttcttataagttcgttgtgtctagagattgttaatattgtaatttaatgtagacttactttgaataaaattagtttaattggccttaaaattacattaataaaactttgtgatatgcaaatgaaaaaaaaaaa

SEQ ID NO: 115346 - DNA, 1000 bp, Homo Sapiens
tgagggcccaatgtgtgatctgttatggtcagatccagatgatcgtggtggatggggtatttcaccacgtggtgctggctacacatttggacaagacatttctgaaacctttaaccatgccaatggtctcacactggtttctcgtgcccaccagcttgtaatggagggatacaattggtgtcatgatcggaatgtggttaccattttcagtgcacccaattactgttatcgttgtgggaaccaggctgctatcatggaattagatgacactttaaaatattccttccttcaatttgacccagcgcctcgtcgtggtgagcctcatgttacacggcgcaccccagactacttcctataaatttctcctgggaaacctgcctttgtatgtggaagtatacctggctttttaaaatatatgtatttaaaaacaaaaagcaacagtaatctatgtgtttctgtaacaaattgggatctgtcttggcattaaaccacatcatggaccaaatgtgccatactaatgatgagcatttagcacaatttgagactgaaatttagtacactatgttctaggtcagtctaacagtttgcctgctgtatttatagtaaccattttcctttggactgttcaagcaaaaaaggtaactaactgcttcatctccttttgcgcttatttggaaattttagttatagtgtttaactggcatggattaatagagttggagttttatttttaagaaaaattcacaagctaacttccactaatccattatcctttattttattgaaatgtataattaacttaactgaagaaaaggttcttcttgggagtatgttgtcataacatttaaagagatttcccttcatttaaactaaattactgttttatgttgatctgcatatttctgtatatttgtcatgacagtgcttgcatcctatttggtgtactcagcaaataaacttttcattttaaacaaaaacattcaaaaaaaaaaaaaaaaaa

SEQ ID NO: 115347 - DNA, 1000 bp, Homo Sapiens
tcatttaaaaatccttggaactcaatgtggaactttaaacattttgcaaaattacatttagagaaacccaatttttcaaagtttaagaaatatacaaagtatgacaaaattatcttcataagaacatgctgcatacttgcctagtagcaaaacaatacagggaagagtcaaaagggcttctccaactgtagaggtacagattgtcttaacctgttcttttctgtacagacttaaaatttctagtggcttttatttttctttgtattttaattttcctacaaagtcctttttggaagttgcagaattattagctttgatgagaacaacttttgtcatagatttgatttattaaaccaaaattatacatattaaaattatatcacaaatatatatgcttccagacaaagaaaagtttgttagtcctgattttctaatcgtagccactcaaggaacagtcctttcatagtaccccaagtatttcaattagacttataaaagtataagtcaatctatggtcagtgtctttggttaaaaaaaaaaaaaaacacaggcagttctttacataaaaacgtcccacacgttatagatgccagccacctcctggtagtcactatggacaactaatgagatgcaaagtcttttggaccgatgatgtctctactactggatctatctgtattaacagcaatgttactctcaatgaaactgcagaagccaccatgaacatggaagaccacctagcagatcggtgagtaggctgcttgttcagctttcctttaacacctgttggtaaatactaatgggagtagacagagttgtatggcctggacagtggaaaccaagagcaggatcgcaaagtaacagcatcagactcttctgccctcctcttgcacttgggttctgactcccagaacaaagaacttgggagaacagtacgggagactgagcagaaaggatgggtttgctgactcgccttgaaatctaactctaacgtaggcag

SEQ ID NO: 115348 - DNA, 1000 bp, Homo Sapiens
aggaaaattcattttctttgcattattccagtaatatataaaaactgtgtcttgttatagtagtacattatgaatcacatataaaatcttacaatacagaacaactgttaagatggaaaacagtgccaaacctccacagctcatttctttgtaatataatcagaatgaaaaataatttaagaggacagaagactggtacttttctgttttattttttctctagcttatccctgcacaattattagagtgaatgaaaaaccactttcctgctttccattgttataaattctaagcttaagataaaagtggttctttacatgactgaatcaattacaatttatgggctagagccaaataggttgaagacaatcatccaaacagatcaatggaatagaatttcattggaaatgtaaaacactttcccaacaatggtcatgactttcttctgtttttgagaagagtttcatatgctggaccacattttagcttttattgtttcttttttcccattgtccaaaaagttaagcaacaagtggccacacttttacgtgactacaacctggagttctgcaaagaaggtaatatttacttggtctttgactaaagttatctccccattctatggttacattttattttggactatggggacttctaatacgttttggtaaagaagagagtataaagaaaattcttgtcaaatttcactcaaaagtaatttcatgagaaatcaatgatttaaagcattatccaaattaaattatcatttgcagcaaactgtacaacagcaggaaggatatggaatggaacatgaggtatatatctttgcctttataattttaacatcttatattgaagattctgaaaacctatctttattagaggaaaatctcaatcttcagttttggccttctgtcaccagaatgataagtgcaacagttgtaaatctacttgacactgtaataaactgaactgaactttcaaaaaaaaaaaaaaaaaa

SEQ ID NO: 115349 - DNA, 1000 bp, Homo Sapiens
tagattagacctccaactccatatttaccagctgaagacgctcatcaagattgtgaagaaaacctacagggactttcgattgcagggtgtgttggaaggaacactgaacagtaagacttatgatactgtgcacagacgtttaacagtagaggaggccacagcctctgtttcagaaggaggaggacttcagggcattactatgaaagacagtgacgaagaagaagaaggctgatatcacacagctttgcagaaggaaggaagaccttgatcgacattgttttttatttttttaaccttgtccttgtaattacattcattgtttgttttggccaaataaaaatgcttgtatttctttaaaaagtaagcctgaatgtagagtaaaaggggaaatgccaagattttggggtttttttgtttcctttttttgtttgtttgtttgtttgtttttttggagaagagcatcctcttttgtgtagtttgacctaaaaatgaaccttggctctgcttgtgatcagaacatgaacttttttttttaaagaagatttgagcatttttctgtaatcacatcaaaatgatgttttctgtgtaaagcgagatacatatttctcataatgcagcattgtgagaagtcagttcggaccactgcaccaacactgtcgtatccttgttaaaatggtgtgtaccttacaaattataatttatgtgccaggttcgttttgtacttaatttgctattattgtgatgtgtataaaatctttaatcttggttcttagtactttgaattggtctacaggtatattcctgggatgaaaggattgccaaacccaaatatagactagattatccaatgggtttgtgtctttgttccattctcaacatttcttctttcaactataagtaatccccaggtgtggggtagcaagtgtgcttccgtcaagataccatattctcctgctccagtataacagcttgcaggcaataaaaatctatttgctcataa

SEQ ID NO: 115350 - DNA, 1000 bp, Homo Sapiens
gtgggatttgctttcatgtcctgtttcaaaaaccaagtgtctcttgacagcccactggttcttcctgtcctcttgctctagtctgtatcagaaagcagaatgactgtacttttgttttacaaacaaccacctgataggacggacactccacgagataaggaaaggcacgtgcccttgagcttgaatggaagcagcctctggagggggcagccactgcccttcgagggagagcagctcttcagcagtggccagagtgccacgtgactctgcagatgacccctgggagccgggtgatgggcacctgctggggcttttgttttttctttttcactggctggcttgatcctcagtggcaaaaggacccctgagccccttctccgagccctggagcactcctcgggacaccgagtggcctcagggctgggttcagagctcctcccgcagggggagcctcagaagtggaggcagctgctgatgggtgagtttacaacttcttatcctgcctaaggcgagtaggcgtttttattccgtttccagtccttgagctcagcagatcaaaataacagtgaccctgcaaccccacagagcccgcgacacgctcgctttcttccccgccctgcccctttagtccccgctctggaaggccaggcagtttaggtgtaaataggtatcttttatggtttccaaatgaattatttgtgtgagagtaattaaatctgtaagaaaacctgttgagattcttcactatgaattatgacttctacaacatgtattttagcaaaaacacgatgctggcctccactggatagctcagtatgctgattgccagtgatagttctgtacgcgttaccaacagcgtctttattaaccctcttccacatccagtggaaatcattgctaggcggtatttgttggttggctgttagctttgctttatgatttcatgtttcttttaaaggttgttttgcatgttgaatattaaattttttttttctgtgtc

SEQ ID NO: 115351 - DNA, 1000 bp, Homo Sapiens
gccagacctgtggcaatccctaacacgtctcacgatggacactggccccgtactgtggctccaaattccctggtaaacagtggtgcagtggggaattcagagccaggctttcgaggactgactcctccaattccttgggaacatgcaccgcgtccccatttcccccttgtcccagcttcgtggccttatggtttgcatcaaaacttcatgcatcagggaaatgcccgattccagcccaacaaacctttctatactcaagacagatgtgccacccgtcggtgtagagagcgttgtccccacccaccaagaggaaacgtgtcggagtaatgcgagtccattttctttcagctggtctaccgatgcacagcaaccagccaatcctgctgtctcaagggtatccgtacctcaatgtcagttacattcagcagaaaaagtgacatttaatggaaagcaaaacaaatcaggtcctgatttaaaattttaacacgtttagatagcttatttaaattctaagactgtttttacagactgtattatttgtatataaatatgaactatagtttttactagtatcaccaaattgagtgatacaaatttcatctattttattaccctatttttaagggaattttatgttttgtttaaccttgatgaattgtataaagagagaatttaaaaaattacattctttattttctattagctgtattcatactttggttgcttcagactttatatattgttcttaaaagttaggaaagaatttcatgtgttttaaattgtcacttctattctttacagaaccttgtagtgccaaaaactttttaaaaggtaaaaaaataaaataaaattacaacatgaagattcagattttttttcttttccatacttgtatattgaacattcaaacttgaatggaaagttgattttgtctgtatttgaagtacttctattttaagttaataaatctttttgacaagagttaaaaaaaaaaaaaaaa

SEQ ID NO: 115352 - DNA, 1000 bp, Homo Sapiens
acaaaacaaagaatgcactgtggaatttgagggccaaacaagatggacatgctacaaatgcagttcaagtaacaaagtaggaaaactcagtgaaaattcatctgaaattaaaaagggaaggataaccccatcacaggtaaaaatgtctccatcgtatcatcagtccaaaggggatcccactgctaaaaagggaacctcagaacctgttctggatccacagcaaatccaagcatttgatcagctttgccgtctctaccgaggaagctccaggctggctctcctcacggaactctcccagaatcgcagcagcgagagctataggccattcagtggctcgcagagtgctcctgctttcaacagcatcttccagaatgagaacttccagctgcagctcattcctccacctgtgactgaggattgatgactccatggagcctggcccaggagaaccagagatgatcccgaggcagctggggagaggccccgcctctggtgggcttggcctccaccacctcccacgcttctgagaagaggttccaaattgggcttctgtgcccagagcgtccacagcaccattcccagtgtagactcccagtcttctccacattgctgtcatggcgtcagttcaccagactcattgattttgttttgcttgttaagcaaaggaatgtcacatacctctgtccagctttttaggaaatacatttcgcctattgcgactttttccatttaccctgaagcctagaaagtaggtggaactcacacaaatggcattccagagtctgccatactccgtctcctccagctgctggataatacagaggaacttcaacttctacagggaacagtggttggccaggctgcagtataactgaagcatgccttggagagagcagacactgtgggggccagggccatctccctttaatgtgttcatgttaaaacctatttgagtgtaagacttgccctttctaacaataaatgctccgtgtttaagttc

SEQ ID NO: 115353 - DNA, 1000 bp, Homo Sapiens
gttcatgacacgtcaactcgatgattaaaatccttcaacacttctcattcacaataagaataaaatctacatcccttaccattcagtatgcaaaacttaaaatacataactttacccttaaatattttttctttctctgacttcataagtataggttatacctctataagaaagaaggtaaaaaactctcaacaatcccttctttcagagagaactactgttaacattttaacagacaacttcattcttttcctattcttttttataatgcttacaggaatgttaaatacttagacagatcttaagtacactagaattatctgtccctgaaataagttaggttgccctgccgcagaatttgtatctatagtttatttggattatttttgaaaaaagtaaaataacaatacccttacgaattttttggtgcatagcatctcagcttcttttatcattaaagatgtatgtataaaaaaaaaatgagtgtatatcaagttgttcatttcttagtttctggggtcttcttaaccagtacatagaactctttatgaattaactttagcttatgttggaagtagtagtttgtttatagtgtcatggattttaaaatcaaactcagtttttatttcttcactaaaacctattttcatatgatatacatgttaaatttcccttttattttggtcatgcatcaaaataaatttactaagtactaaagagccaacattattttataagtgcctggcaataggtattcactagttgaatagtttaatttgaaatgaattaattttaaatgggagttgttcaaaactatgccactttttcttttgtcctttgtgttattaaaatttaattgataattgtgtatattatatatatggagtacaatgtgatgttttgatatatgtttacagtgtagaatgattaaatcaatgtaataaatttattgcctcataccattttttgtggtaaaaaaaccaaaaaaaaaaaaaaaaaa

SEQ ID NO: 115354 - DNA, 1000 bp, Homo Sapiens
ttactcctatgatgacattccagactttgatgactagcacccaccccatagctgaggaggagtcacagtggaactgtcccagctttaagatatctagcagaaactatagctgaggactaaggaattctgcagcttgcagatgtttaagaaaataatggccagattttttgggtccttcccaaagatgttaagtgaacctacagttagctaattaggacaagctctatttttcatccctgggccctgacaagtttttccacaggaatatgtatcatggaagaatagaggttattctgtaatggaaaagtgttgcctgccaccaccctctgtagagctgagcatttcttttaaatagtcttcattgccaatttgttcttgtagcaaatggaacaatgtggtatggctaatttcttattattaagtaatttattttaaaaatatctgagtatattatcctgtacacttatccctaccttcatgttccagtggaagaccttagtaaaatcaaagatcagtgagttcatctgtaatattttttttacttgctttcttactgacagcaaccaggaatttttttatcctgcagagcaagttttcaaaatgtaaatacttcctctgtttaacagtccttggaccattctgatccagttcaccagtaggttggacagcatataatttgcatcattttgtcccttgtaaatcaagatgttctgcagattattcctttaacggccggacttttggctgtttcctaatgaaacatgtagtggttattatttagagtttatagccgtattgctagcaccttgtagtatgtcatcattctgctcatgattccaaggatcagcctggatgcctagaggactagatcaccttagtttgattctattttttagcttgcaaaaagtgacttatattccaaagaaattaaaatgttgaaatccaaatcctagaaataaaatgagttaacttcaaacatttcagaaaacaaaaaaaaaaa

SEQ ID NO: 115355 - DNA, 1000 bp, Homo Sapiens
ttgcagtgagccgagattgcaccactgcactccagcctgggcgacagagcaggactctctctcaaaaaaacacaaaaaaacaaaaacaaaaaaccatacacacacacacacacacacaaatcagcatcataagggaatgtagccttccaacagagatgatgctgttcgtatgttaatctcagagacagtatttcaagagagtggcaggtctgttcctggtaaaattttaaccattaggattgcagataaatgtttgaattctgctcctctctcatcaatccaggacagtatttgaagtgtgagggctttgtgtatagttgtttatccattaccacatttttgtattttaatagtctacaggctatataaaagaacatggctttttgactgataaaagtgattacagatgttggctcaagttcagggccaccatcatatacctaacaagagttcatgattctttaggtaatgtcaaaacattttgtatttttccatcttaagctttataacattttgtgagtaagacaaatgttatttaaaattcttgttgtcagtccagcaattgaggctttcatagttcagtgttataatattcagtagggaccctcaacaaatatataaaaatatgttgctcactctataatcctcctatggctaacctctaggatagttctgccactatattttacttctttgccatcagcaagagtaggatttcatcaaggcaaggtaggaatctaaatgaaattgatatataaatgaattgatctaaatgtaaaagcaaatgaaaaatgcatgtgttttttcctgtcaaacatgtatacccttatgtatagagaccagtagtcacgtatggtgactgaaacaggattatgtaatccctaaaaagcagaatatgtaaaaatcacatgtatgcgtttggtttaggaatgtgcttttgtacttccacttgaataaaggtgtgtttggtattctgagaaaaaaaaaaaaaaaaaaaaaa

SEQ ID NO: 115356 - DNA, 829 bp, Homo Sapiens
cctcttttccgtggcgcctcggaggcgttcagctgcttcaagatgaagctgaacatctccttcccagccactggctgccagaaactcattgaagtggacgatgaacgcaaacttcgtactttctatgagaagcgtatggccacagaagttgctgctgacgctctgggtgaagaatggaagggttatgtggtccgaatcagtggtgggaacgacaaacaaggtttccccatgaagcagggtgtcttgacccatggccgtgtccgcctgctactgagtaaggggcattcctgttacagaccaaggagaactggagaaagaaagagaaaatcagttcgtggttgcattgtggatgcaaatctgagcgttctcaacttggttattgtaaaaaaaggagagaaggatattcctggactgactgatactacagtgcctcgccgcctgggccccaaaagagctagcagaatccgcaaacttttcaatctctctaaagaagatgatgtccgccagtatgttgtaagaaagcccttaaataaagaaggtaagaaacctaggaccaaagcacccaagattcagcgtcttgttactccacgtgtcctgcagcacaaacggcggcgtattgctctgaagaagcagcgtaccaagaaaaataaagaagaggctgcagaatatgctaaacttttggccaagagaatgaaggaggctaaggagaagcgccaggaacaaattgcgaagagacgcagactttcctctctgcgagcttctacttctaagtctgaatccagtcagaaataagattttttgagtaacaaataaataagatcagactctg

SEQ ID NO: 115357 - DNA, 1000 bp, Homo Sapiens
agtgctcttggtatacacttgggaaaataatgtcctccaggagaaagtgttagagggaactaacattttaggaatgcttattcagaaaaaaatcctagagttgattcattgttttcctccatcctgcaaaagaagatccctttgttaagcagctcacttggaaatatgattcttggagtcaatgatctctaaacaaactggattatcaactatttacaacgtctatacagtataaactacctcacttgcctttcttgggaaaaaaaaaatgaatggactttaacaattgttgttacaaactgtgcctgaatcttattatttaaatcacttcagttagctttcagtgtatgtttaataatatacatttaatgatgaaaaatattttcagcaaagctttaaaaccagaaatactgtgtaactgtgatctatgtggtatactctgagagaattctgtgtcctgctcattgtcttgagtttctaaccatgtgcagatgcaagcgttcaggagtaggaattaatgtccatcttttctttcaggcattttcatctgctgtccacgtatttcacttgactgaaagctcatatgagttaaaatgtcccttcttcctagcgagcatatttcaactgttcttcataaatgtttatgtgccttaaaagactttatgttaaaggattaaatagtttctctgacaggcagtttttaactgttttccacaaataaaaataatatgtcatgggattaaaatgtttgttttcaagcatttttaacagttttacacacttacatacaccttaattaaaaatttttttctgtcagacatttaccaactattttctaaaactaatttgacaaatcatgacactagaaaacgccaatgttttatgtctttgcccatctcaaaagctaatattgattcttctgttccatcagctttcattgttaagtagaatatgtatgttgcattttatccataagaaataaagagaaaaaaactaaaaa

SEQ ID NO: 115358 - DNA, 1000 bp, Homo Sapiens
gcatattcctctagagcttcacagccaaacccttgaggtacctgtttctcagctgtcctttgactaacacctgattcacttagttctaccctatggtgctctttctaccacctgcatctcttccttttttcccttttactggctctgcttccctttactctttgaatcctttgtttctccacctagaaagtttctacctaccttatgtatccttcccgatattattgcatctagttctggactgggtttcttaactttccacctttgccagctgctacccagtatcattaaaatattaacatttagccttgctcaatggacctgtagtctatggttcagtctataatttgatacagctccctccagcccttctgagtctaaaacacattccaattcctctgttttccaggcttattttgccatcagtaactccttcctgttcccccagccatgagtgaatatgctgaatgaggacctttgtaagttctgatgaagtagcatttaggagaatgaagcactaatcccagagctaatggaccttcctttcctttcagtactgtaaggagttcttctctcaatgtgtgacctgccctgtctatcaccagtgggtatctgagcttagggcctctgtaatgagatgtgaaaagagagaattgatgtccctgactaacagcatcagaccttttgacacctgcttgaccaggatttggataaaaggagaatttctgcaggaaaataactcttagaaaagaaacttaggaatacagagatttgacagagtggctgatgtcaaggagaacaaggatgcagaagaaactcaagatgtatgtattaaaacaaaagaacaataacctgaagggaccatgattctgttattgtatataacacaaggaaatgccccagattctcctttaaaagatataatgtacatattaagtatactagcctttatagttactgctatctacatgtttatcaaaataaaagactatttttttct

SEQ ID NO: 115359 - DNA, 1000 bp, Homo Sapiens
acgactatagttaagaacattatattccatttagtttcaaatagctaaaaggagattttgtccccaacaaaaagaaatgataaatatttgaaaccatggatactctaatttctctgatctgaccactataaattatatgtattgaaacattattatgtatctcccaaatatgttcaattcttatgtcgctcaaaaaataaaatttaatttaaaaagtatctgatttttaaagtaaatatttttttaaagttttgacatttaaattacttgaatctcattattttgacaataatttaattcttttattgttcaatctgttagtgagatgtgtcataggtattatgtcattagttcaaattcttgtggaaattatagctacattaaaagtgtaacatttttatttagatgtgtacttatttgttaataatacagacattgtatgttatcatactgcaatttacaattaaaatattttctgtagattatttgaaaatcattctgaatatatattttgaaatatatagattatatttgtatgtaaattatatttatacatctgaaatatatttcaaaatatgtgtgtacgtgtgtatatgtgtatatatatacacatatatatacacatacacaaatatatgcatatttcaaatggattgtatgcacttgcaaagcaaaagtacattggtaatttgggcacattcagagtggaaaaaatttgttctatttttacatctttaaatacctatcttctatgaaagcctatgtgcatgtgtgtgtgtgtatgagtttctatgtgagcatgcatatatacttcacaaagagatgacctatataaatcaaagtacacattatttaaaatatttaaaagaaattttcagtttcttcatttttaaattgtgatttttagatttgttagtctatggagcattttcaattctcagattatacatatgtaataaaatatgttcactaaaaaaaaaaaaaaaaaaaaaaaaaaaaa

SEQ ID NO: 115360 - DNA, 1000 bp, Homo Sapiens
acttttcttcttctaagtaataaaacacatagcatgattctctctccctctctctctctctctctgcccaccccctgctagtttccaggagaatacttctctaaaattcatttttttctattttggaataaattatctttatacagtaattcaaacactgatttccattaacctttggccctgagttttcttctaacatagaagagttcattttgagaggcactcagttaccattcaatctgtgctgtaagtatgggactttgtacaaatgccctttttgagggccaaaaatttcaatacactttgttctactttgtgaaccaggtctggatctgcacagagaaagtaatgctgagctgtccaaagagtccgctcaggtctccctcctaaccctcctctgccttcccctagtttgcttatcctcacgtctgacactgaggagtgcatagtcttcaactgaaatggcactacagttagttctcattggaaacaaacaagtgtatttctggaacctgctcgtctaaaatagtcaatgcctttgtaaagactcagcatattcaatatctattgtatggtagctagctatatacatagattgactatttttagtcctggtttgtgtattgttgagctatagtagtttgctttatccatttgtgggattaaacaatactgtttaatggttgtaaacttttataaaatctctttgggttttttgtttgacccaaacataatgtaagtcttaatgacaaaatacacaaagttaaccagaggtgagtgaaaatatagcccttccccagttttgtctgcccctataatgcacgtgcattgctttgtaatatgctctcgctagcatgaatgtgctatgactacttcatgaggttttgtttcacctataattgtgatggaaaatgctgtattgctgacaacaatgaactgtaaccacagttatttactgcataaactatttgtgtactaaccaaaaaaaaaaaaaaaaaaa

SEQ ID NO: 115361 - DNA, 1000 bp, Homo Sapiens
ctccctgagtgctccctggtttcccaagggaaagactttctggcctgctgaggtcgaatcttccaagaggctcttgcaaagacccgagattctcataaatccccgcccagaagagctgcacgtatccctttcatgagtccagggaagagggtcctccaggtcttggaagacagaggggagctgctttagaggctaagttgctttgagcccacaaggtaatggagggctcctacttgggacagagccctcagcagagaattagcagtctgttggtgggttcaccccaactcacagcagtagaaactgctccatcttccaccacttattgggtttctccagtgtcagcaaaccaaagaattggatcttaccaatgcggctataggaaaacagcctgttgcatggtaagagtgataccatcttgaagtgaaaccaccacaatggccattttttttttagatggagttttgcagtggtgcaatcatagctcattgcagccttcaattcctgggctcaggcaatcctcctgcctcagcctcctgagtagctgggactacagtttcgtgtgccaccatgcctggctaatttttagaattttttgtagggacagggcctcactctgttgcacaagctggtcttgaactcctggcctccttgaactcctcctgccttggcctcccaaaatgctgagattacaggtgtgagccactgcacctcgccagatgtccaatgtctgactcctgcataccaaggtgttctgtatcaagggctttaaaacaatgcctgtagcgtaattaacctctcacaaagatgcttatctaacctccccagcagtcatgggtttcagcaagaaagtctgtgatgtgaccagttgcacatgttttcccctaaaagcttactctagaaaggatattttttggagagggagtgtgggaatccaccatcctgtggccacctcagacatcacttctctttggaagactccattaaatatttctctgtg

SEQ ID NO: 115362 - DNA, 1000 bp, Homo Sapiens
tctctttaacgttaaggattttttttctgcctattcaagtctgccattaaaacattaggctggatgcggtggctcacgcctgcagtcccagatttttgggaggctgaggtgggtggataacttgaggtcaggagttcaagaccagcctgactagcgtggtgaagccccgtctccactaaaaatacagaggttggccaggtgtggtggcgtgcacctgtagtcccagctactcgggaggctggggcgggagaatcgcttgaacccagcaggtggaggttgcagtgagccgatatcacaccactgcactcctgcctgggcaaccaagggagactctgtctaaaaaaaaaatacaccgtagtaaatgtttgaattcagttatcgtgtttttcagctccagaattaatttctgttaggttcttttttataacttttatctctgttttgctttgttttgagtcagggtctcactctgtagcataggctggagtgcagtggcacaatcttagcttactgcagcctcaacttccctggcatcaggtggccttcccgcctcggccctactagtggctgggactggaggtgcacgccatcatgcccagctagtttttgatttttagtggaggcggggttttgctgtgttacccaggctggtctctagctcttgggctcggatagtcctcccacctcagcttcctgaagtactgggattgtaggcgtgagctacccggtctgactaatttccatttccttgtgaatatgtgcattttgttcatgtatcttttttatgattttctttacttatctgcctgtgttcttctttggctcatatttaagaatataagcatatttaagacagttgttttaaagtctttgccaagaaagtctgaaaactgtgtttcattagggttagtttctggagatttatttggctctttgaatgtgccgtgcttacctatttctttatatgctttgtggtcttttttattgaaacttgggcatg

SEQ ID NO: 115363 - DNA, 1000 bp, Homo Sapiens
aaaccgcacgtgatgtcgctatgctctaacgatcacctcagttctccctcggattctgggaacagatgaaactttttgcatcgcttgagtcatttttatcacaataatcctactgtgaagctgtcgttgagaacttaggttggcacgtagcgtctcaaggtatgcgttctctcaaaggaaagctatgcatcgctgcttcgttgtctgattttgcttagattttgctttggttaggttgcgttttggggtttgcctttttttgttgtcgcttaaatgcaatttggttgtaaagatttgattcctttgtgttcatctgttccgcttctcagcggtccatctcagcgtctcccttcaggaaccgctgagtgtcctctcttaacatccaagccttttaatgaaatcgtactgaaatctgtatcagctaagagtcctccaatcctggtcccattaactccaagtgcctttttgacagtgacaacagacagtccctcgctttttgttgttgttggttttcttaacccctttaatggaactgcctggattttatacagttattaaaggatgtctcttttgctttaaactgcatgctgccaagtgccatttggggtcagcatcctcgtttcaacacagtgtgctctctagttatcatgtgtaacgtgggttctgtttagcgaagatagactagaggacacgttagagatgcccttccctgctccatccctgtggcaccattatggttttttggctgtttgtatatacggttacgtattaactctggaatcctatgggctcatcttgctcacccaatgtgggagtctggtttgagcaagcgagctgaatgtgactattaaaaaaaatttaaaaaaaaaaaagaaaatcttatgtactatccaaaagtgccagaatgactcttctgtgcattcttcttaaagagctgcttggttatccaaaaatgaaaattcaaaataaactctgaagaaaaggaaaaaaaaaaaaaaaa

SEQ ID NO: 115364 - DNA, 1000 bp, Homo Sapiens
tgcagctgtgccgccttcttgtcctcctcctcattgtcgctgccaaacaggaggcaccggccacaggcccattcatctgctcgtagaatctcctttctgcgtcgtcatatttgaacttgtcgaaccagatcttctcatgtactaggaagtttgtagccatttttctgacgcctgccaaggacgcgacgaccagggaggaggaatcggcggacgcgggacacctgaggaaagggtactaccttaaaaatcttttcctatagtcttggtaaattttaaatgatagctctataaatgatatttataagttatggttattttttttttagtttttcattaattttgatcaattgtatcttactagatcacccatttactgtaggtagtattctcttcctactatatttcatatctacctactacatttcatatcattcctactacatttcatatctacctacatttacatgtaggtagatatgaaatgattcaatatccatgtctccttttactcattacaaatcttacataattttgctctctcttatctctttaccttactcgggtttatgtgaggtatttagtttactaaggttttaaaatattttcatattcattttagtaggaaaaggacggattattttataaatttcattgcctgaataagtttaggtatggtttcgggtacaataagaaagagataaaatggaatgctttatgccaaacatgtttatttttatcacacagctaaagtctgtagttaagttgctgctacttttgagtcaataacatcaagaccagtgttggtgaatcttttggcctttccccaatgcttgaaagaagatcaccactgctggaggcataatgtacaaggcaggaaaagggatggaattgatggtgacagctaagtctgtcttttttcttaggaaataaaggttttcctaggataaaaaaaaaaaaaaaaaaaaaaaaaaaaaaaaaaaaaaaaaaaaaaaaaaaaaaa

SEQ ID NO: 115365 - DNA, 1000 bp, Homo Sapiens
ccctggcgatgggccagaggcgggccggccagcagacaagatccagatggtggagcagctcttcgggctgggtctgcggcccagaggggagtgccacaaagtgctggagatgttcgactggaacctggagcaggccggctgccaccttctgggctcctggggccctgcccaccacaagcgctgagatgcgtctggagagccagagggcctgcctgaaggaatcacctgagcctgtccgtccaccaggagtggggagatgcccccatccagtcctggaggacccgctgctcctgctgctcccggggatggagcaaggccaaggctgcgggaggctgggagccctgccctgcccatccctcctgcaccagcgctgtccctgcacactttggttcagtcccggtgcccctgccaagatgtggaaggggccgggtgaagacaggcttgagggctgccccagcaggctctgggtatgacctgcctctggccctggtcctgggcggggcctgtgggtggagtagtacccccaggccctgccctgggtgacagactgggaggaaaccaggctggacctgggcaggcgggatgtgttggccacagggagaggcggaccggcacccggtgggacctcctaggactgggccttcttccagggggcccctggcagcagctggggtgtcgggcagaatgtgacttgtggccttaccatggacttgaatgggacttggctggcctcaggatcttgtgcctggaaatagcctgaggtggctcaggaagcggagaaagggtgccagaccattctctggcggggaccagggcccaaggccccagggctggaaggagaccaaggggcagccgccctggagggacatcagtgcttcctcttccacccaattcccccacgcggttccatgttttcccaccagcctgttggcgaagttgctgctccggcattcagtacctgcttcttccagagaaataaagttagtttctattttatgtt

SEQ ID NO: 115366 - DNA, 1000 bp, Homo Sapiens
cccctggcccgggcgcagccagccgtccgcgctctagggcagctgttccacatcgcctgcttcacctgccaccagtgtgcgcagcagctccagggccagcagttctacagtctggagggggcgccgtactgcgagggctgttacactgacaccctggagaagtgtaacacctgcggggagcccatcactgaccgcatgctgagggccacgggcaaggcctatcacccgcactgcttcacctgtgtggtctgcgcccgccccctggagggcacctccttcatcgtggaccaggccaaccggccccactgtgtccccgactaccacaagcagtacgccccgaggtgctccgtctgctctgagcccatcatgcctgagcctggccgagatgagactgtgcgagtggtcgccctggacaagaacttccacatgaagtgttacaagtgtgaggactgcgggaagcccctgtcgattgaggcagatgacaatggctgcttccccctggacggtcacgtgctctgtcggaagtgccacactgctagagcccagacctgagtgaggacaggccctcttcagaccgcagtccatgccccattgtggaccacccacactgagaccacctgcccccacctcagttattgttttgatgtctagcccctcccatttccaacccctccctagcatcccaggtgccctgacccaggacccaacatggtctagggatgcaggatccccgccctggggtctggtcctcgcccatcctgcagggattgcccaccgtcttccagacaccccacctgaggggggcaccaggtttagtgctgctgctttcactgctgcacccgcgccctcggccggccccccgagcagcctttgtactctgcttgcggagggctgggagaccctccaggacattcccaccctcccccatgctgccaagttgtagctatagctacaaataaaaaaaaaccttgttttccagaaaaaaaaaaaaaaaaaaaaa

SEQ ID NO: 115367 - DNA, 785 bp, Homo Sapiens
cagcaggaaaccgaagacatgaacaaggtcttcccccagggagagaatggctacactgctgctgaatccaaagcccaccctggaggggaagcaggcggcggccacctctgctgctcacgtcgcggggcctgcctctctgcctctctgctgctcctcctggcaactgtggcggccctcatcgccttggtcaccattcttggactcccatcatgcaccccaggagcccaagcttgtataacactgacaaacaggacaggcttcttgtgccatgaccagaggagctgcattccagccagtggggtctgtgatggcgttcgcacctgtacccacggcgaggacgaggatgagagcttgtgccgagatgtgccccagagcctcccccacttccttgtggcccactgtggagacccggcctcctggatctactcagaccaaaaatgtgatggcactaacaactgcggggactgttcagatgaactgagcccagtaactgtgtgcccaccctgcggccctgggtggtggcgctgtccttcaaccttcttcaagtactgcgactgtataccgaggcatctctgccgcgaccatgtacagcactgctccgactggtccgatgagtatgcctgtcccggaccctgagtgggccactcaggccagcatggaaggctggctggaatggcactgataacccttcacatgaaaatcaaatcctagcgcacaagggcaggaagcagcctttgaaatgggatctacacatcatttctgaataggaattttctctcctcctt

SEQ ID NO: 115368 - DNA, 1000 bp, Homo Sapiens
tggttggattggacctattcagcagctacattttctgtttttctcagtatcctctacttctactcctccctgagcagattcctcatggtcatgggggccaccgttgttatgtacctgcatcacgttgggtggtttccatttagaccgaggccggttcagaacttcccaaatgatggtcctcctcctgacgttgtaaatcaggaccccaacaataacttacaggaaggcactgatcctgaaactgaagaccccaaccacctccctccagacagggatgtactagatggcgagcagaccagcccctcctttatgagcacagcatggcttgtcttcaagactttctttgcctctcttcttccagaaggccccccagccatcgcaaactgatggtgtttgtgctgtagctgttggaggctttgacaggaatggactggatcacctgactccagctagattgcctctcctggacatggcaatgatgagtttttaaaaaacagtgtggatgatgatatgcttttgtgagcaagcaaaagcagaaacgtgaagccgtgatacaaattggtgaacaaaaaatgcccaaggcttctcatgtctttattctgaagagctttaatatatactctatgtagtttaataagcactgtacgtagaaggccttaggtgttgcatgtctatgcttgaggaacttttccaaatgtgtgtgtctgcatgtgtgtttgtacatagaagtcatagatgcagaagtggttctgctggtacgatttgattcctgttggaatgtttaaattacactaagtgtactactttatataatcaatgaaattgctagacatgttttagcaggacttttctaggaaagacttatgtataattgctttttaaaatgcagtgctttactttaaactaaggggaactttgcggaggtgaaaacctttgctgggttttctgttcaataaagttttactatgaatgaccctgaaaaaaaaaaaaaaaaaaaaaa

SEQ ID NO: 115369 - DNA, 745 bp, Homo Sapiens
gcgctgtttccgcctcttgccttcggacgccggattttgacgtgctctcgcgagatttgggtctcttcctaagccggcgctcggcaagttctcccaggagaaagccatgttcagttcgagcgccaagatcgtgaagcccaatggcgagaagccggacgagttcgagtccggcatctcccaggctcttctggagctggagatgaactcggacctcaaggctcagctcagggagctgaatattacggcagctaaggaaattgaagttggtggtggtcggaaagctatcataatctttgttcccgttcctcaactgaaatctttccagaaaatccaagtccggctagtacgcgaattggagaaaaagttcagtgggaagcatgtcgtctttatcgctcagaggagaattctgcctaagccaactcgaaaaagccgtacaaaaaataagcaaaagcgtcccaggagccgtactctgacagctgtgcacgatgccatccttgaggacttggtcttcccaagcgaaattgtgggcaagagaatccgcgtcaaactagatggcagccggctcataaaggttcatttggacaaagcacagcagaacaatgtggaacacaaggttgaaactttttctggtgtctataagaagctcacgggcaaggatgttaattttgaattcccagagtttcaattgtaaacaaaaatgactaaataaaaagtatatattcacagtaaaaaaaaaaaaaaaaaa

SEQ ID NO: 115370 - DNA, 1000 bp, Homo Sapiens
acagcctttctatctaggccacactataaaatctggagaccttgaatatgtgggtatggaaggaggaattgtcttaagtgtagaatcaatgaaaagacttaacagccttctcaatatcccagaaaagtgtcctgaacagggagggatgatttggaagatatctgaagataaacagctagcagtttgcctgaaatatgctggagtatttgcagaaaatgcagaagatgctgatggaaaagatgtatttaataccaaatctgttgggctttctattaaagaggcaatgacttatcaccccaaccaggtagtagaaggctgttgttcagatatggctgttacttttaatggactgactccaaatcagatgcatgtgatgatgtatggggtataccgccttagggcatttgggcatattttcaatgatgcattggttttcttacctccaaatggttctgacaatgactgagaagtggtagaaaagcgtgaatatgatctttgtataggacgtgtgttgtcattatttgtagtagtaactacatatccaatacagctgtatgtttctttttcttttctaatttggtggcactggtataaccacacattaaagtcagtagtacatttttaaatgagggtggtttttttctttaaaacacatgaacattgtaaatgtgttggaaagaagtgttttaagaataataattttgcaaataaactattaataaatattatatgtgataaattctaaattatgaacattagaaatctgtggggcacatatttttgctgattggttaaaaaattttaacaggtctttagcgttctaagatatgcaaatgatatctctagttgtgaatttgtgattaaagtaaaacttttagctgtgtgttccctttacttctaatactgatttatgttctaagcctccccaagttccaatggatttgccttctcaaaatgtacaactaagcaactaaagaaaattaaagtgaaagttgaaaaa

SEQ ID NO: 115371 - DNA, 1000 bp, Homo Sapiens
tgaaatacaagcgtgattaatcagtaattcacattgccgatatgcatatgcaacttataatcaaatagaactagaagagactttgaagtcacctgactcagccccttgtgtttacagacaaggacatgtagtccaaggttgcatggtgagttcacagtcggattgtcctccctccaaactgaaactaatttgattttgatttcatattcaatatgcaataattatgttctatcagagatacaatttgttatgaatttgctttatttaatcagtagcaatgatagatgtgatgcatactataggattaatctgtgaacaatgggtttacggtctatttcataattgaaatatttattttaaaaatgaatattagaaacaaaacagccataaacagagtttaatagcaatgatgttaacaacaagtatttataaggggtgcatttgtagggtgtgacattttaccctagggtataaaactatttttcttttattattattattattattattatactttaagttttagggtacatgtgcacattgtgcaggttagttacatatgtatacatgtgccatgctggtgtgctgcacccgctaactcgtcatctagcattaggtgtatctcccaatgctatccctcccccctccccccaccccacaacagtccccagagtgtgatgttccccttcctgtgtccatgtgatctcattgttcaattcccacctatgagtgagaatatgcggtgtgtggttttttgttcttgggatagtttactgagaatgatgatttccaatttcatccatgtccctacaaaggacatgaactcatcattttttatggctgcatggcattccatggtgtatatgtgccacattttcttaatccagtctatcattgttggacatttgggttggttccaagtctttgctattgtgaataatgccgcaataaacatacgtgtgcatgtgtcgcaaaaaaaaaaaaaaaaaaaaaaaaaaaa

SEQ ID NO: 115372 - DNA, 1000 bp, Homo Sapiens
aacgtattagttgccaatatgccagcttggacatcagtgtttgttggatccgtttgaccaatttgcaccagttttatccataatgatggatttaacagcatgacaaaaattatttttttttttgttcttgatggagattaagatgccttgaattgtctagggtgttctgtacttagaaagtaagagctctaagtacctttcctacattttctttttttattaaacagatatcttcagtttaatgcaagagaacattttactgttgtacaatcatgttctggtggtttgattgtttacaggatattccaaaataaaaggactctggaagattttcattgaggataaattgccataatatgatgcaaactgtgcttctctatgataattacaatacaaaggttccattcagtgcagcatatacaataatgtaatttagtctaacacagttgaccctattttttgacacttccattgtttaaaaatacacatggaaaaaaaaaaaaccctatatgcttactgtgcacctagagcttttttataacaacgtctttttgtttgtttgttttggattctttaaatatatattattctcatttagtgccctctttagccagaatctcattactgcttcatttttgtaataacatttaatttagatattttccatatattggcactgctaaaatagaatatagcatctttcatatggtaggaaccaacaaggaaactttcctttaactccctttttacactttatggtaagtagcagggggggaaatgcatttatagatcatttctaggcaaaattgtgaagctaatgaccaacctgtttctacctatatgcagtctctttattttactagaaatgggaatcatggcctcttgaagagaaaaaagtcaccattctgcatttagctgtattcatatattgcatttctgtattttttgtttgtattgtaaaaaattcacataataaacgatgttgtgatgtaaaaaaaaa

SEQ ID NO: 115373 - DNA, 1000 bp, Homo Sapiens
actcctccactctctgggaatgacacggactccctctcctgcgacagtggcagttcggcaactagcactccgtgtgtgtcccgcctggtcactggccaccacctgtgggccagcaagaatggccgccatgtcctgggcctgattgaggactatgaggccctgctcaaacagatcagccagggacagaggctccttgctgaaatggacattcaaacccaagaggctcccagctccacaagtcaagagctgggaacaaagggtccacacccagcaccactgagcaagtttgtgagcagtgtgagcacggccaagctgaccctggaagaggcctacaggcggctgaagcttctctggagagtctcactccccgaggatggccagtgcccccttcactgtgagcagattggagaaatgaaggcagaggtcaccaaactacataaaaaattgtttgaacaagaaaagaagttgcaaaacaccatgaagcttttgcagctgagcaagcgccaggaaaaagtcatctttgatcaattggtcgtaacccacaaaatccttcggaaggccagaggaaacctggagcttaggcctgggggagcccatccaggaacatgcagtcccagcagaccaggctcctgagaagaactttcagccaataaagcttgtgcttcccccaccgagctcacgctgtctctttgttccaagtgtggttcctatttattgaggaagaaagagctgtctggccaaaggaaatctattttttcccttcatgttttctctctgaaagttggcttgagagttgttgtcagaaaggtgcaggtgctccacaaacgggtggtaaaaaggcctcgagctcttggatgttgtatttcagatcaggggcaggcaccggagttgaggctgtgcgccttggtgggcttcacgtcttcccctggatttgcttagtactcagccagtgccacagtttgaagattctcattaaatgattcatttcatttcaccttga

SEQ ID NO: 115374 - DNA, 1000 bp, Homo Sapiens
ctgacctcagttgatccacccgcctcagcctcccaaagtgctaggattacaggcatgaaccaccgtgcccggccaggaataagcttttgacttacccaattcagataggttgatctttggggttttttttttttttttgagatggagtttcgctctgttgtccaggctggagtgcaatggcagttgtttcaccgtaacctctgcctcctgacttcaagcaattctcctgcctcagcctcccaaagtgctgggattacaggtgtgagccaccgtgcccggcccagataggttgatcttaatgtaacaacccaaaaataaatgtcatagtcaagatttggtagataaatttaaaattaaaatattctgcagttgggagtgaaatgtgatagcacatacgttgacattatgcatttagagatgttataaaaatgtataggcagtatacacagcactactcaagaagccaaagaaacacttgtgcagtgctaagtgtcacatgtctgcttccaccagaggctaggaatagtgatcctgctataatgtgagaacccaaatcatgtttataaaataggacgctgggagcagttgcaggccacagtgaagtgtgttgcttctgtcactttatattcttatatttcctttccctcagacagtaaactgttgatactcgtacttgtaaaaaattgtaaggcaatttttagtattgttgtcaaagaaaagcttggattacattaacatttgtattcagtcttttaggtgatacaccagagggggctgggaattgtctctttgttcctataagtagatcttaatgtaaaatagtaaatgtccattgaaaagcaagtaatacagcctgtgctaattgggagcacttgaacaattttgttccattctgagtaacttttgagcaagtaattctaagctttgtcttgtatccttgtgtgaaattgcataatttttaccctatttgatttcttaaataaagatgtttgctcaagat

SEQ ID NO: 115375 - DNA, 1000 bp, Homo Sapiens
ctggaggcatggagttaggtaaggctacatgagaaattgagcttttccactgggttttgaaagaagagtatgatgtgaacaagtaaagactgaatggggctgagatgaaggcaatgtttccaaggaaaggaaatgttatgagcaagagtgtgaggcaagagaagctggaaccacattcagagagtatcctgtagattgctccacctagaatctcaggtgggtggagcagtggtgggagaagactggaaaggtaagttgaaggtaaggaatgtgtggtgggcctcagatcccaggctcattcctcaaatcacttcttacttccctcacttatctttgtttaaataaggttagtacattcactaggggcaaatgggtttttctaaataaatgacataaaaaagaactggttgtctttctttaaagaaagtcttagttacaggattctgtgattaaaatccttaaatattgggttgccttctgcagctgtagtatcagtttttgaaccacagtaatgggaagaaagacaaatggattcccttagaagtaagatttctatttgcaggatgagttgggcagggaaaagggtcagggttcatcaggtgaactcaacactgggatgagactagaacttcactttatgatataaacacaatacgattattcaatgtggtgactggggtagactgtgaagcagccctccttatgcccactgccttttagaatcgtttgttttattcatggtagttttatgaagacatactattattgaatgaaatttaatgtgtacttgaaaacattgcttttgtcccttctcttcatctggtcttgggtcaagaacattgttttaatggctgccgacaatgaactgtctgtctgagtctaaaaccaagctcaggtttctaagccacatgaccttgattgttaaatgtagttatatttgaataaaaaatgaatcatttccaaaaaaaaaaaaaaaaaaaaaaaaaaaaaaaaaaaaaaa

SEQ ID NO: 115376 - DNA, 1000 bp, Homo Sapiens
gcaaaaacaatatcaaagaaacctgagtcaacatcattttctgcccctcggaaaaagagcccggatttatctgaagcaatggaaatgatggagtctcagacactactgctgacgctactatccgtaaagatggagaacaatcttgctgagtttgaaagaagggcagaaaagaatttattaataatgtgtaaggagaaggagaagctacagaaaaaggcccacgagctgaagcgcaggcttctcctctctcagaggaagcgggagctggcagatgtcctggatgcccagatcgagatgctcagccccttcgaggcagtggccacacgcttcaaggagcaatacaggacattcgccacggccctggacactaccaggcacgagctgcccgtgaggtccatccacctggagggagatgggcagcagctcttagacgccctgcagcatgaactggtgaccactcagcgcctcctgggagaacttgatgttggtgattcggaagaaaatgtgcaggtgctggacttactgagcgaactcaaggacgtgacggcgaaaaaggaccttgagctccgaaggagctttgcccaggtgctggaactctccgcagaggcaagcaaagaggcagccttggcaaaccaggaagtctgggaagagacccagggcatggcgccccccagccggtggtatttcaatcaagacagtgcctgcagagaatctgggggagcacccaagaacacgcccctgtctgaggacgacaacccgggtgcctcgtcagcccccgctcaggccacgttcatcagcccaagcgaagatttttcttcaagcagccaggcagaagtcccgccctctctctctcgttcagggagggacttgtcatgactcatggttacattcaggatacttgagcactttatatactaccgtagcactgtagctattttttatgtgataatcttgtttgataaaaaagtaaacctgttttgcaattgaaaaaaaaaaaaaa

SEQ ID NO: 115377 - DNA, 1000 bp, Homo Sapiens
aaactcaggcccagaattgcagttcagaatggcagtcctggaggcagggggtgaggggcaggtctagtgttcctgcaccaaacctaagtccttccacctgccacccccttccctgggagggaggtggtcctcctatctccctggctcactggcaggtgtgggatctggggagagcggctggagaaagatgcagtcctcaggaagggggccgccaccctcccctatgctggtagatgctgaggcccctaggtgcccagggccagtgggaccctctcagaaccaaatctttcccctttctcggggcttggggctcgggccgtaggggctcctgagtgtcatgaagtgcacaggagccaaatgaccgagccctggagagccccatggtgggtaggtggttcgtgctgtgctctggcaccatcagcctgttccagaaggaggattcgagcatcaggctaagaccctgtgtcctccaccatgcactcacccctagccctggttagctgacagtcagctgtggggaacacagctacaaccctaccctggcagggacctgagagcatctcaggaggggcagcgcatgtgtgcatgtgctgtgtgagtgagcacacccgtgtgcacactcatacacatgtgcacacacacgcactctccccgctcaggggcctggaggtctggctgagcccctggggaaaggtgagttctttcatctccctcctccaggtcggagtgcctggagtcaggtgtcgaggccacattgctggctgccccctctttgtagctcctataaagggcccacacctggtggatacctggttgagtgtgtggtctctgccccagcctgtccttgtcacgatcacaggccttgcttttgtaacaatgatgaccccggcctgtctcatcttctgaagaggaaaagtcaaagtgttgctgtggctccatatttcaactaaaaatatatctgttggagaaagaaattaacaataaagaattttcataggtt

SEQ ID NO: 115378 - DNA, 1000 bp, Homo Sapiens
caacacagagcccctcccgccgcctcagacccctgtgcacatccccagggcctcagccgtctcattggtctttattttttattttttttaagatggagtttcgctcttattgcccagactggagtgcagtgatgctatctcggctcactgcaacctttgcctcccaggttcaagtgattctcctgcctcagcctcccaagtagctgggattacaggcgtgcaccaccacgccgggctaaatttttttgtatttttagtagagacggggtttctctatgttggtcaggctgatctcgaactcccgacctcaggtgatccgccagcctcagcctcccaaagtgctgggattacaggcgtgagccactgcacccggctctcactggtcttacgccaccttctggacactccctccttgagggcagaaaggagtcccaggcctgtccctagggacaaggcccagggaagagtgtatttggggagcaggggaggggagggtgttgagaaagctgaactggagtcaatcacccttcccacaaatcaccaaactgctggaactctccagccaaatgctgggagaaggacctggagggtgagtctttgctgacctctctctactctcaggcatgtcttttgtccttttcgtccatctatttctgtctgtcgctcactcgccccgctttctctgtctcaccttcatccactctgcaggcctgctccaccacagccctaatcctctggacgcttgtgtagggcctggggtgaattccctgtcccccatggtacctcgagaggggctggggagctcagcttggtctcagagtctccccaccagatactgtttaaaaaagtagcactgatgtgttttgtaatctgcccctcccagccctccgtggaggctgccagggccttgtacggtaaacctagctgcatgtaatctgtggacaatggcattctctacaatgcaataaaaacaattacccatgaaaaaaaaaaaaaaaaa

SEQ ID NO: 115379 - DNA, 1000 bp, Homo Sapiens
gaaactgccaaatgtaattaggttaagaaaagttacccttgggcagtgtattagttttctattgctgtgtgacaaattaccccaaatttagcagtttaaaaaacaatacccatagcagttctgtagctcatgagtctggcacagtgtggctggattctctgctcagggtcttaaaggctgaaataagggttggcaggacaacattccttcatggaggctctggggaagaatctgcttctaagttcattcaggttgttggcggaattcagttctttgctggctctcagctggaggcccctctctcacctcaaggctgcctgcattccttcttatgtggtcccctccagcttcaaaccagccttcctgctctttctcatgcttcatatctctctcccgtcctcctgttttaggggcatatgattagctcaagcccacagatatattttaaggttgattgtgcgatagaacataattgcaggagtactgtctcatctcatcatattcacgggttctggagattagctcattgaaagtgggaggggcattttcaaattctgcctaccacaggcaataactgcccatctcagctgtaggtggaatttttacccagaaaagataggccctagaagcctcatttcttttctccatggaaaaggacagccctctgctgcagcgttcaacttgtgtgtttactgacagagtgaactacagaaatagcttttcttcctaaaggggattgttctacattttgaagttattttttaataaaattgaattatgttgtgtattgtgcttcttaataggaaatgcattattggactgtttttgtaacatcctgtttattgcaaatagctagtatcgttcaaaaactgtataaaatacttttgtacatattagcaatgtctaatttgtatacacttcagttaaatttccctaaaacttgaaaggggaccttgtagaaattaaaatatatacttagtctaagtctgaaaaaaaaaaa

SEQ ID NO: 115380 - DNA, 1000 bp, Homo Sapiens
cgttttctcttgttctcgttctggatctttcaaaacctaatgatctctggcccaccatggaaaatctcttgcaagccacaaaaagccatgtagacaaagtgataatgaaactgggaaagacaaatgctaaagcagtttctgaaatgagacagaagatctggaataatatgccgaaggatcatcctgatcatgaattaattgacccatttccggtacctctggtcataattggaagtaaatatgatgtttttcaggattttgagtctgagaagagaaaggtaatatgcaagacacttcgatttgttgcacattattatggagcatcattaatgtttaccagtaaatcagaagctctattactaaaaatacgtggagttatcaaccagttggcatttggcattgacaaaagcaaatcaatatgtgtggatcagaataaaccgctgtttatcacagcaggattggattctttcggtcaaataggatctcctcctgttcctgaaaatgacattggaaagcttcatgcccactcacctatggagttgtggaaaaaagtgtatgaaaagctctttccaccaaagagtattaacacgctgaaagatatcaaggaccctgcgagagatcctcagtatgctgaaaatgaagtcgatgagatgagaattcagaaggatctggtattatcctaaacatttacttaatttcatctgaaattttaacacaaaacctggggtgccttgggaattccttacatttttctctatgtatttacttagagtatcttctttactattaaaattatttaagtagtacatctatttaaataacacactaatagtatactgtagaaaaaataaaaatttgatatgaataaagaaaaatttttaaatcacctgtcatcccaccacccagacatgacttagtgttcacataaacctttttgattttccagttttcattatattaaagatgagtggtgattcttaaaaaaaaaaaaaaaaaaaaa

SEQ ID NO: 115381 - DNA, 1000 bp, Homo Sapiens
gggcccgtgggcctcatcatgtacctcgggggcgtcttcttcatcaaccggcagcgctctagcactgccatgacagtgatggccgacctgggcgagcgcatggtcagggagaacgtgcccatcgtccccgtggtgtactcttccttctcctccttctacaacaccaagaagaagttcttcacttcaggaacagtcacagtgcaggtgctggaagccatccccaccagcggcctcactgcggcggacgtccctgcgctcgtggacacctgccaccgggccatgaggaccaccttcctccacatctccaagaccccccaggagaacggggccactgcggggtctggcgtgcagccggcccagtagcccagaccacggcagggcatgacctggggagggcaggtggaagccgatggctggaggatgggcagaggggactcctcccggcttccaaataccactctgtccggctcccccagctctcactcagcccgggaagcaggaagccccttctgtcactggcctcagacacaggcccctggtgtcccctgcagggggctcagctggaccctccccgggctcgagggcagggactcgcgcccacggcacctctgggagctgggatgataaagatgaggcttgcggctgtggcccgctggtgggctgagccacaaggcccccgatggcccaggagcagatgggaggaccccgaggccagacgcacactgtccgagccctctgctcagccgcctgggacccaccagggtgcagctgggctccagggtccagcccacaagctgcatcaggctctctgggagaggaggggcctggagggccaggagtcccagactcacgcaccctgggccacagggagccgggaatcggggcctgctgctcctgctggcctggaagactctgtggggtcagcactgtactccgttgctgtttttttataaacacactcttggaagtggcaaaaaaaaaaaaaaaaaaaaaaaaaaaa

SEQ ID NO: 115382 - DNA, 579 bp, Homo Sapiens
actctgcagttgatccagcagcaggaggcagctgtacccatcactgtcctcagagtacttttaagaacaaggaggtctctgcccacggcagcccaagcagattcccatccatcatgactgccatccgactacgagaatttattgagcgtcgcccagtgatcccgccaagtatattcatcgctcaccaaggaagagacgttcaaggctattaccctgggcagctggcaagactccattttgatcatagtgcaaagagagctcccagaccgctcatagacttgacaattccacccaagacaaaatatcactatcagcctcaattagaccaacaaacactcattcgatatatttgtcttcgaagacattcaaagcctgccgagccatggtataaagaaaccacttaccgacgagactattctctgccattttatgagattgattggaaccagaaattagccacagtttcgctgaatcctcgaccgcttaattcactgccagagctctactgttgtgaagagagaagcagctttgaaagaaatgcttttaaactaaaataaccacggcattcgaacaaaataa

SEQ ID NO: 115383 - DNA, 1000 bp, Homo Sapiens
ggcaactagacatgagacagtcaggtgggagccaaccaagcatgagacaagtaggcaccagccaatcaggcacaagccaaataggcatgagccaaccaggcacatggcaaacaggcctgagccaaccagtcccgaggcaaccaaacaagagtccaccaggcatgtggcaacgaggcatgtggcaaccaggcatgagccagcaagtccccagccaactaggcatgagacaaccaggcactagccaatcaagtaagaaccaaacaggcatgagccatccaggcaggggccaaccaggcatatgggaaccggggccgagtcagccaggcctgagccaacaagacctgaaccaattagtgctgagccaaccaggcctgagtcaaccaggcaggagccaaccaagtgtgagccaaatgggcatgaggcaaacaagcatggattactttcaaataagacatgcagaggctggagactgcccagaaattttgcgactgattaaagaattggctgcctgtgaaaacatgctagatgcaatggagttaacagcagctgatttactcagagatggctttggggacaatccccttttctactgcctgattgcagaagtaaacgatcaacaaaaaccatcaggcaaactgactgttggatttgccatgtactactttacatacgactcatggactggcaaggtactttacctagaggacttttatgtcacacaagcttaccaagatagccatcacaactcaatgtaactgcatgcactttcttgtcgtcatttggaaccaggcttctatcaactactatactagtcgaggggctttagacctttcctctgaggagggctggcatctcttcaggtttaacagagaagaactcctggacatggcatgggaagaatgaaagaggctttgtaacaactcatcccaacacagcctccaacatttgactgtcacctgagtctaacagcagtttgactttgttgtacaatacagcaagt

SEQ ID NO: 115384 - DNA, 1000 bp, Homo Sapiens
taatggtgtctttcaattgggcagattttgcttttgataatatcaaattttagctaattttttttatggctaaaacattttgtgtcctaagaaatcttcaccaaggccagggagatattttcccatattgtattctagaagctgtggttacatctgggtctctgtccatctcaattgctttgtaggaaatgaaatggatatcagagccattttttccacgtgattcccctgttattccagaactgtttgttagaaagcctgccctttccctatcgcgagtgtctggtgcctttgtcaaaaagcaattcacagaacaggagggggtctattattattattatttttttttttttgagatggagtttcattcttgtcacccaggctggagtgcagtggcacgatctcagctcgctgcaacctccgtctcccagattcaagcaattctcctgcctcagcctcccaagtagctgtgattacaggcatccaccatcatgcctggctaatttttttttttgcatttttagtagaggcggggtttggctgcgttggccaggctggtcttgaactcctgacctcaggtgaacctcccgcctcgcctcccaaagtgctgggattacaggcgtgagccaccacacccggccgagtgggtctattttgagacaccattcggtcctgttggtctgtgcgtctgcattatcttggttactgtgcctttatagaaaatcttcaggtcacctagtgtaagtcttccaaacttcttcttttccaaaactgtttttgctaatctatatattttgccattctgtataaattttaaatcaccttattgatttctatccccaaaaaagcctgctgaaatttgtattgagatggaattgaattcatagtcccacttgataagaactgacatgttgaaaatattgtcttacaatttatgaacatggtgtatctcaccatttggagctgtctaatacatcctttattaaatttatttatcagt

SEQ ID NO: 115385 - DNA, 1000 bp, Homo Sapiens
acgaccacatgctgcccggggccgagcatttcgcggagtacgcaggccgcctgggcgtgggcgcggccacccacgtcgtgatctacgacgccagcgaccagggcctctactccgccccgcgcgtctggtggatgttccgcgccttcggccaccacgccgtgtcactgcttgatggcggcctccgccactggctgcgccagaacctcccgctcagctccggcaagagccaacctgctcccgccgagttccgcgctcagctcgaccccgccttcatcaagacctacgaggacatcaaggagaacctggaatcccggcgcttccaggtggtggactcccgagccactggcaggttccgcggcaccgagcccgagccccgagacggcattgaacctggccacatcccaggtaccgtgaacatccccttcacagacttcctgagccaggaggggctggagaagagccctgaggagatccgccatctgttccaggagaagaaagtggacctgtctaagccactggtggccacgtgtggctctggcgtcacagcctgccacgtggcactaggggcctacctctgcggcaagccagacgtgcccatctacgatggctcctgggtggagtggtacatgcgcgcccggcccgaggatgtcatctcagagggccgggggaagacccactgaagctgggcaggacacaggcgagctcaggtgatgccggccaccagcaatgcctggcctggtagctccgcttctgctttcaccaagagagtgtttcttcactcaactcaggtggcatttggggtgacatctcaaaggccaggaattccgttgacttgttggctgccagtaggggcgggaggaaaggcggaggcgagccctggaggagggaggccacaactccgagctgcccacctggtgctgagctggggccccgcctcctttctgttttatttttgaggaaataaaataaccaagtgctaaatcttgtaaaaaaaaaaaaa

SEQ ID NO: 115386 - DNA, 1000 bp, Homo Sapiens
ccagccttcccgcccctccgcagccggtgatgaggcgacttacctttggacccggacctgcccctgcctccgaccggccctgaactttgtggggactgagcttgggatctcccccgtggcccgcccccacaccgggcttctgggaggtgggctccagggctgtggagagaagttgggtggttggtgcaggcagcttctgggcttgagtccggccccctgcacctccagtccacactccccaggagctcacctgctcccaggtcgaactccatggcggtaagagaagttgggtcctaaggccaagggcgcctgggccctgcagaggagcggagcagggggaggagcgctgagacctgcccgttggaggaatgctgagacgccccacccaacctctgtcctggtcctcagccctgactcattgcccggcaccacccaggatttcctctgtgagaagtgggggagatggacaggtgactgcttccgccagccttggtgcctcaggggaggccgactgaggggggctctgtggatggcattcggggagctacaggtttcccccaaaagctcagatgctcgttcttgaagagggaggtgctgcccctgccttcctgcgtaccgcgacaatacagcttcctccgcggcgctttaacacgcagggcgctgctgccaggggcgtcccgtgttctaactcgctcccacagcccctccggcttggtgagcagcgtctgaggggtgaggggcatagacttggagccagcctgctgcactagatgccagctgtgtcacttagcagcaaggtgacctcagcaaagttgttttacctctgtgcctcagtttcctcatctgtaaataacagctacccatgggattgatgtgaaagtcagaggagttaatttcctagaatggtgtctggcatgaagtactgataatgtgttggttttttaaaaaataaaaggtaggtgttttaggccagtaaaaaaaaaaaaaaaaaaaaaaaaaa

SEQ ID NO: 115387 - DNA, 774 bp, Homo Sapiens
aagatcatggccactaactacagtgccaaccagtatgaaaaggctttctcatccaagtatctgcagaactggtctcccactaagccaacaaaagagagcatctcttctcatgaaggctacactcaaattattgccaacgatcgtggtcatctactgccttctgtgccccgttccaaggcaaatccttggggttccttcatgggcacctggcaaatgcctctgaagataccccctgctcgggtgaccctgacctcccgtacaactgctggtgctgcctccctcaccaaatggatacagaaaaatcctgatttactcaaggcctccaatgggctgtgtcctgaaatcttaggcaagccccatgatccagacagtcagaagaaactcagaaagaagtctatcacaaagactgtacaacaagcacgaagtccaaccataattccaagctccccagctgccaacctcaattccccagatgaactccaaagctcacacccctctgcaggtcatactccaggtccccaaagaccagccaaatcctaagagcccacctggaagtccacgtatgctagaactctgggcagggcctaatctagctgaggtccagaaatacaaacctggaacttcatatggaccaagtggccacacactgaaaaacccgtatagcgactcagtgaaataaacaagagcccccagtcagaactgtgaaacagggaaattttggggtgggagtaaaagcaaatttggaaaataaacttttttttgttgaatctttta

SEQ ID NO: 115388 - DNA, 1000 bp, Homo Sapiens
aaagtatagcgtggcaacccacctgttcattggaggtgtcactggatggtgcacgggttttatattccagaaggttggaaagttggctgcaacagctgtgggaggtggattttttctccttcagcttgcaaaccattctgggtacatcaaagttgattggcaacgagtggagaaggacatgaagaaagccaaagagcagctgaagatccctaagagcactcagatacctaaccaggtcaggagcaaagctgaggaggtggtgtcatttgtgaagaaaaatgttctagtgactgggggatttttcggaggctttctgcttggcatggcatcctaaagaagatacctcattttcattgttcctggttttttccagccagcagcctctacactccatcacaggacattgagtccctcctcctcttctcccatgccttcctccctgctgtggcaaatccgagtggcttctataagcatccgttggtacaagttaatgtggcaccatgagcctgactggcttctataagcatctgttggcacaagttaatgtggcaccatgagcttgatggcggcagaagagacaatagtccttagctcttcttccagtacgccccctacttagtcagtctgtaggtcatcaagaaggtccctctacccctatgcaagacacttacaagaacacattgcaagatagctgaccgtggaggatgagtggatcctgaaatgttgtcccgaactgttgatttggaaaagaaataagcacatagataaccttattgtgtgctgcatggaaaggaactgaacacaattgcctttaagcattaaaaaaaaaaggatgaaaaattggggtgtcacatttgcaaaatggatggacaaatgtggtcagggcagatcaaggaagtaccttccactctgagagtcagaatgctctgcatgtgtgctaaggcattaaatgaagattgaaagtcaaaaaaaaaaaaaaaaaagaaaaaaaaaaaaaaaa

SEQ ID NO: 115389 - DNA, 1000 bp, Homo Sapiens
agtcccagcactttgggaggccgaggcgggcggatcacgaggtcaggagatcgagaccatcctggctaacatggtgaaaccccgtctctactaaaaatacaaaaaattggccgggcgtggtggtgggcgcctgtggtcccagctactcgggaggctgaggcaggagaatggcgtgaacccgggaggcggagcttgcagtgagccgagatcgcgccactgcactccagcctgggcaacacagcaagactcggtctcaaaaaaaaaaaaaaaaagagagagagagagggggtttctccacgttgtccaggctggtctcgaactcctgagctcaggtgatctgcccgcatcggcctcccagggtgctgggattataggtgtgtgccactacctttgttaggcattagtgaaagtgcttttagatcttacgtatattaattcattgagtctttatacaacctcataagaaagcttctgtctgtttcacagtcaggaaacaggcacagagaggttaaacaacttgcccaagatctcagctagtaaatggcagagcctggatttgaacccaggcagagctctatccacccttctgctttccagtactttttgctagacaaatgtgcattgtgtacctactgtgtgacaggattgtgctggcctcagagcagggatgcaaaggtaaataagtccttgattggcagcacaccaaatgcttacactggtccgggcgcggtgattcatgcctgtgatcctagcagtttgggaggccgaggtgggcggatcccttgaggccaggagttcgaaattaacctggacaacatggtgaaaccccatctctactaaaaatacaaaaattggccaggcgtgatggcgggcggctgtggtcccagctacttgggaggctgaggaaggagaattgcttgaacctgggaggcagaggttgcggtgagccgagatttagccactgcactccagcctgggcaacagagcaagactccgtctc

SEQ ID NO: 115390 - DNA, 1000 bp, Homo Sapiens
gtggttttgatttgcatttctccgatggccagtgatgatgagcattttttcatgtgtcttttggctgtgtaaatgtcttcttttgagaagtgtctgttcatatccttcgcccacttgttgatggggttgtttgtttttttcttgtaaatttgtttgagttcattgtagattctggatattagccctttgtcagatgagtagatgcaaaaattttctcccattctgtaggttgcctgttcactctgatggtagtttcttttgctgtgcagaagctctttagtttaattagatcccatttgtcgattttggcatttgttgccattgcttttggtgttttagacatgaagtccttgcccatgcctatgtcctgaatggtgttgcctaggttttcttctagggtttttatggttttaggtctaacatttaagaggatacaaacaaatggaagaacattccatgctcatgggtaggaagaatcaatatcgtgaaaatggccatactgcccaaggtaatttatagattcaatgccatccccatcaagctaccaatgactttcttcacagaattggaaaaaactactttaaagttcatatggaaccaaaaaagagcccacattgccaagtcagtcctaagccaaaagaacaaagctggaggcatcacgctacctgacttcaaactatactacaaggctacagtaaccaaaacagcatggtactggtaccaaaacagagatatagaccctcagaaataatgccacatatctacaactatctgatctttgacaaacctgacaaaaacaagaaatggggaaaggattccctatttagtaaatggtgctgggaaaactggctagccatatgtagaaagctgaaaatggatcccttccttacaccttatacaaagattaattcaagatggattaaagacttaagtgcttctttcttatattttatatttgttgctaagatgttccattaaaaataatttcgaagttattcat

SEQ ID NO: 115391 - DNA, 1000 bp, Homo Sapiens
aggaggccaaccctgaccactctatttaatattgctatgtgtccccattcctgccatgctcactcatttctttttactttttttttaagatataatctcgctgtgtcactcaggctggggcaccatggcacgatcacaacacactgagacctggaactcctaggtcaagaaatcgtcctgcctcagcgcctctagtggctgggactacaggtgcatgccactacacccgctattttttttttcccatgtagacagggtatcactttgttgcccaggcttatcttgaactcctgggccagagcaaccatcctgcctcggcctcctggatagctggaattatgggtgtgggccactacccctggcttcatgttcatttcttcttgctgctgttacaaactaccctacgttgagtggcttaatacaccacaaatctactacctaacaggtctgggggccagaagtccaaaataggtctattaaggctaaagtcaaggtgtcagcaggactgcatcccttctggaggttccagagagaaggtgttcccttgcctttcccagttccaaaagccacccctattctttgcctcatggcccctaaatgcatcttcaaagccagaagcaaagcatattcaaatctccctctgtgacctgtgcttccatcatcaaatctccttcaattctgactctcttacctccctctttcacttataaagacctcttgtgattgctggacacagaggccggtgctcacaaccatggtcccagcagtttaggaggtcgaggcaggagaaatgcttgaggccagaagttcgggaccagcctgggaaacacagtgagacccacccccctcaattaaacaacaaaaagaaataagagaaaattagctgggcgtggtggtatgcatctgtagtttcggctacttgagaggctgtggtgaaaggattgctttagcaccagagttcaagaccagcctcggcaatataacaagatcccatctctac

SEQ ID NO: 115392 - DNA, 1000 bp, Homo Sapiens
cagctctgccgaacagagcttcctgttctccagggaggaggcggacacgctcaggttgaaggtcgaggagctggaaggcgagcggagtcggctggaggaggaaaagaggatgctggaggcacagctggagcggcgagctctgcagggtgactatgaccagagcaggaccaaagtgctgcacatgagcctgaaccccaccagtgtggccaggcagcgcctgcgcgaggaccacagccagctgcaggcggagtgcgagcgactgcgcgggctcctgcgcgccatggagagaggaggcaccgtcccagccgaccttgaggctgccgccgcgagtctgccatcgtccaaggaggtggcagagctgaagaagcaggtggagagtgccgagctgaagaaccagcggctcaaggaggttttccagaccaagatccaggagttccgcaaggcctgctacacgctcaccggctaccagatcgacatcaccacggagaaccagtaccggctgacctcgctgtacgccgagcacccaggcgactgcctcatcttcaaggccaccagcccctcgggttccaagatgcagctactggagacagagttctcacacaccgtgggcgagctcatcgaggtgcacctgcggcgccaggacagcatccctgccttcctcagctcgctcaccctcgagctcttcagccgccagaccgtggcgtagcctgcaggctcgggggcatagccggagccactctgcttggcctgacctgcaggtcccctgccccgccagccacaggctgggtgcacgtcctgcctctccagccccacagggcagcagcatgactgacagacacgctgggacctacgtcgggcttcctgctggggcggccagcaccctctccacgtgcagaccccatgcgtcccggagcctggtgtgtgggcgtcggccaccagcctgggttcctcaccttgtgaaataaaatcttctcccctagacacaaaaaaaaaaaaaaaa

SEQ ID NO: 115393 - DNA, 1000 bp, Homo Sapiens
ttaagggtggacctccgcgacgattctgaaaatgagctctctgccaaggttttaagataatttattgaaatctcctgtaaactttacttgactacttatgaagaggacctctgacttgcttgagagttctgtcagacttttctttttaaaaatttaacatgattgcttttctcaattttggagaagatgtttaaatagttctgttgtaacttttaatagttttgtgtatcattcaactttttttcttgcagcaccgaggcacatttgaaaagatggaattgaagtcgttttgtttaacgctgtgtgaatataaagagtagtttgcagctgtgtggtagtggtttaatttgcagccttagctctgtggtgtctggctctagagttacttctttttaccaagcattttcagcctccattttgaaggctgtctacacttaagaagtcttagctgtctaatttttagagaataagattgttcattgcatttctgagtattatgtaacctatttttgcagaaggtactgttacattaagtgcatctgtgtatcctggtttaaaaaaatgtaatcttttttgaaataaaccttcatattctgtatagttgctaaagtgttgagaacctttttaattgtaaaatgagaaccgattttcagtttagtgtagcagcacacttgttcaggtttgcatggtatgaaaccaaatagattcatgaaaccttggccatgaggtttgtttcacaaggttcttagaccgagttgtgcaggtaagtgcacttttaggtaatctgcactgtttgtttgatggataaattccatctctgggaattgtgtgggtattaatgtttccatgttcccaactatgttgagaagtggaaaaaaacccaggttctagatgggtgaatcagttgggttttgtaaatacttgtatgtggggaagacattgttgtctttttgtgaaaataaaaatccacacctggaagtgtaaaaaaaaaaaaaaaaaa

SEQ ID NO: 115394 - DNA, 1000 bp, Homo Sapiens
cccgccctactccggaccgccccaaagactccatgggatggacctgagtcagccgaatcctagccccttcccttgggcctgctgtggtgctcgacatcagtgacagacggaagcagcagaccatcaaggctacgggaggcccggggcgcttgcgaagatgaagtttggctgcctctccttccggcagccttatgctggctttgtcttaaatggaatcaagactgtggagacgcgctggcgtcctctgctgagcagccagcggaactgtaccatcgccgtccacattgctcacagggactgggaaggcgatgcctgtcgggagctgctggtggagagactcgggatgactcctgctcagattcaggccttgctcaggaaaggggaaaagtttggtcgaggagtgatagcgggactcgttgacattggggaaactttgcaatgccccgaagacttaactcccgatgaggttgtggaactagaaaatcaagctgcactgaccaacctgaagcagaagtacctgactgtgatttcaaaccccaggtggttactggagcccatacctaggaaaggaggcaaggatgtattccaggtagacatcccagagcacctgatccctttggggcatgaagtgtgacaagtgtgggctcctgaaaggaatgttccagagaaaccagctaaatcatggcaccttcaatttgccatcgtgacgcagacctgtataaattaggttaaagatgaatttccactgctttggagagtcccacccactaagcactgtgcatgtaaacaggttcctttgctcagatgaaggaagtagggggtggggctttccttgtgtgatgcctccttaggcacacaggcaatgtctcaagtactttgaccttagggtagaaggcaaagctgccagtaaatgtctcagcattgctgctaattttggtcctgctagtttctggattgtacaaataaatgtgttgtagatgaaaaaaaaaaaaaaaaaaaa

SEQ ID NO: 115395 - DNA, 1000 bp, Homo Sapiens
tctcaatcaagttagcatgctttctccagctgccctatcacctgccagctcatcacaaagaaccacggccacccaggtcatggcaaactctgctggacttaacttcatcaatgtagtgggctctgtttgtggggcccaggctttgatgagtggttcaaaccccatgctgggctgtaacactggtgccataactcctgcaggaataaacctgagcggccttctaccctcaggaggtctgctaccaaatgcactgcccagtgcaatgcaggcagcttctcaagcaggtgttccatttggtttaaaaaatacttcaagtctcaggcccttaaatctactccagcttccaggtggttcacttatttttaacactctgcagcagcagcaacagcagctctcccagtttacaccacaacaacctcagcagcccacaacttgtagtcctcaacagccaggggagcagggttctgagcaaggttcaaccagtcaagaacaggccttatctgctcagcaagctgctgttattaaccttactggagtaggaagttttatgcagtcacaggcagctgtgttgtctcagcttggctctgtcgagaacagacctgagcaaagccttcctcagcagagattccagctctcctctgcctttcaacagcagcagcaacagatacaacagttgcgattcttgcagcatcaaatggctatggcagcagcagcagcacaaacagctcagctacatcatcatcggcatacaggcagccagtcaaaaagtaaaatgaagagaggcacgccaaccactccaaaattttgagtcttgcattactttttgttccttttttaaaaacacaagagcactgaatcaaaagaattgagtttctactttttgttttttttaatgtgtcagtattttacattgctagatgtacaaactttatacagaagcacaaccttatcatttttaaataaaaacagggaaatggtttaacaaaaaaaaaaaaaaaaa

SEQ ID NO: 115396 - DNA, 1000 bp, Homo Sapiens
actgcgctggacgatagcttggagggatggagaggcggcctcgtgccatgatctgtatttaatggtttttatttctcgggtgcatttgagagaagccacgctgtcctctcgagcccagatggaaagacgtttttgtgctgtgggcagcaccctcccccgcagcggggtagggaagaaaactatcctgcgggttttaatttatttcatccagtttgttctccgggtgtggcctcagccctcagaacaatccgattcacgtagggaaatgttaaggacttctgcagctatgcgcaatgtggcattggggggccgggcaggtcctgcccatgtgtcccctcactctgtcagccagccgccctgggctgtctgtcaccagctatctgtcatctctctggggccctgggcctcagttcaacctggtggcaccagatgcaacctcactatggtatgctggccagcaccctctcctgggggtggcaggcacacagcagccccccagcactaaggccgtgtctctgaggacgtcatcggaggctgggcccctgggatgggaccagggatgggggatgggccagggtttacccagtgggacagaggagcaaggtttaaatttgttattgtgtattatgttgttcaaatgcattttgggggtttttaatctttgtgacaggaaagccctcccccttccccttctgtgtcacagttcttggtgactgtcccaccgggagcctccccctcagatgatctctccacggtagcacttgaccttttcgacgcttaacctttccgctgtcgccccaggccctccctgactccctgtgggggtggccatccctgggcccctccacgcctcctggccagacgctgccgctgccgctgcaccacggcgtttttttacaacattcaactttagtatttttactattataatataatatggaaccttccctccaaattcttcaataaaagttgcttttcaaaaaaaaaaaaaaaaaaaaaa

SEQ ID NO: 115397 - DNA, 1000 bp, Homo Sapiens
agtggggagaagaagaagcagaactgaataagaacttttatgacaagaagacagcaattcacaaagccctctgtgacaatgttgacacccgcaccgtcatggaagagatgcgggccttggtcagtcagtgcaacctctatatggcagcccggaaagccgtgaggaagaggcccaaccaggctctgctggagaacatcgccctgtacctcacccatatgctgaagatctttggggccgtagaagaggacagctccctgggattcccggtcggagggcctggaaccagcctcagtctcgaggccacagtcatgccctaccttcaggtgttatcagaattccgagaaggagtgcggaagattgcccgagagcaaaaagtccctgagattctgcagctcagcgatgccctgcgggacaacatcctgcccgagcttggggtgcggtttgaagaccacgaaggactgcccacagtggtgaaactggtagacagaaacaccttattaaaagagagagaagaaaagagacgggttgaagaggagaagaggaagaagaaagaggaggcggcccggaggaaacaggaacaagaagcagcaaagctggccaagatgaagattccccccagtgagatgttcttgtcagaaaccgacaaatactccaagtttgatgaaaatggtctgcccacacatgacatggagggcaaagagctcagcaaagggcaagccaagaagctgaagaagctcttcgaggctcaggagaagctctacaaggaatatctgcagatggcccagaatggaagcttccagtgagggggcacaggactgactttttaaaccattgtggactagtggctgctgtctgcctcagtgacaatgtcccagcgctcctatcatgtttacagtcacccttgggtcctaaattaagagttgtgttcatgtaggttcgtgtcgtcgttggctctgagacattgataataaatttttctcaacagtgaaaaaaaaaaaaa

SEQ ID NO: 115398 - DNA, 1000 bp, Homo Sapiens
cttgccaatggtccagttccctctccaccccgccgaggaggggctctgctagaagaacctgagttaagtgatgatgaccgagccaacctaatgtggaaacgttacctggagcgagaggacagcaagattgtggacctgtttgtgggccagttgaaaagttgtctcaagtgccaggcctgtgggtatcgctccacgaccttcgaggttttttgtgacctgtccctgcccatccccaagaaaggatttgctgggggcaaggtgtctctgcgggattgtttcaaccttttcactaaggaagaagagctagagtcggagaatgccccagtgtgtgaccgatgtcggcagaaaactcgaagtaccaaaaagttgacagtacaaagattccctcgaatcctcgtgctccatctgaatcgattttctgcctcccgaggctccatcaaaaaaagttcagtaggtgtagactttccactgcagcgactgagcctaggggactttgccagtgacaaagccggaagtcctgtataccagctgtatgccctttgcaaccactcaggcagcgtccactatggccactacacagccctgtgccggtgccagactggttggcatgtctacaatgactctcgtgtctcccctgtcagtgaaaaccaggtggcatccagcgagggctacgtgctgttctaccaactgatgcaggagccaccccggtgcctgtgacacctctaagctctggcacctgtgaagccctttaaacacccttaagccccaggctccccgtttacctcagagacgtctatttttgtgtctttttaatcggggaggggggagggggtggttgtagctccattattttttttattaaaaaatacccttccacctggaggctcccttgtctcccagccccatgtacaaagctcaccaagcccctgcccatgtacagcccccagaccctctgcaatatcactttttgtgaataaatttattaagaaaaaatgaaaaa

SEQ ID NO: 115399 - DNA, 1000 bp, Homo Sapiens
caggaatggctggatgagagaaggagacagggtgacctgcccctgcctacaaactctaacccagttctgtccctggagctgtgtgaccccggacaaggccctgcccctttccaggctgtcgttgtcctcatccagcctgggagagggttggcgctgaggcccccaccttcttgcctgtttcctcctgaccccaccccttcccctcctgctgggcagatccgagtgaagcctgacaggaccggtgtggtcacggatggtgtgaagcactccatgaaccccttctgtgagatcgcggtggaggaggctgtgcggctcaaggagaagaagctggtgaaggaggtcatcgccgtcagctgtgggcctgcacagtgccaggagacgattcgtaccgccctggccatgggtgcagaccgaggtatccacgtggaggtgcccccagcagaagcagaacgcttgggtcccctgcaggtggctcgggtcctggccaagctggcagagaaggagaaggtggacctggtgctgctgggcaaacaggccatcgatgatgactgtaaccagacagggcagatgacagctggatttcttgactggccacagggcacattcgcctcccaggtgacgctggagggggacaagttgaaagtggagcgggagatcgatgggggcctggagaccctgcgcctgaagctgccagctgtggtgacagctgacctgaggctcaacgagccccgctacgccacgctgcccaacatcatgaaagccaagaagaagaagatcgaggtgatcaagcctggggacctgggtgtggacctgacctccaagctctctgtgatcagtgtggaggacccgccccagcgcacggccggcgtcaaggtggagaccactgaggacctggtggccaagctgaaggagattgggcggatttgagcccctcccagagatggcaataaaactgactctcaacatctatctctgttaacttaaaaaaaaaaaaaaaaaa

SEQ ID NO: 115400 - DNA, 1000 bp, Homo Sapiens
acgtgtttgttttccaaggtgcaggcgaggcagctatgggcattgcccacctccttgtcatggccctagagaaagaaggtgtaccgaaggcagaggccacaagaaagatctggatggtggactctaaagggctcattgtcaaggggaggagccacctgaaccatgaaaaggagatgtttgcccaagaccatcctgaagtcaactccctggaggaggtggtgaggctggtgaagcccacagccatcataggtgttgctgccatcgcaggagccttcacggagcagattctgagggacatggcctccttccacgagcgccctatcatctttgccctgagcaaccccaccagcaaggccgagtgcacggctgagaagtgctaccgggtcaccgagggccgagggatttttgccagtggaagtccttttaagagtgtgactctggaagatggcaagaccttcattcctgggcagggaaacaatgcttacgtgttccccggggtggcactgggagtcatcgccggcgggatccggcacatcccagatgagatcttcctcctgacagcagagcaaattgcccaggaagtctctgagcagcatctgtcccaggggagactctacccaccactcagcaccatccgagacgtgtctttgagaattgccatcaaagttctcgactacgcgtacaaacacaacctggcttcctactacccagagcctaaggacaaggaggcttttgtaagatccctggtctacactccagactatgactcctttacactggacagctacacttggcccaaggaagccatgaatgttcagacggtctgaggcagtctcagaggctagtatggggctagatgaagcccagagtaacacccacaatataaatgggttccaaaatggcccaagtgaatccttgtcgctgtgttttttcttttaaactttctggtgtgagaggagatgccaaggcatacagtgaataaaagccttgtctctgaaaa

SEQ ID NO: 115401 - DNA, 1000 bp, Homo Sapiens
tagggcctgctgaagccctccctcgcccgcgcctctccttagtccttgagatgagatggcaagttacagcggcttctccggcctgctggagattcgctacgggccaggacaccgcagctgccttccccaattcgctttctttccgcagccgccgctgccccgaccccggatctgcatgtggaagtacctggacgtccattccatgcaccagctggagaagaccaccaatgctgagatgagggaggtgctggctgagctgctggagctagggtgtcctgagcagagcctgagggacgccatcaccctggacctcttctgccacgcgctcattttctgccgccagcagggcttctcactggagcagacgtcagcggcttgtgccctgctccaggatcttcacaaggcttgtattgcaacccccttgggcaacgtggaggagtgctaccgctacttcaccagtgtccttttttgccatggagtcaggcggcctcctttcagcatcgacctcttcaaagaggaacagctgctggccttggaagactacgtggtcaacacttacttccgccacttcaagctctataaatacgtcttcacaccccaggtgcggctggatctgtctttgacttacatggggctacagccacccaaactgtggccagagagtgagacggaggaagaagaaagcaaggagatggaggagcaggcagttaccccgcagaaagaggaactagagacagtggccccaccagagccagagccaagccacatccacgtcctccgagcctacatcaagacccaagtgaacaaagagctggagcagctccaggggctggtggaggagcggctcaaggccagcgaggaaaggctcagcagcaagttgactgcactagagcggcccttccagctacctccgggtaaaggcaagagcaagaccaagtgacccccaacattttccccaataaaggtctgggccagaatggcaccaaaaaaaaaaaaaaaa

SEQ ID NO: 115402 - DNA, 616 bp, Homo Sapiens
ggcttccgtagcgggagggcgaaagatggcggcggcagtactgggacagttgggtgcgttatggatacataacctgaggagccgggggaagctggccttggggaaatctaccactgtcgaagacaaataaaatatagcaaagacaagatgtggtatttggcaaaattgatacgaggaatgtctattgaccaggctttggctcagttggaattcaatgacaaaaaaggggccaaaataattaaagaggttctcttagaagcacaagatatggcagtgagagaccataacgtggaattcaggtccaatttatatatagctgagtccacctcaggacgaggccagtgcctgaaacgcatccgctaccatggcagaggtcgctttgggatcatggagaaggtttattgccattattttgtgaagttggtggaagggcccccacctccacctgagccaccaaagacggcagttgcccatgccaaagagtatattcagcagcttcgcagccggaccatcgttcacactctatgatgaggagattcagactccacagtgtatatattttgccatttattttctaaaaataaacaaaaattgaaggcaaaaaaaaaaaaaaaaa

SEQ ID NO: 115403 - DNA, 641 bp, Homo Sapiens
acttcctctccagcccctgcgtaatcgataaggaaacccggacgctgctgcccctttctttttttcaggcggccgggaagatggcggacattcagactgagcgtgcctaccaaaagcagccgaccatctttcaaaacaagaagagggtcctgctgggagaaactggcaaggagaagctcccgcggtactacaagaacatcggtctgggcttcaagacacccaaggaggctattgagggcacctacattgacaagaaatgccccttcactggtaatgtgtccattcgagggcggatcctctctggcgtggtgaccaagatgaagatgcagaggaccattgtcatccgccgagactatctgcactacatccgcaagtacaaccgcttcgagaagcgccacaagaacatgtctgtacacctgtccccctgcttcagggacgtccagatcggtgacatcgtcacagtgggcgagtgccggcctctgagcaagacagtgcgcttcaacgtgctcaaggtcaccaaggctgccggcaccaagaagcagttccagaagttctgaggctggacatcggcccgctccccacaatgaaataaagttattttctcattccaaaaaaaaaaaaaaaaaaaaaaaaaaaaaaaa

SEQ ID NO: 115404 - DNA, 1000 bp, Homo Sapiens
gcagagctctcaaaagaaggccaccaggtggtcctgctgagtggggagatgatggtggaacagagggctgcagtgattgagcgcttccgagagggcaaagagaaggttttggtgaccaccaacgtgtgtgcccgcggcattgatgttgaacaagtgtctgtcgtcatcaactttgatcttcccgtggacaaggacgggaatcctgacaatgagacctacctgcaccggatcgggcgcacgggccgctttggcaagaggggcctggcagtgaacatggtggacagcaagcacagcatgaacatcctgaacagaatccaggagcattttaataagaagatagaaagattggacacagatgatttggacgagattgagaaaatagccaactgagaagctccaccagccactgatgccagccctggaactgcccctgcacaggagacaagtgcatttagggcacaggccccgacatcaccccaaggacaacggcagaagtagagagaaactacctacctcacttcaaattatgtttggacttgacaaaaataggtgcaaatgatggggggcaatagaagaaaaaatttgcattttggaaaattgggtcctttccccacttttttaaagccacattcccccatctttataataatctggtcacagtggtagtcgctgggccccaggacccccttcctgattttggctagggcatcgtgggaaccagctccagcccctgaaaggaaacgatagatgttgcaggttttttcggaagtaggctcgagttgggaaaatggttttgaggccccaccgctgtgcatcgaatgagggaagttgcagcagagaggccagagctggcccctctctgtctcttcaatggacccatcacaagtggtttctcctggccctggggtggtcttccttctcctgaaatccagagacttttttgctcatcccttctccctttaattctggtctctgctgcagaaagagacttgcatattcg

SEQ ID NO: 115405 - DNA, 1000 bp, Homo Sapiens
tgtcgtggaaagttatctttcccgctctttgctgtggtcattgtgtcttgcagaaaggatggccctgatgcagcagcagcgccagctgtaataaaaaataattcacactatcagactagcaaggcactagaactggaaaagaccacagaaaacaaagaatccaaccctttcatcttacaggtgaacaaactgtgatgatgcacatgtatgtgttttgtaagctgtgagcaccgtaacaaaatgtaaatttgccattattaggaagtgctggtggcagtgaagaagcacccaggccacttgactcccagtctggtgccctgtctacaccagacaacacaggagctgggtcagattcccctcagctgcttaacaaagttcctcgaacagaaagtgcttacaaagctgccttctcggatactgaaaggtcgagttttctgaactgcactgattttattgcagttgaaaaaaaaaaaaagctattccaaagatttcaagctgttctgagacatcttctgatggctttacttcctgagaggcaatgtttttactttatgcataattcattgttgccaaggaataaagtgaagaaacagcaccttttaatatataggtctctctggaagagacctaaattagaaagagaaaactgtgacaattttcatattctcattcttaaaaaacactaatcttaactaacaaaagttcttttgagaataagttacacacaatggccacagcagtttgtctttaatagtatagtgcctatactcatgtaatcggttactcactactgcctttaaaaaaaaaaaccagcatatttattgaaaacatgagacaggattatagtgccttaaccgatatattttgtgacttaaaaaatacatttaaaactgctcttctgctctagtaccatgcttagtgcaaatgattatttctatgtacaactgatgcttgttcttattttaataaatttatcagagtgaaaaaaaaaaaaaaaaaa

SEQ ID NO: 115406 - DNA, 1000 bp, Homo Sapiens
tgtctcaaccagatttattttaaacgcttcttatgtagagtttttatgcctttctctcctagtgagtgtgctgactttttaacatggtattatcaactgggccaggaggtagtttctcatgacggcttttgtcagtatggcttttagtactgaagccaaatgaaactcaaaaccatctctcttccagctgcttcagggaggtagtttcaaaggccacatacctctctgagactggcagatcgctcactgttgtgaatcaccaaaggagctatggagagaattaaaactcaacattactgttaactgtgcgttaaataagcaaataaacagtggctcataaaaataaaagtcgcattccatatctttggatgggccttttagaaacctcattggccagctcataaaatggaagcaattgctcatgttggccaaacatggtgcaccgagtgatttccatctctggtaaagttacacttttatttcctgtatgttgtacaatcaaaacacactactacctcttaagtcccagtatacctcatttttcatactgaaaaaaaaagcttgtggccaatggaacagtaagaacatcataaaatttttatatatatagtttatttttgtgggagataaattttataggactgttctttgctgttgttggtcgcagctacataagactggacatttaacttttctaccatttctgcaagttaggtatgtttgcaggagaaaagtatcaagacgtttaactgcagttgactttctccctgttcctttgagtgtcttctaactttattctttgttctttatgtagaattgctgtctatgattgtactttgaatcgcttgcttgttgaaaatatttctctagtgtattatcactgtctgttctgcacaataaacataacagcctctgtgatccccatgtgttttgattcctgctctttgttacagttccattaaatgagtaataaagtttggtcaaaacagaaaaaaaaaaa

SEQ ID NO: 115407 - DNA, 1000 bp, Homo Sapiens
ttccaagcaaatgttacatagtgtaggctttacttagcttatcaatttgtcattttgaagctaattattttaattaggttaactatgtacaatattttaagcattactcttgtaagattttgaaaactacattttaacatggaactctagggatagtcaccttttaaatcctgttgaaaagccatgtttaagatttaatttgccaaaataatgtcttgttaatattctttcaataacgaagttgggcaatataaccaatgtttaaaaaagtttaaaatgtataagttgaggcatttgggtggtaagagaatgttatagtgaattatcccttttcttgactattggaggaccaaaaaaataaggtgtattgcgtcttagcagtgatttttatccaatcttgtttccaaaaaccatgtctcccagggccttaaaagccatcatgtaaattaccagtaaagtgtaacatatgcaaacataacaaaatcacttccatagtgacgatactccaaccatatggatattagtcatagaagaactagaggttttatgatatttttttaagtcttttttttttttgtctaggtagtcagtctgcacttaaatatcaatcattttccttttttgcttcttcccttaaaatttatatgtatccagtacatttaattgagaagcgtatgttttttattatgctgtattttctttttattttttaattattgtttatattttcaattcaaaaatgtacaaaataaagttacattgctggtcttgtaagagctatacagttttcctaaatgtatacctgtaactgcagcagttcacctatttcaaaaatttggaattctgttcatttgttattcttaagaccacctcaaatttaaaggctaccttattgtacgtttaaagtgtattataacagtgtggtagttaataaaacactatttttttttcttttgaaaaaaaaaaaaaaaaaaaaaaaaaaaaaaaaaaaaaaaaaaaa

SEQ ID NO: 115408 - DNA, 1000 bp, Homo Sapiens
gatgtggaaacgatcacagatggtgttttctcgttgttcgccagaatttatacgggggagacaaattcccggtaattaccaagtctgcactcgggtaccaaagctctgaagctctctgaacagttgccatacttgagttgatgaatgtgttattcatggtgtctcatctcatcaatgcatcttgagagacttaatgaaattttagcaacagtatagaatagctctatcgggtggggagtaatcattaaacagatgaaatcggccccagatttacatgtctctttagaatccacagtgtaagcaaactacagttacaaagggatgggggttgtaaaccctctgagactctgcacttttcgcacgtatggcatcgtcaagtgctgtcttattacagcctttgtaaggagaggcaggctcctcctggggtgggctctgcagctgctctatttccaggcatgtgatcgcccccgctctccagattccccagcactctgctgcgtgtaactccactcaattctccactcatccttccttgtgaagcaggatcgttgaagttttaagtatgggcaaaaatctggaaaacttaggatccctctgacaccccaggattaggggacacagcagtggctagggcatcagccacagaactgagcgggaaatgccacttgtattggctgtaaagaaatcctggctttgggccaggcacagtggctcaagcctgtaatcccagcactttaggaggttgaggcggatggatcacctgaggtcaggagtttgagaccagcctggccaacatggtgtaaccccgtctctactaaaaatacaaaaaaattagccaggcgtggtagcgggcacctgtaatcccagctactcaggaggctgaggcaggagaatcacttgaaccggggaggcagaggttgcagtgagctgagatcatgccactccactccagcctgggcgacagagcaagactccatctctaaaaaaaaaaaaaaaaaaa

SEQ ID NO: 115409 - DNA, 1000 bp, Homo Sapiens
cttctataacctcgctctaatggcttaacagttgttctgggtggaaacgtcccctcatttgaatgctcctctaaaaaaaaaagaaaagaaaactgtattcattccctttaaaatgaaacattcctggtttatttgtccatgcctctagcctgggtgagtgaagctggctgtgttggcctgggcgattgttcaggttgtagaatgcgcattttacattgtttatgataattgaagggtacttctgtctgctccaatttccattccttggtatactcagtatgtcctagtaaggaaggctttccactctactggctccttaagaagcaaaagtaggttaaattttatacttcactgactagggtcttctctctcccctgttctgaatggagtaaaagtctgatgccaagacaaatattgggagcgagccttcctcactagccatgtccaaataatgagcgtattttcatgtggtcttcactgcatttggttttgtttctgatttcatgttcctttgaggtacagtcagatgaaaatgctgagttctgagagagttccaatgaggagctgcctttcagctttggaaaatatgcatctaaaacaaaaccaaacattattgtaatctgacacaggcaaaattatggttcccacacccaaaccccaaatgaaacctgggattttgaatgtggctctaagagttaacattgctgtctgtatgtcgtgtatgctaggtgatatcctcagtagggattgactactagactgtgtgttttatcaaagtgtgtaagaataaaaactcacttgcacgaattgaaacgtaaagaaatgacacttgtgaacgtgtgaacgttaacactgtagttgatagatcttaagctgctaattgttgagagagatttaaatttatgttctgtctggtcgctgcagattctcagcagcacttttactgtatatagaaattgaaataaagacctcagctattaaaaaaaaaaaaaaaaaaaaa

SEQ ID NO: 115410 - DNA, 1000 bp, Homo Sapiens
tctgtccacatctaataagccagaacccagcacctagaagctaggaaagtaaacaagcacctcgaaagttggttaataccaagaacctctctcacagttatattttgcatactactgttaagccagtctttgcaaatgaccccttcctgcccatcactgccttcctcaagacctaaaatagctccctatttagtgaaaaattatctgaatatttaaggtctgccttaacgtgatccccattgctgaattttacctcctgactccaaaaactcttctcttccctgggcccagtcctatttttttttttttttttttttttgtgagacagagtctcactctgtcacccaggttggaatgcaatggcacaatctccgctcactgcaagctccgcctcccgggttcacgccattctcctgcctcagcctcccgaatagctgggactacaggtgcccgccaacacgcccggctaattttttgtatttttagtagagacggggtttcaccgtgttagccaggatggtctcaatctcctgacctcgtgatccgcccgcctcggcctcccaaagtgctgggattacagacgtaagtcaccgtgcccggcctatatttttattttattaaaggttaggcactagatgaccttgactctaggcatctgcattctcttgatctttgcttagggtgaagctcagaaaaggacttggttctgaaaggctgtctggaattagattgtcctacgtgattcccagtgaattgagatgaatttcctctggaagttcaagtcggattcgagaagctgaattaccaaacagaccctccccaacctactaacgaccctattactctgttcaccctagagcagacgaacggcagggaagacttgatctgtggacttttgaaagcaacttgaggaaaaacacataacagaatctataggtgtggacaatatgtgatattgctaaataatgtcaagtaggaaataaaagagactattgacaaa

SEQ ID NO: 115411 - DNA, 1000 bp, Homo Sapiens
gttgggaacctgcggcaggggacagtggcactgcaggaagctcaggacaccatgcaaggcaccagccgctcccttcggcttatccaggacagggttgctgaggttcagcaggtactgcggccagcagaaaagctggtgacaagcatgaccaagcagctgggtgacttctggacacggatggaggagctccgccaccaagcccggcagcagggggcagaggcagtccaggcccagcagcttgcggaaggtgccagcgagcaggcattgagtgcccaagagggatttgagagaataaaacaaaagtatgctgagttgaaggaccggttgggtcagagttccatgctgggtgagcagggtgcccggatccagagtgtgaagacagaggcagaggagctgtttggggagaccatggagatgatggacaggatgaaagacatggagttggagctgctgcggggcagccaggccatcatgctgcgctcagcggacctgacaggactggagaagcgtgtggagcagatccgtgaccacatcaatgggcgcgtgctctactatgccacctgcaagtgatgctacagcttccagcccgttgccccactcatctgccgcctttgcttttggttgggggcagattgggttggaatgctttccatctccaggagactttcatgcagcctaaagtacagcctggaccacccctggtgtgtagctagtaagattaccctgagctgcagctgagcctgagccaatgggacagttacacttgacagacaaagatggtggagattggcatgccattgaaactaagagctctcaagtcaaggaagctgggctgggcagtatcccccgcctttagttctccactggggaggaatcctggaccaagcacaaaaacttaacaaaagtgatgtaaaaatgaaaagccaaataaaaatctttggaaaagagcctggaggttcaacgaggaaaaaaaaaaaaaaaaaaaaaaaaaaaaaaaaaa

SEQ ID NO: 115412 - DNA, 1000 bp, Homo Sapiens
ggagaaagagggagtcaaattctacttgatactccccgagagaaaaattcatcgtacagcctgggaccagtagctgagactcctgacctcttcaaactacctcagctaagtacatcaagtggtcatggaccagctcatactaaaccattaaacagacgctctgtactagaaaagaatcttataaaagtaactgttgcaccatttaatccaacagtttgtgatgctctgcttgataaggacgagactgattcgtccaaagatactgaaaaactctcttcccttggagaagagatgagagaagatggtcttagcccaaatgaaagcaaactttgtactgaatctgaagggatcagccccaataactctgcctggaatgggccccagctctcttcttcaaacaataactttcaacagactgtctctgataaaaatatgcctgacagtgagaaccctacgtctgtattctctcggatctcagaccattcagagactcctaatatggagttatcctgcagaaatggtggttcacacaagtcaagttgtgaaatgagatctctggttgtttccacctcatcaaacaaagatgttcttaacaaggattctgggaagatgaaaggccatgagagaagactaggcaaagtcattcctgttctacaaactaagaccaggactaatgttccgacgttttcacagtcaaatctagaacagcagaagcagctttatctcaggagtgtcattgctcatatagaagacccagaggacactaaccaaggatgaatccctagaagtggaattgctgggcgcagtggctcatgcctgtaatcccagcactttgggaggctgaggcagatggatcatctgaggtcaggagttcaagaccagcctgactaacatgatgaaacctgtctctactaaaaatataaaaattagctgggcgtggtggtgggcgcctgtaatcccagctactcgggaggctgaggcaggagaatctcttgaaccc

SEQ ID NO: 115413 - DNA, 1000 bp, Homo Sapiens
ttaaaacttcaagttggaatttttatgaggtcactgtgtaatttgaagaattgtgtgagattgtcatgatataaattccttttaaggactgataaatagaatgaaaagtttccaggtagtttaaaactccacaggtcagtttccttttcattcctgcttcactgtggtttataagcctacgggagagcaccgttgctcagatgctactgtgagcttcctgtccggtgttagaaagtaactagttaaaagttcattttagaatgtatggtttttggggatgaactaagaattagttattagttccaaaggactgagaaccaattttaatattttcacatttataggaaagaaattcatatgtccctgaaacttctaggacaaaaccaaacaagtaaggagggaactgttgcaaagccatttcatcgagaaggggacagaaggagaaatacacacatgtatacacaaacagaatggttgagaaaacgttttaataaaatgtgagggttgtatgtgtgcgtgtatatatttacacttaacctctaaaattctcttctacagtatctctgttatgaatatgatggaaaagcaacattttggtggtgagactattgttaaaataaatttgagaaagacgaaaattttgtgagtcttgataattacaagtcaacagctatcgaaagttagcacagcttgtctgtggtgctgtttttttccccactgcagtggacttatgctgttttcatgtttagaaacaaaaaggtttcatgtgattcatgtgtaagatgcacagtatttgacatcctgattatgtaatccctattccatctatccagtcttacacttatggttggcctcaaatctattgcatttatgataatgtattatatctagttgagtttaatatttttttattagcctgtaaataaagatggcatcttctacattaaaatgatattgatctcatttttttaaataaacattttgtttccttgacgttaaa

SEQ ID NO: 115414 - DNA, 1000 bp, Homo Sapiens
atcgagaatccacgcccggggaccagtaggacttgagggactgcttactactaagtggctgctgcgagggaaggaccacgtggtctcagatttctcagagcatggaagtttaaaatatcttcatgagaacctccctattcctcagagaaacaccaactgaaaagagccaggaaaacccgggaattttccaaaaggtcttcacgttaaacttgtcttatctcaggagagagcccgctcttgtctcccagttcctggtagggtctgcctgttggaaagtgtacctggatgcttctgggctccgtttggcaatagcagtcttggctgatgtgcacagtctggctcccagctcaccctttttttttaaagtaagaaaatagttgctaccgatagggactttgccaagtccaattatcttctaggattgaaaggtgcattttccccataaaaaaggcgaggaaaacccatggctgctttgtgtcacctcagtgacttacagtcccccttggcatttagttggtactagagccagtcatccttaacaaatcttttcacattttatttctttcacatgtagtcatcttcaaaaaggaaagatttggaattttagaaaaggggcaactcttctttttagcattctcatcagaaagtcacaaaaatcgatggaatcatttccactgggaagattgaccttttgtatttatttgtggggtaaattaataagcattccagatgcttgcagcttcctgcatccaggagatgctgtgttccccgtgatgcagctggaacccaagctgcagcaggagatgcaagtttcaggatgttccccactgagctggaggaatatctacagcagtgatgcttgaaatttttgtatgaattattttgtcgtcctacccttttcctccaaaacaaaaattagaggattattttaatactttggattcttcccccttttttgagaaataaagttttttatgaaaagcctgtgcgtgaaaaaaaa

SEQ ID NO: 115415 - DNA, 1000 bp, Homo Sapiens
aaactccatttggtgaaaccaacatatccatttcttttcctagttacggatgatttggggatgcttttgcagaaatgtgttcatagatgatgctgaatgggggaggggggcagcacgtcagagaatttactattaatcccagagttttctctgtattctcagaagatgttaatagtttgttactagccagagagtatgactatgttagattatttttaaagatgaaacatgtatgataggatggattctttctgtattctgagagtgtacagtacaggattattataatgaaagtttatatcaacagggtttcgttggctctgccatatattataagcaaaagagattggtaaagtgccacagtattccagataacttttcagttgcggcctttcttctcgttctttaatttgaaacctagatacatgcagtaaaaactaggagaatgacttttacccttggggacagccaagttttgttgataaacctatttcctagcatgccttcaggaagttgtgccagaccctagattgtgaaggacccactgttcttctgttgtacgagctccctgaaccattgttcagaggaccaatgtcacatcgcttcatgggcatggcccatggagcatctgggtgatatctgtctacagtattggctcttctgcgaggctgatacacaaggcctctcttccacatgatcatttgcaaacctcccccagcccctaccatccaatgtggaaggaaaacaagaactgcctgaagaagagtccaagctacagatacacagcgtgtgcattgcggctgtcaccttcctcctcccacttctgtatcctcagagatgctgcgtggatgtttccttaacctcagctgacttccctgtgaatgtctaatgctagttcagggcctccaggcattgatttgtacagtggtaactcccaatgaggcttctgttatcatttggtgtgctttctctgtcattaaaagaaatgattttcccaggc

SEQ ID NO: 115416 - DNA, 1000 bp, Homo Sapiens
cgttactctccaacctggacaacaagagcgaaactccgtcttagaagtggaccaggacaggaccagattttggagtcatggtccggtgtccttttcactacaccatgtttgagctcagacccccactctcattccccaggtggctgacccagtccctgggggaagccctggatttcagaaagagcaagtctggatctgggaccctttccttccttccctggcttgtaactccaccaacccatcagaaggagaaggaaggagactcacctctgcctcaatgtgaatcagaccctaccccaccacgatgtggccctggcctgctgggctctccacctcagccttggataatgctgttgcctcatctataacatgcatttgtctttgtaatgtcaccaccttcccagctctccctctggccctgccttcttcggggaactcctggaaatatcagttactcagccctgggccccaccacctaggccactcctccaaaggaagtctaggagctgggaggaaaagaaaagaggggaaaatgagtttttatggggctgaacggggagaaaaggtcatcatcgattctactttagaatgagagtgtgaaatagacatttgtaaatgtaaaacttttaaggtatatcattataactgaaggagaaggtgccccaaaatgcaagattttccacaagattcccagagacaggaaaatcctctggctggctaactggaagcatgtaggagaatccaagcgaggtcaacagagaaggcaggaatgtgtggcagatttagtgaaagctagagatatggcagcgaaaggatgtaaacagtgcctgctgaatgatttccaaagagaaaaaaagtttgccagaagtttgtcaagtcaaccaatgtagaaagctttgcttatggtaataaaaatggctcatacttatatagcacttactttgttgcaagtactgctgtaaataaatgctttatgcaaaccaaaaaaaaaaaaaaaaaa

SEQ ID NO: 115417 - DNA, 1000 bp, Homo Sapiens
ctgatcgtgtgcgaggccaggagatcaagaccatcctgactaacaaacacagtgaaaccccgtctctactaaaaatacaaaaaaattagccaggcgtggtggtgggcgcctgtagtcccagctacttgggaggctgaggcaggagaatggtgtgaacccgggagatggcgcttgcagtgagctgagattgcactccagcctgggcgacaggctcaaaaaagaaaaaaaaaagaacaccgatcatgtgcttcttggatctggtgactgttctctccctgttttcctttctttttgggtgtttgaggagcatggcttagcttgagacacacacagacactgtgtacttcagtgaagggcttaatatacagtttccaaacctgacgactcttcttcttgtaatggctgcccttttcctacctgaggccgtcttagagaaaggggccagtctcctctaatgctcagatttcccatagttggcttttgctgtgtctcctgcctcaggcagtgtcatttctgggagcaggtggttgtagtccaggcccctccccagcagggtctgcccaggctccttcgagcccctttccccgcctcctctcagcctgtccggatgacagtgttcgcctcctgtttagactgtacactcttcaggggtaggggtgccgtcagttcttcaatcagctggcacacacttgtatagtgaaatgtttacatgtgggaaaactccgccttagacaaactaccaaagtacaatcgtgtctctctctagccggaatgctacagagagaaatggaaccttagatttgcaacaaaagtctgtaaactggtctgtttgccaaagtgaacactggatgactaaggagctgaagaaggcccccagaagcggatttgtggtgggttattttattttgcctgtggccaatcttctgtgaaatacaatgtgctgttggtgcaacagatgattcaataaatgtctacagcagaaaaaaaaaaaaaaaaaaaa

SEQ ID NO: 115418 - DNA, 539 bp, Homo Sapiens
cagcctccagagcaccagcactggcactggcactggcacacgctatggcaaatgaagtgcaagacctgctctcccctcggaaagggggacatcctcctgcagtaaaagctggaggaatgagaatttccaaaaaacaagaaattggcaccttggaaagacataccaaaaaaacaggattcgagaaaacaagtgccattgcaaatgttgccaaaatacagacactggatgccctgaatgacacactggagaagctcaactataaatttccagcaacagtgcacatggcacatcaaaaacccacacctgctctggaaaaggttgttccactgaaaaggatctacattattcagcagcctcgaaaatgttaagcctggatttaaaacacagccgtctggccagctgcctcgaatatctgacagcttagcaaaaagggccaaagctttccataggcgtgctgcacttgcttggtaaattaaacagcttttgtatcttcccctttgactttaggtaataaagcatccaaacttgtaaaaaaaaaa

SEQ ID NO: 115419 - DNA, 882 bp, Homo Sapiens
gtacagcagcctgggccatgtcggcgccgccggccctgcagatccgggaggcaaacgcacacctggcagccgtgcaccggcgcgcagcggagctggaggcgcggctggacgcggcggagcgcacggtgcacgcccaagccgagcgcctggccctccacgaccagcagctgcgcgccgccctagacgaactgggtcgcgccaaggaccgtgagattgccacactccaggagcagctgatgacctcagaagccactgtccacagcctgcaggccaccgtgcaccagagggacgagctcattaggcagttgcagccccgggctgagctgctgcaggacatctgccgccgccggccacccctggctgggctgctggatgccctggctgaggctgagcgcctggggcccctgccggccagtgaccccggccacccaccccccggtgggcctggtccaccccttgacaacagcactggggaagaggcggacagggaccacctccagcctgcagtgtttgggaccacagtgtgagcccggaatgcagattacagaatggagacagaaagccactgctgtcagtgtccttgggagtcaccagcaccctgcagggggaccctacggcagagccaaagtcctgtctaagcatcagaacaggctgaacagtcaaaaagttttcaaataggcccacaggccaggtgcagacgtttaacccagacagaagtgttcttgtttgtttttaagctttgaatcagtcacccttgctaaaaacctggcaatgcaaacacaaagatctggatttctggcaagacttggccaagcttgcctggagttcagggcaccctctttagccagggtgtgagtttctgttttttgttttttttttttt

SEQ ID NO: 115420 - DNA, 1000 bp, Homo Sapiens
cttcatgacaaactcctaatgagatcacataaatgtgatgttccaaagagctgcccatcagggtgatgagagctgttgggtaatgtgagtctctttttgtaggtgtctgttcccctgtgagcacagcccttggtgctgctgggcaggctggagccatcagcaccaaggaagagtaggggattggctgcagccctgggtctggcagagagcagactctgcagggccatacccagaaggaagagcacccatacgtccgctgctttcccctagtcaatgtctaaagccctcctatgaaatccatgagaggtggtcatttcctcttagccggacccatgtggaatggaggggccccaagaatcccaacatcagctcatcatcccactgaacagcccttctaggggagaccattcccaggatttaattcacatctgtctccctgccgtttccctcactggccacatgcaaacctttctaagagtgtaaacatgaactagactcattgtgacatctccacacgtttcctccttcccaccttttttacccattcctaatcatccttttaggcctctctcaagtgtgtacattacgtcttccacagagctttccttgacttcacacctctggggaaaaggacagtatgcacattgtgtccattggttgtgagacatttgcaggcaaagactgaccttcctcacggtggccactgcactcgtctaatacctggattgtgttcataatcaatgttagttaacaataaattttaaaaaattgaagatggctctcattttcagactaattgtccgctcatttcttcagattctactcatttgttttcttctgggcattagaaaaaaaaactctaaaaaaaaaaaaaaaacatgtcggccgcctcggcctctagaatgcccaagcagtggtatcaacgcagagtcgccattatggccgggaccacaaacaaaaaaaaaaaaaaaaaaaaaaaaaaaaaaaaaaaaaaaaaaca

SEQ ID NO: 115421 - DNA, 1000 bp, Homo Sapiens
gccgaggcttcttcctctgaacttttgggccagctgaggggcccacggacatagggcacccacaataggcgtgtgtctgctgtgtgtttgtgttcggccgtcctgcttctctgcttccacacgtacacatgcccctgtgttactttggttcatcttctgtactctgtcagttttctgctggtcagaacatctgtgactgtgacagagctgtccaggattgcagtggataggaatttcttcacatggctcctggagaagtgaccatcacagttcgcctcatccgttcctttgaacatcgcaatttcaaacctgtagtgtatcacggagtgaatttggaccaaactgtaaaggaatttatcgtatttctaaagcaagatgtccctttaaggaccaacctgccaccaccattcagaaattataaatatgatgcactaaagattattcatcaagcacataaatcaaagacaaatgaacttgtgttgagtttggaagatgacgaaagactcctgctgaaagaagacagcactctgaaagcagctggaatcgccagtgaaactgaaattgcattcttctgtgaagaagattataggaactacaaagctaatcccatttcatcctggtgaaaacatctcgagggcttcctttttgcatacctgtattaagctctttattccactgctgagtttttgaaattgacaaacaaatcttaaaaaattaatcccaggctatactctttgagctaaaatctggttatttctttctcttcaggtctttctttccttctctctttctttttctttgttgttgtaaaataatatattatgagaaaaacatttgatccttttaaagggaaataaattgttattaaaaattaaaaaaaaaaaaaaaaaaaaaaaaaaaaaaaaaaaaaaaaaaaaaaaaaaaaaaaaaaaaaaaaaaaaaaaaaaaaaaaaaaaaaaaaaaaaaaaaaaaaaaaaaaaaaaaaaaaaaaaaaaaaaaa

SEQ ID NO: 115422 - DNA, 1000 bp, Homo Sapiens
cctttgtgatatcatcttaccagtttatttggtaaaaacaaacagttatttggtatttgtcagaattcttcagtgcctgctattacagctattttccaattactaatttgattatactcactcaaggcagtgcaagatcttgaagtactttttagcagttaagtaatattgaattgtattgaatagtttacatagtttattctagtctttgaaaattactgaacatggacaatgtgcatgtcattgacatctgccttagaacttctgggacaatcctgattcgagagattctatcccattatttacatataccaaaaatactttgttaatttaatgtgttggcttcccaactcctgaacacgacacaattttattattagattttgtatggtgattttaggctatgaaaacatgatcattatatgtatatagatacatttttatttgttacaaatgtttgagcagctcactagcccacccctcctctattttgggtaagagaatttactaccttttttaactatgtagttgagagcaacatgtattttgttatttttagaatggtcagtatattgctataaaattttaaatgagactatgaaagttaaagtattctgattctggttaaattaacgaatatggttccaggccctgttctctgggtttttgagagagaataaaggttatgtttgtcttacctttgttatcgagtttgctgaattcttttgaacgatgatcttaaaggcacaaacaccaccagccactttgctaatttcttaatagcagatttacattgcagcaagaaaaccatcttttatagtaacattcagttaaaatgaactcaattcattgttaacttcctaaaacagaatttgaactttatcaacctcaacgtgtatataaactagatagtcctcaatactttatcaacctcaacatgtatataaactagatagtcctcaaatactgtttgaatttaataaatgtcaatttaaaaatt

SEQ ID NO: 115423 - DNA, 1000 bp, Homo Sapiens
gccggctgagcagggcagcgcagggcctcccagatccgggtgctgagacctgtgcggtgtgcctggactacttctgcaacaaacagtggctccgggtgctgccctgtaagcacgagtttcaccgagactgtgtggacccctggctgatgctccagcagacctgcccactgtgcaaattcaacgtcctggggaaccgctactccgatgattagctgcccagctggactctgcacatggggatggacccttcctgcctgcaccccggtcctcagcctgggctcccaggacaggacaggatgggacagcaggatagacaggacagcaagcccagtgggtgggaggaaggatgagggccccaccatgtccacactgggaaggagggccccacagcttcagactgaggatctagggctgggacctgtcagtcaaggaagagaggtcactttgggaccttctctgcaatcctgtgacgtgagtctgccctccttacaggcagctcccaggtcaataaggaaagagaatatggggccagtgtagctgtcgccagggttctgggagctccctgtggcctgtctgggaattcctgggggctgagactacagtggccaggttttgtgcttatttattggggggtgggttgagggaagagctatctggccttggggtaccctggcctgaccgtctttcaggatacttcttgtcaaggctgtctgcctgttgcctttggtcctcaagcactgggagccatgggtcccactgcctgtccagcctggctcccttcctgggcctggctaggaccagaggtcttagaaaccgtcctgttctggaatccttggctgcggctttgtgttgctgaccgggatactcgaagccacaggatcaatgtggtgcctcatccaggggcatccttttttttttttttttttttttttaaagagttggagtagggaaggtttaatagtaaaataaacgtggctatattttaacataagatgtaaaa

SEQ ID NO: 115424 - DNA, 1000 bp, Homo Sapiens
cgttctgcagggctgttgtgtagactgcagacatccatacctcaccacagaccaaagatgacctcgtgtcagactgtgggctgatgagaggtagagcagcatgcatcgaggcctgagggtgcagggcgccctctcttggcctggaggaattgctcctaactagagtaagtttccacgagggtcccaggcagagctgcagagctggaaccggaggctccacagtccttgcctgctcatggacctccttcagagcacctttctacagactggactgcccagctccgtggggtggcatctggtttctggtgctattctgccaagttatcgagctcctcctcatgtttcaacattccatcttcccgtttctatcctcgactccaaagtaagccttcttagctccaatcagggatgaggggctcaacctcttctgtcctcaaagaggccaaacgcagtgccacagtcggtagccttcacttttagatgtcctattcatgtaaaaaagaaggtgcccccaccaggcttacatcagcaataagcaattctaatgcaacgatggtgtccacattttaccccagtgtgtgcccatgtatgcctttgtgcccgtgtaattattgttagcgcccctttcacttagaggggtgatgataaactgtggccaccttgattacaacccacatttcctgctttggggagcttccaagtaacaggccatttcttacctccctccaggaacagtgggcactgcccaccacctcgtgtctgctcataggatgacgctggagatccccacacttactctaccctcttggcaaattggcattccggtggtggtttttgtttcctttaacacattaaataaatgagtatataggatgtgaggggaggggtgagaacaactagctgtagcatgtgtaggctatatactttaccatttgacttctttcctttttttttttttaaataaaaaaagtgcttgactggtttcaagcttcatcatgaa

SEQ ID NO: 115425 - DNA, 1000 bp, Homo Sapiens
tgcggtcaaagcgctggccaaggagaaggacctgctggagcgtgagaagtgggagctgcggcgccaagccaaggaggccacagaccacgccacggcactgcgctcccagctggacctcaaggacaaccggatgaaggagctggaggccgagctggccatggccaaacagtccttagctacgctgaccaaggacgtccccaagcggcattccctcgccatgccgggcgagacggtgctcaatggcaaccaggagtgggtggtgcaggcggacctcccgctgaccgcagccatccggcagagtcaacagactctctaccactcacacccccctcaccctgcggaccggcaagcggtcagggtgagcccctgccactcccggcagccctctgtcatctccgacgcatctgccgccgaaggcgaccggtcgtccacaccgagcgacatcaactcccctcgacaccggacacactccctctgcaacggcgacagtcccggcccagttcagaagaacctgcacaaccctattgtacagtcactagaggatcttgaagaccaaaaacggaaaaagaagaaagagaagatgggattcggctccatctcccgcgtcttcgccagagggaagcagcggaagtccctcgaccccggcctctttgatggtaccgcccctgattattacatagaggaggacgcggactggtgatacgcgctcccctgcgcctgctgcccgcaggcgtgtctgtgcgtgtgggcgtgtgtgcaagcgagcgtgggtgcgcgtgtggccgtgcgtggggtgcgtgtgcacgtgtgcgctggcacacatgggtgctgggtgtggccgagcgcctctaacaagtgaaaacacgagtgtgaacctctctcccctgcgtcgccacctctgtaattgatgtacataccgcaaaccgtgtgtgaacctgtcaactctctgtcgtctttggagcgatacagttgtgttgttaaaaaaaaaaaaaaaaaaaaa

SEQ ID NO: 115426 - DNA, 1000 bp, Homo Sapiens
tggatcgagctgagcaggcggaggccgacaagaaggcggcggaagacaggagcaagcagctggaagatgagctggtgtcactgcaaaagaaactcaagggcaccgaagatgaactggacaaatactctgaggctctcaaagatgcccaggagaagctggagctggcagagaaaaaggccaccgatgctgaagccgacgtagcttctctgaacagacgcatccagctggttgaggaagagttggatcgtgcccaggagcgtctggcaacagctttgcagaagctggaggaagctgagaaggcagcagatgagagtgagagaggcatgaaagtcattgagagtcgagcccaaaaagatgaagaaaaaatggaaattcaggagatccaactgaaagaggccaagcacattgctgaagatgccgaccgcaaatatgaagaggtggcccgtaagctggtcatcattgagagcgacctggaacgtgcagaggagcgggctgagctctcagaaggcaaatgtgccgagcttgaagaagaattgaaaactgtgacgaacaacttgaagtcactggaggctcaggctgagaagtactcgcagaaggaagacagatatgaggaagagatcaaggtcctttccgacaagctgaaggaggctgagactcgggctgagtttgcggagaggtcagtaactaaattggagaaaagcattgatgacttagaagacgagctgtacgctcagaaactgaagtacaaagccatcagcgaggagctggaccacgctctcaacgatatgacttccatataagtttctttgcttcacttctcccaagactccctcgtcgagctggatgtcccacctctctgagctctgcatttgtctattctccagctgaccctggttctctctcttagcatcctgccttagagccaggcacacactgtgctttctattgtacagaagctcttcgtttcagtgtcaaataaacactgtgtaagctaaaaaaa

SEQ ID NO: 115427 - DNA, 1000 bp, Homo Sapiens
cccaggtggagaaaaggagacttcggctacccagagaagttcagtgcccagctctactgagaagaatgcttttaattcctctctggaagatcccagcaccgactactaccaagagctgcagagagacatttctgaaatgtttttgcagatttataaacaagggggttttctgggcctctccaatattaagttcaggccaggatctgtggtggtacaattgactctggccttccgagaaggtaccatcaatgtccacgacgtggagacacagttcaatcagtataaaacggaagcagcctctcgatataacctgacgatctcagacgtcagcgtgagtgatgtgccatttcctttctctgcccagtctggggctggggtgccaggctggggcatcgcgctgctggtgctggtctgtgttctggttgcgctggccattgtctatctcattgccttggctgtctgtcagtgccgccgaaagaactacgggcagctggacatctttccagcccgggatacctaccatcctatgagcgagtaccccacctaccacacccatgggcgctatgtgccccctagcagtaccgatcgtagcccctatgagaaggtttctgcaggtaatggtggcagcagcctctcttacacaaacccagcagtggcagccacttctgccaacttgtaggggcacgtcgcccgctgagctgagtggccagccagtgccattccactccactcaggttcttcagggccagagcccctgcaccctgtttgggctggtgagctgggagttcaggtgggctgctcacagcctccttcagaggccccaccaatttctcggacacttctcagtgtgtggaagctcatgtgggcccctgagggctcatgcctgggaagtgttgtggtgggggctcccaggaggactggcccagagagccctgagatagcggggatcctgaactggactgaataaaacgtggtctcccactgcgccaaaaaaaaaaaa

SEQ ID NO: 115428 - DNA, 1000 bp, Homo Sapiens
ggggcaggcgtggccgtcggggcggagggcggtggccggccgcggtccgggcgtcaggccgggcggcgggggcggcagggaggcggcgctctggggccgcaggcggacgtactctgtgagcggcgcccgggcgcctgggcaggcgcctcccgagtaccggcgcccattttgcccgcccgctaaggagacccgtgcgcggcctacacgcttgggggacagccctttaagacgacatctccgcgaacgccggcctcttgagccagggggacgctcttttgaaagtcagtcccaaaacagttaaggttttattttattttgttttatttccaagtcacagcccccgaatctcgtacaactctccctggaccacttccggttgccggcccgcgcctcataacttcggttcgagtgacctcggcccgggatgcccctcggctcaccccgggctcacgtcgcgatcctggcttgagtggcccagggtgggagacctggaagttttagcctagctgttctcaaggcggattaattagcccaagaaacattatattcatttttctggatatgccgcagaaggatccgtgccagaagcaagcctgtgagatacagaaatgtttacaagccaacagctacatggaatcaaagtgtcaggctgtcatccaagaactgcgtaagtgttgtgctcagtatcccaagggaagatctgtcgtctgttcaggatttgaaaaagaagaggaagaaaacctaacacggaagtctgcatcaaagtaaagttcttctgaagtgctgctccatgtttccaccaaatgaattttttttatcctcctgactcttcaggccaggtagcagcaaatagcaaatgaaaaagtcagctacaaaagttaatgaatatgccatctatgcagaacaggcagaaatataaacacattaaaagacaaatatgtagaatgtaatatactgagctgctaaaataaacctgtttaagagaaaaaaaaaaaaaaaa

SEQ ID NO: 115429 - DNA, 1000 bp, Homo Sapiens
tgtggcctccactgcaggcaggacaaacctggatgccacctggagctgcttcctgagttggcacactatcgtgtacacagcagtcttcagccccctggaaggaggccatagtcgtgtgaggatggcaaagtcgaacaggaagctttgagtgccttcctccacgatgtcaacgaggagatccagtgccagatcgaggtggatggaacacccaggggtaggggtgcaggtgtgggcagtgatgtcccttcccctccctcccctggtcccacagactgtggccatgaggctgcaggctggtgctatgacagcagattgcagcacagggccctcccctccagcccccagtgggacatcaaaaccaccctggggccatttgtgcagggcaccacctccagtattgatggggaaaataaactcagtagagccacgacagggtggagagaagcagggaccattgtcttcctcaggagcgtgacagctgaccccacagaccatgcttgctggtacacactggtcccagacccaggcctgtcggacatcagcagtgtgctaaaaacgtgtaagatgtcactactcaccgtgtgtcctatctagttgacatgggtggagtcagctaaggggtgaatgttcatatgctcccaattcacgttgaagccctaatccccaaagggatggtattgggggtggggtcttggagaggtgattaggttatgagggtggagccctgatgaatgggattagtgctttataaggagagacaccagagagatgatctctctctccaccatgtgaggacacagtgagaagacagccgtctgcaggcccggaagagagccctcaccaggaaatgaaactgttggcaccttgagacttcccagcttccagaactgtaagaaataaatgtttgttgtttaagcctttcaggctacggctttctgttacagcagcctgaactgagagtccatgccgagtttttgaaataaatgtgaattctgatgtt

SEQ ID NO: 115430 - DNA, 1000 bp, Homo Sapiens
tgtgatcacaccaccacactccaacctgtgtaacagagtgaggcctcatctcaaaaaaaaaaaaaggccacaaaactcaacaataaaaacaaacagtccaattagaaaatgggcaaaagacatgaatagatgtttcactgaagaggatctatagatggcaagtaagcatatgaaaagctgttaaactccataagtcatcagggaatgcaaattgaaaccacagcgaggctatgacttacttatctcaatggctaaagaaaaaatagtgaaaataccaaatactgatgaggatacaaactggatattttatacattgctgacaggaatgtaaaatggtacagccactctgggaaagagtttatgaatttcttatcaagttaaacataattttttaatcaagttaaacataagacccagcagttgtgctcctggacattcattccagagaaatgaaaacctatattgtacttgtactcaaatattcataggagctttatttgtaatagccccaaactggaaacaacccagatgtcctacaacaggtacatggttaaacaaaccatccataacttggaatactgctctggaatgaaaaggaactaactgttgatacaagaacttggttgtacctcaggggtattatggtgaacaaaaaaaaaaccagtctcaaatggtcacatactgtatgatcgcatttatataacattcttgaggtgacaaaattattgaaatgaagaacagattaatggttgccagggatagggactggagggggtgtggggtatgtatgactataaagggatgacgcaaggagttcctttgtgctgatggaacagttctatatgattatgatgattacgatgttgattataacatttgattatgaggttaagcacatgagtctttacctgtgctgaagttgtatggacctacatacacacaaatgaatgcatgtaaaatctggtgatactgaataaagtctgtggtctagatagcagta

SEQ ID NO: 115431 - DNA, 1000 bp, Homo Sapiens
agcctgcaacataaaatatattttgaaagctgttaaggggtgtataatctgttaaaaaataccatgattagtatttcacatttagtgactcagatccctttgtgtaagtcctttgcgttgtgcaaagaggtttttctatgagatgagaattatgaacacttcatataggtaaattccataggttgagctggggcagaaattaatggctcctggagattgcatctttttttttttttttttgagcttagaattcccatttggacagaatttagcttttgtgctgttgattacttctgtactaaactggtagccaattgttcacttctaaatggaagggaaaaagttacccacacaagttagaaaatgatttaccgaattatttttttgagttagtatgtatatactgttttaaatcagtaatgtttgttccttttgctgcccatttgggagtatgtggcaattcctagtgctcttgtatgacattactcttcttgagacttgtatatgcaagaaagtatatataaaagatgcctggtggtaactttgtatctgagttctgattcattatggacttttagaaatctatttagataattggttcatactaggtgctcaattactctgaccttgtgtggcttaatccttaaatagttgctttaggtgttactgggtggaagcatggaaagtgaagggctaatattaaggatttttatgtattactgagtagggaaagtgggaagtagcttatctttggacagttgtattactttgcactaatcaccttgtttgcagttgtagctgattcagttctagattttaggaccaaaaagatctctaatttaaagaaacagtttttatatacctagaatgaagattctgtttaaagcggttttggttaacttggttcttgacatttgcctaaaattttgttggattgggactaaaatgttctattagccaatgaataacgtccaagtaaatttttgttttattttgggaa

SEQ ID NO: 115432 - DNA, 1000 bp, Homo Sapiens
cccttctacgaccccgacaccagtgtggtctacgtctgcggcaagggtgactccagcatccggtactttgagatcacagaggagcctccctacatccacttcctgaacacgttcaccagcaaggagccgcagcggggtatgggcagcatgcccaagcggggcctggaggtcagcaagtgcgagatcgcccggttctacaaactgcatgagcgcaagtgtgagcccatcgtcatgactgtgccaagaaagtcggacctcttccaggatgatctgtaccccgacacagccgggcccgaggcagccctggaggctgaggagtgggtgagcgggcgggatgccgacccgatcctcatctcactgcgggaggcctacgtgcccagcaagcagcgggacctgaagatcagccggcgcaacgtgttgtctgacagccggcccgccatggccccgggctcctcccacctaggggcccccgcctccaccaccactgctgctgatgccacccccagcggcagcctggccagagccggggaggctgggaagctggaggaggtgatgcaggagctgcgggccctgagggcgctggtcaaggagcagggcgaccgcatctgccgcctggaggagcagctgggccgcatggagaacggggatgcgtagggccacagccacacgccaccttcatctcctccgccgcccccttcccactcagcttctgccagcgggtcgcaccgggctagctggctgcccagagcctctgaggcagcgcaggggtcagttcccacccccacccgtcccaggcccaggccgaagccagcgcccagctttcctcactgttcctgtggaggatgtctacgcccaggcgagctcctcgacctctgagggaccatctccccgaccactgcccagccctctgctccctccccagaggaggcgggagggtgggctctatattttcattccaaataaaattctctttctaaaagccaaaaaaaaaaaaaaaaaa

SEQ ID NO: 115433 - DNA, 1000 bp, Homo Sapiens
gagcaggccagcccggacctctggagtgcccccagcccagagcccggtgggtccgcatccctgcttctggcgccccacccaccccacacctgcagtgccagctccctcgtcttcagctgcatttcacatgccttgcaatggatcagccaaggccgagaccccatcttccagccacctagtcccccaaagggcctcctcacccaccctgtggctcacagtggggccagcatactccgtgaggctgctgccatccatgtgctagtcactggcagcctgcacctggtgggtggtgtcctgaagctgctggagcccgcactgtcccagtagccaaggcccggggttggaggtgggagcttcccacacctgcctgcgttctccccatgaacttacatactaggtgccttttgtttttggctttcctggttctgtctagactggcctaggggccagggctttgggatgggaggccgggagaggatgtcttttttaaggctctgtgccttggtctctccttcctcttggctgagatagcagaggggctccccgggtctctcactgttgcagtggcctggccgttcagcctgtctcccccaacaccccgcctgcctcctggctcaggcccagcttattgtgtgcgctgcctggccaggccctgggtcttgccatgtgctgggtggtagatttcctcctcccagtgccttctgggaagggagagggcctctgcctgggacactgcgggacagagggtggctggagtgaattaaagcctttgttttttaaagaaatggcaaagccttcgactgacccttgaccccctgctccctcagcagagacggagggaggggctgctggtggtcagggacctgcactgtgtagagggagcctggctgtgtggcctggaacaagtccctccctccctgtgcgcctcaggtggcctgtctgtgagatgagaagaagaccagactgaagcctgttcaccatatgccaggcagtgctttct

SEQ ID NO: 115434 - DNA, 1000 bp, Homo Sapiens
agcattggcagacccgagttaaaaaatctggatccgtttttactgtttgatgaatttaaaggaggtagaccaggaggatttcctgatcatccacatcgaggttttgaaacagtatcctacctcctggaagggggcagcatggcccatgaagacttctgtggacacactggtaaaatgaacccaggagatttgcagtggatgactgcgggccggggcattctgcacgctgagatgccttgctcagaggagccagcccatggcctacaactgtgggttaatttgaggagctcagagaagatggtggagcctcagtaccaggaactgaaaagtgaagaaatccctaaacccagtaaggatggtgtgacagttgctgtcatttctggagaagccctgggaataaagtccaaggtttacactcgcacaccaaccttatatttggacttcaaattggacccaggagccaaacattcccaacctatccctaaagggtggacaagcttcatttacacgatatctggagatgtgtatattgggcccgatgatgcacaacaaaaaatagaacctcatcacacagcagtgcttggagaaggtgacagtgtccaggtggagaacaaggatcccaagagaagccactttgtcttaattgctggggagccattaagagaaccagttatccaacatggtccatttgtgatgaacaccaatgaagagatttctcaagctattcttgatttcagaaacgcaaaaaatgggtttgaaagggccaaaacctggaaatcaaagattgggaactagtggaaagcggaagagcaggtcttgatgtgtcctagaattttgccatttctgagattgagccattgaaggcattccatttctaaagcttatttagccggtgcttctaaagaattccacactaacgtgataacatggtttttgtaacaataaatgtaggatatttcctggcacatgcaaataaacctaatcattgtttctttaaaaa

SEQ ID NO: 115435 - DNA, 1000 bp, Homo Sapiens
ctacttctctgatcctttcttaaagtatttagaaacatacttgaacttacactgggcaaatgttgtttactacagtccaaatgaagttaaagtggtagcagaaggatttgattcagcaaatgggatcaatatttcacctgatgataagtatatctatgttgctgacatattggctcatgaaattcatgttttggaaaaacacactaatatgaatttaactcagttgaaggtacttgagctggatacactggtggataatttatctattgatccttcctcgggggacatctgggtaggctgtcatcctaatggccagaagctcttcgtgtatgacccgaacaatcctccctcgtcagaggttctccgcatccagaacattctatctgagaagcctacagtgactacagtttatgccaacaatgggtctgttctccaaggaagttctgtagcctcagtgtatgatgggaagctgctcataggcactttataccacagagccttgtattgtgaactctaaattgtacttttggcatgaaagtgcgataacttaacaattaattttctatgaattgctaattctgagggaatttaaccagcaacattgacccagaaatgtatggcatgtgtagttaattttattccagtaaggaacggcccttttagttcttagagcacttttaacaaaaaaggaaaatgaacaggttctttaaaatgccaagcaagggacagaaaagaaagctgctttcgaataaagtgaatacattttgcacaaagtaagcctcacctttgccttccaactgccagaacatggattccactgaaatagagtgaattatatttccttaaaatgtgagtgacctcacttctggcactgtgactactatggctgtttagaactactgataacgtattttgatgttttgtacttacatctttgtttaccattaaaaagttggagttatattaaagactaactaaaatcccaaaaaaaaaaaaaaaa

SEQ ID NO: 115436 - DNA, 1000 bp, Homo Sapiens
gtatgtggaccaacttctgaaagaggatgtgagaaataactctgtctggaaccaaagatacttcgttatttctaacaccactggctacaatgatcgtgctgtattggagagagaagtccaatacactctggaaatgattaaactagtaccacataatgaaagtgcatggaactatttgaaagggattttgcaggatcgtggtctttccaaatatcctaatctgttaaatcaattacttgatttacaaccaagtcatagttccccctacctaattgcctttcttgtggatatctatgaagacatgctagaaaatcagtgtgacaataaggaagacattcttaataaagcattagagttatgtgaaatcctagctaaagaaaaggacactataagaaaggaatattggagatacattggaagatcccttcaaagcaaacacagcacagaaaatgactcaccaacaaatgtacagcaataacaccatccagaagaacttgatggaatgcttttattttttattaagggaccctgcaggagtttcacacgagagtggtccttccctttgcctgtggtgtaaaagtgcatcacacaggtattgctttttaacaagaactgatgctccttgggtgctgctgctactcagactagctctaagtaatgtgattcttctaaagcaaagtcattggatgggaggaggaagaaaaagtcccataaaggaacttttgtagtcttatcaacatataatctaatcccttagcatcagctcctccctcagtggtacatgcgtcaagatttgtagcagtaataactgcaggtcacttgtatgtaatggatgtgaggtagccgaagtttggttcagtaagcagggaatacagtcgttccatcagagctggtctgcacactcacattatcttgctatcactgtaaccaactaatgccaaaagaacggttttgtaataaaattatagctgtatctaaaaacaaaaaaaaaaaaaaaaaa

SEQ ID NO: 115437 - DNA, 603 bp, Homo Sapiens
gaaaagcggccagggtggcccctagctttccttttccggttgcggcgccgcgcggtgaggttgtctagtccacgctcggagccatgccgtccaagggcccgctgcagtctgtgcaggtcttcggacgcaagaagacagcgacagctgtggcgcactgcaaacgcggcaatggtctcatcaaggtgaacgggcggcccctggagatgattgagccgcgcacgctacagtacaagctgctggagccagttctgcttctcggcaaggagcgatttgctggtgtagacatccgtgtccgtgtaaagggtggtggtcacgtggcccagatttatgctatccgtcagtccatctccaaagccctggtggcctattaccagaaatatgtggatgaggcttccaagaaggagatcaaagacatcctcatccagtatgaccggaccctgctggtagctgaccctcgtcgctgcgagtccaaaaagtttggaggccctggtgcccgcgctcgctaccagaaatcctaccgataagcccatcgtgactcaaaactcacttgtataataaacagtttttgagggattttaaagtttcaagaaaaaaaaaaaaaaa

SEQ ID NO: 115438 - DNA, 1000 bp, Homo Sapiens
tactgcctactggatttttttctattaacattgaaaggtaaaatctgattatttagcatgagaaaaaaaaatccaactctgcttttggtcttgcttctataaatatatagtgtatacttggtgtagactttgcatatatacaaatttgtagtattttcttgttttgatgtctaatctgtatctataatgtaccctagtagtcgaacatacttttgattgtacaattgtacatttgtatacctgtaatgtaaatgtggagaagtttgaatcaacataaacacgttttttggtaagaaaagagaattagccagccctgtgcattcagtgtatattctcaccttttatggtcgtagcatatagtgttgtatattgtaaattgtaatttcaaccagaagtaaatttttttcttttgaaggaataaatgttctttatacagcctagttaatgtttaaaaagaaaaaaatagcttggttttatttgtcatctagtctcaagtatagcgagattctttctaaatgttattcaagattgagttctcactagtgtttttttaatcctaaaaaagtaatgttttgattttgtgacagtcaaaaggacgtgcaaaagtctagccttgcccgagctttccttacaatcagagcccctctcaccttgtaaagtgtgaatcgcccttcccttttgtacagaagatgaactgtattttgcattttgtctacttgtaagtgaatgtaacatactgtcaattttccttgtttgaatatagaattgtaacactacacggtgtacatttccagagccttgtgtatatttccaatgaacttttttgcaagcacacttgtaaccatatgtgtataattaacaaacctgtgtatgcttatgcctgggcaactattttttgtaactcttgtgtagattgtctctaaacaatgtgtgatctttattttgaaaaatacagaactttggaatctgaaaaaaaaaaaaaaaaaaaaaaaaaaaaaaa

SEQ ID NO: 115439 - DNA, 511 bp, Homo Sapiens
gtttcctcttttaccaaggacccgccaacatgggccgcgttcgcaccaaaaccgtgaagaaggcggcccgggtcatcatagaaaagtactacacgcgcctgggcaacgacttccacacgaacaagcgcgtgtgcgaggagatcgccattatccccagcaaaaagctccgcaacaagatagcaggttatgtcacgcatctgatgaagcgaattcagagaggcccagtaagaggtatctccatcaagctgcaggaggaggagagagaaaggagagacaattatgttcctgaggtctcagccttggatcaggagattattgaagtagatcctgacactaaggaaatgctgaagcttttggacttcggcagtctgtccaaccttcaggtcactcagcctacagttgggatgaatttcaaaacgcctcggggacctgtttgaattttttctgtagtgctgtattattttcaataaatctgggacaacagcaaaaaaaaaaaaaaaaaaaaaaaaaa

SEQ ID NO: 115440 - DNA, 1000 bp, Homo Sapiens
tcctgtttcttatggacttggttgccacagtccaggagcatttgaaggcacagtgcaggggctcagattggcacagaattctttgtgaaatatgagtgccacagactgtaacagatagcttcatgcacactatgcattttattggtttgtttggaaaatgttggccattgaattattaataggtttatttcaaatagtttggaaattgttgtacttttgaaaacatgctgttcctgtagagttttttgatgagagttatagttgttatatatacctaaagataattttcttttcatttttaagtgagaattctttttatcctaaatcttttattatctttaattttttttctgtattattatatgtgctcctgaagcgagcactctttttatctatgatacttccataataatctcttctatttatagctattggtagttccccaccagaaaaaaacataattctggtgatagaaatttttatttgctgtttaggtttgtgactgacttgtgagaattcagttgtgatttttaacatgtctcagatatatatactaacacgtctaatatatactatctattttattggtttattttgaaaaacatgggtatagaattatttaaatattattttatttactgaaatatttattaaatatatttatttatttaaatattattattactttaaatattattttaaatattttggaaatactggtatttttgaatagatgctgtttctataaagctgtgtgatgggtattataactgttgtatacacatacatataattttgttttcctttttaagagaggattcttttcatcctaaatcttttacctttcaatctttgtatctattattacacgtgctgctgaagggagcatggtttttatctatgatacttagttaacatatatattacatttatagctatgtggtagttcccctaaattcttgtaaaaataaatttttatttgataaaaaaaaaaaaaaaa

SEQ ID NO: 115441 - DNA, 1000 bp, Homo Sapiens
agaaacattggagagggtacagggaaaggaaaaattttcaccaacagaggcagtctctcatagagtataaagcagctgtcacacttcaaagagcagcgcttaaattcctagcgaagtgccgtaagaaaaagaaactatttgctccttggcgaggactccaagaactcactgatgcacgccgagttgaactgaagaaacgagtggatgactatgtcagaagacatttgggctctccaatgtcagatgtggtcagtagggagctccatgcccaagctcaagaacgactgcaacactactttatgggcagggccctagaagagcgagcccagcagcacagagaagctctgatagcacagatcagcaccaacgttgaacagctaatgaaggcaccaagtctgaaggaggcagaagggaaagaacctgagctcttcctaagtagatccaggcctgtggcagccaaggccaagcaggcccatctcacaaccctgaagcacatacaagcaccctggtggaagaagcttggagaagaatctggagatgagattgatgttccaaaggatgagcttagtatagaattagaaaatttattcattggtggaaccaaaccaccttagtgagtaaccctaagaattgacacaaatctcatattttaggagattatattggttctgcctctggcatgctggtagactagggccatcctaacttattattttccagaggttctcctccagacaagacctgcagtaagcaaagagttatattctacctctctctcaattttctttttcttttctctgtatcctcatccttagccacacacagatttgtgtggcttttattgtagaactaaacttagcatagtgttctgttgtttacatgaagtgtgtttttctttggtttcttctgttttccaactaaatatttttttctaaataaatattttcaacaattgatttgaaaaaaaaaaaaaaaaaaaaaaaaaaaaaaaaaaaaaaaa

SEQ ID NO: 115442 - DNA, 1000 bp, Homo Sapiens
acccggctgtatacagtggtgacccaagcaatggatataaacctaaaaatctgagggaggggagaggtggaatacagtagttcttggaatctgaagtctcctatttgatcaggttatttcctgggacttggcaaaaatctgattggtggggatctcctaggacctagtggacatctggtattaatttaatctcaggaaaaacaagaaattaacccagagagagtctgggttttggaattcagcgtagctacctccagaccgtggtgtctggcctccatttttgtctgtcattcagctctgacttacagctgcagtcacctttgctataaggcacctgggtagaagggtggatgggcttcacatcaatttttttcttcctttagggtgggggattggtttggctttcttttgttgtggttttttgttttatttttgtcaagattgatttttagatgcaaggacttgaaaagacccagaaggatgccaccagtttttccttgaggcctaggattttttattctgtcccgagcagaggtaattcctcacaacttagtgcaccagtagcaccagccattttgagcagagtacctctttggggagcttttcgttttgttttgtttttaattctctttccttagcagcaaggtcttttttcctagagaatctactccgttgcagaatcattgcaacctcaggagccctcactgattgagtgctgtcagcctgatatactactttggactctggaaacagatatgggttctattctctatttctactgtgtgtcgttaaacaaccgtcggagaccagatgacctgttagatggctagtcctgtataactcgactctgtatgtttcaatgtatgttactgcaatgcttcacctgctgtacagtgtttgtgagatgctctttgaagatggtacttttatattttttcattttcaataaaagtacattccttcccaaaaaaaaaaaaaaaaaaaaaaaaaaaaaaaaaaa

SEQ ID NO: 115443 - DNA, 767 bp, Homo Sapiens
ttaatacttctatttcttacaaaacaaccgtataggggttaaagtatcagtgcaaagtcccgttcaaatattgactcagtaatgagctctacaagccagcctttgtggcatgttaaattcaaaacaagcttagcatttttttttttttttttggatagaaactggtgggggtggggaaagaaagagggaactgggaagagaaggaggggaacttaaaccttgcttcctgctctgtctttctcagaaaaccaaatatggcatcttccatgaggagcttgttttctgaccacgggaaatatgttgaatctttccggaggtttctcaaccattccacggaacaccagtgcatgcaggaattcatggacaagaagctgccaggcataataggaagataccagaattgctgttaacaaataaaatactggccagatgtgttggttcacgcctgtaatcctagcacttcgggaggctgaggcgggaggattacttgagcctaggagtttgagaccagcctgggcaacatagcaagatcccatctctacaaaaaagtgaaaaagttagctgaacaaggcggcatgcacatgctactccagacgctgaagtgggaagatcacttaagtccgagagatcgaggcttcagtgagatatggctgagacactgctctcagcctggatgacagagtgagaacctgtctcaaacaagagaaaaaaataaatcaaatgctattcaaaattctcaaaaaaaaaaaaaaaaaaaaaaaaaaaaa

SEQ ID NO: 115444 - DNA, 1000 bp, Homo Sapiens
gagattccacagtagacgtcccttgccgtgctcgctctctctctcgcgcgcgctctctctctccctctctctctctctctctctctctctctctctctctctctctctctctcctctctttctctctctccctctctctgttaagatcctgttcgggagtttccccagccgttgtagtatctagtatgttagagttgggaggggaccatagttatgtagcccagccccctcattcccagaggcacccagagggccagcctccagcctgaccccagagcagaaccggaacaccaggttggggccctggtgctgccacctcctctgctggtcgggctgggaccctttgccccttaggagaggtgttggtcacagatgtttacctcagtttatgtcactgtcgaagaaacaaaaaataatagcaaaaaataacactgtagacatgaagacttagaagacaaaaaaaaaaaaatcacacaaaaaatctcccttgttgcgattcttctgtgaaggtacagtgtgtatgtgtgtatgtgtgtatgtgtgtgcgtgtctctgtcccagaccctgtgtcccccacactgccccctgtccttcggtgcttcccagagacccctctgagctggcctgtggggcacgggaagccccctggatgggaggcggggccacaggtcggctagagggtctccaccaggcccactgaacagaaccccacggctgccagaatgttccctgagcccacactgtggccagtgggacagtcctggtggctgacatcagcgtccatgcttggctcagggcctggggcggggtcctgggtagagtcctagccccagagccccagcccctcatgtcttgccgcccttcctccatgtgtttgtaaatactctggcatcctttggccctgagaaggtttttaaatgtgttatttacttctctaaacatgacgattgctataaaaataaacaaaagtttagaaaaatgaaaaaaaaaaaaaaaaaaa

SEQ ID NO: 115445 - DNA, 1000 bp, Homo Sapiens
ttttttctgtcaatcgcaggttatttgattaagataggttctttctgtatatgaaacgctccccgcaaattcactggcagctcagaattattctggaaagaaagcctgccaggaaataaattcaaatacagtatgagctgcggggatatttttgtgtctacaccaggtttgaaataagtaaacaaatacaagaggttcatataaaagggcaaatgaaaacctttcctacagttcctatgaacaacgtaccaacactttctgatttcttctacagctgtagaataccatctttcagaaagttggctggctttatttctaactccttattgaagctaaggggtgcttactaaaaggaggcagccatataggccttttaaaggcctggttctaagtcctttttaaagccatggaacaaaacctgatacatcaccctaacagagcattaagttgtaactgagattgcaatacctgtcaccatgcagccgctgatagttctctgaactaaaaggactaattgtactttgaggccaatgctgctttctggtgtatattctccatacaagattattattaactgctctttttccctctggtggaaaaaaaattaaacctgggcatttcatgggttttctttctttatttttgttcatttgttttggagggagggagcttgttttttgtgtttgtacatgatccacccttagttttctagaatgtgtgttgaaaattgcgattatacaagtaagattttaaaaatgtaactcaagtgtttgttcaaatcaggtttaatggtgttgcttctctcctataatgggatagagaaaattaaaatcacgtagtacagaagtgcaagaagagaatttatgaaggatgaatagaactacaaacctatctaaatgaaaaagaaatggtggaaactaagcctgaactttaacatataaaaaacacttattcccacagagaaaatgtaaaattaaaaatcatcatctttttttttcca

SEQ ID NO: 115446 - DNA, 1000 bp, Homo Sapiens
cgctgaatgaaccatggagcggatggcattgtcctgcagtcgtatagtatagcagtgcaggaacaaacagcacttgccagcaaagtctgtgtgtactgttaagtgtgtgggaggcagagagaggagcaggggccatgggcttcacagcatggcacacatgtgggaactgcagacattcctctcacagctagaactgaaacaaaccctcttgctaggggtggtccgtgtgaggtgtcatcctgtccccctcataattactaatagctggaactggcagcagcctctactgggcttttactgtgatgtgttcagttcatgtcctaggaagtcagcttttgccccaggtgggaatccttatttggcttaggactgatccacttccatgttacttacatctgtgggtttttgttgttgctgttagaaaatttgtggctggtgaaaacagcactcctttggctggagcacttgtgtccgtgcatgtacttgggtgtttccctccatcctttctgatatgaccaaaaatcaagttgttttgttttttgtcaccttcactggcatgggctaaccacttctttttcaaaccctctgaacacctttttctgatgggtaacttgcaggaatattctattggaaaagataacaggaagtacaagtgcttcttgaccccttcctcaatgtttctagccttcactctccattgtcttttctgggctgtattacagccctctgtggatcttcaactctgctgcctccactgtgatgcagcagtccaactgtaactgacagtggctgccttctctgggccatggatcacacctgtaaggtactaattactgcccagcctggggagatcaggagaggtctgcatagttagtaagttgggtttagcttttgtgtgtgcatcagtgacttagagttctgtaataacttattgtaaatgcatgaagcactgtttttaaacccaagtaaagactgcttgaaacctgttgatggaaatgaa

SEQ ID NO: 115447 - DNA, 1000 bp, Homo Sapiens
gctccagtctgtcaacagaggcttcaggaccgcggggtcccttcaaatgccccgccagtcccaggccaatcaccgcgcagcttcttccgggatcgtcgccaatcatcggccgttgcgtattgcgggtacagaggggattcccaggccccaaaccagccctcatctcttggatggaacaggagagtgaggcttggagccccgccgcccaggatcctgagaagggggaaagactgggaggagctcggagaggagatgtcccaaacaggaaggaagaggaaccggaggaagtcccaagagccaaagggcctagaaaggctcctgtgaaggagagtcctgaagtgctggtggaacgcaaccctgacccagctattagcgtggccccggcacgggcacagccacccaaaaatgctgcctgggacccgaccacaggagcacagcccccggcacccatacccagcatggatgctcaggccggccagcggcgccacgtgtgcacggactgcggccgccgcttcacctacccctcactgctggtcagccacaggcgcatgcactcgggggagcggcctttcccctgccccgagtgtggcatgcgcttcaagaggaagttcgcagtggaagcgcaccagtggatccaccgctcctgctccggggggcggcggggccggaggcctgggatccgggctgtgcctcgggcccccgtccgaggtgaccgggacccgcctgtgctcttccggcactacccagacatcttcgaggagtgcggctgagcggcaccgcaggctggagttgagcctgaccttggcacgaaggactgacggatccctgaggtgggccactgagtcggggactccggaactgaaattcatgccctgggctttcctcaaggatccctcaagtttccaacttgtaaaaagaaaagtgcctgtaaagattcgaatagattagacttgccacccatctccccagtcttttgtttaacaaaaaaaaaaaaaaaaaa

SEQ ID NO: 115448 - DNA, 1000 bp, Homo Sapiens
tgaaatattatagagagttatgaacacttaaattatgatagtggtatgacattggatagaacatgggatactttagaagtagaattgacagggcatattagttgatgaaatggagtcatttgagtctcttaatagccatgtatcataattaccaagtgaagctggtggaacatatggtctccattttacagttaaggaatataatggacagattaatattgttctctgtcatgcccacaatccctttctaaggaagactgccctactatagcagtttttatatttgtcaatttatgaatataatgaatgagagttctggtacctcctgtctttacaaatattggtgttgtcagtatttttcctttttaaccattccaatcggtgtgtagtgatgtttcattttggttttaatttgtatatccctgatagctataattgggtcatagaaattctttatacattctagatgcaagtctcttgtcggatatatgtattgagatattacacctagtctgtggcttgactgttttctttatgtcttttgatgaatagaagttttaaattttgacaaggtcaaatttatttttttcttttgtttgatattttttctctccaatttaaccccaagatttcagatattctgctctattatataaactttatatttttatatttgtgatctaccttgaattgatatgtatgttgtgaattatggatcagggttctttttttcccccatacaagtatccagtcattgtaacactgtttattgaaagaattatcctttcctcattaaattaccttgccaattagtaaaaaatcaattaaccataatggtggatctgtttctggactttctgtttggttacactgaaatgtttgtccatccttgcactcactcataccatactgccttgaattactgtagctgcatagatgctccttaagttgggattacattgtaataaacgcaatgtaagttaaaaaaaaaaaaaaaaaa

SEQ ID NO: 115449 - DNA, 1000 bp, Homo Sapiens
ttccccagggccagccttaaggtatctaataaagtctgaactctcccttccaaaaagtagaagtcatccctgtcgagaaggaccaacactgtgcactggtcagctcacagcaccaagaggcccccttcctgcttttctgtcatgtgttcccccagtaatcattttctgaccaccctgaaagcaaagcctgggtgggtactggcagtgcaaaggccagtaggccaccatccctggccccaagctgcacaagcccacagacgagggtcctgtagaacaaacgctttgatgtgcttctcaggtagcctgcggcccagtccagggcttggggaggatcagctgcatggaagagtgaatgccaggctgaggtcatcagggccctgaggaacttggacgtggggtcttcactctcatggaactgcccttctaactggagacatagacaatataccagtggttctcaaccagaggcaattttacccccaggagacatttgacaatgtctggggatatttctggctatcacagcttatgaaggaggttgctactggcatctagcaggcagagtgagtgctgctgttaaacccaccacaggacacagaacagtctactgcaacaaagaattacccaaggcctggcgcggtggctcacacctgtaatcccagcactttgggaagccaaggcaagcggatcacttgagcccaggagttcaaggtcaacctaggtaacgtggtgaaacaccatctctacaaaaaatacaaacattagccaggtatggtgctgtgcacctgtagtcccagctactcgggaggttgaggtgggaggatcacctgagcctgggaggtctagactgcagtgagccatgatcatgccactgcattccagcctaggcaacagagcaagaccctatatcaaaaaaaaaaaaaaaatctagccccaaatgttcaatgttcatgaggtcgttgataaaccgtgcattaaacaatctcacagtaattaccat

SEQ ID NO: 115450 - DNA, 1000 bp, Homo Sapiens
cctcctcttgctctagccttaatactggccttttccctccctgccccaagtgaagacagggcactctgcgcccaccacatgcacagctgtgcatggagacctgcaggtgcacgtgctggaacacgtgtggttcccccctggcccagcctcctctgcagtgcccctctcccctgcccatcctccccacggaagcatgtgctggtcacactggttctccaggggtctgtgatggggcccctgggggtcagcttctgtccctctgccttctcacctctttgttcctttcttttcatgtatccattcagttgatgtttattgagcaactacagatgtcagcactgtgttaggtgctgggggccctgcgtgggaagataaagttcctccctcaaggactccccatccagctgggagacagacaactaactacactgcaccctgcggtttgcagggggctcctgcctggctccctgctccacacctcctctgtggctcaaggcttcctggatacctcacccccatcccacccataattcttacccagagcatggggttggggcggaaacctggagagagggacatagcccctcgccacggctagagaatctggtggtgtccaaaatgtctgtccaggtgtgggcaggtgggcaggcaccaaggccctctggacctttcatagcagcagaaaaggcagagcctggggcagggcagggccaggaatgctttggggacaccgaggggactgccccccacccccaccatggtgctattctggggctggggcagtcttttcctggcttgcctctggccagctcctggcctctggtagagtgagacttcagacgttctgatgccttccggatgtcatctctccctgccccaggaatggaagatgtgaggacttctaatttaaatgtgggactcggagggattttgtaaactgggggtatattttggggaaaataaatgtctttgtaaaaagcttaaaaaaaaaaaaaaaaaa

SEQ ID NO: 115451 - DNA, 1000 bp, Homo Sapiens
aacctacctgatgcggttcctctccacgcatctcgaggcggcgttacctccagattccgtagagttagagtcacatttttctttgcagcgaaactccatcttggtgagagatgaatttggatatttatttccttctctgtttttgggaaatgagaggctacaaccaagacagctgaaggagaatgaaacacacacatccacagaaacagagaggcgtaggtggccctgccgttgaccgcagcctctctggacaggcaaggggagttggcgcaggtgaggactcagacgacgtccaccgtcccaaggctgtcactagtatttctctgaagtgcctgaaggtaggaatgggccggcgattgggaccagctgggccccaccacggccacgccaggcaaagcgccagcagccctgcactccacgctggccaagaaggccttccacgcagaatgacaagactgcaaaaatccgatgtgcttccttccctggcgcagtcgctcctcgagccgctgccccccacccaccctgcacccctcgccctccccccaccacagaatctaagacctttcagcttcgagccagggggcgggggatcccgagcaaaagccttccgtggacatcaggccccgtggcctcaagggctcccagggcaaacctaattccccccaaaacgtgaagtcggggaagctgcggctacacattccacaaagtgctggcacttacacccacaacccggaaggctgtggaccgattcctctagggtggtgacctcccattagcaaacggtgtcatggtttggaatgttcattatcgccaagaacctggttagaggcataaagaccttttttcaccgttacctaattttttcccctttcaagaattttttttttttttggtgtgttgtacagcagtataatttttcacttatttattccatcagtagatatggtttgtacaatgtacaattgtttcatttcagaaaataaaaatttcaaatcatgaa

SEQ ID NO: 115452 - DNA, 1000 bp, Homo Sapiens
caactggacagacaacgctgagctcatgaatcgccctgaggtcacctacccctgttcctgcgaagtcaagggggaagaggacaacagcctttctgtgaggaagggcttctgcgaggcccccggcaacaggacccagagtggcaaccaccctgaggactggcctgtgtaccaggagggctgcatggagaaggtgcaggcgtggctgcaggagaacctgggcatcatcctcggcgtgggcgtgggtgtggccatcatcgagctcctggggatggtcctgtccatctgcttgtgccggcacgtccattccgaagactacagcaaggtccccaagtactgaggcagctgctatccccatctccctgcctggcccccaacctcagggctcccaggggtctccctggctccctcctccaggcctgcctcccacttcactgcgaagaccctcttgcccatcctgactgaaagtagggggctttctggggcctagcgatctctcctggcctatccgctgccagccttgagccctggctgttctgtggttcctctgctcaccgcccatcagggttctcttagcaactcagagaaaaatgctccccacagcgtccctggcgcaggtgggctggacttctacctgccctcaagggtgtgtatattgtataggggcaactgtatgaaaaattggggaggagggggccgggcgcggtggctcacgcctgtaatcccagcactttgggaggccgaggcgggtggatcacgaggtcaggagatcgagaccatcctggctaacatggtgaaaccccgtctctactaaaaatacaaaaaaaatttagccgggcgcggtggcgggcacctgtagtcccagctacttgggaggctgaggcaggagaatggtgtgaacccgggagcggaggttgcagtgagctgagatcgtgctactgcactccagcctgggggacagaaagagactccgtctcaaaaaaaaaaaaaaaaaaaaaaaaaa

SEQ ID NO: 115453 - DNA, 1000 bp, Homo Sapiens
agataatgggctggggtgagaaagccattgagatccgctctgtggagacgggccacctcgacggggtcttcatgcacaaacgagctcagaggctcaagttcctgtgtgagcggaatgacaaggtgttttttgcctcagtccgctctgggggcagcagccaagtttacttcatgactctgaaccgtaactgcatcatgaactggtgacggggccctgggctggggctgtcccacactggacccagctctccccctgcagccaggcttcccgggccgcccctctttcccctccctgggcttttgcttttactggtttgatttcactggagcctgctgggaacgtgacctctgacccctgatgctttcgtgatcacgtgaccatcctcttccccaacatgtcctcttcccaaaactgtgcctgtccccagcttctggggagggacacagcttccccttcccaggaattgagtgggcctagcccctccccccttttctccatttgagaggagagtgcttggggcttgaaccccttaccccactgctgctgactgggcagggccctggacccctttatttgcacgtcaggggagccggctccccccttgaatgtaccagaccctggggggggtcactgggccctagatttttggggggtcaccagccactccaggggcagggaccatttcttcattttctgaaagcactttaatgattccccttcccccaaactccagggaatggaggggggaccccgccagccaaaacattccccccattcccgacccccctctcctcttctagcccatgcccttccccggtggagggagggagcagggagccctcactctccacgccccttgcttgcatctgtatatagtgtgagcagcaagtaacccttctcctccctcccccctcacccctcctcaatgtagtggccttggatatcctgtttgttaataaagacaattcaaccagctcccaccaaaaaaaaaaaaaaaaaa

SEQ ID NO: 115454 - DNA, 1000 bp, Homo Sapiens
gtatctcttgttcatttttatagaacttttgcatactatattggatttacctgcggtgtgactagctttaaatgtttgtgtttatacagataagaaatgctatttctttctggttcctgcagccattgaaaaacctttttccttgcaaattataatgtttttgatagatttttatcaactgtgggaaaccaaacacaaagctgataacctttcttaaaaacgacccagtcacagtaaagaagacacaagacggccgggcgtggtagctcacgcctgtaatcccagcactttgggaggccgaggcgggcggatcacaagggcaggagatcgagaccatcctggttaacacggtgaaaccccgactctactaaaactacaaaaaaaattagctgggcgtggtggcgggcgcctgtagtcccagctactcaggaggctgaggcaggagaagtgtgaacccaggaggcggagcttgcagtgagccgagatcacaccactgcactccatccagcctgggtgacagggtgagactctgtctcaaaaaaaaaaaaaaaaggagacacaagacttactgcaaaaatatttttccaaggatttaggaaagaaaaattgccttgtattctcaagtcaggtaactcaaagcaaaaaagtgatccaaatgtagagtatgagtttgcactccaaaaatttgacattactgtaaattatctcatggaatttttgctaaaattcagagatacgggaagttcacaatctaccttattgtagacatgaaatgcgaacacttacttacatattaatgttaactcaaccttagggacctggaatggttgcattaatgctataatcgttggatcgccacatttcccaaaaataataaaaaaatcactaaccttttttaaggaaaatatttaaagttttacaaaattcaatattgcaattatcaatgtaaagtacatttgaatgcttattaaaactttcccaattaaaaaaaaaaaaaaaa

SEQ ID NO: 115455 - DNA, 787 bp, Homo Sapiens
ctccgccccctcccactctctctttccggtgtggagtctggagacgacgtgcaggtaggaggcccgggcgcgacaatcggggggcatcctgcggcgaggggaccctgtggggcttgggacgagagacgggggtctttccgtgggaaccgagctaggtgccgggcaagagacgcgcggctggcccacctggatcctggccaactcgggattgagttcgttcctggtctcagaaggcccgttttgctttcagggaggagcttgtgaaaaatggcacctcgaaaggggaaggaaaagaaggaagaacaggtcatcagcctcggacctcaggtggctgaaggagagaatgtatttggtgtctgccatatctttgcatccttcaatgacacttttgtccatgtcactgatctttctggcaaggaaaccatctgccgtgtgactggtgggatgaaggtaaaggcagaccgagatgaatcctcaccatatgctgctatgttggctgcccaggatgtggcccagaggtgcaaggagctgggtatcaccgccctacacatcaaactccgggccacaggaggaaataggaccaagacccctggacctggggcccagtcggccctcagagcccttgcccgctcgggtatgaagatcgggcggattgaggatgtcacccccatcccctctgacagcactcgcaggaaggggggtcgccgtggtcgccgtctgtgaacaagattcctcaaaatattttctgttaataaattgccttcatgtaaactgtttcaaaaaaaaa

SEQ ID NO: 115456 - DNA, 1000 bp, Homo Sapiens
aaaatgcaatctaaagtataccaaactgtaacttacctagtaaatgagattagaaactattgtcagggtcatcgtagtgaattattattattattattttttgagacagagtcttgtgctgttgcccaggctggagcacagtggtatgatctcagttcactgcaccctccacctcctgggctcaagctattctcccacctcagccgcctgagtagctgacactataggcaccaccatgccctggctaattttttaaaaactttgtgtagagatagggtttcaccatgttgcttaggctggtctcaaactcctggactcaagggatccacccactttggtctcccaaagtgctgggattacccacatcctagtaccaactttatcacttctgatggcattaggacacacaggccatttataagagcagtgtttgagacctcctgtgtgtcacttccaatcctcttggccttcatactaaagtcactgctgtggcaaccagtttcaagcagggctgaaccttgcctcttgctctggggatgtctcacttcctgcccctgggcttctcaccagctacaggaactgcctagcacttgggtatgtacaacctggaagaggtgtggggccaccccatcccctcctcaaagaaattcacaggcacagtatgaggctaaagtaacttccatcttggatgctaatctaccatgttgacttctgataaccagttcctggaatgccctctaagatttctacttttatctattaaaagaacacacacacacacacacactgtaaatcctggccttaagcaagttataggctaagttgtaaacagcattcttgcctttccctgaggaggtgacttcagtgtctcacatgttccttcatgtacccccttttctctatggcatataagccctgggtcggggggtaactgtggggatcactgcctgagacatggcttctgtgcataagtccctattaaatgtttctttctgacaaa

SEQ ID NO: 115457 - DNA, 1000 bp, Homo Sapiens
aaagcagccaggacatcccagtaccccacttctccgtgccgtgtacttttagggaggttttcgaaagctagcttcttaccgatgattttgtctatttttctgttttatgtgaaaaccttcatttataacctgctcttctcagtgttcttctattcagcattcagtatgacttctatgcctctaattgcgactgtatggagaagaactgtttgtcattcagtgccgtgggatataatcagtcctgtaaattcatcagaatgttctgttgcctgattttttttccattgcattttaatttcattaaacatattttagttctacagtaacctaattcctcattgttaccatgagatcctaattctgtagctgtgttctgtaatcccatggggcgtgtaccatttggagacacatgaaggatacagtagacagcacggaaggcagcagcaacacacaggggtgtcctccctccccagagcccagtgtgcacacagaaccaaattcaatctcattcatcgtgagcttgcatggtaactgatccagccactcagtacctccattggataagagatttggccacagattcttctagagaaaatccaaatgtggagggtgcatttgtttctgcacccaaacaaataccttttgagatttcttataggcattcctctcaaagtctcattactctgatcagttattgatcggaggctaccctggctcagtcaccagctgctcactgtgtccttctgtggtctcaggagctgcagttgttgctgttgtatgaatagacgatagttaattagactggatgtgtctgtactggcagtgattttgcaacttcctctgtataagcgatacatttgtaaatcatgggaatgtatttgatggtaattgcctgtggtggttgtatcatgatttaattttattatgagcttttggctttatatatttttctgcctttttatgcattcattaaacagtttaacagaccaaggacagtgta

SEQ ID NO: 115458 - DNA, 1000 bp, Homo Sapiens
tagagacattcacatctttgcttttattctatgctctctgtacttttgaccaaaaattgaccaaagtaagaaaatgcaagttctaaaaatagactaaggatgcctttgcagaacaccaaagcatcccaaggaactggtagggaagtggcgcctgtctcctggagtggaagaggcctgctccctggctctgggtctgctgggggcacagtaaatcagtcttggcacccacatccagggcagagaggtctgtggttctcagcatcagaaggcagcgcagcccctctcctcttcaggctacagggttgtcacctgctgagtcctcaggttgtttggcctctctggtccatcttgggcattaggttctccagcagagctctggccagctgcctcttctttaactgggaacacaggctctcacaagatcagaacccccactcacccccaagatcttatctagcaagcctgtagtattcagtttctgttgtaggaagagagcgaggcatccctgaattccacgcatctgctggaaacgagccgtgtcagatcgcacatccctgcgcccccatgcccctctgagtcacacaggacagaggaggcagagcttctgcccactgttatcttcactttctttgtccagtcttttgtttttaataagcagtgaccctccctactcttctttttaatgatttttgtagttgatttgtctgaactgtggctactgtgcattccttgaataatcacttgtaaaaattgtcagtgcttgaagctgtttcctttactcacattgaagggacttcgttggttttttggagtcttggttgtgactccaagagcagagtgaggaagacccccaagcatagactcgggtactgtgatgatggctgcagtccagttttatgattctgcttttatgtgtcccttgataacagtgacttaacaatatacattcctcataaataaaaaaaaaacaagaatctgaattcttagaaaaaaaaaaaaa

SEQ ID NO: 115459 - DNA, 1000 bp, Homo Sapiens
agaacaccatggagaccatagactggaaggtctttgagagctggatgcaccattggctcctgtttgaaatgagcaggcactccttggagcaaaagcccactgacgctccaccgaaagtactgaccaagtgccaggaagaggtcagccacatccctgctgtccacccgggttcattcaggcccaagtgcgacgagaacggcaactatctgccactccagtgctatgggagcatcggctactgctggtgtgtcttccccaacggcacggaggtccccaacaccagaagccgcgggcaccataactgcagtgagtcactggaactggaggacccgtcttctgggctgggtgtgaccaagcaggatctgggcccagtccccatgtgagagcagcagaggcggtcttcaacatcctgccagccccacacagctacagctttcttgctcccttcagcccccagcccctcccccatctcccaccctgtacctcatcccatgagaccctggtgcctggctctttcgtcacccttggacaagacaaaccaagtcggaacagcagataacaatgcagcaaggccctgctgcccaatctccatctgtcaacaggggcgtgaggtcccaggaagtggccaaaagctagacagatccccgttcctgacatcacagcagcctccaacacaaggctccaagacctaggctcatggacgagatgggaaggcacagggagaagggataaccctacacccagaccccaggctggacatgctgactgtcctctcccctccagcctttggccttggcttttctagcctatttacctgcaggctgagccactctcttccctttccccagcatcactccccaaggaagagccaatgttttccacccataatcctttctgccgacccctagttccctctgctcagccaagcttgttatcagctttcagggccatggttcacattagaataaaaggtagtaattagaaaaaaaaaaaaaaaaaa

SEQ ID NO: 115460 - DNA, 1000 bp, Homo Sapiens
ctgtacacggccctcaccttctgggggccacccgttgtgggcaaagtcaagcgggaactggaggcccttctgaaagagcagggctttggcggagtcacagatgccattggagcagatcatcggaggtgaggacagcgtctgacgggaagcctgatctggaaccttcccaaggactcaggcaagcctttgtggctggatcatgagaggagggactccatcttgagccatgtcccccagccatggcatggctgcactgtaaacgccaatcggggggtcaccaggatcaaccgcaggctttcttcagtcccttggtcagaccataaactgcatttttgattctttgtggattcaaaccctaggatccatcagtcttgcaaggacattgaatattaggaggaaaaagtcatggaaaaaataaagccatttagaacctgggtttcaacgctagccctttctggtttgccataggccctgccaagatactgcaggtccatccaggcctctgctatctgcatctgcagtgggcttcccaggaacttgactgtctttcatttgatctttatttttgtttatttaatattttaaactttattttaaaaatatttcaaacataagggcggggtgtggtggctcatgcctgtaatcccagcactttgggaggccgaggcgggcggatcacctgaggccaggagttggagaccagccaggccaccatggtgaaaccctgtctctaccaaaaatacaaaaaattagccagatattgtggcaggcacttttaatcccagctactcgggaggctgaggcaggagaattgcttgaacctgggaggcggaggttgcagtgagccaagattgcaccagtgcactccagcttgggcgacagatcaagactctgtcacacacaaaacaaacaaacaaattttcccgtttctctctgtccctttctctataacatggataaaatattcacgtcttatgtatttattaaaaaaaaaaaaaaa

SEQ ID NO: 115461 - DNA, 1000 bp, Homo Sapiens
tggacttacagggagaccccagagagagtcaaccccttctgggcactgtgattgatgggatgctgctgctgaaaacacctgaagagcttcaagctgaaaggaatttccacactgtcccctacatggtcggaattaacaagcaggagtttggctggttgattccaatgcagttgatgagctatccactctccgaagggcaactggaccagaagacagccatgtcactcctgtggaagtcctatccccttgtttgcattgctaaggaactgattccagaagccactgagaaatacttaggaggaacagacgacactgtcaaaaagaaagacctgttcctggacttgatagcagatgtgatgtttggtgtcccatctgtgattgtggcccggaaccacagagatgctggagcacccacctacatgtatgagtttcagtaccgtccaagcttctcatcagacatgaaacccaagacggtgataggagaccacggggatgagctcttctccgtctttggggccccatttttaaaagagggtgcctcagaagaggagatcagacttagcaagatggtgatgaaattctgggccaactttgctcgcaatggaaaccccaatggggaagggctgccccactggccagagtacaaccagaaggaagggtatctgcagattggtgccaacacccaggcggcccagaagctgaaggacaaagaagtagctttctggaccaacctctttgccaagaaggcagtggagaagccaccccagacagaacacatagagctgtgaatgaagatccagccggccttgggagcctggaggagcaaagactggggtcttttgcgaaagggattgcaggttcagaaggcatcttaccatggctggggaattgtctggtggtggggggcaggggacagaggccatgaaggagcaagttttgtatttgtgacctcagctttgggaataaaggatcttttgaaggccaaaaaaaaaaaaaaaaa

SEQ ID NO: 115462 - DNA, 1000 bp, Homo Sapiens
tctgccttacacctaacggaagtttatgcctgttttctcttcacataccccaacagttacaaatggttgttattattaagcatcttttattttgtggcctctgattacatggtcccctaaattttgacctaatcacaaaagattggtaaaatttcttaacatattaataatattttgtttatgtgtcaatatcttagcatgtatcaattaagacagaggtcttaacgttctctttttgaaagagaatattaggattcagagatattaagagattctcccaggatcacagttaggtaacagagctggattttagtccaggtctgtctacagctctaacgtatatacaccctttgtataacatgtcacgaattcagcataaagggatcttcagtgatctaagtcaggggtcagcaaccttttctaaaaaggaccaaatagtaatatttcaggctttgtggaccctatggtctctatcataactgttcaaatcaccatgtagtgtaaaaggagccataagcaaaatataaactaacgaatgtggctgttttatgggatttttttttaactctttatttacaaaagcaggtggcagatcagaactcacttatgggccatagttctctgacccctgacctgagaaaatcttatatttatggacaacatttagactgtgacttgccaagtaagaacaagaagctctgtcaactgaaggtcaaggctggagttctgaaagcaaagagctgtctggtgttaatgataagtgaaatagttaaagttagaagatcccagttataagaagcacaaagaataatgaccatagactcctgaacaagaatgtctggacttctggcttaggcactcttgttgtatggtccaggccaagttacctaatctctccaggcctccattttcttatcattaaatgaagataataaaagtattttcctcagagagctgtaagaataaactgagctaacccatgtcaagcacatagaatagg

SEQ ID NO: 115463 - DNA, 1000 bp, Homo Sapiens
aatgtaaatcaattacagattaaaaaaaaaagcctgtatttaactcatatgatctcccttcagcaacttattttgctttaattgctttaaatcttaagcaatattttttattcagtaaacaaattctttcacaaggtacaaaatcttgcataagctgaactaaaataaaaatgaaaaggagagattaaaggtattccttgttcttcccttctcttcactagtctaaaaacttctttttaatcttaagattctttgtgatgagggtgagaaaaagaatcctcagtttatttttccactattaatctttcttttgataaatcctctattgactgggtagaggtatgtttgtgaaagacatgtaacttggggatttgttactttaggtttgttcccttgaatttcatctcatcaggcaaattgtactagttgtagttacgagttttccctcagtgaagtagcaataggctgtaatcaagaaaatatgccatttatagagataagataaatgaaataatacttcagccaccaggtttttctgtctcacatacataagcagcatttcattgcagatatgggactgattctgtggcttaccttgattaacatcttttggaagttttgctagtgtgctttcctttctttactatgtttctcagattcctttgtatcagggttttgggtgtcacttaggttttgtccatcagattctgtgagacaccaggcatcgttttgaggatgtgggttatacacatggagtgcttctggaactatcagcccacttgaccacccagtttgtggaagcacaggcaagagtgttcttttctggtgattctccaggccatttaataccctgcaatgtaattgtccctctgtggctcacatttcattagtgagccatgaaatcaactcagtgggacatagccagcatttttgcataccaggttgggctataaaatatttctgttgtcaataaattttaaatgttttcctgctaaactaa

SEQ ID NO: 115464 - DNA, 1000 bp, Homo Sapiens
gaagttctttcctcctctgtattccaggaggaaagagggttttcattcccttctgaatgttaggagggaaggcattttccatccttgaccagcttgtagatgacacacattcagcaaacgcacatcccagcagcaccgagagaacacacaggtgtgtcacgcttttgcgttcataaggccttttcatgtcagtatcttattagatattcccaaacaagggtgttttctcatcttatagaagagaggcctgaggctcacagggtgaaaacaatttgcttaagcctgcacagcagctgtgctggcaacgtttctcccggtataaatgagaagcagcctttgtggccacagagatgtgactgctaagtgcatcgtcccaccctgaaggagattcttcctcaacaagaggacattagtgcaaagactgatgaagtctgtagtttcgtgggttttttttttaagcataaggggttaaatattatgtaattaagtaataaggcagttgtgaggatgcaactgccaaaagtttgaaaaaagctgcccagatggaaatctgcttgcatttgtgcaagcagataggtgagggatttttactgtactgccgtgtcccctacctgccccagctttattgagttataattgacaagcaaaaattgtttatatttaaagtgtacaatgtgatgtggcctttttgttttgttttgagacataatcttatcacccaggctggagtgaagtggcgcagtttaaactgcgcaggctcatcatcctccttcctcagcctcctcagtagctagaaccacaggtgtgagccaccatgcctggctcattttttgattttctttttttaagagacaggggtctccctgtttcccaggctggtcttgaactcccgggctcaagtaatcatcccgcctcagcctcccaaagtgatggtgttacaggcatgagctactgtgcctggccagaaatggtaaattataattaaaggcttctgtaagtc

SEQ ID NO: 115465 - DNA, 1000 bp, Homo Sapiens
ggccctgcccagccccggaactctgcgcgatatcaatactggctattttctcttctcgccgtagtgccgttggtttcacatgattgcacttttgtgggtcgcaaggtgatacatacgtgtattacttggtcactggatgcagaagtacccattcatcacacctgccccatagcccccactctgctgtactgataggatttagttgtgttttaggacattgcaaatcttctagaagttctcccccaaatcaggtcaatgtgtgccctcctgagctcccacccaggcatctccagtgctcatgatcatgtgtcccccaactccacccctcacagtttgggcctgtttctggcaaagagtcaggaaggttactgaattagggaacattttctgcaccttctgattttacttaagcagctaccattccatggacttgcctcccagagcagcacaatgcccgtctgagccccacgtggcaggagcctctgggacggggcacacacaggcccagcctctgtgctgtctcctcctccgtgcgcctcagactcggggtgagggaggcgggcagcctctcgccagccttcccgtccttcagttcaacgacatctttggagtgtttttgttttctcttccaagggccgtcccgttgtgttaggaagggtgagtggctggttccagggtgggccggtgccagctccggggtggactgaacagcggcggctgtccctgtgcatcctttgattactctcatgctgcatttactgtttacatttgttttattgtacataggtttgtaaacattattgcctgagatatttgtatataacttgggctttgtagcttttatttattcagaacgcatacggcatgttaatgactctgatggtgtcctcctctgggcagctgtataggatcatcatgtggttacaaaaaatacttccctcaaaaaaattcttttaatgtggaaacaataaatttcacagaaaaaaaggaaaaaaaaaaa

SEQ ID NO: 115466 - DNA, 1000 bp, Homo Sapiens
aatcttgaaaattagaacatcgttatttttttctacttgcaatggaaaatctattttgcttttttgcttctaggaaaatattctgattatgatatgtgatatgttggctactcaaagtcagaacttttcaaagtaatcagtaaattgaatcaacagaaaaatattcattaactcggggatgcattaataaagtttttaaattcaaaatgtatagaaaaatcaagcttagtaatactttaatattattctaccaatgtattttttttaattaagacttctgtatgcagcagggcatggtggcacacctgtagtcccagctactagggaggctgaggcaggaggattacttgagcccaggaattcaagcctgggcaacatagtgagtcctcatctcctaaatttaaaaaacaaacaacaaaaatttctacgtgtggtaaagggttaactcagcaagcttgggttgcttaaaccttgcacattccaaagaaaggtctgaccccagtgctgacctttgactggctactgggaaatgagctctgagcccctggataggaatgtttctgtttgcctgaggcctttgaccatgccagatagtttatgctaacaatgtgatttatagtgaatacctgttttcctgtgtctaagaccctgggctgcactgtattaatttgaccttgggtatttggggagctgagactgagtagctgaagtgagtcacataagcactaaatgcttacctgactgacccccagtaaaactctggacatccagacttggatgagcttccttgggtggcaacacttttacgtattgtcacacaccattgctggggggattaagcactgtctgtaaaactccactgtgaaatgacaactggaaacttgcacgtggtctctcctgattctgctctattcaccttttccctttgctgattttaatctctattcttttgttgtaataaaccataatggtgaataaaaaaaaaaaaaaaaaaaaaaaa

SEQ ID NO: 115467 - DNA, 1000 bp, Homo Sapiens
agacatgtttgatgcttgggatgcctttgcacatctgccagccctgatgcaacatttggctgacaactacaaacactggaagacactagatgacctaaagtgcaaaagtttgaggcttccatctgacagctaaagccaagccacagagggggcctcttgaccgacaaaggacactgtgaatcacagtagcgtaaacgagaggccttcctttctaatgacaatgacaggtattggtgaaggagctaatgtttaatatttgaccttgaatcattcaagtccccaaatttcattcttagaaagttatgttccatgaagaaaaatatatgttcttttgaatacttaatgacagaacaaatacttggcaaactcctttgctctgctgtcatcctgtgtacccttgtcaatccatggagctggttcactgtaactagcaggccacaggaagcaaagccttggtgcctgtgagctcatctcccaggatggtgactaagtagcttagctagtgatcagctcatcctttaccataaaagtcatcattgctgtttagcttgactgttttcctcaagaacatcgatctgaaggattcataaggagcttatctgaacagatttatctaagaaaaaaaaaaaacgacataaaataagtgaaacaactaggaccaaattacagataaactagttagcttcacagcctctatggctacatggttcttctggccgatggtatgacacctaagttagaacacagccttggctggtgggtgccctctctagactggtatcagcagcctgtgtaacccctttcctgtaaaaggggttcatcttaacaaagtcatccatgatgagggaaaaagtggcatttcatttttggggaatccatgagcttcctttatttctggctcacagaggcagccacgaggcactacaccaagtattatataaaagccattaaatttgaatgcccttggacaagcttttcttaaaaaaaaaaaaaaaaaaaa

SEQ ID NO: 115468 - DNA, 1000 bp, Homo Sapiens
atggctaaaggttgccatctgaattattttataggatattttaattgactccattgtatggaaaccaagtgtgaatgttaagatgaatttgccgtataccctttatcattcggtgtccttgtactcagactttcatgtccctgggtgacctcaatgtgttggtttgtctccatttagaaaggttgataatatattgaattgttcaagatcaggagttccagactgaccctccaggaaaaaaaaaatcgcaaagaacaaattctttttctgtgtaaaaaacactgatcctttgggaatggggcgggaaatgggagtaggacaacattaactttagctgttttagtttctgagatttcataacctcagtagacaccagcaaaattttcagtttctaactccaccaccaatctctcctcaatgaataagactttagcaatttatatagaatttgatcaggtaagagcgaaccacaattctcctgaaccctgctagagattaagtggtggttctcacttcatcaatgaaaacttgcactggggacagcgcttgccttggtcagaccttcccacatctacatactctcaaatacatgaccaggtgatcaagcaatggaaaaatttgcaccaccgtgtcccatgaaattgtttcaatgtttagtttagatattgctaacttgtgctattaaccttttgacaagcgtgtagtattgtttgttttgggtttctttttgatttataactatttagtagtccccagctagctaccagtacagattttaccccatgggtaggattctattgttaagccacataacaaagcacactaattctgacaacactgcaaatggaaaatacgaaccaaaaaaaagttacaccgataagttcaacaaactgtccatttttgatatttgcatgctcccctatggactggctgtggcaatgtaatgcctgtataatgttttcaaataaaaataaatgctttatgaaaaaaaaaaaaaaaa

SEQ ID NO: 115469 - DNA, 1000 bp, Homo Sapiens
tcccgagcttgatggcaagcatttcccaccgctggcccacccacccacggtgtttgacgccggcctgcagaaggcatactcgcccacctgctcgcctacactgggcttcaaggaagagctgcggccaccgcccacaaagctggctgcctgcgagcccctcaagcatggactccagggggccagcctgggccacgcagctgcagcccaggcccacctgagctgccgggacctgccgctgggccagccccactacgattcccccagctgcaagggcacagcctattggtaccctccaggctcagctgcccgcagcccgccctatgaaggcaaggtgggtacagggctgctggctgacttcctgggcaggacggaggccgcgtgcctcagtgcccctcacctggctagcccaccagccacgcccaaggccgacaaggagccactggaaatggcccggccccctggcccaccccgtggccctgctgcagccgctgctggctatggctgcccactccttagtgacttgaccctgtcccccgtgccgagggactcgctgctgcccctgcaggacaccgcctacaggtacccaggctttatgccccaggcgcatcctggcctgggtgggggccccaagagcggcttcctggggcccatggcggaacctcaccccgaggacacattcaccgtcacatccctgtagtgccaactgaagtgccgactggaccgcgaggttttgttcctgggaactttcagaaaaccaacgccaagatccctcccagcgtccacatcgtcctctggcaggagctcctgcccctctgcctcccaccctgccccctacaccccctgcagacccatctccctccaccccctcccacccatctcctccacgcagaagccgaaggtgagccctttctgcacaaaaccagcaattgtaaatactttttaaaaatgtacaaaacttaaaaacaaaacacagttttagaaaaagacaaaaaaaaaaaag

SEQ ID NO: 115470 - DNA, 1000 bp, Homo Sapiens
ccgggacacaagtgtgggagtctgcaacttgtggacctggcgagcacaaagcctggcacctcgtctgctccattcacgatcaatgcacatcagagtgacatagcctgtgtgtctctaaaccagccaggcactgtagtggcctcagcctcccagaagggtacccttattcgcctctttgacacacaatccaaggagaaactggtggagctgcgccgaggcactgaccctgccaccctctactgcattaacttcagccacgactcctccttcctctgcgcttccagtgataagggtactgtccatatctttgctctcaaggatacccgcctcaaccgccgctccgcgctggctcgcgtgggcaaggtggggcctatgattgggcagtacgtggactctcagtggagcctggcgagcttcactgtgcctgctgagtcagcttgcatctgcgccttcggtcgcaatacttccaagaacgtcaactctgtcattgccatctgcgtagatgggaccttccacaaatatgtcttcactcctgatggaaactgcaacagagaggctttcgacgtgtaccttgacatctgtgatgatgatgacttttaaggaccctgggggctgtgctagggacctgcagtggcagaactgcagagctgagccttggcagtggggcgtgcttggaagccaccagccagcaagcattaatggggctggtgcccactttccactcagcagagctatgtctaaataaagagctcacttccccccagcacttcttgatgactgtgtgccccaagggccaggccagagacccaggaaggcagcgaccccttgggatccctaacctggaggaaattgccagggacccagagggagtgccctaatccaacctggggattttttaaaagcttcctaggaagagatgatctccgatgtgatgaatacgaataaaaggcccttaatggcatttacggctaaaaaaaaaaaaaaaaaaaaaaaaaaaaaa

SEQ ID NO: 115471 - DNA, 1000 bp, Homo Sapiens
cctggtattctagaatgtaaatttacataaatgtgtttgttccaattagctttgttgaacaggcatttaattaaaaaatttaggtttaaatttagatgttcaaaagtagttgtgaaatttgagaatttgtaagactaattatggtaacttagcttagtattcaatataatgcattgtttggtttcttttaccaaattaagtgtctagttcttgctaaaatcaagtcattgcattgtgttctaattacaagtatgttgtatttgagatttgcttagattgttgtactgctgccatttttattggtgtttgattattggaatggtgccatattgtcactccttctacttgctttaaaaagcagagttagatttttgcacattaaaaaattcagtattaattaaacattacttattctaccctcttttttggcaaggaggacaaatacgcaatgttggaaaaccttggatggatatcttctctttaaaaaaatgtaaagataatttggtcttgagggtttaaacggttgataatgcctctacaacaacaagaaaaaagataaaatactaggatagaatcatggtgggcacagtggcttctcaggaggctgaggagggaggtttgcttgagtccaggagttggagaccagcccaggcaacatagcgtaaaccctatctctaaaacaatttttagccaggtgcggtggctcacgcctgtaatcccagcactctgggaggccgaggcgggtggatcatgaggtcaggagatcgagaccatcctgcctaacaaggtgaaaccccgtctctactaaaaatacaaaaaattagccgggcgcggtggcgggcgcctgtagtcccagctactcgggaggctgaggcaggagaatggcgtgaacccgggaagtggagcttgcagtgagccgagattgcgccactgcagtcggcagtccggcttgggcgacagagcgagactccgtctcaaaaaaaaaaaaaaaaaaaaaaaa

SEQ ID NO: 115472 - DNA, 1000 bp, Homo Sapiens
ttcaaaccttaccgtacatcagagaattcacactggagaaaagccatataaatgtaatgagtgtgggaaagcttttagcaaaggctcaaatcttactgcccatcaaagagtacataatggagagaaacccaatagtgtggtaagtgtggaaaagcctttagactatatgaatcactatacatgtgagaaatcttacagaagagaaactgtatgaagcagtggttatcatggtaaatttcctagattctcccttatttaacattagaaaaatttatactggggaaagtcttatgaatgtggtgaatataggaagaccttttagcaaagatgcaggccagtttgtttattagactttatactgtagagaaatcatatgaagaccataaatgtgggaaagcctttgtcagtattaatcccttaattgacataagtatactcacactaggataaaaccctgtacatgtagcaaatgtgggaaagactacagacaataggaatcttttacaaactcctacaggagagaagctgtatgaatgtagaaaatttagaaattgagggaagtcttcagttccaagtatatcccttattctacagcagagaactcaaaatggagagaaatctcatttaagagatgtagcaaagtgttcactaagagtgtttatcttggtacacatcagaagattaatggtagaacaacctgaaggatttaggagttatgtgtaaatctttgcagtcatgctatttgtaaactggattctacaggagagcaaataaacattataataaaatatgcatttcttagagcagtagcttgcagtttcagttgagttctacttagaaattctttttagctagtgggcatgtgaagatatttagtcacccagaggagccagtaagtgttataatattgaaaattaaagctgcaaaagaaataaagtgatgttaataaaagttttggcatctaataaaatcattttgtatatcaaaaaaaaaaaaaaaa

SEQ ID NO: 115473 - DNA, 372 bp, Homo Sapiens
gctttcgctcctttccggcggtgacgacctacgcacacgagaacatgcctctcgcaaaggatctccttcatccctctccagaagaggagaagaggaaacacaagaagaaacgcctggtgcagagccccaattcctacttcatggatgtgaaatgcccaggatgctataaaatcaccacggtctttagccatgcacaaacggtagttttgtgtgttggctgctccactgtcctctgccagcctacaggaggaaaagcaaggcttacagaaggatgttccttcaggaggaagcagcactaaaagcactctgagtcaagatgagtgggaaaccatctcaataaacacattttggataaaaaaaaaaaaaaaaaaa

SEQ ID NO: 115474 - DNA, 1000 bp, Homo Sapiens
aactctgagagagagcatgggcagacaccctcagcagacaggaggcctgagttccagtctccacctttattgttcttgaaagcccctgctctctctgagccttatttcatcatctgtaaaatgggaatgtcctgaatgacttctaaggctctttctggcttgaactgtcagagccaagcccacatccctccttgggcagggcagcagctgctgccacagcctccagcggctgccactgtgggctctgggagccggagcgatgctgtgtgagaggcagagtgccaaggatgaagctggcactgaacagtaagcggctccaggcctcctctgggcccagggcccagccaatttctgttctgttcctgtagaacgctctctggattccatagctggaatctcctctcttagctcagtgaaaaataaaaatcccaaatggtgtgcctaccttcccacttcttactggcttccaggagtcttggagttcatagccccccgagcctgccttaaaggggtgtcctccaccccccacctacagcttcacaggaggggagaaggcatccagtgctaggagtagaagtgtctccagctctgttctcttggggccctgggtgaaggtggggtctggggcttatgaaataggtctgggctttgaggaggatggagcagcctcattatgtggggaagatggggcctctggggcgtcactgagaccacaggtggggccggggctggaccgcagctgtcttgggtgcctgtgcctacacccctcctcaccctagagacggaagatgtgcaaaaagaaagaaggaagggcaactgcattccagccccacactgtgatgactttgagcctgtcctttccctccttgagcctgtcttgcttgtcccctgtaaaatgaacagtccccctctcccccaaatagtaataatacatgtttcaaagggtgaccatttataaagcatatgacaaaccatatcaataaatgtaactcattctttt

SEQ ID NO: 115475 - DNA, 1000 bp, Homo Sapiens
cacacccctatttcatgtctgaaataaccctgtttcataccagttgcaaagcttgtggggagcggtcccacaaagcactttcttaaaccttgagaatctccaagagaaaaatatttggggaaggagggaggaaatatgtcccttgcacaccacccctgaagcacatggcagtaggaaacagcataggattgtatgtgggaggtggataggtcggtgatgtgtggagcggaaaagcaggttggtaaagttcccttcttgggacttattcctggagtcagtggatacaagtagtgcagaaggttcacactgcaaatagtgttctcatctcaaagcaaactatcattccagaaggaaaagtgtgtcagggcaagcagacaacacaatttcctatcagaatatgtccctcaacccccgaaacaaggcttctctcagcctccccaccagtgatggataacagctcctattctcagctgacctgactgagccaacccatgaactcttcactccttggggaagccacctcccatcacacccctgagcagagttagggaggaattctacttcccataaaaggacctctcctgagaggcaaaacctgttgcctccaccacggcttccctcttggctcattccaagcttggccaaattggggaagtgggatggaggttgccctgcatcccccctcctctgcctgagtgtgtctttgtaatgtcagctggcatcatacaaagagcaggagaagcaaacacccagaactcttttgctggtcagagattccctgagtgtctgtcctcacccaagcctgctctgtgtctgtgttgtgaagcttgagactctggaaagaaatggggagggggggcaggggaaatgttgccctaagaatgcttctcattcctctgttcttattgggtcctgtttttcgggagggtgggggttgggggaagcttgaccttgtgtcttcgtcaataaactcacatttacacaaaatgaaaaaaaaaaa

SEQ ID NO: 115476 - DNA, 1000 bp, Homo Sapiens
acactaatggtttatataacatgcttcccattttttttatgtcgtagaaattggaagttagggagtactgctttcaaggttcaacttcattatcttctgcattggaaaatatttgggccatgagaactaggggaaaggagtttgaatgtgtctatttttttctagtgaatgtattttaaccacagtgtcctaaactgagaaaactagagaggaaaaagtgggtgttcatgaactttgtagttgggagagtggttttacatgtctgtgtattcatgactttgggagtgggtaggatcattggagagagaattgcacagaaagtcctgaagtttaaaacacttttgaccagctttggctcgggagagtggggctgcttgtagaactggaagtgaataactttttcaagcaatatcagtgagtgggtcccatcgacagggttccaggacctggaacactttaacagaaggaaatgccgaagcagcttgcacagttgctttacagacttccaagaggctgattctggcttcaagatggagccttggagttggtttttttttttttttttttcttccctcaaagaacctgcggttgcgctttgtgtgttttgtttttgttttccatttgggggccccatgggaaagagcttctgaactctttcctttatgaactcccactgtgttcctataaaggcccttttctttcttagtgttgtaagttacattttcattatgccccatcacatcttctttactgtaaaaatattaaaaagctgtttccaagtgggacagctaatgaagctctaattattgcagacatatttttgagatgtaaaaaaaaaaatttaaagttaaatgataagtcttagaggcgagtgaggaataaaatggatgtaaacatttacatgggatgcattagaattctgctgtgtgtactgtcttttggttgaaacaaattatgaacagtgactaataataaaaagtcaatacccaatgatttaaaa

SEQ ID NO: 115477 - DNA, 1000 bp, Homo Sapiens
ttcaaatatattttttaaattactctattttccaaaacacgtaatgcatttttctcgaaaataccttactgtaaaaataactgtcgcgtacacatgtgtgaagtagctagaacatactgaattttttttgtactgttggactctattcagtgtcatgtcctatatctgatcaagttatcaaggagataattctagaatgaaaaagaaaatcctcttgttggaaacaaaagacgttttatatgtgcagtatgacaaagaggagtttcagagacaactttgaatccttgtcagcctggagaccagcaccagaggaatctacaaggcaaactcccatatatttgcttcccccaaattgctgcccctacagactcaaagctctttttctttgttttgttgtttctctaaaaatttactgttctttgtcgatgctatataagccagggagttctaagacgccagctctttgagatttgctcattcccctgtatttcccacatatatattacatatacccgctaataaatttatgtttgtttttctcttgtcaatctgtcttttgttataggggccccagccaaggaacctaaagtgggtagaaggaaaaattattttttctttccctacaaactgaacatggattattagaactcaaggttttcattgacaatatagaaaagaaacactgaatcattttattttattgcccaatttttatttcttatatgactctagtgtttcatcttcataattaatcatgtttgaaggatttctgagtgactcagcagcctgttaaagaaggatgaaccaaagaaaacatttcactaaatgtgcttttaaaaatcaagtgtattgctggttctgctgcagtatgtagtcgaagaataaattagtaaattgcttctgagggtctgaaattgaataaagtaatggctttgtatttctataaaagttgtctccccttgtttcctttccattctggcacatgtagacatttaattta

SEQ ID NO: 115478 - DNA, 673 bp, Homo Sapiens
gcgctcgggctgccgctggctcttcgcacgcggccatggccgactccgagctgcagctggttgagcagcggatccgcagcttccccgacttccccaccccaggcgtggtattcagggacatctcgcccgtcctgaaggaccccgcctccttccgcgccgccatcggcctcctggcgcgacacctgaaggcgacccacgggggccgcatcgactacatcgcaggcctagactcccgaggcttcctctttggcccctccctggcccaggagcttggactgggctgcgtgctcatccgaaagcgggggaagctgccaggccccactctgtgggcctcctattccctggagtacgggaaggctgagctggagattcagaaagacgccctggagccaggacagagggtggtcgtcgtggatgatctgctggccactggtgtatgagtgaccacagggcctcccagcccaacatctccagctggatcccagggaaatatcagccttgggcaactgcagtgaccaggggcaccggctgcccacagggaacacattcctttgctggggttcagcgcctctcctggggctggaagtgccaaagcctggggcaaagctgtgtttcagccacactgaacccaattacacacagcgggagaacgcagtaaacagctttcccacaa

SEQ ID NO: 115479 - DNA, 1000 bp, Homo Sapiens
ctcccaactcacattgttcctccagaccgcaggttcccccagcctcaggttgctggagctgtcacatgactgcatcctgcctgccagggctgcaaagcaaggtcttgcttctatctgggggacgctgctcgagagaggccaagaggccgcagaacatgccaggtgtcctcactcaccccaccctccccaattccagccctttgccctctcggtcagggttggccaggcccagtcacaggggcagtgtcaccctggaaaatacagtgccctgccttcttaggggcatcagccctgaacggttgagagcgtggagccctccaggcctttgctctcccctctaggcacacgcgcacttccatctctgccccatcccaactgcaccagcactgcctcccccagggatcctctcacatcccacactggtctctgcaccacccctctggttcacaccgcaccctgcactcacccacagcagctccatccactgggaaaactggggtttgcatcactccactgcacagtgttagtgggacctgggggcaagtcccttgacttctctgagcctcagtttccttatgtgaaagttgctggaaccaaaatggagtcacttatgccaaactctaataaaatggagtcggggggccacatagaagccctcacacacacatgcccgtaacaggatttatcacaagacacgcctgcatgtagaccagacacagggcgtatggaaagcacgtcctcaagactgtagtattccagatgagctgcagatgcttacctaccacggccgtctccaccagaaaaccatcgccaactcctgcgatcagcttgtgacttacaaaccttgtttaaaagctgcttacatggacttctgtcctttaaaagcttccccttggctgtggccctctgtgtatgcctgggatccttccaagcactcatagcccagataggaatcctctgctcctcccaaataaattcatctgttctggaaaaaaaaaaa

SEQ ID NO: 115480 - DNA, 852 bp, Homo Sapiens
ggaaaatcctcacgtgaggtgaagcgcaggcgagtagggccagacatggtggctcatgcctgtaatctcagcactttgggagactgagatgagaagatcacttgaggccaggagttcgagaccagactggcaacatagtgagaccctgtctctacaaaatgctggccaaggagcagggcctgcgcccgtggtctcatagagcctggcctgttctggaagagcacccagttgttccttctaggctgcccaagccccactgatgatggctgagagggaagaggacgacgacactgaggaagcctggatgcagctacggcccacagaacccttgccttcccagtgctgcggcagtggctgctcaccctgtgtgtttgacctctatcaccgagatctggcaaggtgggaggcagcccaagccagcaaggacaggagcctgctgcgtgggccagagtcacagagctgcccctccaagctgaacccagagaccttcgtggccttctgcatcattgccatggacaggctcactaaggacacctaccgtgtccggtttgctctacccgggaacagccagcttggcctgcggcccggccagcacctcatcctacggtacactcagagggatagtagatgacttagaaattcagagagcctatacgcccatcagccctgccaacgcagaaggatactttgaagtgttaattaagatgaagaaactgaagctcaaaaagatgacatcatttgtctcaaggcctcttgggtaatatgatccaaatggaaggacaaaagttcagtgtcagttctgtttaacaagtatgtattaaacatttactctgtgccaaaaaaaaaaaaaaa

SEQ ID NO: 115481 - DNA, 1000 bp, Homo Sapiens
ctgtgacattaggtatttgggacacagcaggctctgagcgctatgaggccatgagtagaatctactatcggggtgccaaggctgccatcgtctgctatgacctcacagacagcagcagctttgagcgagcaaagttctgggtgaaggaactgcgcagcctagaggagggctgccaaatctacttatgtggcaccaagagtgacctgctggaagaagaccggaggcgtcgacgtgtggacttccacgacgtccaggactatgcagacaatatcaaagctcagctctttgaaacatccagcaagacaggccagagtgtggacgagctcttccagaaagtggcagaggattacgtcagtgtggctgccttccaggtgatgacagaggacaagggcgtggatctgggccagaagccaaacccctacttctacagctgttgtcatcactgagtcagcactcacctggcctgggggaattaaaggaattccccgtaagggctggacccagctcctttctgggcttgggtagtcaaatgtctgagctaccccaggtcctcatgtcagcagagtggcgcctgcctgtgctggcccatggaacggagacagcattgggctgactgtgggcatgaggagggataaggctgatttggaccccaggcttctgccctggacagcacttgtgtctgcagattatttaagtggcttttgatctgtaaataaaatcagtgcactgtgaatcacacccagcccctttccctgctgtgtggattaggtgtcaagacacctagttctttctggggccacccggctggcctcactgcttatattaaggctcctcccaactctcattttcctttggaaaacaagacttttttccccatggttaccgctgagatactggggctgtagtagtataaaagctcacagttccttctgagtgctgaaaagagtgcatgagttgcttcgaaataaaagggtcaagcattaaaaaaaaaaaaaaaaaa

SEQ ID NO: 115482 - DNA, 1000 bp, Homo Sapiens
cttcagaggcacacacagcacctctcggctgctccagctctgtaggatagcctcccctggggtccgtgggacgcgggccacagtgttgaggtagacaaggaggatcagtgagaggcctcttccctctccacagagactggattgtcattgttccttcatttatatcgtagggcttaacatttcactcaaaaaaaagcccctctttttctaatccttagtctttgtttcaaggaaagccagtttttcttctaccacattttccaggatcgactttaagaaaaatgcaacatctattgaaaaaaagtggggtgtatgcatgtggtttaattccagattgcttttgggtttaagtggtatcaaatttcagtatatttctgtcttatgtgaaagaaatatattactaaaacgtcagtgagcaataatgtcagctgtcaagcactagatttatttttgcaggatatggagtgcaatgaactgagtcaatatggcaaggtgtatgtgatctgtgggagttatgccatttaacataggaagtgcatgggactttccctctctgcactccagctcttactgtaccattagaagatgcagaattctgttggtgtgcaaaaagtatagccttacattcaagcagaatggatctgaagaaagcagcaatatctgttactagagaacattcccatgtgtttaaactcttcacttcttagatgcatttaaattcttaatgcaaatgacgtagcaatttgaaaacttctccgtattacttgtgtttaaaatgtcttgctttaaatacaaaacaaatggtaaaggggattatcttttgtttagatggttaaatattatttttgccttagatagctttgtaataatttttctccagacagttcaacacttttgaaaaatgacatgaattttcattaaaaacccttttcctatgtttattgtatacaagaattatgcaataaaatttctttataaaaataaaaaaaaaaaaaaaaaa

SEQ ID NO: 115483 - DNA, 1000 bp, Homo Sapiens
tcttcgacgtcgtcttcttcatccagcacttctgtttgtacagaaagagaccggggcttcaggcagcgcgcacaggctctggcagccgtctcaggcaggactgggcaccaagcttgcagccgaaggccttgccccaaactaccagcgtttctgcaagcagcttgaagggctgaccttgcagccgggtgagccaagggcactttgctgccaccactgcgttcccagagaccaagcagcccggtgccgtggccagtgaactcagaggtgctggtggacgggctaggactttggggttaggccatggggctctttctctgaaggccactttcctgacgtactctctgtacataactcagcgtccgcgactgcagtaacagccggccctacccagagtatttctgagccatgaggggcccaccagattggttctgaatcggactcatgcccagcgcattagcatagtaactcctttcagattttttggagggacgtttggaagtggcttactctcttctgccctctttcctacctccaccttctcagatgagccccatctgagcacatccagctgctccttacccagcatctggagtacaggacatagctctctcctgctaccagtctgtgccttagaggtctgttaggcctgccaaacggcgaccagctcccctggagcgagggcaggccccttccctctctttccccagacacctacttgagactcaccaatttctggcctgttcaggagcctcagataagtatttgtacttgagaccacctcacacaatctgtatgggcccaaccctgatctcaaacctccttccctctgcctgaagctgtcgtccttcctatggcaggagggggggggggtcccaggacgtgcctcatacatgacttgagcttgtcagtccactgagtttccttctatgagatcaacgcgaggggcctgtatcttgaattaaagcctactcgcttcctttctgcaaaaaaaaaaaaaaaa

SEQ ID NO: 115484 - DNA, 1000 bp, Homo Sapiens
agcctagacaaccaagtggcagcaggtgggggcattcttctaggaatgaggggcatcagcccaccccaggcacctcagtggggttccgggccacctcaggactctaagaggctgtgtggagccaccactcctagccacagctgccatgataagtccttccatgaaggactgaggagggagagtgggggtccagggctggtgctgctcttccctcagctctgccggggctctaaggtccctctatttatttctcaaccctggctggcctctcaccaggagtttaggctgaatgccttccacgtgatggaggaaaaggccaactctgtcctggtcttgctgtggcaccccatcgccccacagctcgtaccttctcaccagattcccctgaatccaaactcgtggtgcaaacctctaccttttttacaaaaagatcttattgttaatttattgtttctggcacttgggcaaaccctgtagttaatactcctcccacactagacactgggtttcaggaggagggagactgccctgctttggtcccagagaggccctctgcagataggcgtggcccctcttcagaggacactaccctagggcactttctctttgaggtggagagacccataaagccttgaccacatcactccatatggggaggagaaggatccctgtcaccttctcctctcttcacggggcccttttgcagccctaggcctcatctgtgggaagggagtccctggctcatactgcccccaccacagctccttgccctggccagaactgctgtcgaagaaaatcaggccggaaggccaagaaggcgctaagggggatgggagggcaggttttccaggctggagtcggttccacccactcgcctgtccacaggcttccttgtaagcaagtcagcagcacagctactcacgctgccatctggacttattttatgtcaatctgtttataaataaaaaccaatatagataaaaaaaaaaaaaaaaaaaaa

SEQ ID NO: 115485 - DNA, 1000 bp, Homo Sapiens
ccaatggagatctgcctcaatggaacccctgctctggcctacctggcgagtgcgcccccacccctgtgtccaagtggccgcactccagacctgaaggctctactcaacgtggtggacaatgcccggagtttcatctacgtcgctgtcatgaactacctgcccactctggagttctcccaccctcacaggttctggcctgccattgacgatgggctgcggcgggccacctacgagcgtggcgtcaaggtgcgcctgctcatcagctgctggggacactcggagccatccatgcgggccttcctgctctctctggctgccctgcgtgacaaccatacccactctgacatccaggtgaaactctttgtggtccccgcggatgaggcccaggctcgaatcccatatgcccgtgtcaaccacaacaagtacatggtgactgaacgcgccacctacatcggaacctccaactggtctggcaactacttcacggagacggcgggcacctcgctgctggtgacgcagaatgggaggggcggcctgcggagccagctggaggccattttcctgagggactgggactccccttacagccatgaccttgacacctcagctgacagcgtgggcaacgcctgccgcctgctctgaggcccgatccagtgggcaggccaaggcctgctgggcccccgcggacccaggtgctctgggtcacggcccctgtccccgcacccccgcttctgtctgccccattgtggctcctcaggctctctcccctgctctcccacctctacctccacccccaccggcctgacgctgtggccccgggacccagcagagctgggggagggatcagcccccaaagaaatgggggtgcatgctgggcctggccccctggcccacccccactttccagggcaaaaagggcccagggttataataagtaaataacttgtctgtaaaaaaaaaaaaaaaaaaaaaaaaaaaaaaaaaaaaaaaaaaaaaaaaa

SEQ ID NO: 115486 - DNA, 1000 bp, Homo Sapiens
aatgagcagacagacccagagccagaggaaaatgaaacaaagaaagaatcaagtgttcccatgtgccaaggggaactgaggcattggaagaccggtcactacactttaattcatgaccatagcaaggctgaatttgccctagacttaattctgtactgtggctgtgaaggctgggagccagaatatggcggttttacttcttacattgccaaaggtgaagatgaagagctgctaacagtgaatccagaaagcaattctttggcattggtctacagagacagagagactctgaaatttgtcaagcatattaaccaccgaagcctggaacaaaagaaaaccttcccaaacagaacaggtttctgggacttttcattcatctattatgaatgacagcactgggcaaagctgaacaaaaatgtgacccttcgtaattactgggaagtctgaaagagctaagcatggagtcaaggagaactacatggtagcttgcctgacagtgttcttaaaactggttgtcttttactaggactcataatgattgtcctcaaccgagaccttgagcttgcagctaagtacttatctcttgattaaaaaaaaaaagttggcttttttttttttaacatttagtcctttttccatattggcttcttcagtgaatttttaagttcaatttgtttttattgaggtaaaatatttataacataaaactgaccagcttacccatttttaaatatgcaattcagtggattaagtacattctcattgttgtccagccatcaccatcatccatctccagaagttttccatcttcccaaattctgtgcccattgaacaataactccccacctccccttcccctagcaacagccataccttttgtctctatcatcaacttcactactcatatttctcatgtaagtggaatcatacagtatttgtccttttgtgactggtttcacttagcataaagtctttaagatgcaaaaaaaaaaaaaaaaaa

SEQ ID NO: 115487 - DNA, 1000 bp, Homo Sapiens
tttcttttatatggatttccttaattcaaagatcatattttagctggccacaaaaccaagaacatatctagcaagaaaacttgaaaaagtataagcatttgttaaaaatgtgaatttcttgaatgaatttcacatttgtaactatgattttggcagaatagaagattggctcatcagtgaagcgcagtatcttagctctagattctattttcatgcatcacagaagtgctatacggttaggtctgtttgtgctcagtcaagaactaagaaatagtatgaattgtaagtcaagatgggcaactcagatggagcagcttagtctcacagtttgcttgtctatttattttatttagtgccaaatgtattccattttaaaagtaagccagagtgagtcaaggcatatacacactttctcacaaaacttcctaaacagatttgggggtttaatatgtccaactcctcatgaaatatattcaatccacttaaatatattccatctttttaacataaaatgtaaagcttagcacccatcattaatttatgtctctgttttatccagtggttaaaaaaggattctgcctctttagtcctcactgttaaataaaacccaatcatagtaagtgattaactagcaaaaagtaaagctatttatagcaaatttctagatcattagaaaagcactggtagttgtacaatatcagtgttgactttgaacttctttaacgagatcatgaattcttttcccttagccaaaacatgaaatatttaacctagttgtctctaaaagttttgtaatcatgagttagatatatgtcatctcctattcattgcttttatgtgatcaataaatcttttacaaacccaactactcatttccttcctagtaatactttgcctttttcactgtgtatggaatgaaacatgtaaagctgtcacaatcaatgtttttatctgataatattaaatattttttaacttaaaaaaaaaaaaaaaaaaaaaa

SEQ ID NO: 115488 - DNA, 1000 bp, Homo Sapiens
ttgagatccagatagacatggtttgtgcacttacgtccagatgggaagcatccttcctgcaaccctaaaataatcatgcagcctctcagacggacgccatcggtcccaaggccttaggtggaggaagcaaagcaggccaggcctgtcctgtccgtggacctctaccttctggactccctacgggtgcagagcacttgggtttctctacagccatcgtggcccacttgacactgtgctcctccatcagctggtcacatgccaacacgttcccagcccctgaggcagctccagggtgccccacctgctcctgaggtgggtccctaccctgctgctcctcttcatcctttcccttttgtcctgaaagggaggagcaatggtccaggcattaattccacccagggaattttagctatgccctcatgtcccagggagagagccacacgcctgttttccatttatagcaagattgtttgcatacttttgtaatgaaggggagtgtccagtggaaggatttttaaaattatcttatggatagctcaagtctctgccatttgtaatttttggctctaagctccgattggagacgcttctccttgtgcatgtgagttgactgatgttgtgagtgtaaatgcatttggttatttctggtatcggtggccacttggatggatttttttacattctgttccccagttacaggaaggagtccctttggtgtgtgaatatgtgtgcctgtagagggtggggcagggtggggtggggatggaaatgtgtggcatgcacatgagttgaaattcttttatgcatttttttgaagaaaaaaaaaaaaaaaacaactctgaggacataggggatgtcagtttcctatggaagagacacctctgacccgttattcttataatcaaaatctgaagggaaaaaaatgttttagttctttccccactcgttgggttcaactagattaaaaggctgattttcagaaaaaaaaaaaaaaaaaaaa

SEQ ID NO: 115489 - DNA, 1000 bp, Homo Sapiens
acagaggtgtgtccgggagagaacaagcagtgtgaaaacaccgagggcggttatcgctgcatctgtgccgagggctacaagcagatggaaggcatctgtgtgaaggagcagatcccaggtgcattccccatcttaactgatttaacccctgaaacaacccgacgctggaagttgggttctcatccccactctacatatgtaaaaatgaagatgcagagagatgaagctactttcccagggctatatggcaagcaagtcgcaaagctgggatcccaatccagacagtctgaccgtggaacgagactcatacacagtcagcaggcttcttctcagagatgacagaagacgagttggtggtgctgcagcagatgttctttggcatcatcatctgtgcactggccacgctggctgctaagggcgacttggtgttcaccgccatcttcattggggctgtggcggccatgactggctactggttgtcagagcgcagtgaccgtgtgctggagggcttcatcaagggcagataatcgcggccaccacctgtaggacctcctcccacccacgctgcccccagagcttgggctgccctcctgctggacactcaggacagcttggtttatttttgagagtggggtaagcacccctacctgccttacagagcagcccaggtacccaggcccgggcagacaaggcccctggggtaaaaagtagccctgaaggtggataccatgagctcttcacctggcggggactggcaggcttcacaatgtgtgaatttcaaaagtttttccttaatggtggctgctagagctttggcccctgcttaggattaggtggtcctcacaggggtggggccatcacagctccctcctgccagctgcatgctgccagttcctgttctgtgttcaccacatccccacaccccattgccacttatttattcatctcaggaaataaagaaaggtcttggaaagttaaaaaaaaaaaaaaaaaaaaaaaa

SEQ ID NO: 115490 - DNA, 1000 bp, Homo Sapiens
acagcagtggcctgctggtgacactgatagctgacctgcagctgatagactttgaggaaaaaaaagatgtgacccagatatttaacaacatcttgagaagacagataggcactcggagtcctactgtggagtatattagtgctcatcctcatatcctgtttatgctcctcaaaggatatgaagccccacagattgccttacgttgtgggattatgctgagagaatgtattcgacatgaaccacttgccaaaatcatcctcttttctaatcaattcagagatttctttaagtacgtggagttgtcaacatttgatattgcttcagatgcctttgctactttcaaggatttactaaccagacataaagtgttggtagcagacttcttagaacaaaattacgacactatttttgaagactatgagaaattgcttcagtctgagaattatgttactaagagacagtctttaaagctgctaggggagctgatcctggaccgtcacaactttgccatcatgacaaagtatatcagcaagccggagaacctgaaactcatgatgaacctccttcgggataaaagtcccaacatccagtttgaagcctttcatgtttttaaggtgtttgtggccagtcctcacaaaacacagcctattgtggagatcctgttaaaaaatcagcccaaactcattgagtttctgagcagcttccaaaaagaaaggacggatgatgagcagttcgctgacgagaagaactacttgattaaacagatccgagacttgaagaaaacggccccttgaagagctccccggcccctgtcacagtcagtcgtctcatttgtccagtttgtacagtgtgtcatttcagaaagtcatcattcttgggaagactttggaggtgcctattttttctgctgtaattgttctgggtagatggagtataaacatttgaatggaaaaaaaaaaaaaaaaaaaaaaaaaaaaaaaaaaaaaaaaaaaaaaaaaaa

SEQ ID NO: 115491 - DNA, 928 bp, Homo Sapiens
gttggttggccggcggcgggccgggacgggcatgaccctgctgctgtgcctggtgtgcctgacggcggcgctggcccacggctgtctgcactgccacagcaacttctccaagaagttctccttctaccgccaccatgtgaacttcaagtcctggtgggtgggcgacatccccgtgtcaggggcgctgctcaccgactggagcgacgacacgatgaaggagctgcacctggccatccccgccaagatcacccgggagaagctggaccaagtggcgacagcagtgtaccagatgatggatcagctgtaccaggggaagatgtacttccccgggtatttccccaacgagctgcgaaacatcttccgggagcaggtgcacctcatccagaacgccatcatcgaaagccgcatcgactgtcagcaccgctgtggcatcttccagtacgagaccatctcctgcaacaactgcacagactcgcacgtcgcctgctttggctataactgcgagtcctcggcgcagtggaagtcagctgtccagggcctcctgaactacataaataactggcacaaacaggacacgagcatgagcctggtatcgccagccttaaggtgtctggagcccccacacttggccaacctgaccttggaagatgctgctgagtgtctcaagcagcactgacagcagctgggcctgcctcagggcaacgtgggggcggagactcagctggacagcccctgcctgtcactctggagctgggctgctgctgcctcaggaccccctctccgaccccggacagagctgagctggccagggccaggagggcgggagggagggaatgggggtgggctgtgcgcagcatcagcgcctgggcaggtccgcagagctgcgggatgtgattaaagtccctgatgttccaaaaaaaaaaaaaaa

SEQ ID NO: 115492 - DNA, 1000 bp, Homo Sapiens
gtcgtatcagaggagcagttcaaggtgttcacgctgcccaaggtgagtgccaagctgaagttgaagctgacggccctggagggctcaagagtgcggcgggtcagcgtggcccacttcggcagtcgtcgagccgaggactacggggagcaccacctggcagtccttaccaacctgggcgacatccaggtggtctcgctgcccctgctcaagccccaggtgcgctacagctgcatccgccgggaggacgtcagtggcatcgcctcctgcgtcttcaccaaatatggccaaggcttctacctgatctcaccctcggagtttgagcgcttctctctctccaccaagtggctggtggagccccggtgtctggtggattcagcagaaaccaagaaccaccgccctggtaacggtgcgggccccaagaaggccccgagccgagccaggaactcagggactcagagtgatggcgaggagaagcagcccggcctggtgatggagcgcgctctgctcagtgatgagagagtcctgaaggaaatccagagcacactggagggagaccgcgggagcggcaactggcgttcacatcgagccgccgtggggtgcagcctcagcaatggcggagcagagtgagtggctgagcgtccaggctgcgcgatgagcacacactactactgatggcctttcgggggtccctgccccaaccggagaggccggtgcacagggccccgccaggggctgggggcatcccggcttccacaatgcagctgctctgggcctcgggagaggagagaccccagtcccctgggctgcccttcccgggcctcgtctgtctgggtcctttggtcaatgttgcacagtttttattgctcccatccctttttgtagtgggctgggttttaagttataaatgttaactgcctctgggtgaaaaagtttttaataaacacctattacctcttgaaaaaaaaaaaaaaaaaaaaaaaaaaaaaaaaaaaaaaaaaaa

SEQ ID NO: 115493 - DNA, 1000 bp, Homo Sapiens
tgacaagaagacaaaactcttcccactcccagggaccgctttgtcttgagtttggctagtaaaggctagcaagtgaggctttgtctctgcatcccgttccccctaacatcctcagagaaccttcgtttctagaatctttctagtattcagagacttctccagggtcatgatcccaaaggcttaacccgtttacaaggagagagttgtctcctgacgcccaaaatggcagctaaaatggagataactttaagctccaacactgaagcttcctccaagcaagagagacacataatagccaaactagaagagaaacggggccctcctctgcaaaaaaactgcccagatcctgagctctgccgccagagcttcagacgcttttgttatcaagaggtgtctggaccccaagaggcgctctcccagctccgacagctctgccgtcagtggttgcaacccgagctgcacaccaaggagcagattttggagcttctggtgatggagcagttcctgaccatcctgcccccggagatccaggctcgggtcaggcatcgatgtccaatgagcagcaaggagattgtgaccctcgtggaagattttcacagagcatccaagaaaccaaagcagtgggtggccgtttgtatgcaggggcaaaaggtgctcttggagaaaactggatctcagcttggagaacaggaactgccagactttcaaccgcagactcctaggagagatctcagggagagctctccagcagagccttcccaggcaggagcttatgaccggctgagcccccatcattgggagaaatccccactcctccaagaaccaacccccaaattggctgggacagaacttcttatagaaaagacagatccaaatatggccacagatgaacttccatgcaagctatggctgagtttcattgcttaaaatgctcctctgtttagaggggcctggtagaaataaaaacccaccctatatcttaaaaaaaaaaaaaaaaaaa

SEQ ID NO: 115494 - DNA, 1000 bp, Homo Sapiens
aacaactagtgcaaccagtaagttgatccatccagatgaggatatatccctggaagagagaagggcacagttacctaagtatcaacgtaatcttcctcggccaggacaggcccccatcggtaatccaccagttggaccaattggaggtatgatgccaccacagccaggcatcccacagcaacaaggaatgagacccccaatgccacctcatggtcagtatggtggtcatcatcaaggcatgccaggataccttcctggtgctatgcccccgtatgggcagggaccgccaatggtgcccccttaccagggtgggcctcctcgacctccgatgggaatgagacctcctgtaatgtcgcaaggtggccgttactgatcttacttcatccagtctaataggtttggagattaaaccttttctcaacttgtgctgtttatatagccaagcttccgtcaataaggcttcattgtgactttaacaaacattatcttcccacataccaggaactattggacatttattttacatgggaaaaattatttggaataataaagcaggaacttttcctgaagttgcaatttatactgtatggcttctttttcatgtttcatctaggtttttagaagtgaagtatagtaaatttggttcgttaaattgtgaaggcgctggaattacatgaacataccaccctagtaaaggcaagttctgtaagcttacattgctatttgtaaagtttgccttcacagcatttcagatgctgttggacttcatgtccccaacctagcttggtgagggctgtaactgtttccaagtacttgtacattggaagtctgaatgtgtaacaatatttaatgtatttagagttcctcatgttgcagggtttaagaaatctgacccaccaaggtcatgtgacttttctgtactgttaaacttcattgtaataaaatgagagaaaaaaaaaaaaaaaaaaaaaaaaaaaaaaaaaaaaaaaaaaaaaaaaaa

SEQ ID NO: 115495 - DNA, 1000 bp, Homo Sapiens
tattatagctgggaaatcgcaagtagttcagcatagccagggtgtgtaggggcaggggaaaggcatggagggggaggctgggcaatagggtacaactcatgtctgactccagttctggaacattgattagaccttagttcttgcaagtgctatagtgagtacattcagggtagcaaataccctccctcagcctccccactcccttttccagaaaggtctgctaggctctgccctgcaaactgtccaggctcctctgccctctgggcttgttttcctctttattgctacttggctgtttttcacttggtcctcttcattctatgattaaggcaacccatataattgaaagaaaaataatgtgcagcctgtttcatcccttccacttgttttcttactatttatttatttatttctgagatggaattttgctcttgttgcccaggctggagtgcaatggtggcgatctcggcctgctgcaacctccgcttcctgggttcaagcgcttctcctgcctcagcctcccgagtagctgggattacaggcatgcgccatcacacctggctaattttgtatttttagtagagacggtgtttctccttggtcatgctggtctccaactcccgacctcaggtgatcctcccgcctcggcctcccaaagtgctgggattacaggcgtgagccaccgcacccagcctcctatttgctttaaaagtaatttcctggccggatgcggtggctcacacctgtaatcccagcactttgggaggccaaggcaggtggatcatgaggtcaagagatcaagaccatcctggccaacattgtaaaaccctgtctctactaaaaatataaaaatcagctgggcatggtggcgcacacctgtagtcccagctactcaggaggttgaggcaggagaatcatttgaacccgggaggcagaggttgcggtgagctgagatcgcgccactgcactccagcccggcgacagagcgagaatctgtctc

SEQ ID NO: 115496 - DNA, 1000 bp, Homo Sapiens
agctgcgacgcagacgacgagggcgtgcgcggcacctgcgaagatgcttccctgtgcaagaggtttgcagtaagcattggctactggcatgacccttacatacagcactttgtgagactgtctaaagagaggaaagcccctgaaatcaacagaggatattttgctcgagtccatggtgtcagtcagcttataaaggcatttctacggaagacagaatgtcattgtcaaattgtcaaccttggggcaggcatggataccaccttctggagattaaaggatgaagatcttctcccaagtaaatattttgaggttgactttccaatgattgtcacgagaaagctgcacagtatcaaattgccaacactcctgatagctgaatgtgtgctggtttacatgactccagagcagtccgcaaacctcctgaagtgggcagccaacagttttgagagagccatgttcataaactacgaacaggtgaacatgggtgatcggtttgggcagatcatgattgaaaacctgcggagacgccagtgtgacctggcgggagtggagacctgcaagtcattagagtcacagaaagaacggctcctgtcgaatgggtgggaaacagcatcggccgtcgacatgatggagttgtacaacaggttacctcgagctgaagtgagcaggatagaatcacttgaattcctggatgaaatggagctgctggagcagctcatgcggcattactgcctttgctgggcaaccaaaggaggaaatgagcttgggctgaaggagataacttattaatctgtcgaaggcttatgccgagccagaagccgaagccacttgccctcctggaggagacctgcaagctccctgagcggtgggcgggcctcgtccgcaggtctcatcccacactcttgagaagccttggtcactacagtggtcgcacatgttcctcttcctgttcctgttgacatgtcgttgtttaaataaatctcacttgccaccagtaaaa

SEQ ID NO: 115497 - DNA, 1000 bp, Homo Sapiens
ctaccaaaatccatgcttctcaagtcccttatgtaaaatggtgcagtatttgcatataacctacataccttctcttgtgcaatccctaatataatgtaaatgctatgtaatcgttgttatactgtattgtttttatttgtattatgttttattgtcatattgttattttctctcatctttttcaagtcttttccatccacagttggttgaatttgtggatgtggaacccatggatacagagggccaactgtatttaggataatttcatcacttttaattcaaaccagaatatgtgaataagcagacagaaagaatctttttgatgtcgatgttcaactatttttggcaccatagtagaacatggttgctttctattttttcttgggtatggaggtttcttgaagacctagaacatagaagaatgcctagttaaaaaaaaaaatcaatgaaactacgagttttaggccaaatctgagaaaagaccaaagatgactatgtttgggactgaagtaaacatatcaagttagaactctcatcacatgtttgactcaaattgtggagcaaaatagtaaataaaatataaaaatgaaaatgaagatacgtgaaattcaaatgtcacaacttgcctattatttattttagtgcatttttttgtgcttttcccagtttggtgttaggtggccttaagttctcagtaatgacacttatcaaataggaacttagtgttactcacctttatccattcccccaacactcaacaaattgcctttgctatatccctatgagatgagcagatcaaatattccccgtgagttaatgaaaactgattcaaccaaatggcgaagtcagagactatcgggggccatggagacactctgggccatttttatgaggtagtctaggctcatcttcatgagggaactgaggtcttggggggtgggggttacccaaataggttcacagaagaaccagaaataaaacctgcctttctagactgtaa

SEQ ID NO: 115498 - DNA, 1000 bp, Homo Sapiens
cgagttgatgcaacctggggtattcatgctggatggaaacaacaaccttgaagatgactccagtgtgagcgaagacctagaagtggattggagcctctttgatggatttgcagatgggttaggagtggctgaagccatttcctatgtggaccctcagttcctcacctacatggcacttgaagaacgcctggcccaggcaatggaaactgcccttgcgcacttggagtctctcgcagtggatgtagaggtggccaatccaccagcaagcaaggagagcattgacgctcttcccgagatcctggtcactgaagatcatggcgcagttggtcaggagatgtgctgccccatctgctgtagcgaatatgtgaagggggaggtggcaactgagctgccgtgccaccactatttccacaagccgtgtgtgtccatctggcttcagaagtcaggcacctgccccgtgtgccgctgcatgttccctcccccactctaaagaccaaggccgtttactcctggtctgattattttccccatctgaaatccacaatactgcaggagccctcttgaaattaacaatggaaataaaaccaatcagtcagttagcctaaacctattgattcctcgtgattatttccaatgtgaaaacagttgtgtatgattgcattaaaaatcatatcatcttttagaggttagaaaagggaaaactaaactttctaaatgctacttgagattgcagtaagaagatacgttttctaacctgaaagttaaatcgcatttgttttcttcagtagaatgggaatgtgttgctgttacttgtaatgtcaagtttatctgttaaatatgtccaaaaggcaaaatcatttttgttgcatgttatgggtcgatgttcctgtaattgcagtgccgtaaaagcttattaaagttgttcttttggttttaaaaaaaaaaaaaaaaaaaaaaaaaaaaaaaaaaaaaaaaaaaaaaaaaaaaaaaaaaaaaaaaa

SEQ ID NO: 115499 - DNA, 1000 bp, Homo Sapiens
gtcagttgactggcggctataaacctaacccccaaatctatgtcaagctcatcgaggagtgcaccgacctgcagaaagagggcgagttctccacctgcttcacagaactacagagagacttcctgaagcagcgccccaccaagctcaagagcctcatccgcctagtcaagcactggtaccaaaattgtaagaagaagcttgggaagctgccacctcagtatgccctggagctcctgacggtctatgcttgggagcgagggagcatgaaaacacatttcaacacagcccagggatttcggacggtcttggaattagtcataaactaccagcaactctgcatctactggacaaagtattatgactttaaaaaccccattattgaaaagtacctgagaaggcagctcacgaaacccaggcctgtgatcctggacccggcggaccctacaggaaacttgggtggtggagacccaaagggttggaggcagctggcacaagaggctgaggcctggctgaattacccatgctttaagaattgggatgggtccccagtgagctcctggattctgctgacccagcacactccaggcagcatccaccccacaggcagaagaggactggacctgcaccatcctctgaatgccagtgcatcttgggggaaagggctccagtgttatctggaccagttccttcattttcaggtgggactcttgatccagagaggacaaagctcctcagtgagctggtgtataatccaggacagaacccaggtctcctgactcctggccttctatgccctctatcctatcatagataacattctccacagcctcacttcattccacctattctctgaaaatattccctgagagagaacagagagatttagataagagaatgaaattccagccttgactttcttctgtgcacctgatgggagggtaatgtctaatgtattatcaataacaataaaaataaagcaaataccatttaaaaaaaaaaa

SEQ ID NO: 115500 - DNA, 1000 bp, Homo Sapiens
cctctcccggctgccttcacggactctgtggagaacccgggcagtgcatttgcaccgacggctgggacggggagctctgtgatagagatgttcgggcctgctcctcggccccctgtgccaacaacgggacctgcgtgagcctggacgatggcctctatgaatgctcctgtgcccccgggtactcgggaaaggactgccagaaaaaggacgggccctgtgtgatcaacggctccccctgccagcacggaggcacctgcgtggatgatgagggccgggcctcccatgcctcctgcctgtgcccccctggcttctcaggcaatttctgcgagatcgtggccaacagctgcacccccaacccatgcgagaacgacggcgtctgcactgacattgggggcgacttccgctgccggtgcccagccggcttcatcgacaagacctgcagcagccggagcaccgcatcctgaaggtgtccatgaaagagctcaacaagaaaacccctctcctcaccgagggccaggccatctgcttcaccatcctgggcgtgctcaccagcctggtggtgctgggcactgtgggtatcgtcttcctcaacaagtgcgagacctgggtgtccaacctgcgctacaaccacatgctgcggaagaagaagaacctgctgcttcagtacaacagcggggaggacctggccgtcaacatcatcttccccgagaagatcgacatgaccaccttcagcaaggaggccggcgacgaggagatctaagcagcgttcccacagccccctctagattcttggagttccgcagagcttactatacgcggtctgtcctaatctttgtggtgttcgctatctcttgtgtcaaatctggtgaacgctacgcttacatatattgtctttgtgctgctgtgtgacaaacgcaatgcaaaaacaatcctctttctctctcttaatgcatgatacagaataataataagaatttcatctttaaatgagtaagagaaa

SEQ ID NO: 115501 - DNA, 1000 bp, Homo Sapiens
gaataaagatgaaaatgccatctatttcttgggaaattctcttggccttcaaccaaaaatggttaaaacatatcttgaagaagaactagataagtgggccaaaatagcagcctatggtcatgaagtggggaagcgtccttggattacaggagatgagagtattgtaggccttatgaaggacattgtaggagccaatgagaaagaaatagccctaatgaatgctttgactgtaaatttacatcttctaatgttatcattttttaagcctacgccaaaacgatataaaattcttctagaagccaaagccttcccttctgatcattatgctattgagtcacaactacaacttcacggacttaacattgaagaaagtatgcggatgataaagccaagagagggggaagaaaccttaagaatagaggatatccttgaagtaattgagaaggaaggagactcaattgcagtgatcctgttcagtggggtgcatttttacactggacagcactttaatattcctgccatcacaaaagctggacaagcgaagggttgttatgttggctttgatctagcacatgcagttggaaatgttgaactctacttacatgactggggagttgattttgcctgctggtgttcctacaagtatttaaatgcaggagcaggaggaattgctggtgccttcattcatgaaaagcatgcccatacgattaaacctgcgagatcggagttctttaattaggaatggaatgcaacagatttggacaagtcaaggacaagagctttagagagaccaaagagtttttcactgttaaagtgtccagtatgtagccgagaaccatatggagaacatcaaatacagtggaacaaatgtaactgctattgatgtcacactttgtgaagtagtctttgttgcttaaaaagggtgacatctagtggctaaacatgttatttcaaataaataatatcgaaataaaaaaaaaaaaaaaaaaaaaaaaaaaaa

SEQ ID NO: 115502 - DNA, 1000 bp, Homo Sapiens
gacctgggttggatggcagagaccgctgccatcatcacagacgcctccttcctgtccggcctgagcgcctccctcctggagcggcgtccagccagcccgctgggccctgctgggggcctcccccacgccccccaggacagtgtccccccgagtgactccgcagcttctgacacaactcccctgggggctgcggtaggcgggcctagcccggcctccatggccccaacggaggcgccctcggaggtggggtcctgagccgcacagctgagccgcctctgacccctgctggctgggcctgaccttcccgagcccgtgggggtgggggaggccagccacctccttcctctgggactgcccagcctgtgtcgggggctttcagggtttcgtggggtttgcccggaaggcggctttcctccccctggtgtgaggtcgcgcccgaggcttgtacccgctagtgaggtgtttgagctggtcagcaaggagagggggtggggttccgcggaaggttctggaggggtcttggtaggtctgcagtgaaccgtcctgaggatggagtggggtcccatggtgcaggtctctgagcaaggcggaggtgtggaggagaggccggcttggggtggggcctcgcgccctagtgccggccggcctcagcccggctctgcctggtgctccctgcagtgccttctccatggccccgccctccccgcgtgtgcgccaggcttggggtccccgggagagcagagcttgcgcctcgggcatagggacgtggggtgcaggcgccaacatcagtggcagcagccagggccgtggtccagtcccactcggggatggagtgggccggcggccaaaccagtcactcggggaggaatgcggaggagcgctcattccattctatttaattgcagtgtacaaaattgtgtttgtatatagaataaactgtctgttgacagcggcaaaaaaaaaaaaaaaaaaaaaaaaaaaaaaaaaaaaaaaaaaaaaa

SEQ ID NO: 115503 - DNA, 1000 bp, Homo Sapiens
ccctgcccaccctctggagaaggtgggcactggattagttaacagacaacacgttactagcagtcacttgatctccgtggctttggtttaaaagacacacttgtccacataggtttagagataagagttggctggtcaacttgagcatgttactgacagagggggtattggggttattttctggtaggaatagcatgtcactaaagcaggccttttgatattaaattttttaaaaagcaaaattatagaagtttagattttaatcaaatttgtagggtttctaggtaatttttacagaattgcttgtttgcttcaactgtctcctacctctgctcttggaggagatggggacagggctggagtcaaaacacttgtaattttgtatcttgatgtctttgttaagactgctgaagaattattttttttcttttataataaggaataaaccccacctttattccttcatttcatctaccattttctggttcttgtgttggctgtggcaggccagctgtggttttcttttgccatgacaacttctaattgccatgtacagtatgttcaaagtcaaataactcctcattgtaaacaaactgtgtaactgcccaaagcagcacttataaatcagcctaacataagatctctctgatgtgtttgtgattctttcaaatccctatgtgccattatatttctttatttcctaaaacaggcaaaataagctcaagtttatgtactctgagtttttaaaacactggagtgatgttgctgaccagccgtttcctgtacctctctaagttgggtatttgggacttaagggattaagtttttcacctagacttagttacacacaatcttggcatttcctagcctagaggtttgtagcagggtacaagccccactcctcccccttcctttgctcccctgagtttggttttggcttaccataacattgttttgaccattcctagcctaatacaatagcctaacataatgtaagatt

SEQ ID NO: 115504 - DNA, 1000 bp, Homo Sapiens
gcctgcctttctgcagccggaggtctcgccagccctggactcctgctttgggccacagcaagacctcgggcgagtggagaggcggggccaggccgggcccttgtgggtgctgatgctgcatgttgtccccgacacagcgtcctctccctggtggacatccccagcggtcaggtgcttccccaagggcagtgaggggtgaacatccagggcctacctggctgtgcacgctgcagccacactgtggaagctgcccctccccgaggacccgcctcccttgctgatgccaggatctcggcgcatagaccactctgccccagcggtcgtcacagaaaggtctctctgttcctcacactcagcttcagcataagctgtgaggccagaaaaaaggtcagctcttctagtatcgtgcagtgcttaaaaaccgggagctccagccgggcgcagtggttcatgccagtaatcccagcactttcggaggccgaggtgggaggattgcttgaggccaggagttcaagaccagcctgggcaacacagcaagatcctgtctttgtaaaaaaactaaccaaacaggaaaaactgggagattttctgcagaaattgagttccagcctctctcgaacctgggaagacctggcaggagggggctgggctctcggctacagacttctccccaccccgtaggagctgaacgccaaccatcctgacccgccagtgctcttggtctcctgagtgtacccaggtcctcccaggtgcggtgtgcaccgagcgcgcctggcctgatgccctggcctgtgagctggggactcctgggccctgtgagcccctaggcggcaggcccaggaatggctgggtaggacagggaacacctttgccccacgtctggctgtgacctcggtgaaagccgacaggagagagatgggaccctcctcctcagtagtggctgccagtccctcgttgcaggacagggtcatcataaccataaataacccttcacgtgtca

SEQ ID NO: 115505 - DNA, 1000 bp, Homo Sapiens
ccgcgtccatcctgaggaagtcaccttccacctctacctgatcccaagtgactgctccattcggaaggccatagatgatctagaaatgaaattccagtttgtgcgaatccacaagccacccccgctgaccccactttatatgggctgtcgttacactgtgtctgggtctggttcagggatgctggaaatactccccaaggaactggagctctgctatcgaagccctggagaagaccagctgttctcggagttctacgttggccacttgggatcagggatcaggctgcaagtgaaagacaagaaagatgagactctggtgtgggaggccttggtgaaaccaggaaggaacaccagccagccgtggaacctcaggtgcaacagagacgccaggagatactagtgcccagcagcctgcggcagtaccaatgaagccagagagggcttggtggatgacaaggaggcctgagtagaccgcagactttgttgtcgctgcccggaggagtcgagactggtacccggaggagctgtctcaccaggagaccacgtcctggaagtgtccgggactcgcgggacctgtggctgcagaccccgccggcacgcaggcccagagctggcgcactcctgaggatgagactctgggggccctagccggggtccacgggagggctgtccttggggactctaggatggcttcgttctggcccggctcacttctggagctgtgagacccaagacaaaaggggctgagggatttctcattgacaagagttcgtgcgggaaaaccacctgatccctagggatttgtcatcttaagactcaaaaggcttaataccaggaaccaccttggcaagatatttacccaccggccatctctgtttactcatgaatgttaaatgttaaaacgcagcgctctaaccctgcatattatttacttgcaaatgtctgtaatctgtaattgtgatgcctctgatggaataaattatctttttcagtctcctct

SEQ ID NO: 115506 - DNA, 1000 bp, Homo Sapiens
tagctgggcgtggtggcgggcgcctataatcccagctacttgggaggctgaggcaggagaattgattgaacctgggaggcggaggttgcagtgagccaagatcacgtcattgcactccagcctggtcaacaagagtaaaacttcatctcaaaaaacaaaacaaaacaaaaacaacaacaaaaaacaaaagaaaaacaaacaaaaccaaaaccaaaacagctgtattgaagctgcagtgttgcagctctgtgactgccctgcagagcagggctaccccataggcagcgagcagcagctcagggcagttctgcagtcagatttatacccacttttaattacatgtagattaaggagctgcatatacaaagatttctagggaaggagtagtaacttctgggtcctggggtctttgccacggaacagggcagtatgccagggtgttgccacggcaatggtaaactgacatggcaccctgggggtcatgccttagggaaagccgcttccactcgcccctgttttagctcatcttcaagttagtctggtgtccaagctccaccgcctgcctcagtctggtgacctccttctgtgtctgatgagcatggcagcgttgggaccttccccttccaactctctccctcctcttcgtcctccctaaaggacgggtacgaggaggggctatcacgccagcgacatcctctagcaccacccaggtgtgtggggtggggcaggggggcgacgaagtatccagcccagggccacgtagtcaactgccaagggcttcctgggcttctcttctgccccagagcttgtctccacccagcaggggttcccccagcgctaactgtatccctaaagttctgatgtactttacttttccatcttccttgttgttaacatctaccttctgctctgtaagcaaaactaaatcttctgtgctttgtccataggttgattctacaatctgaaaatcaataaacagcatttgcatgaaaaaaaaaaa

SEQ ID NO: 115507 - DNA, 1000 bp, Homo Sapiens
ctatacagttttatgctttaaaacaaatgataaagttaatttccaattcaatagtgaaatattaacaatctaactatagccagatcaaagacacctgaacacagaaaacctttatttgctggtgctgccattgcacaggctgtacaatgaaatagatttgaaaagctgattgattttcccgcacataaattctggatgtcaatttccaaccaaactccaatacagctatgtggcatgaagagttacaggagggagggaggaaaatagccctatgttagtcatgtttgcatacagaggatcaaagtaggccttcaccataatagttctaattaaaatggtcctcgctgtaggagagacaaaggggcttttcctctagctggtaactattcagatgatggacaagtcttctttcataaaagattacaaagaaggcatccgaatcactgtctgtgatactgggtcacatattaatcactgcagctaattgtaaatctttctatgaaacactgaaaagcctctttgtgaattaatacagttctgcttgatgcacttgatttgaaaagacatttctctgtatgtggcgcatgtcggctttgctttgaaaaataacaaagttagcagaatatgttcaatatattttcttggggaatagggtttttattacatgattcattaaggatttgccttaccctgacatttgtgatataaaggaaaatcagaaaaaaagtaattttcttgatcaagatatgtttttacttaatgcaaataaatgtagtctgttgcttgcaaggaaaaaaaaatggcttctgatatctggtataaactgctaaataggataatacgtgcctcttttgttaaaccggcatttaaatgctggactgcttctaaatctgtttgtttcttttcatctgtgccatacactaaaaaacaactgttgccttcatactatatttgttagagcagaatacaaataaaatttgtttgagaggataatgtgaaa

SEQ ID NO: 115508 - DNA, 1000 bp, Homo Sapiens
gttggctgaaggctttgatgtcagcactgatgtgatccgaagagttttaaaaagcaagtttttacccacattggagcagaagctgaagcaggatcaaaaagtccttaagaaagctgggcttgcccactcgctgcagcacctccggggctctggaaatacctcaaagctgctccctgcaggccactctgtatcaggctctttgcttatgccagggcatgaagcctcatctaaagacccaaatcacagcacagctttgaaagtgatagagtcagacactcacaggacaaatacaccaaggagaaggaagggaagaaataaagaaatccaggacctggaggagagctttgtgcctgttgctgcacccctaggtcatccaagagagctgcagaagtactccagtgattctgagagccccagaggaactggcagtggtgcgttgccaagtggtcagaagctggaggagttgaaggcagaggagccagataacttcagcagcaaagtagtgcagaggggccgagagttctttgacagcaacgggaacttcctgtacagaatttgagtcggggcttggcttatggagatgcctcgtgaaacacagctgggcaagtattaatgtatatggaacagcctggatttctgcatatggataagccaccttggaataggaagaggtgttgagcctggactgtgggaggaaagagctgcgtggatagattcaaacttcctgtggtagtgctcccagtctgacctctgtagaccttcagtactcactcttcttgcttaggctctctgtgtgttgaaagccatcccgtgttgcatgtgttgttacaattttctgtgatacttgcaatttatgtttgagaagaagtgaaaagtttgccttctgacctcatttccttcttgatcagtgaacactaacattttggggacaacttagtcaattggttttccttacaacaaaataaagtaaaatgtagcagtcaaaaaaaaaaaaaaaaaa

SEQ ID NO: 115509 - DNA, 1000 bp, Homo Sapiens
ggtggtgatttggagactcaaatttcctttgccaggtctcttttgtctttctttgggattggtagtatagaagatgctgggaattgtcttcctcgctcagcctcggcttcccgcactgtaagatgaggcagttgcagaggaggcctcggacgtcctgtgaccctcggcccacactcccccttgggtggccctggcagggctggctaggtgcgttccctgcagaccacgggaagccctgtgcttgcctgggtcagggctaagctgtgcgccctagaggagggaggaggactgcagattcttggtcgagaagaatgaagaggatttctgtgtttgctgagcagccattgtggagggttacccgcctccactttcccgttgcccatttcactgccaccagctcctcttcctctgctcgaacctatgagtcccagcctcactggcggcctcagacatgctcaggagtgacggggacagagggaggccgctgagttgcccgttagaactcttactgctgcgccagtgacccaggtggagagggaccctgaaccaaacagaacgtgtgctaattttccgaactccaaactgtacactcatattcatttttaaattgtatttttccaaacttcaaaaaggacgatgagcgtgggggataggaaacaaaacctgtaaacgttgtgaatgggctcagtggactctgggaccaaaccttctgtaatctctaaaacaatgggaccaagagctggatggaacctggagtcaaaaagaactgcttcagtccccgctgtaccgcctgcctagctgtgggagcaggcagggcgcctgggagcctgcgttttctggaccgttccatgggactcatccctacctcacagggctgttgtgaggtgttgtgtgactgcgtgtcctgcaaacgcccagctcggtgcccagccagcggtgggcacccaataaacgctacaacataaatgtgtcttctgcaattaaacacgatttttattca

SEQ ID NO: 115510 - DNA, 1000 bp, Homo Sapiens
ggtcttggccgagaagctctctctcaagccccaccagggccctgtgctgcgctccaactctgttccttaggactggcggctaccccgccactggcctgtacacccacccaagactcctgcaatgcaaaaatgtacacaaaccaagcccgggtgttttctatactctaccagaaacccttcaactacaatctttgcatgaaatgaagaaaaccttttgactgttttttaaaaatcctttttcttttctcaagttctagggggcatttgcacatatatttgtactcaacatttcatgggaaagcggcagacctgagctgaggaacagcgtgggcagggagggaaagacccagggtctggacacttcctccaacacaaaacccttccccacccacctcctgctccctccccctcgcccaccattgtaaaataatcagaaacttgttctattttgtggcagtgacaatagttttatattaaaagaaaaaatacagttttcatacagcaaaatctatacaatatcattgttttatttaatataaagatcgctacccaccttccttccatggttcccaccctccacgttattttccctttctgcagcggttgcactacaggtagctactgtgtattatggacaaatgagaaatgaattctttttctggctgtccatctattttatttcaaataaggaaaagtgtatttggattttgtgtaaatacatctagtgatgacattttttcaatgtttttaaaaaccgtgtacagtactacatgtggtagagcgttttctcaaattgtctattgtagcaaaaatgtttttgtcgtaaacctgttttgtctcctttttttgttctcttgccacttctctcctcttcctcctgcccctggttccctcctctcctcccacccccacaaccagtaccaatgtacatagtaattgtaatgttttagactttacagaaactttcctgtattctgtatataaaaaacaaaaatacttc

SEQ ID NO: 115511 - DNA, 1000 bp, Homo Sapiens
agggcaagagaagggtaaagaacaagagagaccacctgaggcagtgagcaagtttgcaaagcggaacaatgaagaaactgtaatgtcagctagagacaggtacttggccaggcagatggcgcgggttaatgcaaagacctatattgagaaagaagatgattgatggctaccccaagagaaagatttaaggaagcacagaaaactgtaattcctggaacctgctgcgtaaaaccataaaggagtgtgttaccagtagtttggagggcatttttaaatttattttcaaaattttaagttaaaagtcagtcttacagcttggatgtttggatgtggatgtttggctgaatttatatatagtgtgtactcatcaataccacattctttgttgtattcaagaaccgttaagagtgtgctaattccctgtaggtacataatgaggaaaatttgctccactacaaccattaaaaaataattttggccagatacggtagctcgtgcctgtaataccaacattttgggaggccaaggcagaaggatattgaggctaggcattcaagaccagcctaggcaggataataagaccttgtctctatttaaaaaacaaaaagcctagcatggtagtccatgcctgtagtcccagctgttcgagaggctgaggcaagaagatcacttgagcctaggaatttgatgttacagtgaggtatgatcatgccactgcactccaacctgggcaacagaatgagaccctgtctctaaaaaattttttttaaataaataatttaactcttctaataatgttttgttgcaggaaatgtatttcagataaaatatggatttgaaaaacagaaaatatactttatgttctgaaatttgtatttaagtataaaatgtgaatcatcttgtctaaatagcttacagcatagttggcttaaatgaaaataaaatgatatgcttataaaaaaaaaaaaaaaaaaaaaaaaaaaaaaaaaaaaaaaaaaaa

SEQ ID NO: 115512 - DNA, 1000 bp, Homo Sapiens
aatagactcctgggcgggcgcctgagcccccaaaatagatcctcagggcccaaaagcagactcttcggcgggcgccatgggaccggcagaagctgggcgccgcggggccgcctcgcccgtacctccaccgttggtgcgcgtcgcgccctcactcttcctcgggagcgcgcgagccgcgggcgcggaggagcagctggcgcgcgcgggagtcacgctgtgcgtcaacgtctcccgccagcagcccggcccgcgcgcgcccggcgtggcagagctgcgcgtgcccgtgttcgacgacccggctgaggacctgctggcgcacctggagcccacgtgcgccgccatggaggccgcggtgcgcgccggcggcgcctgcctagtctactgcaagaacggccgcagccgctcggccgccgtctgcaccgcgtacctcatgcggcaccgcggcctcagcctggcgaaggccttccagatggtgaagagcgctcgcccggtagcagaaccgaacccgggcttctggtctcagctccagaagtatgaggaggccctccaggcccagtcctgcctgcagggagagcccccagccttagggttgggccctgaggcttgaagcttgaaggcctgctgcctggaggaaggatgtccctgcactgatacagaagctgtttctggcaaagcctgccgtgtcttacatttgtctctctatccggattagatgttgctatatgaacacatcgggactgtgtctgcaggaaggagctccccattcgaggccttcacagtgtcacccacattcacctctttccacttaaacgtgtcccatgaatcttgtcataacagttttgtgttccttaactattttgtctgccatgtcatttatgatgtatataacctctttaatgcctgaaatcataagaataatcatcaaaggcaagagggttgtatattttcccgttggagacacatctggaatttgctgcaataaaataataataagaaagca

SEQ ID NO: 115513 - DNA, 1000 bp, Homo Sapiens
tagaagagaatgagtgggtggtagactatgctctgaaaaagaggaatgtgcgactggtgcccacgggcctagactttggccaggaaggttttacccgctttcgagaaaggcgcttccaccccagtctgcgttctacccgacgcttctaccctcatacccacaatatggatgggttcttcattgccaagttcaagaaattttccaattctatccctcagtcccagacaggaaattctgaaacagccacacctacaaatgtagacttgcctcaggtcatccccaagtctgagaacagcagccagccagccaagaaagccaagggggctgcaaagacaaagcagcagctgcagaaacagcaacatcccaagaaggcctccttccagaagctgaatggcatctccaaaggggcagactcagaattgtccactgtaccttctgtcacaaagacccaagcttcctccagcttccaggatagcagtcagccagctggaaaagccgaagggatcagggagccaaaggtgactgggaagctaaagcaacgatcacctaaattacagtcctccaagaaagttgctttcctcaggcagaatgcccctcccaagggcacagacacacaaacaccggctgtgttatccccatccaagactcaggccaccctgaaacctaaggaccatcatcagccccttggaagggccaagggggttgagaagcagcagttgccagagcagccttttgagaaagctgccttccagaaacagaatgatacccccaaggggcctcagcctcccactgtgtctcccatccgttccagccgccccccaccagcaaagaggaagaaatctcagtccaggggcaacagccagctgctgctatcttagatggttgaaaactagacgggtggctcactgccattgtcaccaggttggaactcttgcctctgtgaggatgccttctctactgtgcatacccatgaaatttaatacacattttaaaacctctg

SEQ ID NO: 115514 - DNA, 1000 bp, Homo Sapiens
tacctcacaaccagtcctgtctgtttatagtgctggtagtatcaccttttgccagaaggcctggctggctgtgacttaccatagcagtgacaatggcagtcttggctttaaagtgaggggtgaccctttagtgagcttagcacagcgggattaaacagtcctttaaccagcacagccagttaaaagatgcagcctcactgcttcaacgcagattttaatgtttacttaaatataaacctggcactttacaaacaaataaacattgttttgtactcacggcggcgataatagcttgatttatttggtttctacaccaaatacattctcctgaccactaatgggagccaattcacaattcactaagtgactaaagtaagttaaacttgtgtagactaagcatgtaatttttaagttttattttaatgaattaaaatatttgttaaccaactttaaagtcagtcctgtgtatacctagatattagtcagttggtgccagatagaagacaggttgtgtttttatcctgtggcttgtgtagtgtcctgggattctctgccccctctgagtagagtgttgtgggataaaggaatctctcagggcaaggagcttcttaagttaaatcactagaaatttaggggtgatctgggccttcatatgtgtgagaagccgtttcattttatttctcactgtattttcctcaacgtctggttgatgagaaaaaattcttgaagagttttcatatgtgggagctaaggtagtattgtaaaatttcaagtcatccttaaacaaaatgatccacctaagatcttgcccctgttaagtggtgaaatcaactagaggtggttcctacaagttgttcattctagttttgtttggtgtaagtaggttgtgtgagttaattcatttatatttactatgtctgttaaatcagaaattttttattatctatgttcttctagattttacctgtagttcataaaaaaaaaaaaaaaaaaaaaaaaa

SEQ ID NO: 115515 - DNA, 1000 bp, Homo Sapiens
ggagaactaagagaccaacaggaacaagtcaaagaagacatggagaccaaatgcttcatctgtgggataggcaatgattacttcgacacagtgccacatggctttgaaacccacactttacaggagcacaacttggctaattacttgttttttctgatgtatcttataaacaaagatgaaacagaacacacaggacaggaatcttatgtctggaagatgtatcaagaaaggtgttgggaatttttcccagcaggggattgcttccggaaacagtatgaagaccagctaaattaaactcagacccaatcacctctaaaaaccaaaaccctacccctctctctccctctctcaatttctctgctctcttggaaacattttgctgattttgtgaattgccagcgatgtgtgttttctgggagcatcgaagctctgtttcggaagagctgtttcctccccccaccttttgtatttactttgagactaaagactgaagaataatctaaattcatactcagacaaaaaaaggaattctggaaagaaaaccattctggacactgtcataacacacatagatagattttcttctgagactcccggagtcttctcgagctacgagaccttcacagagacacgtggcagccacactcacccagcctctttatttcaccatcctggaaggaaactgtctgtctaatggtcacagagcactgtagcacttaacagattgccatggacaccagttgcgaagggaaatagtgccttactatatgtgggttgagctatgcagaagatacgtgcatgaaaaaacatctttattttctttatgtcgacctttcttttcttagattgattttgtgaggttttttttttttcctttagtcttttctttagtgggggagggtaagaaaagcagtttgcacttaaaaagaaaaaaaaaaaacgggtggtgtgtctcaggacaaaaggaggctcttctcattcagctaaattcacatttgcc

SEQ ID NO: 115516 - DNA, 1000 bp, Homo Sapiens
aggctggacagctactgccagatgccaaagataggagaaagtgccagccctgaagctggagccgtttgtgaataaactgttcttcatcattgacactggagaaaggtgtcctccatgccctcaggcagcagagaactggcccagggcccttggagtgttggtggagatcagagtgccgtggtggaggtctgggactatgtcagagtgtcctcactttggggcatgggtgggcccaggagatggatttagttattcaattttgtggatgaataaattgaggcacagaaagattaagttaccggcccaaggtgacacagtgaggaggtggcagagctaggatttgaacccagacaatctgactccatgattttgcatccaattcgtgtctgtgccttttaaagggtgaggtctgtgtcactttgggtggggagggggagcatggtgggccatgctctgggcagctgttccaagacagagctgacccttccattaccaatggcctgtccctcaccaacaagccaactgccacagatgacccacttcataccacattcacatctttccacctgaaatggctaacaggtattaaatccttggttggtgtttaaagccaacccaagaacagggtgttaggtactgttttaagcacctagataggttagcataggggactgcaaatggtgttccgcaaagcaaatcctgtttttgaccatgaactaagaattttattttattttattttttattttttgtagaaataggatctcactatgttgcccaggctgttcttgaactcctggcctcaaatgatcttcccacttcagcctcccaaagtgcagggattacaggcacaagccaccgtgcccagccaagaatttttatttttgcttttaaatagcaaaagaagaagattctgtgactcatgaaaatgatatgagattcgaattccagtgtctataaataaagttttattggtacacagcaaaaaaaaaaaaaaaaa

SEQ ID NO: 115517 - DNA, 1000 bp, Homo Sapiens
agctggtgtggtcaacacagtcttcaccttggtctcggtgttgttggtggagcgggcggggcgccggacgctccatctcctgggcctggcgggcatgtgtggctgtgccatcctgatgactgtggctctgctcctgctggagcgagttccagccatgagctacgtctccattgtggccatctttggcttcgtggcattttttgagattggccctggccccattccttggttcatcgtggccgagctcttcagccagggaccccgcccggcagccatggctgtggctggtttctccaactggacgagcaacttcatcattggcatgggtttccagtatgttgcggaggctatggggccctacgtcttccttctatttgcggtcctcctgctgggcttcttcatcttcaccttcttaagagtacctgaaactcgaggccggacgtttgaccagatctcagctgccttccaccggacaccctctcttttagagcaggaggtgaaacccagcacagaacttgagtatttagggccagatgagaacgactgaggggccaggcaggggtgggagagccagctctctctacccggcccagagaccccttcctttcctctgcagcactttaaccctctcttccctattatttccgggtggaaaagaatccctgcagcctggtagaattgggaagctgggggaagggtggtctgagcaccccctcattcccctcgtgtgactctcttggattatttatgtgttgtggtttggccgtggccatcagggtgggccactctcccctccctcttccttcccccatcccctttcctccccaccttccccagactcagctccagaataccttcttcgctgctagagaagggggattggagggaagacaggtctagactttctcagtgggacaaaccagagcagagagcaggacaggagacaagaaatccagtttcccaccaccttggactcctcccacaatctgggactttcact

SEQ ID NO: 115518 - DNA, 1000 bp, Homo Sapiens
ggtgcctgtcttggcagaaaactacaataagagcgataattgtgaggatacaccagaggcagggtattttgctgtagcagtggtgaagaaatcagcttctgacctcacctgggacaatctgaaaggcaagaagtcctgccatacggcagttggcagaaccgctggctggaacatccccatgggcctgctctacaataagatcaaccactgcagatttgatgaatttttcagtgaaggttgtgcccctgggtctaagaaagactccagtctctgtaagctgtgtatgggctcaggcctaaacctgtgtgaacccaacaacaaagagggatactacggctacacaggcgctttcaggtgtctggttgagaagggagatgtggcctttgtgaaacaccagactgtcccacagaacactgggggaaaaaaccctgatccatgggctaagaatctgaatgaaaaagactatgagttgctgtgccttgatggtaccaggaaacctgtggaggagtatgcgaactgccacctggccagagccccgaatcacgctgtggtcacacggaaagataaggaagcttgcgtccacaagatattacgtcaacagcagcacctatttggaagcaacgtaactgactgctcgggcaacttttgtttgttccggtcggaaaccaaggaccttctgttcagagatgacacagtatgtttggccaaacttcatgacagaaacacatatgaaaaatacttaggagaagaatatgtcaaggctgttggtaacctgagaaaatgctccacctcatcactcctggaagcctgcactttccgtagaccttaaaatctcagaggtagggctgccaccaaggtgaagatgggaacgcagatgatccatgagtttgccctggtttcactggcccaagtggtttgtgctaaccacgtctgtcttcacagctctgtgttgccatgtgtgctgaacaaaaaataaaaattattattgattttatatttc

SEQ ID NO: 115519 - DNA, 1000 bp, Homo Sapiens
ttctcggagatcttcaaaaaggagcacccggaccgcttcatcgagtgctacattgctgagcagaacatggtgagcatcgcggtgggctgtgccacccgcaacaggacggtgcccttctgcagcacttttgcagccttcttcacgcgggcctttgaccagattcgcatggccgccatctccgagagcaacattaacctctgcggctcccactgcggcgtttccatcggggaagacgggccctcccagatggccctagaagatctggctatgtttcggtcagtccccacatcaactgtcttttacccaagtgatggcgttgctacagagaaggcagtggaactagccgccaatacaaagggtatctgcttcatccggaccagccgcccagaaaatgccatcatctataacaacaatgaggacttccaggtcggacaagccaaggtggtcctgaagagcaaggatgaccaggtgaccgttatcggggctggggtgaccctgcacgaggccttggccgctgccgaactgctgaagaaagaaaagatcaacatccgcgtgctggaccccttcaccatcaagcccctggacagaaaactcattctcgacagcgctcgtgccaccaagggcaggatcctcaccgtggaggaccattattatgaaggtggcattggtgaggctgtgtccagtgcagtagtgggcgagcctggcatcactgtcacccacctggcagttaaccgggtaccaagaagtgggaagccggctgagctgctgaagatgtttggtatcgacagggatgccattgcacaagctgtgaggggcctcatcaccaaggcctagggcgggtatgaagtgtggggcgggggtctatacattcctgagattctgggaaaggtgctcaaagatgtactgagaggaggggtaaatatatgttttgagaaaaatgaaaaaaaaaaaaaaaaaaaaaaaaaaaaaaaaaaaaaaaaaaaaaaaaaaaaaaaaaaaa

SEQ ID NO: 115520 - DNA, 1000 bp, Homo Sapiens
agggggctgaccccatccttgcgacagccctcgcctccgaccccatccccaacccccttcagaagtgggaggacagcgcccacaagccacagagcctagacactgatgaccccgcgacgctgtacgccgtggtggagaacgtgcccccgttgcgctggaaggaattcgtgcggcgcctagggctgagcgaccacgagatcgatcggctggagctgcagaacgggcgctgcctgcgcgaggcgcaatacagcatgctggcgacctggaggcggcgcacgccgcggcgcgaggccacgctggagctgctgggacgcgtgctccgcgacatggacctgctgggctgcctggaggacatcgaggaggcgctttgcggccccgccgccctcccgcccgcgcccagtcttctcagatgaggctgcgcccctgcgggcagctctaaggaccgtcctgcgagatcgccttccaaccccacttttttctggaaaggaggggtcctgcaggggcaagcaggagctagcagccgcctacttggtgctaacccctcgatgtacatagcttttctcagctgcctgcgcgccgccgacagtcagcgctgtgcgcgcggagagaggtgcgccgtgggctcaagagcctgagtgggtggtttgcgaggatgagggacgctatgcctcatgcccgttttgggtgtcctcaccagcaaggctgctcgggggcccctggttcgtccctgagcctttttcacagtgcataagcagttttttttgtttttgttttgttttgttttgtttttaaatcaatcatgttacactaatagaaacttggcactcctgtgccctctgcctggacaagcacatagcaagctgaactgtcctaaggcaggggcgagcacggaacaatggggccttcagctggagctgtggacttttgtacatacactaaaattctgaagttaaagctctgctcttggaaaaaaaaaaaaaaaaaaaaaaaaaaaaaaaaa

SEQ ID NO: 115521 - DNA, 1000 bp, Homo Sapiens
tgacgcagaatgcagactgtgtggtggtgctggacaacacagccctgaaccggattgccacagaccgcctgcacatccagaacccatccttctcccagatcaaccagctggtgtctaccatcatgtcagccagcaccaccaccctgcgctaccctggctacatgaacaatgacctcatcggcctcatcgcctcgctcattcccaccccacggctccacttcctcatgaccggctacacccctctcactacggaccagtcagtggccagcgtgaggaagaccacggtcctggatgtcatgaggcggctgctgcagcccaagaacgtgatggtgtccacaggccgagaccgccagaccaaccactgctacatcgccatcctcaacatcatccagggagaggtggaccccacccaggtccacaagagcttgcagaggatccgggaacgcaagttggccaacttcatcccgtggggccccgccagcatccaggtggccctgtcgaggaagtctccctacctgccctcggcccaccgggtcagcgggctcatgatggccaaccacaccagcatctcctcgctcttcgagagaacctgtcgccagtatgacaagctgcgtaagcgggaggccttcctggagcagttccgcaaggaggacatgttcaaggacaactttgatgagatggacacatccagggagattgtgcagcagctcatcgatgagtaccatgcggccacacggccagactacatctcctggggcacccaggagcagtgagtcccccaggacagggaccctcatctgccttactggttggcccaagccctgcctgactgaccaccccctcagagcacagatcagggacctcacgcatctctttctcatatacatggactctctgttggcctgcaaacacatttacttctcctcttatgagactatttatctttaataaagcactggatataaaaaaaaaaaaaaaaaaaaaaaaaaaaaaaaaaaaa

SEQ ID NO: 115522 - DNA, 1000 bp, Homo Sapiens
cggctcctggccacttccagatacgacacggagcacctgcaccccgacctctggcagatcttcgacaaccccgtcgactggaaggagcagtacatccacgagaactacagccgggccctggaaggggaaggaatcgtggagcagccatgcccggacgtgtactggttcccactgctgtcagaacaaatgtgtgatgagctggtggcagagatggagcactacggccagtggtcaggcggccggcatgaggattcaaggctggctggaggctacgagaatgtgcccaccgtggacatccacatgaagcaggtggggtacgaggaccagtggctgcagctgctgcggacgtatgtgggccccatgaccgagagcctgtttcccggttaccacaccaaggcgcgggcggtgatgaactttgtggttcgctaccggccagacgagcagccgtctctgcggccacaccacgactcatccaccttcaccctcaacgttgccctcaaccacaagggcctggactatgagggaggtggctgccgcttcctgcgctacgactgtgtgatctcctccccgaggaagggctgggcactcctgcaccccggccgcctcacccactaccacgaggggctgccaacgacctggggcacacgctacatcatggtgtcctttgtcgacccctgacactcaaccactctgccaaacctgccctgccattgtgcctttttagggggcctggcccccgtcctgggagttgggggatgggtctctctgtctccccacttcctgagttcatgttccgcgtgcctgaactgaatatgtcaccttgctcccaagacacggccctctcaggaagctcccggagtccccgcctctctcctccgcccacaggggttcgtgggcacagggcttctggggactccccgcgtgataaattattaatgttccgcagtctcactctgaataaaggacagtttgtaagtcttgaaaaaaaaaaaaaaaaaaa

SEQ ID NO: 115523 - DNA, 1000 bp, Homo Sapiens
tgaagaatggaactagggggaaaatcacagatctgatcaaggaccttgactcgcagacaatgatggtcctggtgaattacatcttctttaaagccaaatgggagatgccctttgacccccaagatactcatcagtcaaggttctacttgagcaagaaaaagtgggtaatggtgcccatgatgagtttgcatcacctgactataccttacttccgggacgaggagctgtcctgcaccgtggtggagctgaagtacacaggcaatgccagcgcactcttcatcctccctgatcaagacaagatggaggaagtggaagccatgctgctcccagagaccctgaagcggtggagagactctctggagttcagagagataggtgagctctacctgccaaagttttccatctcgagggactataacctgaacgacatacttctccagctgggcattgaggaagccttcaccagcaaggctgacctgtcagggatcacaggggccaggaacctagcagtctcccaggtggtccataaggctgtgcttgatgtatttgaggagggcacagaagcatctgctgccacagcagtcaaaatcaccctcctttctgcattagtggagacaaggaccattgtgcgtttcaacaggcccttcctgatgatcattgtccctacagacacccagaacatcttcttcatgagcaaagtcaccaatcccaagcaagcctagagcttgccatcaagcagtggggctctcagtaaggaacttggaatgcaagctggatgcctgggtctctgggcacagcctggcccctgtgcaccgagtggccatggcatgtgtggccctgtctgcttatccttggaaggtgacagcgattccctgtgtagctctcacatgcacaggggcccatggactcttcagtctggagggtcctgggcctcctgacagcaataaataatttcgttggaaaaaaaaaaaaaaaaaaaaaaaaaaaaaaaaaaaaaaaa

SEQ ID NO: 115524 - DNA, 1000 bp, Homo Sapiens
aggagctgtattctcaatcctatgatgctgttggggtgatgtttgcctccatcccaggatttgcggacttttactctcagactgaaatgaataaccagggagtggaatgcctgcgcttgctcaatgagatcattgctgacttcgatgagttgcttggtgaagaccgatttcaagacattgaaaagattaagaccattggcagcacctacatggccgtgtcaggcctgtcacctgaaaaacagcaatgtgaagacaagtggggacatttgtgtgctctggctgacttctcactcgccctgacagaaagcatacaggagatcaacaagcattcattcaacaattttgaactccggattggcatcagccacggctcagtggtagctggcgttatcggcgctaagaaaccacagtatgacatttggggcaaaactgtgaacctggcaagccgaatggacagcacgggggttagtggccggatccaagtcccagaggagacctatctcatcctgaaggaccagggctttgcctttgattaccgaggggagatctatgtgaagggtatcagtgaacaggaaggaaaaatcaaaacgtactttcttctgggaagagtccaacccaacccattcatcttgcccccaagaagactgcctgggcagtactccctggccgcggttgtcctgggacttgtccagtccctcaataggcaaaggcagaagcagctactcaatgagaacaacaacacaggaatcatcaagggtcattacaaccggcggactttgttgtcacccagcggcacagagcctggagcccaggctgaaggcaccgacaaatctgatttgccataaaagcattttctttctgtttttttttttttttgtatttcttttatatataaaataaatatactaataaaaaggtttaattttttttagaacaaaaaaaaaaaaaaaaaaaaaaaaaaaaaaaaaaaaaaaaaaaaaaccccaaaaaaaaaaaaaaa

SEQ ID NO: 115525 - DNA, 1000 bp, Homo Sapiens
cacacttcttccccatcaagcccatttccttccccaaccacaaaggtgtttgtgattcctcaccccgggaaaccaaggagctgcaaagtggagtctggttcagccccgtgcagactcacccagagcttaacgttgtctttcaaacaccctgagccttcctaaacagccagtgcagacgttctctctgggccacgaagcccctcgggtcctccccgtcccctgctccgatgcatacctcagtgcagaaccacagaatctctgcagcggaaacgccgtgcatctcttgtctgttggcagcgagcacatcgtgctggagacacgagtttctaagcagctggcacgagggctgctgacggcatgggtcgtgcttcagggtggcaatacctcttaggaacttagggcaggaagcaatacttcagcattgaatgtgtgtaaatagttgctttgagttgcaattgctattttcttctcagtcccagctcagatcgaattatatatccatatatatatatatatatatatatatatatatatatatatatatatggtaaacaagcacacacaattttatccaatgcaaacaaatgtagagcatcagttacaaaaccctcgaatagcttgagagccccacaggctctgccacacccgtgacttcatccacactgacgtcacccgcgggggctccccctgcacatttgcacacgatccggagagccgaaggccgcgtgcttcctgtcacatgggctgtaatcatttgtagtttccaaagacacgtctgcatttgaatttctagattttcgaggtaaggagttttttttaattggttgtttggaaaatcacatcatgcctagaatctgaaattgaattagcaagaaccgactgtttgcattttccatatatccttttatctgctctttttaaattgttaattctaataatttcaaaatgcattcactgaagaaatggacattaaaatattctaaaatttaaataaaaaaaa

SEQ ID NO: 115526 - DNA, 1000 bp, Homo Sapiens
cgacctgctgttcatcttctgcttcctgccagagacgctgcccctggagaaacgggcgccctctatcgccctggggttccgtgatgcggctgatctgctcagccccctggccctgctgcgcttctcggctgtcgctcgtggccaggacccaccctctggagacaggctcagcagcctgcgccgcctgggcctagtctacttcctctacctcttcctgttctcgggcctggagtacacgctgagcttcctcacacaccagcgcttccagttcagtagcctacagcaggggaagatgtttttcctcatcggcctcaccatggccaccatccagggtgcctatgcccggcggatccaccctggcggggaagttgctgccgtgaagcgggccctcctgctgctggtgcccgccttcctcctcatcggctggggacgttctctgcccgtgctgggcctggggctgctgctctactcctttgccgccgccgttgtggtgccctgcctgtcctccgtggtcgctggctatggctcaccagggcagaagggcacggtcatgggtacactgcgcagcctaggtgctctggccagggccgcggggcccctggtggccgcttcagtgtactggctggccggggcccaggcctgcttcaccacgtggtccgggctctttttgctccccttcttcctcctgcagaagctgagttacccggcacagacgctcaaggctgagtagctgagccactgtgcccaggctgtgggcaccaggcagagtgggagcctaggtcaggcccctgcccactgcctgacccccaccccccgccagtccagggagaccctgtgggtgggggccggcccctaagcaggaagctcaggcagctcctccagacttacttactccttcagtgactccgagctgcagcactccaaggctgtcagggcttctgtttgttttttaaactatgcaccaggtttctgatgatgaaataaagcacctgtttgtttt

SEQ ID NO: 115527 - DNA, 1000 bp, Homo Sapiens
caggataagctctacctctcatgggtagagtggaaaaggagcattggatatgatgatactgatgagtcccactgtgctgagcacattgagtcacgtactcttgcaattgcccgcaacctgactcagcagctccagaccacgtgccacaccctcctgtccaacatccaaggtgtaccacagaacatccaagatcaagccaagcacatgggggtgatggcaggcgacatctactcagtgttccgcaatgctgcctcctttaaagaagtgtctgacagcctcctcacttctagcaaggggcagctgcagaaaatgaaggaatctttagatgacgtgatggattatcttgttaacaacacgcccctcaactggctggtaggtcccttttatcctcagctgactgagtctcagaatgctcaggaccaaggtgcagagatggacaagagcagccaggagacccagcgatctgagcataaaactcattaaacctgcccctatcactagtgcatgctgtggccagacagatgacaccttttgttatgttgaaattaacttgctaggcaaccctaaattgggaagcaagtagctagtataaaggccctcaattgtagttgtttccagctgaattaagagctttaaagtttctggcattagcagatgatttctgttcacctggtaagaaaagaatgataggcttgtcagagcctatagccagaactcagaaaaaattcaaatgcacttatgttctcattctatggccattgtgttgcctctgttactgtttgtattgaataaaaacatcttcatgtgggctggggtagaaactggtgtctgctctggtgtgatctgaaaaggcgtcttcactgctttatctcatgatgcttgcttgtaaaacttgattttagtttttcatttctcaaataggaatactacctttgaattcaataaaattcactgcaggatagaccagttaaaaaaaaaaaaaaaaaaaaaaaaaaaaaaa

SEQ ID NO: 115528 - DNA, 1000 bp, Homo Sapiens
aagccctacagttgtttccagtcttttcagatggatgcctactgtggagattaactttggcatattccagtgtcagctttctttagctggaattgccaaatcatttgttgctcctgctgctctcatggtgccacgttttttttttcaatgtttagtaatagtataatccatgttgtttgatatcaaaagtagaattacttttaatgtagtttttcttcattattgtcattgcgtgttcttaagttttacccctattagatggtaagaacaattaatgcagttttgcacaaatatttttacattctgatcattcagttctgtcattgtaatctttgttgttagaaacaaatgatgaaaacataggggttctgtaaacttttgtaatgctatgaattctgtttaaattttgggctgtctattttctgctgaaaccatgcaaaattgagctttggtggggctgggagggggttatgtattcatgggacctttaatttgtacagaacacagaacttatttctgtcagttatttaatacattgaaaatttagtgaaatgttcaaagagaatagatgtttcccaaaacaacaatctttatgttaaaaatagtcattaaaagatctgttgtaatatatggtggatatttttctttaatttcaaacattacctctgaaatgtgtatcttttcttttttatcttaccattaattttaaatctagtggattggttttcaacatcgtgcctgccgatatgcctacagaatcatctgtaagtgtcaaaatgaacccacgttgttagccataattttgattatgcctttatttctcctttcttgaaaaaaaaaaggtgttattttgacaattaggcataacattgttttgtagattatcttttaatgaactattttaaatgttaaattaggtgccacttaaatttattttattacaccatgaatagctgattaaaagaaccaaatatttctagtaaaaaaaaaaaaaaaaaaa

SEQ ID NO: 115529 - DNA, 1000 bp, Homo Sapiens
ccaaggatgactcagcactgccgctcaacagacatgactcagggatggcttagtactgcccctcagcagggatgactcagcagggatgactcagcaccacccctcaacagggatgactcagcagggatgactcagcactgcccctcaacagggatgactgcagggatgactcagcactgcccctcagcagggatgactcagcactgcccctcagcagggatgactcagcagggatgactcagcaccgcccctcaacaggcatgactctgcagagatgactcagcactgcccctcagcagggatggctcagcagggatgactcagcattgcccctcaacagggatgactcagcagactcagcagggatgactcagcactgcccctcaacagacatgactcagcagggatgactcagcaccgcccctcagcaaggatgactcagcagggatgattcagcagagataactcggggatgactctgattgtccttcagcagggatgagtctgttttgctccgatggaagcatctgtagtgtccatcagcaggtgaatggccaaagtggtatatactgtagtcacattcagctataaaaaggaataaagtatcgatgcatgccacaacatgggtgaacctagaaaatactgatctaaatgcaagaagccaggcacaaaaggccacatagtatatgttcccatttatgtgaaatgtgcagaataataataaaaatgtatagaatagcaaatctgtagggacagacatgaggtgagtggttgccagaagtggaaatgggagttaactataaattgcacagggtaccttacagagatgatggaaatgtcctaaaactagattatggcaatagttgcactacgtgatcagtttattaaaaatcgttgatgtgtgtgtgtaaaatgggtggattttatggtttataaattataccttaataaaggttaacaaaaaatgtggctaaaaaaaaaaaaaaaaaaaaaaaaaaaa

SEQ ID NO: 115530 - DNA, 1000 bp, Homo Sapiens
gttgtggaagcatgtagactgtgccagaggccagacccacgggctcatgcacccctgagccagcagggcatcttggaaaaggaactcttggttcgatacctggagcagaggaggggaaagtccagggctatagggtgtgatgaagtcacccctttctgtcccactacatctgggactgactttccgagcctccagtccaaagccggcttgatttccgtgaactctggtgctcctgcatctcatgagtgtgccccatgggtcccctcccctctcagcatttccttgtcccgtctggacctggggagtggttaggcagcaagctttggtttatggttttcattcattggtgaagtaaattaggcagtgctaaagcctgtgggtttggtccttgaacaagatgtgggccttgcaagatgggagagtaaaccttgaagggctttattaaagaaataaaaaagaacttttgtatcttttatcctgggagcactgcgttttcctagctgtgttattcctggtttaattcagcagagaaggtaaggtgtgaacctacctgccttggagagggcccaggtcccaaatctcttcaaattcttcacatgtttaactttaaggatttgaaccatgaagtcataggttacagacctcagttttatgccccattggattacttttttttttttttttttttttttttttttactctttgaaagctttgttttgtggtagtccttttgggaagaatccagtattatctacaattattggcaaagtttaaatgtattttacataacggaaagtttttagaatgttgaaaagtaattgaaaaaggtgataggtaaatttttaggcaaagataatttatttcaataaatctttcaaaagccttaccttgaaatgctgttagtaaatttctgtgatttttttttttaatttgttttgctgagagcatagctatttgtttttattgtaaaacaataataataataaaaagcaaactcta

SEQ ID NO: 115531 - DNA, 1000 bp, Homo Sapiens
tcaggggagaaaaattggcaaaactattatatgtaagggaaatatatacaaaaagaaaattaatcatagtcacctgactaagaaattctgactgctagttgccataaataactcaatggaaatattcctatgggataatgtattttaagtgaatttttggggtgcttgaagttactgcattattttatcaagaagtcttctctgcctgtaagtgtccaaggttatgacagtaaacagtttttattaaaacatgagtcactatgggatgagaaaattgaaataaagctactgggcctcctctcataaaagagacagttgttggcaaggtagcaataccagtttcaaacttggtgacttgatccactatgccttaatggtttcctccatttgagaaaataaagctattcacattgttaagaaaaatactttttaaagtttaccatcaagtcttttttatatttatgtgtctgtattctacccctttttgccttacaagtgatatttgcaggtattataccatttttctattcttggtggcttcttcatagcaggtaagcctctccttctaaaaacttctcaactgttttcatttaagggaaagaaaatgagtattttgtccttttgtgttcctacagacactttcttaaaccagtttttggataaagaatactatttccaaactcatattacaaaaacaaaataaaataataaaaaaagaaagcatgatatttactgttttgttgtctgggtttgagaaatgaaatattgtttccaattatttataataaatcagtataaaatgttttatgattgttatgtgtattatgtaatacgtacatgtttatggcaatttaacatgtgtattcttttaattgtttcagaataggataattaggtattcgaattttgtctttaaaattcatgtggtttctatgcaaagttcttcatatcatcacaacattatttgatttaaataaaattgaaagtaatatttgtgcaa

SEQ ID NO: 115532 - DNA, 1000 bp, Homo Sapiens
agagatcaaggcctactgtgacatggaagctggaggaggcgggtggacaattattcagcgacgtgaggatggcagcgttgattttcagaggacttggaaagaatataaagtgggatttggtaacccttcaggagaatattggctgggaaatgagtttgtttcgcaactgactaatcagcaacgctatgtgcttaaaatacaccttaaagactgggaagggaatgaggcttactcattgtatgaacatttctatctctcaagtgaagaactcaattataggattcaccttaaaggacttacagggacagccggcaaaataagcagcatcagccaaccaggaaatgattttagcacaaaggatggagacaacgacaaatgtatttgcaaatgttcacaaatgctaacaggaggctggtggtttgatgcatgtggtccttccaacttgaacggaatgtactatccacagaggcagaacacaaataagttcaacggcattaaatggtactactggaaaggctcaggctattcgctcaaggccacaaccatgatgatccgaccagcagatttctaaacatcccagtccacctgaggaactgtctcgaactattttcaaagacttaagcccagtgcactgaaagtcacggctgcgcactgtgtcctcttccaccacagagggcgtgtgctcggtgctgacgggacccacatgctccagattagagcctgtaaactttatcacttaaacttgcatcacttaacggaccaaagcaagaccctaaacatccataattgtgattagacagaacacctatgcaaagatgaacccgaggctgagaatcagactgacagtttacagacgctgctgtcacaaccaagaatgttatgtgcaagtttatcagtaaataactggaaaacagaacacttatgttatacaatacagatcatcttggaactgcattcttctgagcactgtttatacactgtgtaaatacccatatgtcct

SEQ ID NO: 115533 - DNA, 1000 bp, Homo Sapiens
aaacactatttgtttcttttttaaaacatcgatagttttgctgtaaataataacactgtataaattctaacagaaaaatagaataaaatgttgataaggcactgcctcttagaacacaaacagaatattgcaaatgcatttaacaaataggggtctcaagtgacttcaccctagaagaggagggagggattctgggtgggggtgactcttcactgattcttgtatattagcaattataatgtttgtatatgcaaaactgctagcttgattttaaaaaaaaacaaatctttaaaatctgctgcaaatttaaataattcccaaaatgaggaattctgtagttctgtgaaaaatttttttcttcagaatactaatattttgatgcatgtgtatcaccttattttgattaaatcttttccaattttgcaaacactacagtatactgcaacacaaaagattttatctgtaaacacaaagcccttcatctaatatttgttgctattgccaatttttcaatgaaatgacctaaaaacaacaaaaaaaaataacctatacggtagttgctttagggggtggggggatgctatctgttagtgcttaaaagggggtaaatgcttgccgctttagaggtggatggtgctcataaaaggccccagtcgggggtatttaaaaaggactgaacagaaatccttagctagtagaatggcagcacgctgtaaaattattactgtattgtgtactggctataagatgtagacacctttcagtaagccaatcatttgtaaccattctagcagtgtcatattaggttaataaggctgctgtgttttaaagggcatttttatttgggttttggtgaaattctttaatttgttgattatattcacataaaatcagcattcattgacacatagctctaatgacatatgtatgaaaaaccatacactggatgacctagtcgattatttaagcataaaataaattgtgttaaactcttcaccta

SEQ ID NO: 115534 - DNA, 1000 bp, Homo Sapiens
tgcggtccaccgtctactgcaacgctatcgcccagggcggggaggaggagtgggacttcgcctgggagcagttccgaaatgccacactggtcaatgaggctgacaagctccgggcagccctggcctgcagcaaagagttgtggatcctgaacaggtacctgagctacaccctgaacccggacttaatccggaagcaggacgccacctctaccatcatcagcattaccaacaacgtcattgggcaaggtctggtctgggactttgtccagagcaactggaagaagctttttaacgattatggtggtggctcgttctccttctccaacctcatccaggcagtgacacgacgattctccaccgagtatgagctgcagcagctggagcagttcaagaaggacaacgaggaaacaggcttcggctcaggcacccgggccctggagcaagccctggagaagacgaaagccaacatcaagtgggtgaaggagaacaaggaggtggtgctccagtggttcacagaaaacagcaaatagtccccagcccttgaagtcacccggccccgatgcaaggtgcccacatgtgtccatcccagcggctggtgcagggcctccattcctggagcccgaggcaccagtgtcctcccctcaaggacaaagtctccagcccacgttctctctgcctgtgagccagtctagttcctgatgacccaggctgcctgagcacctcccagcccctgcccctcatgccaaccccgccctaggcctggcatggcacctgtcgcccagtgccctggggctgatctcagggaagcccagctccagggccagatgagcagaagctctcgatggacaatgaacggccttgctgggggccgccctgtaccctctttcacctttccctaaagaccctaaatctgaggaatcaacagggcagcagatctgtatatttttttctaagagaaaatgtaaataaaggatttctagatgaaaaaaaaaaaaaaaaa

SEQ ID NO: 115535 - DNA, 1000 bp, Homo Sapiens
gggtactaccagcggatgttggtggttctccttcaggctaacagagaccctgatgctggaattgatgaagctcaagttgaacaagatgctcaggctttatttcaggctggagaacttaaatgggggacagatgaagaaaagtttatcaccatctttggaacacgaagtgtgtctcatttgagaaaggtgtttgacaagtacatgactatatcaggatttcaaattgaggaaaccattgaccgcgagacttctggcaatttagagcaactactccttgctgttgtgaaatctattcgaagtatacctgcctaccttgcagagaccctctattatgctatgaagggagctgggacagatgatcataccctcatcagagtcatggtttccaggagtgagattgatctgtttaacatcaggaaggagtttaggaagaattttgccacctctctttattccatgattaagggagatacatctggggactataagaaagctcttctgctgctctgtggagaagatgactaacgtgtcacggggaagagctccctgctgtgtgcctgcaccaccccactgccttccttcagcacctttagctgcatttgtatgccagtgcttaacacattgccttattcatactagcatgctcatgaccaacacatacacgtcatagaagaaaatagtggtgcttctttctgatctctagtggagatctctttgactgctgtagtactaaagtgtacttaatgttactaagtttaatgcctggccattttccatttatatatattttttaagaggctagagtgcttttagccttttttaaaaactccatttatattacatttgtaaccatgatactttaattagaagcttagccttgaaattgtgaactcttggaaatgttattagtgaagttcgcaactaaactaaacctgtaaaattatgatgattgtattcaaaagattaatgaaaaataaacatttctgtccccctgaattat

SEQ ID NO: 115536 - DNA, 1000 bp, Homo Sapiens
tttcctcagctgagagctaccatggaggcttattctaggatggctaatcgagacttgttaagcagtgtgagccgtgagttttccggatatgtagaaagtggtttgaagaccatcttgcagtgtgccctgaaccgccctgccttctttgctgagaggctctactatgctatgaaaggtgctggcacagatgactccaccctggtccggattgtggtcactcgaagtgagattgaccttgtacaaataaaacagatgttcgctcagatgtatcagaagactctgggcacaatgattgcaggtgacacgagtggagattaccgaagacttcttctggctattgtgggccagtaggagggatttttttttttttaatgaaaaaaaaatttctattcatagcttatccttcagagcaatgacctgcatgcagcaatatcaaacatcagctaaccgaaagagctttctgtcaaggaccgtatcagggtaatgtgcttggtttgcacatgttgttattgccttaattctaattttattttgttctctacatacaatcaatgtaaagccatatcacaatgatacagtaatattgcaatgtttgtaaaccttcattcttactagtttcattctaatcaagatgtcaaattgaataaaaatcacagcaatctctgattctgtgtaataatattgaataattttttagaaggttactgaaagctctgccttccggaatccctctaagtctgcttgatagagtggatagtatgttaaaactgtgtactttaaaaaaaaattcaacctttacatctagaataatttgcatctcattttgcctaaattggttctgtattcataaacactttccacatagaaaatagattagtattacctgtggcaccttttaagaaagggtcaaatgtttatatgcttaagatacatagcctccctttttttcgcgttgtttcctttttttaaattgagttatgacaaataaaaaattgcatat

SEQ ID NO: 115537 - DNA, 1000 bp, Homo Sapiens
ggaccactctaaacttgtggatgtccctttccaagtggaattcccagcgcctaagaatgagttggtccagaagttccaagtctattacctggggaatgtacctgttgctaaacctgttggggtagatgtgattaatggggccctcgagtcagtcctgtcctccagcagccgtgaacaatggaccccaagtcatgtcagtgtggcccctgctaccctcaccatcttgcaccagcagacagaggcagtgctgggagagtgtcgggtgcgtttcctctccttcctggccgtgggcagagatgtccacacgtttgcattcatcatggctgccggcccagcctccttctgctgccacatgttctggtgcgagcccaatgctgccagcctctcagaggctgtgcaggctgcgtgcatgcttcgctaccagaagtgtctggatgcccgttcccaggcctccacctcctgcctcccagcaccccctgctgagtctgtggcacggcgtgtagggtggactgtccgcaggggtgttcagtcgctgtggggctccctgaagcccaaacggctgggggcccataccccatgaagaagcccccaccttccctccacctgcttgtgttgggccccagggaactaaagggtgtgggtcagggaggggtctagaggctattcctaggcctcaggcctcccaaatatgcccctccccagtagctacggttccctgcctaggagctggggagggagagatctaatcccttcaaggaagtgataacactggagtggtaacaagaggagcaggaagcaaggccagccctggttctccatccccatgtgtttcaggtggaacaggaggaactggtccaggccaggcctcatcctcctggacccagcaggggcagaaggaggaagggactggtccaggcatgggtcccttccccctgctccatgggcacctctgctgtattgatatcactaataaagtctgtctgcactgcaaaaaaaaaaa

SEQ ID NO: 115538 - DNA, 1000 bp, Homo Sapiens
aaatggcatcagatgatttgtcattaattcggaagaacagaatggctctctttcaacaattgacatgtgtgcttcctatcctggataatcttttaaaggccaatgtaattaataaacaggaacatgatattattaaacaaaaaacacagatacctttacaagcgagagaactgattgataccattttggttaaaggaaatgctgcggccaacatcttcaaaaactgtctaaaagaaattgactctacattgtataagaacttatttgtggataagaatatgaagtatattccaacagaagatgtttcaggtctgtcactggaagaacaattgaggaggttgcaagaagaacgaacttgtaaagtgtgtatggacaaagaagtttctgttgtatttattccttgtggtcatctggtagtatgccaggaatgtgccccttctctaagaaaatgccctatttgcaggggtataatcaagggtactgttcgtacatttctctcttaaagaaaaatagtctatattttaacctgcataaaaaggtctttaaaatattgttgaacacttgaagccatctaaagtaaaaagggaattatgagtttttcaattagtaacattcatgttctagtctgctttggtactaataatcttgtttctgaaaagatggtatcatatatttaatcttaatctgtttatttacaagggaagatttatgtttggtgaactatattagtatgtatgtgtacctaagggagtagtgtcactgcttgttatgcatcatttcaggagttactggatttgttgttctttcagaaagctttgaatactaaattatagtgtagaaaagaactggaaaccaggaactctggagttcatcagagttatggtgccgaattgtctttggtgcttttcacttgtgttttaaaataaggatttttctcttatttctccccctagtttgtgagaaacatctcaataaagtgctttaaaaagaaaaaaaaaaa

SEQ ID NO: 115539 - DNA, 1000 bp, Homo Sapiens
tatcagcactggatcttgttgaagtcaatcctcagttggccacctcagaggaagaggcgaagactacagctaacctggcagtagatgtgattgcttcaagctttggtcagacaagagaaggagggcatattgtctatgaccaacttcctactcccagttcaccagatgaatcagaaaatcaagcacgtgtgagaatttaggagacactgtgcactgacatgtttcacaacaggcattccagaattatgaggcattgaggggatagatgaatactaaatggttgtctgggtcaatactgccttaatgagaacatttacacattctcacaattgtaaagtttcccctctattttggtgaccaatactactgtaaatgtatttggttttttgcagttcacagggtattaatatgctacagtactatgtaaatttaaagaagtcataaacagcatttattaccttggtatatcatactggtcttgttgctgttgttccttcacatttaagtggtttttcatctttcctccctcctcccacagcctggctatacagtgcatccttgaactgtcagcccacagcagcaatatgcttattctatccacatccctaacatcatgcattcacaaggtcaaagttctggtccacaaacccttccctatagaagttcaatggctgcgaaagaatttgtagtaaaccaggcctcccaggatggcgagctccagtaagatgataatggaaagcagcagcttgttggttgtcactctacaaagagaagcaaagtggggagtagtcagaagtttggataaccttccttctaaacattttggggttagacctgggaccacggctggatactctgaggctgtatgtttgatcacacagccacttagcaggaagtactcataaggttctttagctgtcacttagggataacactgtctacctcacagaaatgttaaactgagacaataaaaaccaaagcataaaaatggattctgaaa

SEQ ID NO: 115540 - DNA, 1000 bp, Homo Sapiens
tggacaaagatgatgagagtctaattaagtacaagaaaacgctgctgggagatggtcctgtggtgacagatccgaaagcccccaatgtcgttgtcacccggctcaccctggtttgtgagagtgccccgggaccaatcaccatggaccttactggagatctggaagccctcaaaaaggaaaccattgtgttaaaggaaggttctgaatatagagtcaaaattcacttcaaagtgaacagggatattgtgtcaggcctgaaatacgttcagcacacctacaggactggggtgaaagtggataaagcaacatttatggttggcagctatggacctcggcctgaggagtatgagttcctcactccagttgaggaggctcccaagggcatgctggcgcgaggcacgtaccacaacaagtccttcttcaccgacgatgacaagcaagaccacctcagctgggagtggaacctgtcgattaagaaggagtggacagaatgaatgcatccacccctttccccacccttgccacctggaagaattctctcaggcgtgttcagcaccctgtccctcctccctgtccacagctgggtccctcttcaacactgccacatttccttattgatgcatcttttcccaccctgtcactcaacgtggtccctagaacaagaggcttaaaaccgggctttcacccaacctgctccctctgatcctccatcagggccagatcttccacgtctccatctcagtacacaatcatttaatatttccctgtcttacccctattcaagcaactagaggccagaaaatgggcaaattatcactaacaggtctttgactcaggttccagtagttcattctaatgcctagattcttttgtggttgttgctggcccaatgagtccctagtcacatcccctgccagagggagttcttcttttgtgagagacactgtaaacgacacaagagaacaagaataaaacaataactgtgtgtgttctggctgag

SEQ ID NO: 115541 - DNA, 1000 bp, Homo Sapiens
gactctcacccttcttgctcattctccagcacccattcctactttagtctctttgaaatcttttttggagattttccttcagctacaaatgttccagtacaaccaatattactcctgaggggcaaagactttttcatatttatgtccctagtatctggtatggcgcctggcatatggcatttcagaatatgttcatagttgaaacagtaggatagatatttgtcatcttgacaagtagccctttgcaatttatacttgagttcactcctggtcaatggcacatggctggaaaatgcagaaagcaagttcacttacagcctgaggcttataaagcttgtacagctgcctcccggcagtccaggaaaactgcaaaaaatgggaagtaaggtcctggcaggcagacccggcatgtagccgctggccatcttgaatcctagggcatgaagttgccccaaagttcagcacttggttaagcctgatccctctggtttatcacaaagaataggatgggataaagaaagtggacacttaaataagctataaattatatggtccttgtctagcaggagacaactgcacaggtatactaccagcgtttggatattgatatatacatggcaaatctgaatattgttttatgagaggcctggcaatgggtaaaacaccaaacttgaaatcagaacataggtgcaaatggccactcctgtagtttcttttctgtaaaatgggatctggacgaatgataccaaacgtttctttctaacattgtattttataactctggcctatgattgtgttgtgtcttgcattaaaaaaaaaaatttgagagtggtagaattacttctgttatctgaaatacctgagatgcactttaaactgttgaaatgtaagctctgagggcagggaccgtatcttatttactgttagtatccgttgcatctagtgtggtgcacctggcacacagtaggcactcaataaatatgtattgattaaaaacaaa

SEQ ID NO: 115542 - DNA, 1000 bp, Homo Sapiens
agtccacagcaatggctccgtcgcctacttcaatgcttcccaggtcacagggcccagcatctactccttccactgcgagtatgtcagcagcctgagcaagaagggtagtctcctcgtggcccgcacgcagccctctccctggcagatgatgcttcaggacttccagatccaggctttcaacgtaatgggggagcagttctcctacgccagcgactgtgccagcttcttctcccccggcatctggatggggctgctcacctccctgttcatgctcttcatcttcacctatggcctgcacatgatcctcagcctcaagaccatggatcgctttgatgaccacaagggccccactatttctttgacccagattgtgtgaccctgtgccagtgggggggttgagggtgggacggtgtccgtgttgttgctttcccaccctgcagcgcactggactgaagagcttccctcttcctactgcagcatgaactgcaagctcccctcagcccatcttgctccctcttcagcccgctgaggagctttcttgggctgcccccatctctcccaacaaggtgtacatattctgcgtagatgctagaccaaccagcttcccagggttcgtcgctgtgaggcgtaagggacatgaattctagggtctcctttctccttatttattcttgtggctacatcatccctggctgtggatagtgcttttgtgtagcaaatgctccctccttaaggttatagggctccctgagtttgggagtgtggaagtactacttaactgtctgtcctgcttggctgtcgttatcgttttctggtgatgttgtgctaacaataagcagtacacgggtttatttctgtggcctgagaaggaagggacctccacgacaggtgggctgggtgcgatcgccggctgtttggcatgttcccaccgggagtgccgggcaggagcatggggtgcttggttgtttccttcctaataaaataaacgcgggtcgccatg

SEQ ID NO: 115543 - DNA, 1000 bp, Homo Sapiens
tcagcccatgggactctggagacaggtggaaggaatggaggattggaagcaggacagccaacttcagaaggccagggaggacatctttatggagaccctgaaagacatcgtggagtattacaacgacagtaacgggtctcacgtattgcagggaaggtttggttgtgagatcgagaataacagaagcagcggagcattctggaaatattactatgatggaaaggactacattgaattcaacaaagaaatcccagcctgggtccccttcgacccagcagcccagataaccaagcagaagtgggaggcagaaccagtctacgtgcagcgggccaaggcttacctggaggaggagtgccctgcgactctgcggaaatacctgaaatacagcaaaaatatcctggaccggcaagatcctccctctgtggtggtcaccagccaccaggccccaggagaaaagaagaaactgaagtgcctggcctacgacttctacccagggaaaattgatgtgcactggactcgggccggcgaggtgcaggagcctgagttacggggagatgttcttcacaatggaaatggcacttaccagtcctgggtggtggtggcagtgcccccgcaggacacagccccctactcctgccacgtgcagcacagcagcctggcccagcccctcgtggtgccctgggaggccagctaggaagcaagggttggaggcaatgtgggatctcagacccagtagctgcccttcctgcctgatgtgggagctgaaccacagaaatcacagtcaatggatccacaaggcctgaggagcagtgtggggggacagacaggaggtggatttggagaccgaagactgggatgcctgtcttgagtagacttggacccaaaaaatcatctcaccttgagcccacccccaccccattgtctaatctgtagaagctaataaataatcatccctccttgcctagcataaaaaaaaaaaaaaaaaaaaaaaaaaaaaaaa

SEQ ID NO: 115544 - DNA, 1000 bp, Homo Sapiens
agctgtgcctacgactatctggaggtgcgcgacgggcacagtgagagcagcaccctcatcgggcgctactgtggctatgagaagcctgatgacatcaagagcacgtccagccgcctctggctcaagttcgtctctgacgggtccattaacaaagcgggctttgccgtcaactttttcaaagaggtggacgagtgctctcggcccaaccgcgggggctgtgagcagcggtgcctcaacaccctgggcagctacaagtgcagctgtgaccccgggtacgagctggccccagacaagcgccgctgtgaggctgcttgtggcggattcctcaccaagctcaacggctccatcaccagcccgggctggcccaaggagtacccccccaacaagaactgcatctggcagctggtggcccccacccagtaccgcatctccctgcagtttgacttctttgagacagagggcaatgatgtgtgcaagtacgacttcgtggaggtgcgcagtggactcacagctgactccaagctgcatggcaagttctgtggttctgagaagcccgaggtcatcacctcccagtacaacaacatgcgcgtggagttcaagtccgacaacaccgtgtccaaaaagggcttcaaggcccacttcttctcagaaaagaggccagctctgcagccccctcggggacgcccccaccagctcaaattccgagtgcagaaaagaaaccggaccccccagtgaggcctgccaggcctcccggaccccttgttactcaggaacctcaccttggacggaatgggatgggggcttcggtgcccaccaaccccccacctccactctgccattccggcccacctccctctggccggacagaactggtgctctcttctccccactgtgcccgtccgcggaccggggacccttccccgtgccctaccccctcccattttgatggtgtctgtgacatttcctgttgtgaagtaaaagagggacccctgcgtcctgc

SEQ ID NO: 115545 - DNA, 1000 bp, Homo Sapiens
gcccccctacatgctagacctgtatcgcaggcactcaggtcagccgggctcacccgccccagaccaccggttggagagggcagccagccgagccaacactgtgcgcagcttccaccatgaagaatctttggaagaactaccagaaacgagtgggaaaacaacccggagattcttctttaatttaagttctatccccacggaggagtttatcacctcagcagagcttcaggttttccgagaacagatgcaagatgctttaggaaacaatagcagtttccatcaccgaattaatatttatgaaatcataaaacctgcaacagccaactcgaaattccccgtgaccagacttttggacaccaggttggtgaatcagaatgcaagcaggtgggaaagttttgatgtcacccccgctgtgatgcggtggactgcacagggacacgccaaccatggattcgtggtggaagtggcccacttggaggagaaacaaggtgtctccaagagacatgttaggataagcaggtctttgcaccaagatgaacacagctggtcacagataaggccattgctagtaacttttggccatgatggaaaagggcatcctctccacaaaagagaaaaacgtcaagccaaacacaaacagcggaaacgccttaagtccagctgtaagagacaccctttgtacgtggacttcagtgacgtggggtggaatgactggattgtggctcccccggggtatcacgccttttactgccacggagaatgcccttttcctctggctgatcatctgaactccactaatcatgccattgttcagacgttggtcaactctgttaactctaagattcctaaggcatgctgtgtcccgacagaactcagtgctatctcgatgctgtaccttgacgagaatgaaaaggttgtattaaagaactatcaggacatggttgtggagggttgtgggtgtcgctagtacagcaaaattaaatacataaatatatatata

SEQ ID NO: 115546 - DNA, 1000 bp, Homo Sapiens
ctgtatttatcacattgtcaaacagaatttttctttgaatcagacaagttcaagctctaaattgatgtgctatatacttaaaatcctaggaagttatctgtaaccagtctcttgtctcaggctcttcaccttgttaccaatcctcgtaagtatgtaaaggaaacatatttttaaagaagcttaacagtaagaaaaaattactaaaagatgcaattcaaagataggtcccagtttaacactgaattgcttgacttctgtggcttttctttttctggccacatttatttatttaagcaatttttgtatgccttgttatttcatttccatagagattatattgtatcagtgtttatgtaagctggaatcatcctcagttttttgctgataatttttcaaataaagatacatggataattgtaaaatacactaactcttagggtgttgtagtagctgaaacatggagatgcgtagctgtcatgctttttctgaatggacaggagaaacataagctacggagtattcacttctgaggatgcttttccggaaaaagaaaggctagaaaatactcgcacttcctcagaaccctctttcttgttaacgggtatcttttgttggtgtgttttgctcttacattacagatagactatcatatatgactttatgaataatttcagttattttgcttttgtataagctgtctgaagccttgctatgctgtataagttgtgtttgatggatcagtgtgagtataaaataaagcaaatcacttttcttttgtattatctatggatgccactatgaaagctgacattaagccactaaagagttttctatgaataagtgtaagtaaatgctttgatatatataaacctaaataaaaagattgtattgatacagagacattggagaaggagattttaaggcagttctttaggtttaaaaaggcttgctgtaaaatggtgcgttattccgtttattaaagatcatattaatgacaata

SEQ ID NO: 115547 - DNA, 1000 bp, Homo Sapiens
ggcatcccggccttgccattagcatgcctcatgcatcatcagatgacaaggacaaccctcatgacgaagcaacatgaattagggggcctcttggccttggtccaaaattgtcaatcagaaatgaacataaaggactccagagcagtgggactgtctgtcaaaagactctgtatatcttttgtggatgagttttgtgagagaacagagagaccattgtacctggcacaagggctgttcatgaaaagggagacttactgggaggtgcaagacagtggcatttctcctctcctcttgctgctcagcacagccctggattgcagccccgaggctgagaccagacaaagcccgggaggcagaaagatgctccaagaaccaacactatcaatgtctttgcaaatcctcacaggattcctgtgggtccagctttggaactgggaaacctttcttcggatccgcactcattccactgatgccagctgcccctgaaggatgccagtactgtggtgtgtgagtctcagcagccgcccacacgctcctaactctgctgcatggcagatgcctaggtggaaatagcaaaaacaaggcccaggctggggccagggccagaggggaaggccctggattctcactcatgtgagatcttgaatctctttctttgttctgtttgtttagttagtatcatctggtaaaatagttaaaaaacaacaaaaaactctgtatctgtttctagcatgtgctgcattgactctattaatcacatttcaaattcaccctacattcctctcctcttcactagcctctctgaaggtgtcctggccagccctggagaagcactggtgtctgcagcacccctcagttcctgtgcctcagcccacaggccactgtgataatggtctgtttagcacttctgtatttattgtaagaatgattataatgaagatacacactgtaactacaagaaattataaatgtttttcacatcaaaaaaaaaaaaaaaaaa

SEQ ID NO: 115548 - DNA, 1000 bp, Homo Sapiens
cccttctgggatgaagaccaacacagactctatcagcagatcaaggctggagcttatgattttccatcaccagaatgggacacggtgactcctgaagccaaagacctcatcaataaaatgcttactatcaaccctgccaaacgcatcacagcctcagaggcactgaagcacccatggatctgtcaacgttctactgttgcttccatgatgcacagacaggagactgtagactgcttgaagaaatttaatgctagaagaaaactaaagggtgccatcttgacaactatgctggctacaaggaatttctcagcagccaagagtttgttgaagaaaccagatggagtaaaggagtcaactgagagttcaaatacaacaattgaggatgaagatgtgaaagcacgaaagcaagagattatcaaagtcactgaacaactgatcgaagctatcaacaatggggactttgaagcctacacaaaaatctgtgacccaggccttactgcttttgaacctgaagctttgggtaatttagtggaagggatggattttcaccgattctactttgaaaatgctttgtccaaaagcaataaaccaatccacactattattctaaaccctcatgtacatctggtaggggatgatgccgcctgcatagcatatattaggctcacacagtacatggatggcagtggaatgccaaagacaatgcagtcagaagagactcgtgtgtggcaccgccgggatggaaagtggcagaatgttcattttcatcgctcggggtcaccaacagtacccatcaagccaccctgtattccaaatgggaaagaaaacttctcaggaggcacctctttgtggcaaaacatctaaggcctgaaaaccattcacatatgggtcttctaaatttcaacagtgccacttctgcattctctgttctcaaggcacctggatggtgaccctgggccgtcctctcctcctcttcatgcatgtttctgagtgcatgaag

SEQ ID NO: 115549 - DNA, 1000 bp, Homo Sapiens
ggagtgaggcagtgggagaagaggtggtggtcgtttctatgcattcaggctgcctttggggctgcctcccttcttattcttccttgctgcacgtccatctcttttcctgtctttgagattgacctgactgctctggcaagaagaagaggtgtccttacagaggcctctttactgaccaactgaagtatagacttactgctggacaatctgcatgggcatcacccctccccgcatgtaacccaaaagaggtgtccagagccaaggcttctaccttcattgtccctctctgtgctcaaggagttccattccaggaggaagagatctataccctaagcagatagcaaagaagataatggaggagcaattggtcatggccttggtttccctcaaaacaacgctgcagatttatctgcacaaacatctccacttttgggggaaaggtgggtagattccagttccctggactaccttcaggaggcacgagagctgggagaagaggcaaagctacaggtttacttgggagccagctgagaagagagcagactcacaggtgctggtgcttggatttagccaggctcctccgagcacctcatgcatgtcccagcccctgggccctagccctttcctgccctgcagtctgcagtgccagcacgcaaatcccttcaccacagggtttcgttttgctggcttgaagacaaatggtcttagaattcattgagacccatagcttcatatggctgctccagccccacttcttagcattcttactcctcttctggggctaatgtcagcatctatagacaatagactattaaaaaatcaccttttaaacaagaaacggaaggcatttgatgcagaatttttgcatgacaacatagaaataatttaaaaatagtgtttgttctgaatgttggtagacccttcatagctttgttacaatgaaaccttgaactgaaaatatttaataaaataacctttaaacagtcaaaaaaaaaaaaaa

SEQ ID NO: 115550 - DNA, 1000 bp, Homo Sapiens
aatgtaaacctaaagtgggttacatgaagaaacagccagacatcactaacagtatgagagctatcctcgtggactggttagttgaagtaggagaagaatataaactacagaatgagaccctgcatttggctgtgaactacattgataggttcctgtcttccatgtcagtgctgagaggaaaacttcagcttgtgggcactgctgctatgctgttagcctcaaagtttgaagaaatataccccccagaagtagcagagtttgtgtacattacagatgatacctacaccaagaaacaagttctgagaatggagcatctagttttgaaagtccttacttttgacttagctgctccaacagtaaatcagtttcttacccaatactttctgcatcagcagcctgcaaactgcaaagttgaaagtttagcaatgtttttgggagaattaagtttgatagatgctgacccatacctcaagtatttgccatcagttattgctggagctgcctttcatttagcactctacacagtcacgggacaaagctggcctgaatcattaatacgaaagactggatataccctggaaagtcttaagccttgtctcatggaccttcaccagacctacctcaaagcaccacagcatgcacaacagtcaataagagaaaagtacaaaaattcaaagtatcatggtgtttctctcctcaacccaccagagacactaaatctgtaacaatgaaagactgcctttgttttctaagatgtaaatcactcaaagtatatggtgtacagtttttaacttaggttttaattttacaatcatttctgaatacagaagttgtggccaagtacaaattatggtatctattactttttaaatggttttaatttgtatatcttttgtatatgtatctgtcttagatatttggctaattttaagtggttttgttaaagtattaatgatgccagctgtcaggataataaattgatttggaaaacttaaaaaaa

SEQ ID NO: 115551 - DNA, 1000 bp, Homo Sapiens
tcagcctcttccagtcacatctggccagagggctgtctggacctgggccctgctcaatgccacctgtctgcctgggctccaagtgggcaggaccaggacagaaccacaggcacacactgagggggcagtgtggctccctgcctgtcccatccccatgccccgtccgcggggctgtggctgctgctgtgcatgtccctgcgatgggagtcttgtctcccagcctgtcagtttcctccccagggcagagctccccttcctgcaagagtctgggaggcggtgcaggctgtcctggctgctctggggaagccgagggacagccataacacccccgggacagtaggtctgggcggcaccactgggaactctggacttgagtgtgtttgctcttccttgggtatgaatgtgtgagttcacccagaggcctgctctcctcacacattgtgtggtttggggttaatgatggagggagacacctcttcatagacggcaggtgcccacctttcagggagtctcccagcatgggcggatgccgggcatgagctgctgtaaactatttgtggctgtgctgcttgagtgacgtctctgtcgtgtgggtgccaagtgcttgtgtagaaactgtgttctgagcccccttttctggacaccaactgtgtcctgtgaatgtatcgctactgtgagctgttcccgcctagccagggccatgtcttaggtgcagctgtgccacgggtcagctgagccacagtcccagaaccaagctctcggtgtctcgggccaccatccgcccacctcgggctgaccccacctcctccatggacagtgtgagccccgggccgtgcatcctgctcagtgtggcgtcagtgtcggggctgagccccttgagctgcttcagtgaatgtacagtgcccggcacgagctgaacctcatgtgttccactcccaataaaaggttgacaggggcttctccttcaaaaaaaaaaaaaaaaaaaaaaaaaaaaaaaaaa

SEQ ID NO: 115552 - DNA, 1000 bp, Homo Sapiens
ctacctgagctacatggcggtggagtacaatgtgtccttcccccacgcagcaaagtggacattctcggctcagaatgcatcccttcgagatctccaagcacccctggggcagagcttcagttgcagcaactcgagcatcattctttcaccagctgtccacctcgacctgctctccctgaggctccaggctgctcagctgccccacacaggggtctttgggcaaagtttctcctgccccagtgaccggtccatcttgctgcctctcatcatcggcctgatccttcttggcctcctcgccctggtgcttattgctttctgcatcatccggagacgcccatccgcctaccaggccctctgagcatttgcttcaaaccccagggcactgagggggtttggggtgtggtgggggggtacccttatttcctcgacacgccgctggctcaaagacaatgttattttccttccctttcttgaagaacaaaaagaaagccgggcatgacggctcatgcctgtaatcccagcactttgggaggctgaggcaggtggatcactggaggtcaggtctttgaggccagccctagccaacatggtgtaaacactgtctctactaaaaatacaattagccaggtgtggcggcgtaatcccatgctaacctgtaatcccagctacttgggaggctgaggcagagctgcttgaaccctggaagtggaggttgcagtgagcctgtcatcgctccactgagccaagatcgctcccactgcactccagcctgggcgacagagccagactgtctcaaataaataaatatgagataatgcagtcgggagaagggagggagagaattttattaaatgtgacgaactgcccccccccccccccccagcaggagagcagcaaaatttatgtaaatctttgacggggttttccttgctcctgccaggattaaaagtccatgagtttcttgctcaaaaaaaaaaaaaaaaaaaaaaaaaaaaaaaaa

SEQ ID NO: 115553 - DNA, 1000 bp, Homo Sapiens
atgaccttctacatcacccttatgaaccatctggaaataaaaaaggcaaaactgtagggtttggtaccaataattcagagcacattacctatctggaacataatccttatgaaaagttctccaaagaagagctgaaaaaggcccaggatgttttggtgcaggagatggaagtggttaaacaaggaatgagccatggagagctctcaagtgaagcttataaccaggtgtgggaagaatgctacagtcaagttttatatcttcctgggcagagccgctacacacgggccaatctggctagtaaaaaggacagaattgaatcacttgaaaagaggctcgagataaacaggggtcacatgacgacagaagccaagagggctgcaaagatggaaaagaagatgaaaattttgcttgggggttaccagtctcgtgctatggggctcatgaaacagttgaatgacttatgggaccaaattgaacaggctcacttggagttacgcacttttgaagaactcaagaaacatgaagattctgctattccccggaggctagagtgtctaaaagaagacgttcagcgacaacaagaaagagaaaaggaacttcaacatagatatgctgatttgctgctggagaaagagactttaaagtcaaaattctgaagtacagtttatattctgtcacaggattaattaattgccggttttcatactctagaaggctgaaactgatgtttatcttcattgacaaatttacccaccatctgtggtttttcagttgtttattttaaatgatatcgatcttacacattctgtgtataaagaccttaactccacaggacggacattttagagtttaaattattaaggctatcattcttttagtaatgtcatatttgcaaacttttttagttttggcctttaatttaaaaagcctaattttaaagtgctgcctttgagtaactcttgaataaaaacaaaatataaaaaattgaaaaaaaaaaaaa

SEQ ID NO: 115554 - DNA, 1000 bp, Homo Sapiens
agttctgggaatgtactggccgtggcactggacaacagtgtgtacctgtggagtgcaagctctggtgacatcctgcagcttttgcaaatggagcagcctggggaatatatatcctctgtggcctggatcaaagagggcaactacttggctgtgggcaccagcagtgctgaggtgcagctatgggatgtgcagcagcagaaacggcttcgaaatatgaccagtcactctgcccgagtgggctccctaagctggaacagctatatcctgtccagtggttcacgttctggccacatccaccaccatgatgttcgggtagcagaacaccatgtggccacactgagtggccacagccaggaagtgtgtgggctgcgctgggccccagatggacgacatttggccagtggtggtaatgataacttggtcaatgtgtggcctagtgctcctggagagggtggctgggttcctctgcagacattcacccagcatcaaggggctgtcaaggccgtagcatggtgtccctggcagtccaatgtcctggcaacaggagggggcaccagtgatcgacacattcgcatctggaatgtgtgctctggggcctgtctgagtgccgtggatgcccattcccaggtgtgctccatcctctggtctccccattacaaggagctcatctcaggccatggctttgcacagaaccagctagttatttggaagtacccaaccatggccaaggtggctgaactcaaaggtcacacatcccgggtcctgagtctgaccatgagcccagatggggccacagtggcatccgcagcagcagatgagaccctgaggctatggcgctgttttgagttggaccctgcgcggcggcgggagcgggagaaggccagtgcagccaaaagcagcctcatccaccaaggcatccgctgaagaccaacccatcacctcagttgttttttatttttctaataaagtcatgtctcccttcatgtttttttttttaaaa

SEQ ID NO: 115555 - DNA, 1000 bp, Homo Sapiens
aaaaatataagtctgctttacaagaacttgaagaattgaaacaaattgttcccaaagaatccctcgtttacttcttaataggaaaggtttacaagaagttaggtcaaacgcacctcgccctgatgaatttctcttgggctatggatttagatcctaaaggagccaataaccagattaaagaggcaattgataagcgttatcttccagatgatgaggagccaataacccaagaagaacagatcatgggaacagatgaatcccaggagagcagcatgacagatgcggatgacacacaacttcatgcagctgaaagtgatgaattttaacttctggaaatcagacttttacaactggatgtgtgactagtgctgacgtgtttcttgtccctctgtatactgagtctttactcttgagctggcggtgtcatcgtccgtcacttataccatgagtgtgccactttcattggaccctgactgtatacagaatgaaaggcagtgcaatatttagctgctaacaagactggctcttttaccagtatgaatgacaatttatggggggtagggtggggaactttcttttctgtttttctttaatctccctttgttggaaagtatcatgaaggaagagttatgctttatcttgaaggaaccattagatatggaaaatagtgatgaaccagagtttcttggttgctttttcaaaaatttgtttttatttggttctgttccagataaacagagtaactgaccttcatttctaggttcttcaagaatggtgtttgcaagtgccagatggaacaataaaagacgttgcctataacagtgacttgattgccaaggaatgtaaattaccttaaacttcgatgatctcccataaacaaatgtaatgggcatattgggactcgtatgtaggaatcaaatatccctccatacagtgtactcttattcttggcaagaatgctttaatgtataaccaagaattttaatttattcatcttgct

SEQ ID NO: 115556 - DNA, 1000 bp, Homo Sapiens
aaagtagtttttgctgagtgtatacatttttggctttacagtttctttcagtgctttaaagatgtacctctgctatttacttgcattgttttgtgatgaaaaatctgtcatccttatctttgttcctctttacataatgttccttttaaaaaaaatcactgattatgatgtgccttggtgtatttttccttggtttcttgtgcttggaaatttttgaacttcttggatctgtgggtttattgtttccataaaatttggaaatttttacaatcttcttcaaatattttttctgatcccccactctctcttcttctttggagattctcattacacctatattagcttgcttgaagttgtctcacagctcacttgtattctgttgacttttaaaaaattatgctttctgtttcactgtggatagtttctattgctacctcttcaagttcactaatactttccttttcaatgtcaagactgctgtgaggcccatccagtgtactttgcattttatacattgtagttctaaaagttcggaaagttgtttttgggtctttttatatatgttctgtgtctaaccttttaaaacctggaacacagatataacaatggttttgatgtccttgtctgcgaatcttatcacttgggtcagtttcagttgatacctcctcactgtgggtcttgctcccctggtgctttctgtgcctagtaatttttgtcagatgccagatgtaacatttaccttgttgggtgctggatatttctgtattcctgtaagtattctggagctttgttatgagttgcaggttatttggaagcagtttcctttttcaggtcttgctgttaagattcgttaggtagaaccagagcagtgctcagtcaagggctaatgattgcccacccccaaggtaaagagcctcattgcactctacccaattgcgttagtctgttttgcaggaatacctgaggctgggtaatttatagagaaaagagttttatttgg

SEQ ID NO: 115557 - DNA, 1000 bp, Homo Sapiens
ctcgaaggtttaagctcttagaacaagctctggtgattgaggaacagctgcgccgggctgcttacttgaacatgtcagaagacccttctcacccttccatggccctcaacacccgctttgctgaggtggagtgtttggcggaaagtcatcagcacctgtccaaggagtcaatggcaggaaacaagccagccaatgcagtcctgcacaaagttctgaaacagctggaagaactgctgagtgacatgaaagctgatgtgactcgactcccagctaccattgcccgaattcccccagttgctgtgaggttacagatgtcagagcgtaacattctcagccgcctggcaaaccgggcacccgaacctaccccacagcaggtagcccagcagcagtgaagatgcagactgataccacctccaccgctgagcagtgaccttcctcactttctcttgtcccagcttctcccctgggggcctgagagaccctcaccttccttctgcccatcttccatgttgtaaaggaacagccccagtgcactgggggaggggagggagtgaggggcagtggtgcccttcctgcagaagagacatgcagcagtagcgctggcgccatctgcaggagctggcgggctggccttctggaccctggcttctccccactgtaacgcctgttacacacaaactgttgtgggttcctgccaggcttgaagaaaatgatctgaattttttcctccttttggttttattttgttggtttattttgtgttttcttttctcctttttggggggtattcagagtgggctgggcccctgggcgagacacagctacctctgttggcatctttttaataccaggaacccagcggctctagccactgagcggctaaatgaaataaagtggaaaaaaaaaaaaaggaaaaaaccaaaagcataaaaaaccacagcaaatttcttgatgaaaattgaaaataaaagtttccttgtattttaaaaaaaaaaaaaaa

SEQ ID NO: 115558 - DNA, 1000 bp, Homo Sapiens; identical to SEQ ID NO: 115475

SEQ ID NO: 115559 - DNA, 1000 bp, Homo Sapiens
tcttgggagccagcggcagggccggcacctgcgtgcctgtgcccgtgtgcgtgagacagagcccttgcccctgctgctgccccgagggctgccctgccctggaagggcccctctgcctccacaccagtggagtcttcgagacttgggagctgcttggcctcattttcagccatgagcagacggcctgtggtccctgggcctgaggcacggactcgtagcaccagggtttggaggctgcgaccgccccggagagcagcttcacactggcgccacagaggagccccacgtgcactccccggcctgcatccggcttgggtacacgggcccagaggactggggtgactcacgggccctgtgctgtgatgttgagagctgagaaaaacctccaaggccctgagccccatgcccagccctgccttggtcccccaacccccagagcttggagtctgggccccacacccagccctgccttggtccctgagcctcagagcgtggaattgctgccctgtggacactggctgggaaggcaggtcttcccctagcacatggggaccccggcctcgagggtgacctccctaccttgcccctgccagccaccaagcgcaggtgcagcgggggccagactcctgccggcctcagaggacacctggcccagcacaggcagctagaagggccggtgggcaccggggccgggaagcccccacctcaccacctgagggcccctgggaggctcctctggcctggctgggctgggtctggggccgccacaggcccctcacggggcggcagaggcaacttcagtgtccctgttagagcaacacgggtccctccgtggggggctgggtgcggccccctgccgtgtatttcctccccagggagtggggcctccccgggagctgacgccaccaccctgcttagccctcacagggccccaaggtgtccgagtgtgttgggtctgaacgcgaaataaagaaatcctctcaaaaaaaaaaaaaaaaaa

SEQ ID NO: 115560 - DNA, 1000 bp, Homo Sapiens
ttgctgatgaagaagaggaagacagtgatgatgatgttgaacctattactgaatttagatttgtgcctagtgataaatcagcgttggaggcaatgttcactgcaatgtgcgaatgccaggccttgcatccagatcctgaggatgaggattcagatgactacgatggagaagaatatgatgtggaagcacatgaacaaggacagggggacatccctacattttacacctatgaagaaggattatcccatctaacagcagaaggccaagccacactggagagattagaaggaatgctttctcagtctgtgagcagccagtataatatggctggggtcaggacagaagattcaataagagattatgaagatgggatggaggtggataccacaccaacagttgctggacagtttgaggatgcagatgttgatcactgaaaatgatttatgcaagtttaagattctgctcctaagtgtaggagagaacttggtgcctcttccactctggagtgaagttaatgaaagtctttttccttttccaaaacccaacctgaaccagttctttcttgagacagactatactgagacaacaagttgtcaccagcagaagatagataatatgacctttattaacttgatgaattaacttaaccaagagggtatttgtagtttactatttaccctaaaactttctgtgtctgggtaccctctgagtaggcctataattcctaccttgactgtgtgcatcatttgtaagctagcagatctatgtggtgaaaatgcacaggagcttggtagactgcgggggaaagagagagctcctttcgccatgttttaccagtctgctgttataacctcttaggttgtatcctttaatttccagccttttaggttagtttctgtaacagaacaagtgagtctgggatgaagtcctcaaagtacttcaaatggtaattgttttgtttttgtaatagcttaacaaataaacctaggttttctataaa

SEQ ID NO: 115561 - DNA, 1000 bp, Homo Sapiens
ccgtctacagtcttctgtacctggagcacaagggctggtactcctgggtgctcagcatgctctacggcttcctgctgaccttcggcttcatcaccatgacgccccagctcttcatcaactacaagctcaagtctgtggcccaccttccctggcgcatgctcacctacaaggccctcaacacattcatcgacgacctgttcgcctttgtcatcaagatgcccgttatgtaccggatcggctgcctgcgggacgatgtggttttcttcatctacctctaccaacggtggatctaccgcgtcgaccccacccgagtcaacgagtttggcatgagtggagaagaccccacagctgccgcccccgtggccgaggttcccacagcagcaggggccctcacgcccacacctgcacccaccacgaccaccgccaccagggaggaggcctccacgtccctgcccaccaagcccacccagggggccagctctgccagcgagccccaggaagcccctccaaagccagcagaggacaagaaaaaggattagtcgagactggtcctcacctgctccggctcctggcgaccactacccctgcgtcccggccccctcgcctcccctccctgtcgccctttccctggacagatcaggccggggcggtgggaggcccgcctcaggtcagggcccagcgtgtgacgtaggggccggggcaggccagggtttgtttgtggaggcgctgtctgtccctctgtccctctgtgtttccagccatctcgccctgccagcccagcaccactgggaatcatggtgaagctgatgcagcgttgccgagggggtgggttgggcgggggtggggccgggcccccctacgggatgcccacggccgttcatcatcttgtccctcgtccccctaccacactccccctcctagaccgccgccctttaacacagtctggatttaataaattcatatgggtgtttaacttaaactcaaaaaaaaaaaaaaaaaa

SEQ ID NO: 115562 - DNA, 1000 bp, Homo Sapiens
gagaagcaggagcggaaattcgagccggggaagctaagagaagggcggaacatcattgggctgcagatgggcaccaacaagtttgccagccagcagggcatgacggcctatggcacccggcgccacctctacgaccccaagctgggcacagaccagcctctggaccaggcgaccatcagcctgcagatgggcaccaacaaaggagccagccaggctggcatgactgcgccagggaccaagcggcagatcttcgagccggggctgggcatggagcactgcgacacgctcaatgtcagcctgcagatgggcagcaacaagggcgcctcgcagcggggcatgacggtgtatgggctgccacgccaggtctacgaccccaagtactgtctgactcccgagtacccagagctgggtgagcccgcccacaaccaccacgcacacaactactacaattccgcctagggccacaaggccttccctgttttccccccaagggaggctgctgctgctcttggctggacccagccaggcccagccgaccccctctccctgcatggcatcctccagcccctgtagaactcaacctctacagggttagagtttggagagagcagactggcggggggcccattggggggaaggggaccctccgctctgtagtgctacagggtccaacatagagccgggtgtccccaacagcgcccaaaggacgcactgagcaacgctattccagctgtccccccactccctcacaagtgggtacccccaggaccagaagctcccccagcaaagcccccagagcccaggctcggcctgcccccaccccattcccgcagtgggagcaaactgcatgcccagagacccagcggacacacgcggtttggtttgcagcgactggcatactatgtggatgtgacagtggcgtttgtaatgagagcactttcttttttttctatttcactggagcacaataaatggctgtaaaatctcaaaaaaaaaaaaa

SEQ ID NO: 115563 - DNA, 948 bp, Homo Sapiens
gcgttccaaaataagagcaaattcgctctaaacacaggaaaagacctgaagctttaattaaggggttacatccaaccccagagcgcttttgtgggcactgattgctccagcttctgcgtcactgcgcgagggaagagggaagaggatccaggcgttagacatgtatagacacaaaaacagctggagattgggcttaaaatacccaccaagctccaaagaagagacccaagtccccaaaacattgatttcagggctgccaggaaggaagagcagcagcagggtgggagagaagctccagtcagcccacaagatgccattgtcccccggcctcctgctgctgctgctctccggggccacggccaccgctgccctgcccctggagggtggccccaccggccgagacagcgagcatatgcaggaagcggcaggaataaggaaaagcagcctcctgactttcctcgcttggtggtttgagtggacctcccaggccagtgccgggcccctcataggagaggaagcccgggaggtggccaggcggcaggaaggcgcacccccccagcaatccgcgcgccgggacagaatgccctgcaggaacttcttctggaagaccttctcctcctgcaaataaaacctcacccatgaatgctcacgcaagtgtaatgacagacctgaataaaatgtattaagcagcagtgatctttcctctcctccttcccaagtcatttgaaaagtgtttgttatttaaattccaataatgcccaatactgacgtgtcttgagtaatttggaacccaaagtgaagatctttgataaagatttttttgtggttcgactggactgtgctgagtgcgggcactgggcttttcttctgatgttcattatggtgctgggaagctctgtctttgatttaaaataaaatagctaaaggctacacaaaaaaaaaaaaaaa

SEQ ID NO: 115564 - DNA, 1000 bp, Homo Sapiens
tggttttccccaccccacacattctcaaccatagtccttctaacaataccaatagctaggacccggctgctgtgcactgggactggggattccacatgtttgccttgggagtctcaagctggactgccagcccctgtcctcccttcacccccattgcgtatgagcatttcagaactccaaggagtcacaggcatctttatagttcacgttaacatatagacactgttggaagcagttccttctaaaagggtagccctggacttaataccagccggatacctctggcccccaccccattactgtacctctggagtcactactgtgggtcgccactcctctgctacacagcacggctttttcaaggctgtattgagaagggaagttaggaagaagggtgtgctgggctaaccagcccacagagctcacattcctgtcccttgggtgaaaaatacatgtccatcctgatatctcctgaattcagaaattagcctccacatgtgcaatggctttaagagccagaagcagggttctgggaattttgcaagttatcctgtggccaggtgtggtctcggttaccaaatacggttacctgcagctttttagtcctttgtgctcccacgggtctgcagagtcccatctgcccaaaggtcttgaagcttgacaggatgttttcattactcagtctcccagggcactgctggtccgtagggattcattggtcggggtgggagagttaaacaacatttaaacagagttctctcaaaaatgtctaaagggattgtaggtagataacatccaatcactgtttgcacttatctgaaatcttccctcttggctgcccccaggtatttactgtggagaacattgcataggaatgtctggaaaaagcctctacaacttgttacagccttcacatttgtacaattcattgattctcttttccttccacaataaaatggtatacaagaaaaaaaaaaaaaaaaaaaaaaaaaaaaaaaaa

SEQ ID NO: 115565 - DNA, 1000 bp, Homo Sapiens
gcctccggcctgctgctccttggcggggggctgctttgctgcaactgtccaccccgcacagacaagccttactccgccaagtattctgctgcccgctctgctgctgccagcaactacgtgtaaggtgccacggctccactctgttcctctctgctttgttcttccctggactgagctcagcgcaggctgtgaccccaggagggccctgccacgggccactggctgctggggactggggactgggcagagactgagccaggcaggaaggcagcagccttcagcctctctggcccactcggacaacttcccaaggccgcctcctgctagcaagaacagagtccaccctcctctggatattggggagggacggaagtgacagggtgtggtggtggagtggggagctggcttctgctggccaggatagcttaaccctgactttgggatctgcctgcatcggcgttggccactgtccccatttacattttccccactctgtctgcctgcatctcctctgttccgggtaggccttgatatcacctctgggactgtgccttgctcaccgaaacccgcgcccaggagtatggctgaggccttgcccacccacctgcctgggaagtgcagagtggatggacgggtttagaggggaggggcgaaggtgctgtaaacaggtttgggcagtggtgggggagggggccagagaggcggctcaggttgcccagctctgtggcctcaggactctctgcctcacccgcttcagcccagggcccctggagactgatcccctctgagtcctctgccccttccaaggacactaatgagcctgggagggtggcagggaggaggggacagcttcacccttggaagtcctggggtttttcctcttccttctttgtggtttctgttttgtaatttaagaagagctattcatcactgtaattattattattttctacaataaatgggacctgtgcacaggaaaaaaaaaaaaaaaaaaaaaaaa

SEQ ID NO: 115566 - DNA, 1000 bp, Homo Sapiens
ccttcatcggcagcaacatcatcacgtcgcagaacatctgggagggcctgtggatgaactgcgtggtgcagagcaccggccagatgcagtgcaaggtgtacgactcgctgctggcactgccacaggaccttcaggcggcccgcgccctcatcgtggtggccatcctgctggccgccttcgggctgctagtggcgctggtgggcgcccagtgcaccaactgcgtgcaggacgacacggccaaggccaagatcaccatcgtggcaggcgtgctgttccttctcgccgccctgctcaccctcgtgccggtgtcctggtcggccaacaccattatccgggacttctacaaccccgtggtgcccgaggcgcagaagcgcgagatgggcgcgggcctgtacgtgggctgggcggccgcggcgctgcagctgctggggggcgcgctgctctgctgctcgtgtcccccacgcgagaagaagtacacggccaccaaggtcgtctactccgcgccgcgctccaccggcccgggagccagcctgggcacaggctacgaccgcaaggactacgtctaagggacagacgcagggagaccccaccaccaccaccaccaccaacaccaccaccaccaccgcgagctggagcgcgcaccaggccatccagcgtgcagccttgcctcggaggccagcccacccccagaagccaggaagcccccgcgctggactggggcagcttccccagcagccacggctttgcgggccgggcagtcgacttcggggcccagggaccaacctgcatggactgtgaaacctcacccttctggagcacggggcctgggtgaccgccaatacttgaccaccccgtcgagccccatcgggccgctgcccccatgctcgcgctgggcagggaccggcagccctggaaggggcacttgatatttttcaataaaagcctttcgttttgcaaaaaaaaaaaaaaaaaaaaaaaaaaaaaaaaaaaaaaaaaaaaa

SEQ ID NO: 115567 - DNA, 1000 bp, Homo Sapiens
ctcaagttttcttttgtggggctgccccccaagtgtcgtttgttttactgtagggtctcccgcccggcgcccccagtgttttctgagggcggaaatggccaattcgggcctgcagttgctgggcttctccatggccctgctgggctgggtgggtctggtggcctgcaccgccatcccgcagtggcagatgagctcctatgcgggtgacaacatcatcacggcccaggccatgtacaaggggctgtggatggactgcgtcacgcagagcacggggatgatgagctgcaaaatgtacgactcggtgctcgccctgtccgcggccttgcaggccactcgagccctaatggtggtctccctggtgctgggcttcctggccatgtttgtggccacgatgggcatgaagtgcacgcgctgtgggggagacgacaaagtgaagaaggcccgtatagccatgggtggaggcataattttcatcgtggcaggtcttgccaccttggtagcttgctcctggtatggccatcagattgtcacagacttttataaccctttgatccctaccaacattaagtatgagtttggccctgccatctttattggctgggcagggtctgccctagtcatcctgggaggtgcactgctctcctgttcctgtcctgggaatgagagcaaggctgggtaccgtgcaccccgctcttaccctaagtccaactcttccaaggagtatgtgtgacctgggatctccttgccccagcctgacaggctatgggagtgtctagatgcctgaaagggcctggggctgagctcagcctgtgggcagggtgccggacaaaggcctcctggtcactctgtccctgcactccatgtatagtcctcttgggttgggggtgggggggtgccgttggtgggagagacaaaaagagggagagtgtgctttttgtacagtaataaaaaataagtattgggaaaaaaaaaaaaaaaaaaaaaaaaaaaaaaaaaaaaa

SEQ ID NO: 115568 - DNA, 1000 bp, Homo Sapiens
cctgatctcaatacctatatctactataacgagaagtacggaggccccaaccaccacctgccccttccagacaactggaaaagtcaggtggaacccgagacccgggcggtgatccggtggatgcactccttcaactttgttctttcagccaatctccacggaggggcggtggtggccaattacccgtatgacaagtcctttgagcaccgggtccgaggggtccgccgcaccgccagcacccccacgcctgacgacaagctcttccagaagctggccaaggtctactcctatgcacatggatggatgttccaaggttggaactgcggagattacttcccagatggcatcaccaatggggcttcctggtattctctcagcaagggaatgcaagactttaattatctccataccaactgctttgagatcacgctggaactgagttgcgacaagtttccccccgaagaggagttacagcgggagtggctgggtaatcgggaagccctaatccagttcctggaacaggttcaccagggcatcaagggaatggtgcttgatgagaattacaataatctcgccaatgctgtcatttctgtcagtgggattaaccatgatgtcacttcaggtgaccatggtgattacttccggctgctgcttccaggtatctacactgttagtgccacagcacctgggtatgacccagagacagtaactgtgaccgtgggtcctgcggaaccaacgttggttaacttccacctcaaaagaagcatccctcaagtaagccctgtgaggagagctcccagcagaaggcacggagtcagagccaaagtgcagccccaagccagaaagaaagaaatggagatgaggcagctgcagagaggccctgcctgaaacccacagtgccaggcaacccttcagaaaggctttgctcctgctctcagatcagatcaagcattctttctattttattatctgggacatatttaaatacaaacatattcag

SEQ ID NO: 115569 - DNA, 1000 bp, Homo Sapiens
gtatctttacaggagcagggaagagcagtagaggatgtataattttgggcgaagttaaattacaatttatttgaggttattcctaaacctatttatttggtgttttggaggagatcacacactaagagaacgttgattgcctcggctattgtgctggctggacactttggtcacttttgaagcatgttaataaatgtcactgattaaaacagctggagcatttccttccctttccagtgaaggagcagcatagtgaaatcctggcacccctcacctttttgtgatgacaagatggctgacagtcacggagtccaggagaaggtgctgctctccttgctttctgagtaaacagagtaatgttttttttcttattttcccaaagaaagaaaagggggaaaatatatttgtatgtttagaccagccaaattctgtcattattttagtatcaacctgctgtatattagagcaactgaatataatatggaataagtttgaccaggtcaagttttaggatatagttgaatttctttaaaaagttttctattttatctaaaatctttctattatatctaaattagaatgatcatcctgcgcaaattcagattactgtttgctggctaattgacagtatttctcagcatcactatgtagcattctgttttagcatctttgaattatgatcatttgatttggctaattacaaaaagtacaggtttaaactggacttaccttgagttaaaggcaaagaaaatctaaaaacataaatgttatatttcacaagaaatcagttgcatattatccattacatatttagttttaaaaggaggagtcaccttgaattattttctgagtcaccttgagttatttgatctctcagcctgctttctcatctgtaaaaaaggggggaggataactttcacagggtaattggtaggctaaataggagttacagaaaactgttaaatagggaagaactacattaaatttaaatattcacatt

SEQ ID NO: 115570 - DNA, 1000 bp, Homo Sapiens
gtgctacgccaccctgttcggacccaaaggcgtgaacatcgggggcgcgggctcctacatctacgagaagcccctggcggaggggccgcaggtcaccggccccatcgaggtccccgcggcccgagcagaggagcggaaggcgagcggccccccgaaggggcccagcagagcctccagtgtcaccactttcaccggggagcccaacacgtgcccgcgctgcagcaagaaggtgtacttcgctgagaaggtgacgtctctgggcaaggattggcaccggccctgcctgcgctgcgagcgctgcgggaagacactgacccccggcgggcacgcggagcacgacggccagccctactgccacaagccctgctatggaatcctcttcggacccaagggagtgaacaccggtgcggtgggcagctacatctatgaccgggaccccgaaggcaaggtccagccctaggctacagcggctctcatgatgtgggctcacctgcgccccagaccctgcaggggcccccctgcttggctctgctgggagagtgctcagccgcccagtcctgcctgcaagcccagggcgagtattggaggaggggcagccacgggcagagcaccatgcccatccccgagtctctggtgtgtctgccccctctggcatcctctgggcgtcccatgatcccttctgtgtctgcgtgtccgaatccccgtgtgaccctgtcccagcattttcccgccgaccctgcgtgtccccgtggcgctgtccgctctccctctcctgctgcccacccacctgccagtgttatttatgctcccttcgtgggtgatggccacgccctcaccatgtccctggcagagggcttccctccgggatcccctgcctggtgcccacactgcctcgcaagcgctcgccaccctcacgtggctcacctgctgttgagccttgtgctgtcaataaacggtttgaggattgcagaaaaaaaaaaaaaaaaaaaaaaaaaaaaaa

SEQ ID NO: 115571 - DNA, 1000 bp, Homo Sapiens
gaaatgctgaaaatcaaagtaaaaaattaaagcccataaggccagaaactccttttgctgtctttctctaaatatgattactttaaaataaaaaagtaacaaggtgtcttttccactcctatggaaaagggtcttcttggcagcttaacattgacttcttggtttggggagaaataaattttgtttcagaattttgtatattgtaggaatccctttgagaatgtgattccttttgatggggagaaagggcaaattattttaatattttgtattttcaactttataaagataaaatatcctcaggggtggagaagtgtcgttttcataacttgctgaatttcaggcattttgttctacatgaggactcatatatttaagccttttgtgtaataagaaagtataaagtcacttccagtgttggctgtgtgacagaatcttgtatttgggccaaggtgtttccatttctcaatcagtgcagtgatacatgtactccagagggacagggtggaccccctgagtcaactggagcaagaaggaaggaggcagactgatggcgattccctctcacccgggactctccccctttcaaggaaagtgaacctttaaagtaaaggcctcatctcctttattgcagttcaaatcctcaccatccacagcaagatgaattttatcagccatgtttggttgtaaatgctcgtgtgatttcctacagaaatactgctctgaatattttgtaataaaggtctttgcacatgtgaccacatacgtgttaggaggctgcatgctctggaagcctggactctaagctggagctcttggaagagctcttcggtttctgagcataatgctcccatctcctgatttctctgaacagaaaacaaaagagagaatgagggaaattgctattttatttgtattcatgaacttggctgtaatcagttatgccgtataggatgtcagacaataccactggttaaaataaagcctatttttcaaattt

SEQ ID NO: 115572 - DNA, 901 bp, Homo Sapiens
gggatctcggactccctggaccctccctccagcccagcctcgctagctccgcctgcggtacgtgctcccgcctccgactcaaaatgcctgtctggggaggtggaaacaagtgtggggcctgtgggaggaccgtgtaccacgcagaagaggtgcagtgtgatggcaggagcttccaccgctgctgctttctctgcatggtttgcaggaaaaatttagatagcacaacagtggcaattcacgatgaagagatctactgcaaatcctgctacggaaagaagtatgggccaaaaggctacggttatggccagggcgctggcacgcttaacatggaccgtggcgagaggctgggcatcaaaccagagagtgttcagcctcacaggcctacaacaaatccaaacacttctaaatttgctcagaaatatggaggtgctgagaagtgttccagatgtggggattctgtatatgctgccgagaagataattggagctggaaagccctggcacaaaaactgtttccgatgtgcaaagtgtgggaagagtcttgaatcaacaactctgactgaaaaagaaggtgaaatctattgtaaaggatgctatgcaaagaactttgggcccaagggatttggctatggccaaggagcaggggctcttgttcatgcccagtaagatgtaaaccctgaactaaacatcacacactgagaatctcttcataatctaggcacagataatctttaacactaaactactgtgaaattctaccagcattaagtactgtatatcgccctgtacttggataggctggctaactcgtaggaagagagcactgtatggtatccttttgctttattcaccagcattttgggggaacatttcttttacattttaaataaaacttcagcttg

SEQ ID NO: 115573 - DNA, 1000 bp, Homo Sapiens
ccagttgtagctccttctatagtgcctgttctgaaagatgaagtggatagaaaaccagaataccctaaaccagacactcagcagatgattccatttcagccacgacatttagcacctccaggtttacaccctgtacctggtggagtgttcccagtccctcctgcagctgttgttttaatgaaacttctccctcctcctatctgtttccagggtccttttgtacaagtggatgaactgatggaaattttccgaagatgcaagataccaaatactgttgaggaagctgtgaggatcattactggtggggccccagagctagctgtagaaggcaacggccccgtggaaagtaatgcagtactcaccaaggccgtcaaaaggcccaacgaggattcagatgaagatgaagaaaagggagccgttgtcccccctgttcatgacatttacagagcacggcagcagaagcggattcggtagggttttaaacgcctctgcagaaaactcctgtccaggattccttttgcctcaagtggtatgtttaaaagagacaacgctttgttacaaggttcttggaaacaaagttgtattgtcattggtgcctctatcacatggttcttgagaaaaaacaaaccaacctgtgtgaattttagaatacggaacagacctatgctctaagcaaaattaggttttcaaaaatgtgagaacagtacaaagtggcagaaccacattttgttccctcttcaagggtgtcttgtatgtgccgcttgaagatttgtgagtttttcaacagttttattttaaaaactggatggcttatgattgtaaagcattttatcacattttctgaaaacaattgttcttggtttgcttatgtagagtcctgccttattgtttgtttttatttatggcagaatgtatgaaatccgttttgtagtttcaaattttaaaagtcctttaaaaaataaaaggattcagaaacaaaaaaaaaaaaaaaaaaaaaaaa

SEQ ID NO: 115574 - DNA, 1000 bp, Homo Sapiens
ctgctcttttcctggtgctcttttttctcggtggggtgtgggtaatagaacagccgtgggcttttggggacctttaacttttttttctctcttttgtttataaaaaacactaaacattcaattccagagaacccaaaatcccaccttcccaccgaacactactaaggggcttgtgttctgctccataccttttctcttttctttctgtcttgttaatgcttttaaaaacaaatgagttttttatataaataaagtttttaaagtgtgtatgtggggggtctgtgtcatttcttcacttcaagctgttatttcttccctgctttgcatctttgttacttccttatgtatcagtgtcctttccagagcaaccagaaggaggttataccaggatttattttgagctcagccccaactctttatcaagcaacattcttgttaactatatgtgaaacattttttcttctgaagattcttaaaaattgaatgtggctgaagttgaacatgggagcttattgctaatttagagataggaaactgaagcataaagaattaatgacttactttaattactggaattcttctgcaacatttgacaaaactaaccttgaataaggcccactgtaatacgtagctctcttaaatataacacttaggactagaagattagaaactaccaatcccaactacgtaataggaaaatgtaggatcaaaaggcccatgtatataagtactgaccactgggccataatgttgcttctcaggctatatgcagtcctttagtcagaagtcaataggcctatttattaatattttacagaccatattacctggattaccagggactatctttgctgcagagatcaagggttaagatctatgggaagatacttatttttctgaggtccttatgtcctgtcatataattaaagactcaagagaatttatgtgaaatgctttctgtatgccccaatctttagattaaaattatatacctgctcct

SEQ ID NO: 115575 - DNA, 1000 bp, Homo Sapiens
caggaaggggaaagtgttccgtgagcctctgtttcttgatcttcccaaatctgtggattggagaaagaaaggctacgtgacgccagtgaagaatcagaaacagtgtggttcttgttgggcttttagtgcgactggtgctcttgaaggacagatgttccggaaaactgggaaacttgtctcactgagcgagcagaatctggtggactgttcgcgtcctcaaggcaatcagggctgcaatggtggcttcatggctagggccttccagtatgtcaaggagaacggaggcctggactctgaggaatcctatccatatgtagcagtggatgaaatctgtaagtacagacctgagaattctgttgctaatgacactggcttcacagtggtcgcacctggaaaggagaaggccctgatgaaagcagtcgcaactgtggggcccatctccgttgctatggatgcaggccattcgtccttccagttctacaaatcaggcatttattttgaaccagactgcagcagcaaaaacctggatcatggtgttctggtggttggctacggctttgaaggagcaaattcgaataacagcaagtattggctcgtcaaaaacagctggggtccagaatggggctcgaatggctatgtaaaaatagccaaagacaagaacaaccactgtggaatcgccacagcagccagctaccccaatgtgtgagctgatggatggtgaggaggaaggacttaaggacagcatgtctggggaaattttatcttgaaactgaccaaacgcttattgtgtaagataaaccagttgaatcattgaggatccaagttgagattttaattctgtgacatttttacaagggtaaaatgttaccactactttaattattgttatacacagctttatgatatcaaagactcattgcttaattctaagacttttgaattttcattttttaaaaagatgtacaaaacagtttgaaataaattttaattcgtatataaa

SEQ ID NO: 115576 - DNA, 1000 bp, Homo Sapiens
agatgtagcgctttgaatatgaaatcataggtgaagacatgggtgaacttacttgcataccaagttgatacttgaataaccatctgaaagtggtacttgatcatttttaccattatttttaggatgtgtatttcatttatttatggcccaccagtctcccccaaattagtacagaaatatccatgacaaaattacttacgtatgtttgtacttggttttacagctcctttgaaaactctgtgtttggaatatctctaaaaacatagaaaacactacagtggtttagaaattactaattttacttctaagtcattcataaaccttgtctatgaaatgacttcttaaatatttagttgatagactgctacaggtaatagggacttagcaagctcttttatatgctaaaggagcatctatcagattaagttagaacatttgctgtcagccacatattgagatgacactaggtgcaatagcagggatagattttgttggtgagtagtctcatgccttgagatctgtggtggtcttcaaaatggtggccagccagatcaaggatgtagtatctcatagttcccaggtgatatttttcttattagaaaaatattataactcatttgttgtttgacacttatagattgaaatttcctaatttattctaaattttaagtggttctttggttccagtgctttatgttgttgttgtttttggatggtgttacatattatatgttctagaaacatgtaatcctaaatttaccctcttgaatataatccctggatgatattttttatcataaatgcagaataatcaaatacattttaagcaagttaagtgtcctccatcaattctgtattccagacttgggaggatgtacagttgctgttgtgtgatcaaacatgtctctgtgtagttccagcaaatcaagctgagctttgaaaaagtttgtcttagttttgtgaaggtgatttattcttaaaaaaaaaaaaaaaaaaaaaa

SEQ ID NO: 115577 - DNA, 699 bp, Homo Sapiens
catccggtgtggtcgacgggtcctccaagagtttggggcgcggaccggagtaccttgcgtgcagttatgtcggcgtcggtagtgtctgtcatttcgcggttcttagaagagtacttgagctccactccgcagcgtctgaagttgctggacgcgtacctgctgtatatactgctgaccggggcgctgcagttcggttactgtctcctcgtggggaccttccccttcaactcttttctctcgggcttcatctcttgtgtggggagtttcatcctagcggtttgcctgagaatacagatcaacccacagaacaaagcggatttccaaggcatctccccagagcgagcctttgctgattttctctttgccagcaccatcctgcaccttgttgtcatgaactttgttggctgaatcattctcatttacttaattgaggagtaggagactaaaagaatgttcactctttgaatttcctggataagagttctggagatggcagcttattggacacatggattttcttcagatttgacacttactgctagctctgctttttatgacaggagaaaagcccagagttcactgtgtgtcagaacaactttctaacaaacatttattaatccagcctctgcctttcattaaatgtaaccttttgctttccaaattaaagaactccatgccactcctcaaaaaaaaaaaaaa

SEQ ID NO: 115578 - DNA, 1000 bp, Homo Sapiens
gacagtattgaggtcatttgttatggtgctatttcaattagtctaggtttaggcccttgtacattttgcccataactttttacaaagtacttcttttattgcacattcagagaattttatatatatgtcttgtgtgcgtgtccttaaacttccaatcttactttgtctcttggagattgttgaacgcagcttgtctaggaaggggatgggactagattctaaaatttatttgggaccatgggaatgatagttgggaagaaaactatttgcacacgacagatttctagatactttttgctgctagctttatgtaatatttattgaacattttgacaaatatttatttttgtaagcctaaaagtgattctttgaaagtttaaagaaacttgaccaaaagacagtacaaaaacactggcacttgaatgttgaatgtcaccgtatgcgtgaaattatatatttcggggtagtgtgagcttttaatgtttaagtcatattaaactcttaagtcaaattaagcagacccggcgttggcagtgtagccataactttctgatgttagtaaaaacaaaattggcgacttgaaattaaattatgccaaggttttgatacacttgtcttaagatattaatgaaacacttcaaaacactgatgtgaagtgtccagattctcagatgtttgttgtgtggattttgtttagttgtgtgtttttttttttttcagtgaatgtctggcacattgcaatcctcaaacatgtggttatctttgttgtattggcataatcagtgacttgtacattcagcaatagcatttgagcaagttttatcagcaagcaatattttcagttaataaggtttcaaaaatcatgtaaggatttaaacttgctgaatgtaaagattgaacctcaagtcactgtagctttagtaattgcttattgtattagtttagatgctagcactgcatgtgctgtgcatattctgattttattaaaataaaaaaaaaa

SEQ ID NO: 115579 - DNA, 1000 bp, Homo Sapiens
cttctttgtatttggtgaaaagattcgaactcgagccatctctgctaaaggcatgactttagtaccccccctgcagttgcttctctttgcctccaagaaagtccaatctgatgggcagattgtgcttgtagatgactggattaaactgcaaatatctcatgaagctgctgcctgtatcactggtctccgggcagccatggaggctttggttgttgaagtaaccaaacaacctgctatcatcagccagttggaccccgtaaatgaacgtatgctgaacatgatccgtcagatctctgagccctcagctgctggtatcaaccttatgattggcagtacacggtatggagatggtccacgtcctcccaagatggcccgatacgacaatggaagcggatatagaaggggaggttctagttacagtggtggaggctatggcggtggatatagcagtggaggctatggtagcggaggctatggtggcagcgcaactccttcgggcaggatatgtgcaggtgttggtggaggctatagaggagtttcccgaggtggctttagaggcaactctggaggagactacagagggcctagtggaggctacagaggatctgggggattccagcgaggaggtggtaggggggcctatggaactggctacttggacattgaagaggaggtggcggctataaaacttggttatgtcagttctgtgtgtagacagtaaggaaaaaaaggcatgctatgtgttacgtgttttttccagtatgtttatttgccaccaaaaagtaaatgcattttcacccattctgtggttcattgtagtttaaggaaaccaagcatatagatgcattagtgattttgtttattttatgtaaaatataacgatcttcttttaaaaataccacagtttgtatttttctttaaggagtaaagatttgcctttaaataacttggtattttcctggctttcgtttaatacaatagaaaataaagtattacaccg

SEQ ID NO: 115580 - DNA, 1000 bp, Homo Sapiens
gcccgcaaagccttcgacagagccaccaagctggagcaggagttcacagagtgcttctcagccatcgtggagggtgacagctttgaggagatctaccacaaggtgaagcgtgtcatcgaggacctctcaggcccctacatctgggttccagcccgagagagactctgattcctgccctggcttggcctggactcgccctgcctccatcacctgggcccttggtctggactgaattgcccaagcccttggctccccccggcctccctcccaccccttcttatttatttcctttctaactggatccagcctgttggaggggggacactcctctgcatgtatccccgcaccccagaactgggctcctgaacgccaggaacctggggtctgggggggagctgggctccttgttccgagcccttgctccttaggatccccgcccccacctgcccccaatgcacacacagacccaccgggggccacctgccctcccccatcctctcccacacacattccagaagtcagggccccctcgaggagcacccgctgcagggatgcagggccacaggcctccgctctctcctaaggcagggtctggggtcacccctgcctcatcgtaattccccatgttaccttgatttctcatttattttttccactttttttcttctcaaaggtggttttttggggggagaagcaggggactccgcagcgggcccctgccttccacatgcccccaccatttttctttgccggtttgcatgagtggaaggtctaaatgtggctttttttttttttttcctgggaatttttttggggaaaagggagggatgggtctagggagtgggaaatgcgggagggagggtggggcaggggtcgggggtcgggtgtccgggagccagggaagactggaaatgctgccgccttctgcaatttatttatttttttcttttgagagagtgaaaggaagagacagatacttgaaaaaaaaaaaaaaaaaaaa

SEQ ID NO: 115581 - DNA, 1000 bp, Homo Sapiens
aatattggagcgggtgacagacgagtttaacatcccagaactgatggccaaagtggaggagcgcaccccttacattgtagttgccttccaggagtgtggccggatgaatatcctcaccagagagattcagcgctcactgagggagctggagctcggcttaaagggggagctgactatgaccagccacatggagaacttacagaatgccctgtacttcgatatggtgccagagtcctgggctagacgagcctacccttccacagcaggcctggcagcctggtttccagacctcctcaacagaatcaaggagctagaggcttggacgggtgactttacaatgccctccactgtgtggctgacaggcttcttcaacccccagtcgttcctgactgccatcatgcagtccacggctcgcaagaatgagtggccactggaccagatggccctgcaatgtgacatgacgaagaagaacagagaagagtttaggagtcctcctcgggaaggggcctacatccatggcctcttcatggaaggtgcctgctgggacacacaggctgggatcattacagaggcaaagctgaaggatctgacaccccctatgcctgtgatgttcatcaaggccattcctgcagataagcaggactgccgcagtgtctattcctgtcctgtgtacaagactagtcagcggggacccacctacgtgtggactttcaacctgaagactaaggaaaacccatccaagtgggttctggctggagtagccttgcttctccagatttagcatcctgcagagccaccgagaaaataaaaaagctgggcttggaggctgcctagagggacaggtgggtgaagggtcaccacagacacttagaacggtaagaaaccatgagcactcacaattctgtagaattcctctagggaacttggagaggtgtgcctaaggtgaggctgagctgaaggaatgtgggcccaggtttcttaataaaatgatttactcttc

SEQ ID NO: 115582 - DNA, 1000 bp, Homo Sapiens
actcctgtggggaggaaaccttataaattaaacacatggcccccttagagaccacaggtgatgtctgtctccatccttccctctccttttctgtcacctttccccctagctggctcctttggacctacccctgtccttgctgacttgtgttgcattgtattccaaacgtgtttacaggttctcttaagcaatgttgtatttgcaggcttttctgaataccaaatctgctttttgtaaagcgtaaaaacatcacaaagtaggtcattccatcaccacccttgtctctctacacattttgcctttggggatctggttggggttttgggttttttgttgttgttgtttatttgttattttaaaggtaaattgcacttttaaaaaaataattggttgacttaatatatttgctttttttctcacctgcacttagaggaaatttgaacaagttggaaaaaaacaatttttgtttcaattctaagaaacacttgcagctctagtattcacttgagtcttcctgtttttcctgtaccgggtcatggtaatttttggttgttttggttgttttcttaaaaaacaagttaaaacctgacgatttctgcaggctgtgtaagcatgtttacctgttggcttgctttgtgtgtctgttaaatgaatgtcatatgtaaatgctaaaataaatcgacagtgtctcagaactgaataactgcagtgacttgatgctctaaaacagtgtaggatttaagaatagatggtttttaatcctggaaattgtgattgtgacccatgagtggaggaactttcagttctaaagctgataaagtgtgtagccagaagagtacttttttttttgtaaccactgtcttgatggcaaaataattatggtaaaaaacaagtctcgtgtttattattccttaagaactctgtgttatattaccatggaacgcctaataaagcaaaatgtggttgtttcaggaaaaaaaaaaaaaaaaaaaaaaaaaaa

SEQ ID NO: 115583 - DNA, 1000 bp, Homo Sapiens
aacaacatgagctcaggaagcctctctttcttcacttaccattactaactctccaagcatagaaatccctgggaattgcgagaataactcccactattttaaaatttatattcagatttgtttcgtttcataagacacatcaaacaggcctatacaaaaggtttaggaaaagaaaacaatggtgagtcccggccctcttcgaattcactggcacctcatgcaagtgtaggaaggcacgctggatcgtctatctgattccaaagctgtcctttgccatctcatcccttggcctgccccccaaccctgaggatgcccctgccatccccccaacctcctcatattgcctctgaacccagatggcaatccatcccggttctctctgagggccacgggcttgggtagtggaaagggtgtttgggaaattgttaaatcagttacccgtagtagagctatttcttgtacttctaagttttctagaagtggaaggattgtagtcatcctgaaaatgggtttacttcaaaatccctcagccttgttcttcacgactgtctatactgagagtgtcatgtttccacaaagggctgacacctgagcctggattttcactcatccctgagaagccctttccagtagggtgggcaattcccaacttccttgccacaagcttcccaggctttctcccctggaaaactccagcttgagtcccagatacactcatgggctgccctgggcagccagcattcattgtaagttccctctttgaaaactggtgtgtgggtgttcagttctgtgtctggtgggtatggacagacagtaatctcctgtgatctgtgctagctgtgaggcagctctggaacgtgaagagctgtttggtttgaaccgtgaacaaaactgtgttttgagtttagctgacattaaagaaaaaagttcatcacgtgactgttaatgtaaacctggttattaaaataactatgaaattaccaaaaaaaaaaaaaaaaaa

SEQ ID NO: 115584 - DNA, 1000 bp, Homo Sapiens
tctgctggagatgctttgggagtacttggccctgacctgcatctacaccaagaagagaggacagaggccagacttcacagacgccatcattctccggaaaggggcctcagtggagcacgtgtgccaccgcatccaccggtcactcgccagccagttcaagtacgccctggtgtggggcaccagcaccaagtacagtccgcagcgggtgggcctgacccacaccatggagcatgaggacgtcatccagatcgtgaagaagtaacggcgcctgccgggcctcccgcccacctgcctcgtctccctggggaggtggtcccactgggacacacaaacacccaaacagaaaaatacaaatacacgtaccccaggaaggggtccctcaagtctctgctatttacagaagtttcttcagtaggcagacgaagagtgtgttggggcaaaggggctcggttggaggcatttcccataagactgagccctctcatgggggttttgagtttgtagtgctgagcctgcatctgtgcctcccagccccctgcactgagggagcaagttgcccacatgcccgccagccagggcctaaagcagatggcatgctcagtgccaggctggtagctgggcctgtttgggtccctggaggctgtggctgctgtcatggcacctcactccctcagctcttgccagcttctctgacacttgggttgggggcccttccaggaggaaacccccttgggtgccccacacagggctctccatgatgggaaccagtggttagtggcttcaaaggcccagctgacaccctccacagcctaaggggtgtcctaaagtgcctccccctgtattccccctcccagggcagcccctgcccagcacaaaaccccaggaccctggctctgcacgcctggggcagggacttttgagtttaggatctgtattttctaagtccccagttctcctggctctcctttctgaaataaaggattgaaaacggttcctgttc

SEQ ID NO: 115585 - DNA, 1000 bp, Homo Sapiens
gattaagaaggcatttgaggaaagcctgagcaccctgaagtggatggatgaggaaacccgaaaatcagccaaggaaaaggccgatgccatctacaacatgataggataccccaacttcatcatggatcccaaggagctggacaaagtgtttaatgactacactgcagttccagacctctactttgaaaatgccatgcggtttttcaacttctcatggagggtcactgccgatcagctcaggaaagcccccaacagagatcagtggagcatgaccccgcccatggtgaacgcctactactcgcccaccaagaatgagattgtgtttccggccgggatcctgcaggcaccattctacacacgctcctcacccaaggccttaaactttggtggcataggtgtcgtcgtgggccatgagctgactcatgcttttgatgatcaaggacgggagtatgacaaggacgggaacctccggccatggtggaagaactcatccgtggaggccttcaagcgtcagaccgagtgcatggtagagcagtacagcaactacagcgtgaacggggagccggtgaacgggcggcacaccctgggggagaacatcgccgacaacgggggtctcaaggcggcctatcgggcttaccagaactgggtgaagaagaacggggctgagcactcgctccccaccctgggcctcaccaataaccagctcttcttcctgggctttgcacaggtctggtgctccgtccgcacacctgagagctcccacgaaggcctcatcaccgatccccacagcccctctcgcttccgggtcatcggctccctctccaattccaaggagttctcagaacacttccgctgcccacctggctcacccatgaacccgcctcacaagtgcgaagtctggtaaggacgaagcggagagagccaagacggaggaggggaaggggctgaggacgagacccccatccagcctccagggcattgctcagcccgcttggccacc

SEQ ID NO: 115586 - DNA, 1000 bp, Homo Sapiens
ttggtactgttcctgttggccgagtggagactggtgttctcaaacccggtatggtggtcacctttgctccagtcaacgttacaacggaagtaaaatctgtcgaaatgcaccatgaagctttgagtgaagctcttcctggggacaatgtgggcttcaatgtcaagaatgtgtctgtcaaggatgttcgtcgtggcaacgttgctggtgacagcaaaaatgacccaccaatggaagcagctggcttcactgctcaggtgattatcctgaaccatccaggccaaataagcgccggctatgcccctgtattggattgccacacggctcacattgcatgcaagtttgctgagctgaaggaaaagattgatcgccgttctggtaaaaagctggaagatggccctaaattcttgaagtctggtgatgctgccattgttgatatggttcctggcaagcccatgtgtgttgagagcttctcagactatccacctttgggtcgctttgctgttcgtgatatgagacagacagttgcggtgggtgtcatcaaagcagtggacaagaaggctgctggagctggcaaggtcaccaagtctgcccagaaagctcagaaggctaaatgaatattatccctaatacctgccaccccactcttaatcagtggtggaagaacggtctcagaactgtttgtttcaattggccatttaagtttagtagtaaaagactggttaatgataacaatgcatcgtaaaaccttcagaaggaaaggagaatgttttgtggaccactttggttttcttttttgcgtgtggcagttttaagttattagtttttaaaatcagtactttttaatggaaacaacttgaccaaaaatttgtcacagaattttgagacccattaaaaaagttaaatgagaaaaaaaaaaaaaaaaaaaaaaaaaaaaaaaaaaaaaaaaaaaaaaaaaaaaaaaaaaaaaaaaaaaaaaaaaaaaaaaaaaaaaaaaaaaaaa

SEQ ID NO: 115587 - DNA, 1000 bp, Homo Sapiens
gacattcctgcagagggtcggtggaggggtcattcacctgcccctgcagcaagcaaaagttgtctgtggtgccatttgattccctgacactgccccctgcttgaattgattccgaagggtagggtgggaaggtgagcaaagggagcagaaacaagggaattcaagacccagaatgtaggtgccactgcctcctatgtttacaggatcctccgtggccctaggcacctgggctgcaggaagtgactccgttccactcctcctttattcccttaaaaagggaaaaatgactgttacgaccctgttcacaaaactcttacttttgctattttgtctgctgtccagaactgaagactttaaaattttgttactgtttacaagtccagattcaaaaaatgtttttactttgtttacaactcaaaactttgagttttacactttgtttacagtagataattttttttcctttgtttccaagtgaaaggtagggaaagtgggagagggacttggaggacccacctgtgaggaccctgacctggccatcttgaggggttttctaacccccaggtctcccaggccgaaggtcagccttgagtcccgtttaacagcagatccagaagaccttgagagtaggcgtcctctaaccacgggggagagtggctgtgcagggctggggggtggtctgtgcagacacctcctcacccaccaccccatgcatactcttgggaagcagcttcctgggagattagaaattctacttccctgactggagctaaatcccaccagccaggacccaaactctccttaccgagaaggaccccagctcttgaagggctgagtggcctgctgggggtgggagggtgtctttactatgtcctaggtttcgtagatgcccctctctggggttcccctcctccagcccagcggccctctttcctgtctgtgtaaattgttccgtgaagccgcgctctgttttgggaataaacttctatagaaaacaaaa

SEQ ID NO: 115588 - DNA, 1000 bp, Homo Sapiens
tctcatccacagcagctgggtcacctgatagggccgccctggacttggggtccctccacctgggggcccctggacactgtctacttggagaccactggcccccttcccccagggttgcccagatggggcctcctttgttctgcattcagcagctatttatcgagtacctactctgtcaggcactgtcataggcgtggggcaaagcaggaaccaagagacgaggttccctgatctcatgggacttaggttctggtgaagggagacaatcagtgcacatgcacacaccccacacgcatacacacatgaacacatgcacatgtgcacacacaagtaagatggcttcagagagggagaagcactgtgaggcctccagaggatgtggcagtgagggacgatggggtgaagtcagctgggcattcaaagaagctagactgagaacgcctgagaagaaccagctacgggaagagctttgggaagcaaaggcagaggccctggggtgggagcaggcttgttttattggaaggaccagaaaactggtaagtgtgacccagatcaagtgtgaggagatgaggctggggatagtcaggggctggatcacccagggccttgtgggccccacatagggttttgggttttattctcagggcaatgggaagctgttggatggtttgatgtaaggggagtgacaggatccgatgtacctatttaagaatttaagagggtcgggtgcggtggctcatgcctataatcctagcactttgagaggccaaggtgggctgatcacaaggtcaagagttcgtgaccagcctggccaatatggtgaaaccccatgtctactaaaaatacaaaaattagctgggcatggtggcacacacttgtagtccgagctactcgggaggctgaggcagaagaatcgcttgaacccaggaggcggaggttgcagtgagctcagattgcgtcactgcactccaacctgggtgacagagcgagactccacctc

SEQ ID NO: 115589 - DNA, 1000 bp, Homo Sapiens
gtgtgtgccaaagcacagaacaaacctttctatgtggttgcagaaagtttcaagtttgtccggctctttccactaaaccagcaagacgtcccagataagtttaagtataaggcagacactctcaaggtcgcgcagactggacaagacctcaaagaggagcatccgtgggtcgactacactgccccttccttaatcactctgctgtttacagacctgggcgtgctgacaccctcagcagtcagcgatgagctcatcaagctctatctgtaacctgtgagccctttcctgccaaggtgcagcttacgtagttgaggcagggtgagtagctgcttgacaccccagtgagtcaggccaaaactgagatgtgtttaatgaagatttatggagtaaggacttaaaatcatacatcttggagaacctttcttactcatttcagtcccatctaaaaatgtgtcagctattctaaatcccaacttaaattgttcttacggtttctagaaactttccttttcagtttccagaaatacaagttagataattggctacttaactgatgaaagatgagcccaagtccacctgtcttcatcctcccctgcactccagactgatctgcctggggcacgcgagatgcaggcgaaaagcagccacacccctctgccacaaatgaccaacagctggtcaggacgttacacgcggtgccttgtaagaggcaagaaacacttgccgaatctgcatctggcttccagtggtaagcacattcctcagcaggatcaagccaaacagtaaaaactaccaagagaacacgaggaaggcagaaacgatgtttagcaacagtattctgcatggttcactgcttaagaaaatgccttctggaatatttgtaaactgaaattctgtatgtgtaagagatgtttaaatatgtttgggtcctaaacagctttttaaaattatacttgggaataaattcagcatcttttcaaataaactctatgaaccacac

SEQ ID NO: 115590 - DNA, 1000 bp, Homo Sapiens
ggattgaatctacattttggcagaagttaaacattcccacataatgtcaaaattatacatcatgcagttctgtttttttgtttgtttaattttgttttgtttttgagtctggctctgtcacccaggctggagtgcagtggcgtgatctgcaacctctgccccccgggttcaagcgattctcctgcctcagcctcccgagtagctgagattacaggtgcgcgccaccacacttggctaatttttgtattattagtagagacggggtttcagcatgttggctaggccggtctctcctgacctcagggtgatcagcccacctcggcctcacaaagtgctgggattacaggcgtgagccaccttgcccagcccacatcatacagtttgaaatgaaactttgccacaaccagcctttgctgtagcacacacatatatcactgaacctgtttgaaataaagttttttttctttttcatgattcgtctttgagtacctccaggctgaaagactgttgtaccagtaaaaacttaaaggcacaaattctccttgaagaccttctcccttttatgtggccccatattttatgttgctttatctttgaaattttgcatgaaaaggaaatgaatggattcgaatgaaattgtcctttagagcatgattacttgttcccatggacaaatatttttctccccttgctcttcctggcctgaaacacgggaaaccagagtcaaaagttatctccctctccctgtgatgccttgagatttttttctgcgttgtttaatgcctgaaatccaagtcttcctccatgggaaaatactgttataccaaataattctagatgagtaacaaagatctttttaggccttcattttatgttttttcttaactgttatattatgattgtgacatagattatactactactaatttttggatgtttcaaaaggtcaagaagtaaaagatgttagaaagcaaaaaaaaaaaaaaaaaaaaaaaaaaaa

SEQ ID NO: 115591 - DNA, 1000 bp, Homo Sapiens
taggagactacatgggcgcctcctgtcacgcctgtatcgggggcaccaacgtgcgtgctgaggtgcagaaactgcagatggaagctccccacatcatcgtgggtacccctggccgtgtgtttgatatgcttaaccggagatacctgtcccccaaatacatcaagatgtttgtactggatgaagctgacgaaatgttaagccgtggattcaaggaccagatctatgacatattccaaaagctcaacagcaacacccaggtagttttgctgtcagccacaatgccttctgatgtgcttgaggtgaccaagaagttcatgagggaccccattcggattcttgtcaagaaggaagagttgaccctggagggtatccgccagttctacatcaacgtggaacgagaggagtggaagctggacacactatgtgacttgtatgaaaccctgaccatcacccaggcagtcatcttcatcaacacccggaggaaggtggactggctcaccgagaagatgcatgctcgagatttcactgtatccgccatgcatggagatatggaccaaaaggaacgagacgtgattatgagggagtttcgttctggctctagcagagttttgattaccactgacctgctggccagaggcattgatgtgcagcaggtttctttagtcatcaactatgaccttcccaccaacagggaaaactatatccacagaatcggtcgaggtggacggtttggccgtaaaggtgtggctattaacatggtgacagaagaagacaagaggactcttcgagacattgagaccttctacaacacctccattgaggaaatgcccctcaatgttgctgacctcatctgaggggctgtcctgccacccagccccagccagggctcaatctctgggggctgaggagcagcaggaggggggagggaagggagccaagggatggacatcttgtcattttttttctttgaataaatgtcactttttgaggcaaaagaagg

SEQ ID NO: 115592 - DNA, 1000 bp, Homo Sapiens
attttttttttctcacttgtaagtcaccgccagtacctaagttaggctaacggagactttgacaggactggatttttcttccaccagaagagaagccttttccgttggtttggggccacctctttgaccatgaccatgtgatgttccgtttacagtgacttgctttgggggaggggaggctctcttaaccgattcccatgttgtacagtagatggttagaccttttgtatattagtgtgttttaagttattgatttgttttatataaaataatttatttttcaggtgccatttttcattttaactttgtttttacatgggtttgttttcaataaagtctgacactggtgtccaaaagtcaacaataaaatgaatcccattgtgttcttttgaagatgcctatgtaacttttaagctttttaaattattttcagaaaaaaaaaaagaaaagcccttatcagttttccatcagcccattgcctttttattttttttttttaatccttgtgaataaatgttctttagtgttttaggaggaaaaagcaaacctagattttgataacccagaagacttcagattaataaagaagctttgaaagaagaccatttttcaaaattttagtgaagtgtgaatattttttgtcaatggctttctcaaagagaatgaaacttttgcaccattttcagagtttttatagagatgccaaattgatatatttacatgtaatggaaacatgaaaaagttttattaaacaattgttcatagctgtgtagacattttaattcagtttccaaagctctcaaaaaatcgtatttttgaagtacggagtgatgcggtttggggcgtggcttacagttccaacgactcaattgtcccgatactcagttctttctacaggtatcaggttcgtgttaaacgctgtatgttaactatgactggaattctgtgatattttggtaataaatgaagtgggatcattgcgaaaaaaaaaaaaaaaaaa

SEQ ID NO: 115593 - DNA, 1000 bp, Homo Sapiens
agtcaccttgcagtcaggctggaatcttgggccaccccacagtgctttgctgtaggatttagacggggatgaagtgccctccagcctcagagctagccacaaagcccccagagctgaattcattgagtatttgtgcctagggcttgggctgtttgtgtgataccggccccccgacagacaataggctgtgatgacaccccagtctacttccccgatcctgggctccctcttgattagtaggtgacattttccactgtcaggcatcactggggctagtccggcagcgacctagatggggtccacccccattcctgctcaagcatgggcacctaccacatggtttctgctgctcagcctgactgcaactcacctcgaaggcggaccagcctgcctctgtgatgactgcagaagacctccttgggtgtaccaatgcccctcatctcccactttcacacctaaccctgactccttcaccaagaagacgggagtcggcagccaggagttcccgtggcacctctctctcttcgtggctccctgcttcccccttccctctttccgaggaagggtcaacctattctctctcaaaaccaacccctaggccaattgcctggatctcctcccctctcccttctttaaacgagcttgcctccctcctgccaagtttgagggcaaggctaagaaatgtcagccacggaaacaactctaatatctggtgactttgggtaatgtgaatcagtgcctgaggacctttgctgtgtccttggtacagaaccatccacttgacctaactacctcccctggccgcgctctcgctcttctcttctttgttaagccaacaactatcaccctctcctactcttctttctccctgccccctggagggcactgtgtttggttgtgcaaatgtatttactatgcgtgtttccagcagttggcattaaagtgcctttttctaataaaatcagtttattatgaccaaaaaaaaaaaaaaaaggaattc

SEQ ID NO: 115594 - DNA, 1000 bp, Homo Sapiens
ggcatggcaattctggaagctgattaaaacacacataaaccaaaaccaaacaacaggcccttgggtgaaaggtgctatataattgtgaagtattaagcctaccgtatttcagccatgataagaacagagtgcctgcattcccaggaaaatacgaaaatcccatgagataaataaaaatataggtgatgggcagatcttttctttaaaataaaaaagcaaaaactcttgtggtacctagtcagatggtagacgagctgtctgctgccgcaggagcacctctatacaggacttagaagtagtatgttattcctggttaagcaggcattgctttgccctggagcagctattttaagccatctcagattctgtctaaaggggttttttgggaagacgttttctttatcgccctgagaagatctaccccagggagaatctgagacatcttgcctacttttctttattagctttctcctcatccatttcttttatacctttcctttttggggagttgttatgccatgatttttggtatttatgtaaaaggattattactaattctatttctctatgtttattctagttaaggaaatgttgagggcaagccaccaaattacctaggctgaggttagagagattggccagcaaaaactgtgggaagatgaactttgtcattatgatttcattatcacatgattatagaaggctgtcttagtgcaaaaaacatacttacatttcagacatatccaaagggaatactcacattttgttaagaagttgaactatgactggagtaaaccatgtattcccttatcttttactttttttctgtgacatttatgtctcatgtaatttgcattactctggtggattgttctagtactgtattgggcttcttcgttaatagattatttcatatactataattgtaaatattttgatacaaatgtttataactctagggatataaaaacagattctgattcccttcaaaaaaaaaaaa

SEQ ID NO: 115595 - DNA, 1000 bp, Homo Sapiens
aacctccatcatccagctaatgtcatgtctgtgtgtcatgattgcggcctccatttatacagacaggcgtgaagacattcacgacaaaaacgcgaaattctatcccgtgaccagagaaggcagctacggctactcctacatcctggcgtgggtggccttcgcctgcaccttcatcagcggcatgatgtacctgatactgaggaagcgcaaatagagttccggagctgggttgcttctgctgcagtacagaatccacattcagataaccattttgtatataatcattattttttgaggtttttctagcaaacgtattgtttcctttaaaagccaaaaaaaaaaaaaaaaaaaaaaaaaaaaaaaaaaaaaaaaaaaaaatccaaaagagagaagagtttttgcattcttgagatcagagaatagactatgaaggctggtattcagaactgctgcccactcaaaagtctcaacaagacacaagcaaaaatccagcaatgctcaaatccaaaagcactcggcaggacatttcttaaccatggggctgtgatgggaggagaggagaggctgggaaagccgggtctctggggacgtgcttcctatgggtttcagctggcccaagcccctcccgaatctctctgctagtggtgggtggaagagggtgaggtggggtataggagaagaatgacagcttcctgagaggtttcacccaagttccaagtgagaagcaggtgtagtccctggcattctgtctgtatccaaaccagagcccagccatccctccggtattggggtgggtcagaaaaagtctcacctcaatttgccgacagtgtcacctgcttgccttaggaatggtcatccttaacctgcgtgccagatttagactcgtctttaggcaaaacctacagcgcccccccctcaccccagacctacagaatcagagtcttcaagggatggggccagggaatctgcatttctaatgcgctccctgggcaacgcttca

SEQ ID NO: 115596 - DNA, 1000 bp, Homo Sapiens
aagaaggcctggagctgctgaagactgctattgggaaagctggctacactgataaggtggtcatcggcatggacgtagcggcctccgagttcttcaggtctgggaagtatgacctggacttcaagtctcccgatgaccccagcaggtacatctcgcctgaccagctggctgacctgtacaagtccttcatcaaggactacccagtggtgtctatcgaagatccctttgaccaggatgactggggagcttggcagaagttcacagccagtgcaggaatccaggtagtgggggatgatctcacagtgaccaacccaaagaggatcgccaaggccgtgaacgagaagtcctgcaactgcctcctgctcaaagtcaaccagattggctccgtgaccgagtctcttcaggcgtgcaagctggcccaggccaatggttggggcgtcatggtgtctcatcgttcgggggagactgaagataccttcatcgctgacctggttgtggggctgtgcactgggcagatcaagactggtgccccttgccgatctgagcgcttggccaagtacaaccagctcctcagaattgaagaggagctgggcagcaaggctaagtttgccggcaggaacttcagaaaccccttggccaagtaagctgtgggcaggcaagcccttcggtcacctgttggctacacagacccctcccctcgtgtcagctcaggcagctcgaggcccccgaccaacacttgcaggggtccctgctagttagcgccccaccgccgtggagttcgtaccgcttccttagaacttctacagaagccaagctccctggagccctgttggcagctctagctttgcagtcgtgtaattggcccaagtcattgtttttctcgcctcactttccaccaagtgtctagagtcatgtgagcctcgtgtcatctccggggtggccacaggctagatccccggtggttttgtgctcaaaataaaaagcctcagtgacccatgag

SEQ ID NO: 115597 - DNA, 1000 bp, Homo Sapiens
ttggttttgttttctgtttactttgtgtgcaactacctgcttttaatgactcactttgatcaaatgacagtgaacaaagccagcccaagctggtaaggtgctgttcacttgaacaggtgctgttgcgcagaaaggaaactctgtgactaatttagatagtggctttccttcttctggattcttttcattgaattctcacagtaaatatttacggagttttcaaattgcagcaaatatactgtatgagaaaatattaatacagattaaaagcctttcttacatcttgaaaattttctaatatttgagaatttcacagggatgttttttatattgggacccttttgactttccagtcctgtgactttctacttttagtagagagtcagaatctctggactggagaataatgaagaagttcactgactgtgcactgtgcttagagaccctgccgcaccacagtgccaatgcttgtcagacacatgcccttcggcagcattccagaacaggagggaagagaaagagaaaactttcttccctctactaaaagattcaggcagcttaaaaccttagtgctttctttcttaacatacccaaatttcaattctttccattatttgaacacttgggtagaactcttgctttgtattaaacctctttgtctacacatgtaaaacttaccttttgttattgagcaggcctatctctttcagatagttttatgattcacacaggtttgaggatgctggggagagggggagggggctgtggtggtgttctgttggttacaagaaagttataccatttaaagctggcaccagagacccgatagggacttattaactatattgaacattttttcctttgcctttgaccctatgtatagttacgatgccagattagatttatagcagcctcaagttgtattaaatgatattttgcttcctgtaatactattataaaataaagtttgtttattctctaaaaaaaaaaaaaaaaaaaa

SEQ ID NO: 115598 - DNA, 619 bp, Homo Sapiens
tgcagcttccttctcaccttgaagaataatcctagaaaactcacaaaatgtgtgatgcttttgtaggtacctggaaacttgtctccagtgaaaactttgatgattatatgaaagaagtaggagtgggctttgccaccaggaaagtggctggcatggccaaacctaacatgatcatcagtgtgaatggggatgtgatcaccattaaatctgaaagtacctttaaaaatactgagatttccttcatactgggccaggaatttgacgaagtcactgcagatgacaggaaagtcaagagcaccataaccttagatgggggtgtcctggtacatgtgcagaaatgggatggaaaatcaaccaccataaagagaaaacgagaggatgataaactggtggtggaatgcgtcatgaaaggcgtcacttccacgagagtttatgagagagcataagccaagggacgttgacctggactgaagttcgcattgaactctacaacattctgtgggatatattgttcaaaaagatattgttgttttccctgatttagcaagcaagtaattttctcccaagctgattttattcaatatggttacgttggttaaataactttttttagatttag

SEQ ID NO: 115599 - DNA, 584 bp, Homo Sapiens
gaagaagtggggtgacttaggggctgagcctcagcaactgggagagtttataagctgggatagcagacccctcagcaccacccattctcctcatccctctgctctctggcctccagcctcccagcagcatggctttcaccggcaagttcgagatggagagtgagaagaattatgatgagttcatgaagctccttgggatctccagcgatgtaatcgaaaaggcccgcaacttcaagatcgtcacggaggtgcagcaggatgggcaggacttcacttggtcccagcactactccgggggccacaccatgaccaacaagttcactgttggcaaggaaagcaacatacagacaatggggggcaagacgttcaaggccactgtgcagatggagggcgggaagctggtggtgaatttccccaactatcaccagacctcagagatcgtgggtgacaagctggtggaggtctccaccatcggaggcgtgacctatgagcgcgtgagcaagagactggcctaagcagccaggcccggcccagggagctacaaacccaccaataaaactgatataaggacaaaaaaaaaaaaa

SEQ ID NO: 115600 - DNA, 1000 bp, Homo Sapiens
ctgagatgcctctcatgcctcagctgggacccaccgtgtagacacacgacatgcaagagttgcagcggctgctccaactcactgctcaccctcttctgtgagcaggaaaagaaccctactgacatgcatggtttaacttcctcatcagaactctgcccttccttctgttcttttgtgctttcaaataactaacacgaacttccagaaaattaacatttgaacttagctgtaattctaaactgacctttccccgtactaacgtttggtttccccgtgtggcatgttttctgagcgttcctactttaaagcatggaacatgcaggtgatttgggaagtgtagaaagacctgagaaaacgagcctgtttcagaggaacatcgtcacaacgaatacttctggaagcttaacaaaactaaccctgctgtcctttttattgtttttaattaatatttttgttttaattgatagcaaaatagtttatgggtttggaaacttgcatgaaaatattttagccccctcagatgttcctgcagtgctgaaattcatcctacggaagtaaccgcaaaactctagagggggagttgagcaggcgccagggctgtcatcaacatggatatgacatttcacaacagtgactagttgaatcccttgtaacgtagtagttgtctgctctttgtccatgtgttaatgaggactgcaaagtcccttctgttgtgattcctaggacttttcctcaagaggaaatctggatttccacctaccgcttacctgaaatgcaggatcacctacttactgtattctacattattatatgacatagtataatgagacaatatcaaaagtaaacatgtaatgacaatacatactaacattcttgtaggagtggttagagaagctgatgcctcatttctacattctgtcattagctattatcatctaacgtttcagtgtatccttacagaaataaagcagcatatgaaaaaaaaaaaaaaaaaaaaaaa

SEQ ID NO: 115601 - DNA, 1000 bp, Homo Sapiens
ccaatggcagaagtgggggaaaatttttagaagaaaagcaacatgtgagaccaatcattatcaaatacttttatttttgggtgagtattaaccttttaatttttaatttttttttgaaagaatgtcttggaatgcgcaagtctccctttagagccgtcttttgcagggagcgggaagtgacaagagctcagatctccctcccgatctccctccccacctccgaagtctcctccgtggaccacaggtggatctttgtgcgaacaacttgcatttcggaagccactgtccgtctttaaacagaaagtcaaaggagccacgaagcaagcggccgtccgggcgtccgcctccgtccccttccatgttcctcctcttccttcgcttcagcctcttctgttatgttttgtcttgaattttatttagactttttcagtgggtatttttctgtctcccaacctctactgtaaactttctggtccgagaacgagccgaacacagcgcgacgcagggactaggacggcccggtgaccgcgcggattcaggattgcggggacgcagaaaggttaaggcacttttaaaaactatagcaaggctcctgtttatttattctactttctttccctaataatcaaaacaccgcgtaggctcctccgtttatcagtattaatggtgtaactttgttggcaatatttgccgtgtagaattttttttagatatccattgtaaatttgaaacaaagaccgatctgtgtaaaaacaaatttccatatgttttatataaatatatatataatatgaaggactaccctcctttttttttttttgtattttggctgctagagtgcagcatttgtgacacgtatttgaaatttgaaatttccttctgcactgtataaaaggaccatttgaggatgttttgccttttgtgtattttttcctaaaaaaagaacaaaaataaaaatgtataacatttgtacatggcctttaaaattgtatcaactaga

SEQ ID NO: 115602 - DNA, 1000 bp, Homo Sapiens
ttacctgattgacgtcaagttcaacggtacccacatccctggaagccccttcaagatccgagttggggagcctgggcatggaggggacccaggcttggtgtctgcttacggagcaggtctggaaggcggtgtcacagggaacccagctgagttcgtcgtgaacacgagcaatgcgggagctggtgccctgtcggtgaccattgacggcccctccaaggtgaagatggattgccaggagtgccctgagggctaccgcgtcacctatacccccatggcacctggcagctacctcatctccatcaagtacggcggcccctaccacattgggggcagccccttcaaggccaaagtcacaggcccccgtctcgtcagcaaccacagcctccacgagacatcatcagtgtttgtagactctctgaccaaggccacctgtgccccccagcatggggccccgggtcctgggcctgctgacgccagcaaggtggtggccaagggcctggggctgagcaaggcctacgtaggccagaagagcagcttcacagtagactgcagcaaagcaggcaacaacatgctgctggtgggggttcatggcccaaggaccccctgcgaggagatcctggtgaagcacgtgggcagccggctctacagcgtgtcctacctgctcaaggacaagggggagtacacactggtggtcaaatgggggcacgagcacatcccaggcagcccctaccgcgttgtggtgccctgagtctggggcccgtgccagccggcagcccccaagcctgccccgctacccaagcagccccgccctcttcccctcaaccccggcccaggccgccctggccgcccgcctgtcactgcagctgcccctgccctgtgccgtgctgcgctcacctgcctccccagccagccgctgacctctcggctttcacttgggcagagggagccatttggtggcgctgcttgtcttctttggttctgggaggggtgagggatgggg

SEQ ID NO: 115603 - DNA, 1000 bp, Homo Sapiens
gatcactagcactgctttaccgctcctcatcgccaacacccccatgctctgtggccttcttacacttctcagagggcagagtggcagccgggcaccctacagaaactcagagggcagagtggcagccaggcccacatgtctctcaagtacctgtcccctcgctctggtgattatttcttgcagaatcaccacacgagaccatcccggcagtcatggttttgctttagttttccaagtccgtttcagtcccttccttggtctgaagaaattctgcagtggcgagcagtttcccacttgccaaagatcccttttaaccaacactagcccttgtttttaacacacgctccagcccttcatcagcctgggcagtcttaccaaaatgtttaaagtgatctcagaggggcccatggattaacgccctcatcccaaggtccgtcccatgacataacactccacacccgccccagccaacttcatgggtcactttttctggaaaataatgatctgtacagacaggacagaatgaaactcctgcggctctttggcctgaaagttgggaatggttgggggagagaagggcagcagcttattggtggtcttttcaccattggcagaaacagtgagagctgtgtggtgcagaaatccagaaatgaggtgtagggaattttgcctgccttcctgcagacctgagctggctttggaatgaggttaaagtgtcagggacgttgcctgagcccaaatgtgtagtgtggtctgggcaggcagacctttaggttttgctgcttagtcctgaggaagtggccactcttgtggcaggtgtagtatctggggcgagtgttgggggtaaaagcccaccctacagaaagtggaacagcccggacctgatgtgaaaggaccacgggtgttgtaagctgggaccggaaccaaactggaatcaaacgcgactgtaaattgtatcttataacttattaaataaaacattgctccgtaaaaaaaaaaa

SEQ ID NO: 115604 - DNA, 1000 bp, Homo Sapiens
catcagtctatccttctgcctccatatatcctgaacatcaaactatcccaggaaaaccatctagagtagtttgtttcaaaatattagccacagaccacctacatcacaataactcagggagcttatagaagtgaagattcctgaatataaacatagtaataattcaacctactgaatggaaatctctgctgaaatccacagttttcataagctccccagatgattcctgtgtacattaaatctagaaaccattagtttgagatctctcaaaaataaaaataaaaattgctttcagagagtagcccatgaaatttcccattcttcaaggacaaattccttctgttcagccttggtcctccaactgcagtttacaatttttgttcttctcctgtaaagaatgtcaatggttatcaccttcaatagtttcaatatgtcccccaaagttatgtgtttgaaacttgcaatagtattgggagatggggcctaatgaggtgattaggtgaagtctctgccctcatgaaaagattaatcccattatctcaggagtgtgttggttataaaagcaagtttggctccctcttttcctcacacactctttttcccttctgccttcacctttgccgtgggtggacacagcaagaaggccctcatcagatgctggccccttggtcttgaatttcctagcctctacaactaagccaaataaatttctgtttattataaataacccagtctcagatattctgttacagaaacacaaaatggactaagacaccacccttttccaaaatctctccttgtgatggctccctttactaacctttcttttagctattccctttatgatagtttcttaattttttctatcaaaagctaaatatggcacacttgttctttacagaaaaataaagatattttaaacaaaatactagggccatggtatgtaataaaatttgaaacaataatttcaaataataaagattgaaaatgcttaacccag

SEQ ID NO: 115605 - DNA, 1000 bp, Homo Sapiens
gtccaactacgggaaccctcgccatggcctgttgctgttcatgatggctggcatgacagtgtccatgtacctcttccgggtaacagtgaccagtgactcccccaagctctggatcctggtattgggagctgtatttggtttctcctcgtatggccccattgccctgtttggagtcatagccaacgagagtgcccctcccaacttgtgtggcacctcccacgccattgtgggactcatggccaatgtgggcggctttctggctgggctgcccttcagcaccattgccaagcactacagttggagcacagccttctgggtggctgaagtgatttgtgcggccagcacggctgccttcttcctcctacgaaacatccgcaccaagatgggccgagtgtccaagaaggctgagtgaagagagtccaggttccggagcaccatcccacggtggccttccccctgcacgctctgcggggagaaaaggaggggcctgcctggctagccctgaacctttcactttccatttctgcgccttttctgtcacccgggtggcgctggaagttatcagtggctagtgaggtcccagctccctgatcctatgctctatttaaaagataacctttggccttagactccgttagctcctatttcctgccttcagacaaacaggaaacttctgcagtcaggaaggctcctgtacccttcttcttttcctaggccctgtcctgcccgcatcctaccccatccccacctgaagtgaggctatccctgcagctgcagggcactaatgacccttgacttctgctgggtcctaagtcctctcagcagtgggtgactgctgttgccaatacctcagactccagggaaagagaggaggccatcattctcactgtaccactaggcgcagttggatataggtgggaagaaaaggtgacttgttatagaagattaaaactagatttgatactgaaaaaaaaaaaaaaaaaaaaaaaaaaaaaaaaaa

SEQ ID NO: 115606 - DNA, 1000 bp, Homo Sapiens
ggtgatggttaaaacaacctgagatggagaggccaggagagagtataaggggatagcagcaaaccacctatctggccccaacacacctgagagaattcagcagcccagactgagggtctgggatggggtgaaccttccgcaccagagggacactccacagaagccacagcccagtaagtcaggcgcttctgcggcggctccagtgtggggtgaggcagtgaggttaggcccagagagctggagttggctcagatgaaaacctctgtcaacaaagaggggatgaatcacccttggcccagcctccccacaaagcctgaccctgggcaggtgagtgacgggtgtgtcctcgtagagtctattgctgcctggacacctttcttttgggagctcaaagcaagtgagctcacctacctgccaccgcccaggaccagtctgcccactgcctaaatgatgcccggccagcaggacctggcctgcagatcccagtgagtcatgagcctcagccccctccagcccactggggctctcacctccacatgtgggtagaagctttcctgccccctcttcctctagtagccctcagtgtcgaaggtgagcttgtaggtgcctgccttcatctggtccaggacagtgaccatctgggtctgtgtagctggggagagaatgaggctgcagagatggggaccagaagccccccaccccagctttcctgggtctgcatcccagtgggcctcagacactgccctgccacctgtcagacttgggtgagcagacacagtgaggctgttaggtcctgcagttccagagcagtctagggacaccactgccctgtctttaggaaatcacaacacagagaagcaaaaagggaaaaagtctcccacaatttatcccatgagcaagaaccactttatagctggcatatatttttccagattttctctatgcataagtatatttgtttaaaaacttataaagtggattatactatttgtattgtttt

SEQ ID NO: 115607 - DNA, 567 bp, Homo Sapiens
cagcgggcacgtgacatggccccggggagccgaggtgagcgtccagcttccggagccggagggggcccggcgtacccagcccccagcccgacgtgaccatgctgtcccgcctcctaaaagaacaccaggccaagcagaatgaacgcaaggagctgcaggaaaagaggaggcgagaggctatcactgcagcgacctgcctgacagaagctttggtggatcacctcaatgtgggtgtggcccaggcctacatgaaccagagaaagctggaccatgaggtgaagaccctacaggtccaggctgcccaatttgccaagcagacaggccagtggatcggaatggtggagaacttcaaccaggcactcaaggaaattggggatgtggagaactgggctcggagcatcgagctggacatgcgcaccattgccactgcactggaatatgtctacaaagggcagctgcagtctgccccttcctagcccctgttccctccccaaaccctatccctcctacctcacccgcagggggaaggagggaggctgacaagccttgaataaaacacaagcctcc

SEQ ID NO: 115608 - DNA, 1000 bp, Homo Sapiens
tatcagtgacttgtatgagcccattgatgatggttgtgagagccaggtgttctgttcctgctcctacgatgccaccacacactttgagacaacctgcaacgacatcaaagacatctacaaacgcatggctggcacggcctttgactttgagaacatgaagcgcaaacagaacgacgtctttggagaagctgagcagtgattgtggccgcccccagcccctgctgccccagcctgtgtctgttctcctcgagggctccagcatcctctgcttcccccaccacgttcccatcacccacctcattgatccactgaccaaatccttaaccctagcgatggcttgggagatggggggttggatagcatcctctttcttggcccttccttatcctaggaaaagagggttcctctccttgtgtgtgtctcttccccccacccctaattcttctgctctgtttgggaagacgtggaggaaaaggtgacttctgcccccaccgctcttacccccactgtagtggcctttggagatgcccccacctcccccccaccaactctcgcgtgttggagagaaggggccctcccagcacaaagttgcattcctccccccctaatttattctaatttattaactttgacccaccctttctgagcctgcagccttcccgtgtggcctgagggctgtcgagtgagctgccccagccccctcccagcccttgcccagcctgggggagtggggaaggcttgggcatggccccgttggaggttgatttgctgttttgtttcttgtctttgtgttctgtggtacttgctgagagaaaagaaaagtgagccaagcagaaggaggtggaaaacggacccaaaccccagtgtgccctgccccatgcctttcctttagtggtgggaaacccttatcttgcaaagtgaatgtgtccccttccccaccctctagtgtatttcacagaaaacaaaacctcccaataaaacggttgaaacctgaaaaaaa

SEQ ID NO: 115609 - DNA, 1000 bp, Homo Sapiens
ccaattgaacagaaatttgttagcatcagtgacctcctggtaccaaaagacttgggaacagaaagccagatctttatttcccgcacatatgatgccaccactcattttgagacaacgtgtgatgacattaaaaacatctataagaggatgacaggatcagagtttgactttgaggaaatgaagcgcaagaagaatgacatctatggggaagactaacagcagtacatgttattatgtaattaggacacatttaaaatttggcaaataatgcatataatgaaatcaatattgtaaggcctgcttttgtaatgaaaatggagagaatgaagagcgctgtgccagtaaatactccccttcacctttctaattattaacttgttttcatggagtggctattcagcattggcagttaccacattctgttcaatttaaccaaactggcttttttttttttctagtgaagttaaacaaacattgggataccgacacagacaacttgagacagtttttttaatcttttaatcagtgtagctatgtgctgctgctgctcaagagctggatccatacaggttgtgtgtcatctgtcctcttgaggttcaggagattctaaattgaatattccacggtttgggacagcatccggaagttttccctatgactttatattttgtattatgtcaaatgttatggcagggcccaaatagcatagccacaagtttggtttatgtgggcataaaattctaaccaaaccccagacatagggagtcatttggagaaagcctgtatgtggtgttttaacctaataaagttgatgagagagaaggggagaggaagcgaacataaagcgggtcaagtgtagtgcatcttttgtatctcaggcgtggcttcttcagtggaccaagctgcaatgcagtattgacttgacagagcctctacttctgtctcaaaatggctccaaatgatttctgtactgcaaaataaagccaaattctggaaacta

SEQ ID NO: 115610 - DNA, 1000 bp, Homo Sapiens
aaaacattttctctcgttaattttcctttgtcatttcctttgttgtctacattaaatcacttgaatccattgaaagtgcttcaagggtaatcttgggtttctagcaccttatctatgatgtttcttttgcaattggaataatcacttggtcaccttgccccaagctttcccctctgaataaatacccattgaactctgatggctgttatcaaaggaacttttctttgtttaaatttgctgatgcaggaattaagtttaaacacaactctatagaaagaaaggagattattacccagaattcacatgtagtgattattaaggacaatttttttttttaactaaaaaagttggcggcaggggtggggggtggcaatcatttttcttcctatacatacaaaggatattgtcaaaaatggcgttcttctcttgtggcctgttattctgattgctgctgtatacagttttgtcactctttagtttttagttaagcatactgatagactttcctctaaaagccattcactccagattttacctggggaatattctacatactgcttactttctctataaaactcatcaataaatcatgaaaggcactgagttttgtaaatcaggaccctaaatgtttaattgtaaataagtttcagataattattatagctttgcgttgaagtttgttgttttttttctcaactagttaagtcaactgcttctgaaataactctgtattgtagattatgcagatctttacaggcataaatatttaaactgtaatatgctaacttgaagagattgcaataaagctgcttcagctaaccctgtttatgtttaaatactagggtttgttctatattttatacatgcattttggatgattaaagaatgcctggttttcgtttgcaatttgcttgtgtaaatcaggttgtaaaaaggcagataaattgaaatgtttgtggtatgaggaaataaaagaatggaattagctttcattcagaaa

SEQ ID NO: 115611 - DNA, 1000 bp, Homo Sapiens
ccacccctttctatccccggtcaccctatggggcagcaaaactctatgcctattggattgtggtgaacttccgtgaggcgtataatctctttgcagtgaacggcattctcttcaatcatgagagtcccagaagaggagctaatttcgttactcgaaaaattagccggtcagtagctaagatttaccttggacaactggaatgtttcagtttgggaaatctggatgccaaacgagattggggccatgccaaggactatgtggaggctatgtggttgatgttgcagaatgatgagccggaggacttcgttatagctactggggaggtccatagtgtccgggaatttgtcgagaaatcattcttgcacattggaaaaaccattgtgtgggaaggaaagaatgaaaatgaagtgggcagatgtaaagagaccggcaaagttcacgtgactgtggatctcaagtactaccggccaactgaagtggactttctgcagggcgactgcaccaaagcgaaacagaagctgaactggaagccccgggtcgctttcgatgagctggtgagggagatggtgcacgccgacgtggagctcatgaggacaaaccccaatgcctgagcagcgcctcggagcccggcccgccctccggctacaatccccgcagagtctccggtgcagacgcgctgcggggatggggagcggcgtgccaatctgcgggtcccctgcggcccctgctgccgctgcgctgtcccggccgcaagagcggggccgccccgccgaggtttgtagcagccgggatgtgaccctccagggtttgggtcgctttgcgtttgtcgaagcctcctctgaatggctttgtgaaatcaagatgttttaatcacattcactttacttgaaattatgttgttacacaacaaattgtggggccttcaaattgtttttctcttttcatattaaaaatggtctttctgtgaactagcaaaaaaaaaaaaaaaaaaaaaaaaaaa

SEQ ID NO: 115612 - DNA, 423 bp, Homo Sapiens
ctgcagctgcctgaaggagccatctcatccacagctcttccttgagcagccatggccagctccaggcgaggcctcctgctcctgctgctgctgactgcccaccttggaccctcagaggctcagcactggtcccatggctggtaccctggaggaaagcgagccctcagctcagcccaggatccccagaatgcccttaggcccccaggaagggccctggacactgcagcaggcagcccagtccagactgcccatggcctcccaagtgatgccctggctcccctggacgacagcatgccctgggagggcaggaccacggcccagtggtcccttcacaggaagcgacacctggcacggacactgctgaccgcagcccgagagccccgccccgccccgccatcctccaataaagtgtgaggttctccg

SEQ ID NO: 115613 - DNA, 1000 bp, Homo Sapiens
gagatttgtctaccatgattggcaagggcacaggagctgcaagttttgacgaatttggcaattctaagtaccagaatcggagaacaatgagcagttctgatcgggcaatgatgaatgcattcaaagaaatcactaccatggcagacagaatcaatctacctcgaaatatagttgatcgaacaaataatttattcaagcaagtatatgaacagaagagcctgaagggaagagctaatgatgctatagcttctgcttgtctctatattgcctgtagacaagaaggggttcctaggacatttaaagaaatatgtgccgtatcacgaatttctaagaaagaaattggtcggtgttttaaacttattttgaaagcgctagaaaccagtgtggatttgattacaactggggacttcatgtccaggttctgttccaacctttgtcttcctaaacaagtacagatggcagctacacatatagcccgtaaagctgtggaactggacttggttcctgggaggagccccatctctgtggcagcggcagctatttacatggcctcacaggcatcagctgaaaagaggacccaaaaagaaattggagatattgctggtgttgctgatgttacaatcagacagtcctatagactgatctatcctcgagccccagatctgtttcctacagacttcaaatttgacaccccagtggacaaactaccacagctataaattgaggcagctaacgtcaaattcttgaatacaaaactttgcctgttgtacatagcctatacaaaatgctgggttgagcctttcatgaggaaaaacaaaagacatggtacgcattccagggctgaatactattgcttggcattctgtatgtatatactagtgaaacatatttaatgatttaaatttcttatcaaatttcttttgtagcaatctaggaaactgtattttggaagatatttgaaattatgtaattcttgaataaaacatttttcaaaactcaa

SEQ ID NO: 115614 - DNA, 1000 bp, Homo Sapiens
tcacttattcgtatgggatttcctcagcacaccattgcttctttatctgaccaggatgcaaaaccctctttcagcatggcgcatttggatggcaatactgagccagggcttacattaggaggctatttctgcccacagtgtcgggcaaagtactgtgagctacctgttgaatgtaaaatctgtggtcttactttggtgtctgctccccacttggcacggtcttaccatcatttgtttcctttggatgcttttcaagaaattcccctagaagaatataatggagaaagattttgttatggatgtcagggggaattgaaagaccaacatgtttatgtttgtgctgtgtgccaaaatgttttctgtgtggactgtgatgtttttgttcatgattctctacactgttgccctggctgtattcataagattccagctccttcaggtgtttgattccagcatgtagtatacattgtatgtgttaaaaagaaatttgcaactgtgaataaaaggacttctttagaagaagcttcatttaaaacatgaaaggataatctgacttaagaaactttttgctaagaaaaggtaatattttattaaattttaaatttgtgttgtcacagaaatacctgaaattcagtagtacttcattcaattaattttgttttctattattttgagttatactgttttcaaagtcattatgcagtatgtataaacttataagaattaaattgatgtgataattttatgtttttataattaaatatagaatctttatgatttatgttaattcattaatttagtgtaagaagaaagttaagtctgaatgtaaattcagtgtaagatgaaaatttatcaatacttatgaaattaggctgggcgctgtggctcacacctgtaatcccaacactttgggaggctgaggtgggcagatcacttgaggtcaggagttcgagaccagcctggccaacatggtgaaaccccgtcactactaaaaatacaa

SEQ ID NO: 115615 - DNA, 1000 bp, Homo Sapiens
gatattggtgattaaggctgcagaagacagtgcgttgcagtatatgaacttcatgaatgtcatctttgcagcacagaaacagaatattttgattgatgcctgtgttttagactccgactcagggctcctccaacaggcttgtgacatcacgggaggactgtacctgaaggtgcctcagatgccttctcttctgcagtatttgctgtgggtgtttcttcccgatcaagatcagagatctcagttaatcctcccacccccagttcatgttgactacagggctgcttgcttctgtcatcgaaatctcattgaaattggttatgtctgttctgtgtgtttgtcaatattctgcaatttcagccccatttgtactacgtgcgagacagcctttaaaatttctctgcctccagtgctgaaagccaagaaaaagaaactgaaagtgtctgcctgaggataaaatattttccccatcttttagagctgttaatagaaattatatagcagattctttgttgggaagactgaaaaaaataaagataggtataggataatttttaatatggtgaccttacagaaaatatttcccaaacatccttttcatcctgtgcttctggaggactgatttgtttgagggaatcattctatgcattatatcctaaaatattctatgactggtttctgtccatgtttgtggctttcatttttttaatgggatgactattagtcaaagtcagcttgtcatgactcatcataggctttctaacctactccctgaatccgggtcctcattgtgaaatgcatgccatacgaaatttgaacgtagctttggaaaaagggactatttgtggagtaatggcattaatcaacatagaacatcttatttgaatcaacagttaacttcagtagtcatgtgaataaaattcttattgtctaaattgagacagcctcagatatttgcagatatttactttttgtctgatatcagtacatatttggacaaagt

SEQ ID NO: 115616 - DNA, 1000 bp, Homo Sapiens
gtgactgtgggtctggaatggctggtgtacttgggaatgtactatcaggattttacagcaatgctgggaaatgacagggaaaatgacaggaatgaatctcaccagattttttatgtactcagcagagccttgagttacggtgtttattttccaatcaagtgaagatatctcctacttctcctactggaacatctcagcttctgcagtgaagaaaaattcctgtgatagttcagttctttagtttttctatttgaaaaaaaaaaaatcatttaaatgatcctttgttcacggctctccttaatgactgagtgaacagttcctatctgtatatttgactaaaccttttcctaagctatctctcatggttcctatgtttttttatcataattaaaagcaaaaccatctggatcacctaacagtcagaggtcagtatctcagcgtgtgaattatagaggaatacagagagaacctctcccactttttacttttcgtccaaataaaatgcatggtgtaccagaagttgaagatcgggttgaggattggggctagctcgatgacactaaggccccaacatcgcgggacctgctgtggcgcggattcttaggaacgctgttctagccggccccctctccaggggtcgccgtggccggcattatttcctagttcttcttgtaaccctgaggtgccagcgcggggagtgaggaggggtcagggggctaaggatgcaacctctgacgttctgcgccttcctaggagagtcttacatgtgttgagatttcacaagcaatgcgagttgtaaaataccagctctacaagaaactaggctctgtgacggcatagttttcagtagctttatcacaatattcacaatggagaattatatgacatggtagcagaaataggcccttttatgtgttgcttctattttacctcaaattgtagatatagggtaatcaataaaatccatccatgcctttcacacactaaaaaaaaaaaaaaa

SEQ ID NO: 115617 - DNA, 1000 bp, Homo Sapiens
gtcgactcatccaaggaccctccaaggctggcagtgtggtgttgctactattaaggaaacaggcttggggcagccccactgctggtccaagtgtgtggagggctgagtgtgctggccctgtgactcaggaccagctctggagtctccagcccaccctccgcaccgtcccctcctgagcagcactcggcgccagcagcctctgccagagtggaagccagagccctgcaggtgtccggcgcagccgtgggagctgaggatctggcacttgagaggcagcagctccttgaaggtcctctgcctccagctgtggccctgcatccagatacctgcctcgtccgaggcagacacccccacccctgcctcctccagacccccctccccgctgcctgcaccgcctggagcagcatgggggtcagacccctgctccagggccacttgagttgtgggcccaggagccctgcggctgccggcaggtgaactgagtgcccgacagctgagaccggcgcccacccgtcctgagcatagctctgtaggcagtgcgggcatagcctgcatagtgtcctggcgctgggagttccccgtggacagagccagagggcagtggcgctccctgtcagagctggatcaggccccccatcgaggagggagggcagacggaggcccgagagcctccccaggcctcttcgtgggaaggccccagtaccactcgtaggaggtctcagctctggcatggctgccccggatgtggccgagggggcttcaccctgtgtccttaggagggggtggccttgaggcagagccgtgcctcactgacccccaggggcctcatcctccccatggaatgggctgtatgtcctgccccaacttggcccgcagcaggccagacccccctacccccgcccagagctcagtagccagcctgggtcctgccagggcttctcgagggcttgggggaagaatagatttagtaaagcaggaagatctgttgttacttaacaga

SEQ ID NO: 115618 - DNA, 1000 bp, Homo Sapiens
tgtctgcttcatcggccggccgtggcgtgtcgtggatggccacctgaaccttcctgtatgcaagggtatgatggaggccatgctgtaccacatcatgaccaggcctggcatccccgagagctccctgctgcgccactaccagggggtcctgcagcccgtcgccgtgctggagttgctccagggcctggagtccctcggctgcatccggaagcgctggctgagaaagccaaggcctgtctcgctcttctctacacccgtggtggaagaggtggaagtgccctccagcctggacgagagccccatggctttctatgagcccaccttggactgtaccctccggctgggccgtgtgttcccccacgaggtcaactggaacaagtggatccacctctaggacccctgtgggcgtcccctccctcccagccaccgcctgccacaccactcctgcctggtgctcggcagaccccactgtgccctggccttgggtctgccgagcctcctgcagcaggggacgggtgctttggccagagtcacagactgacacgtttcccactgtactggaactctggaaagaggggctccccgacctgcccatcccccaggctcttctgggccttccccttgggaactggcctcatcacactgggagttggtgcttcttgtctctgggtctccagagtttgccccgcctgtgcacacctcacattccagactctagccatctcggcaggatctcctggctccttgagtgcccaggtgccaccaagaggaagggccttgtgggatacaccttgcagaatagggatcggtgtgccccgctgcgaggggccccccatgggggctgtggcccctccgcaggcaggacatcccaacccctggctgggactgaaccacccagagcggagcggctcccttttcagccttgtgagtcacctggcaggccccagctgggctggctgtccgtgtccctcagcctggctggtgattccttgcaggaggg

SEQ ID NO: 115619 - DNA, 1000 bp, Homo Sapiens
aaccgtgcaaatttctgatctagagaccctgaggggcgagctgcgcttcgacatcaggaaggcggggaccctgcacggcttcacggcctggtttagcgtccacttccagagcctgcaggaggggcagccgccgcaggtgctcagcaccgggcccttccaccccaccacacactggaagcagacgctgttcatgatggacgacccagtccctgtccatacaggagacgtggtcacgggttcagttgtgttgcagagaaacccagtgtggagaaggcacatgtctgtggctctgagctgggctgtcacttccagacaagaccccacatctcaaaaagttggagaaaaagtcttccccatctggagatgacagttgatgctttatttggaaagcagtgtgcatatcttgaggggtgatgaacacaagcaaaccaagttgcacctggcttctgcacactcctgcgaaagtcggtgaacattcactccacattgacccctccctagcctggcaggtgacgtcagggtccttcacagacaaacacgcttgggctcggcaggagctgccgtggccacccccgctgcccagtgtctgccctctagaagtaggctgtgtttccaggtgttcacccgtggtgcccacagtgccgacccgtggctgggtcggagctccatgttcctaagctaggtctaggtctacactcctaggacgcacgcatatcagcccgtgtaccctgtgacagtgactgtccccacctcctatgttagtggtgcccttactgccgtcgctcatccactcgtgtgggacgtaggattgcacagggctgtgccagtggcgtgtagggaacactgccctggctcagcgtgcgagctaaggtggtgatgtatgcgatgggactctgcatgggatagtacagttgtgtagacgtcttccaaataaattatgtgttggtccatcgcacatgctcaataaatatttttaaatgagtgaatgtcaaaaaaaaaa

SEQ ID NO: 115620 - DNA, 1000 bp, Homo Sapiens
aaagtcgatgaaaagtaaccactgccactgtcttgtgtcagaacttttacagtacagaaaataacagaatagccttctgtaatgaggcgtttgttagagttttgcatgagattctaatacttcagtaggaccctacctacgtggttcatctacaatggttaccataaaaaatctggcaggattttaaaactcaatcagtctttcctttgagctagtgacttgaaaagaaagagagaaggaaaagagaccatattaagtccatgccagttgcttggctagaatatgatcaacgacttgtagtagactcaagtttttaaaaaacactattttacttaaactgtttcttatctaaattcttgcagagtgtcaatgttatcattgattatagaagacagggataatacctttatctctggccactcaaaaatgcagtgccaggagtgctaaacctagaggccaatactgatgacctggaaggtgatccatatgattgtcaccacaaagtgcttttacacaaaaacttgaaaatttgaaaaacatgatttttttaagtttctcatctcaccagtcttggtgtttatattgcaaatctatcaaagtaagaaataatttgtgctgtatacaaattacatggggaacataaaggagtgagatccttctgtgataaaatgaattcaccactctggttacccaactacagaacctcctttgatcaggccagtaggttgtgatgcaggctggagcccccgaatgccccacacacactgcagcattgaccagaccatccgaaacctgcgtccctggtgatgttctcaagcctcggaagtggcaaatggaaatgatatggccggttgcggttgtaggagagttgtgacttaggcaggagtcgacctcctcaagtaatggaacgatttcaaaggcaggctgccctgaccaaaaatatctgccatgaataaaggtgcctgaaatcctaaaaaaaaaaaagaaaaaaaaaaaaaaa

SEQ ID NO: 115621 - DNA, 1000 bp, Homo Sapiens
ggtcattggcaagctgatccagtgtctctttgggccacttcaggcggggccgagcaatgcaggaggcaagagaaagctgtccctgatgctggatgaggggagctcatgcccaacacctgccaagttcaacacctgccctctacctggtgcccttctgcaggacccctacttcatccagtcgccttctacttacagcctctcccagagacaaatttgggccttagccctcacagggccaggggccccatcatctctgacatcccagaagactctccatcccctgaggggaccaggctttctccctccagtgatggcaggagcccccccgccactgcctgtggctgtggtgcaggccatcctggaagggaaagggagcttcagccccgaggggcccaggaatgcccaacagcctgaaccaggggatcccagggagatacctgacagggggcctctgggcctggaaagcggggacaggagcccagagagtctgctgcctccgatgctgcttcagccccctcaagaaagtgtggaacctgcagggcctctagatgtgctgggccccagtctccaagggcgagaatggaccctgatggacttggacatggagctgtccttgatgcagcccttggttccagagcggggtgagcctgagctggcggtcaaggggttaaattctccaagcccagggaaggaccccacgctcggggccccactcctgctggatgtccaggcggccttgggaggcccagccctgggcctgcctggggctttaaccatttatagcactcctgagagccggactgcctcctacttgggcccggaagccagtccctccccctaagaccccgcgcctctgaaggggcttggaaccagtccgccgctgcacatccttcttggcttcctggccgcctacgggggtgagcgaagcccccactactaaatggcctctctccactaccccgactatccctgcacataaactccgtttttttttttcacc

SEQ ID NO: 115622 - DNA, 1000 bp, Homo Sapiens
tgtatatatagagatgttctataagtgtgagaaagtatatgctttaatagatactgtaattataagatatttttaattaaatatttttttgtaaatattatgtgtgtgtttttttttaatctatgggaatatttcttttggaaaatcatttttcagctcaattacagagctcttgatatcttgaatgtcttttctgtttggcctggctcttaatttgcttttgttttgcccagtatagactcggaagtaacagttatagctagtggtcttgcatgattgcatgagatgtttaatcacaaattaaacttgttctgagtccattcaaatgtgtttttttaaatgtagattgaaatctttgtatttgaagcatacatgttgaaaatacaccttatcagtttttaagtacagggttttatagtgtaatatatacagagtaagtgtttgtttttgtttttcaactgaggtcaaaatggattctgaatgattttgcatatgggatgaggaaatgcttggatccttaaggagtttacgaaatctgctgttttatcaaagtgaaaaaaaattgcttattactcttcattttacactaaagcttaatgtcactaagtttcatgtctgtacagattatttaaatcatggaaatgaaaaaaatgttctctgcttgctaccaaaggacaaactcttggaaatgaacactttctgctttccttcctccaaagaattaataggcaacagtgggagaaaaaaaaggcataatggcaaatccttcaagcagggataaaagtcgatcttcaaacattaacttaagcagaccaaaaattctgatgaccgcatctagattatttttttataaaaatgattttcactatagctatgttacgctaagctactgtcccatctcttgtgatgtgtaacttttacatgtgaatattaaagtagatttctctgtcttgtaaaaaaaaaaaaaaaaaaaaaaaaaaaaaaaaaaaaaaaaaaaaaa

SEQ ID NO: 115623 - DNA, 1000 bp, Homo Sapiens
tgcgagccggcctcctgcccgcccctgcccccgctgggctgcctgctgggcgagacccgcgacgcgtgcggctgctgccctatgtgcgcccgcggcgagggcgagccgtgcgggggtggcggcgccggcagggggtactgcgcgccgggcatggagtgcgtgaagagccgcaagaggcggaagggtaaagccggggcagcagccggcggtccgggtgtaagcggcgtgtgcgtgtgcaagagccgctacccggtgtgcggcagcgacggcaccacctacccgagcggctgccagctgcgcgccgccagccagagggccgagagccgcggggagaaggccatcacccaggtcagcaagggcacctgcgagcaaggtccttccatagtgacgccccccaaggacatctggaatgtcactggtgcccaggtgtacttgagctgtgaggtcatcggaatcccgacacctgtcctcatctggaacaaggtaaaaaggggtcactatggagttcaaaggacagaactcctgcctggtgaccgggacaacctggccattcagacccggggtggcccagaaaagcatgaagtaactggctgggtgctggtatctcctctaagtaaggaagatgctggagaatatgagtgccatgcatccaattcccaaggacaggcttcagcatcagcaaaaattacagtggttgatgccttacatgaaataccagtgaaaaaaggtgaaggtgccgagctataaacctccagaatattattagtctgcatggttaaaagtagtcatggataactacattacctgttcttgcctaataagtttcttttaatccaatccactaacactttagttatattcactggttttacacagagaaatacaaaataaagatcacacatcaagactatctacaaaaatttattatatatttacagaagaaaagcatgcatatcattaaacaaataaaatactttttatcacaaaaaaaaaaaaaaaa

SEQ ID NO: 115624 - DNA, 1000 bp, Homo Sapiens
gtaatcaacctgttaatccaaggtctttagaaaaacttgaaattattcctgcaagccaattttgtccacgtgttgagatcattgctacaatgaaaaagaagggtgagaagagatgtctgaatccagaatcgaaggccatcaagaatttactgaaagcagttagcaaggaaatgtctaaaagatctccttaaaaccagaggggagcaaaatcgatgcagtgcttccaaggatggaccacacagaggctgcctctcccatcacttccctacatggagtatatgtcaagccataattgttcttagtttgcagttacactaaaaggtgaccaatgatggtcaccaaatcagctgctactactcctgtaggaaggttaatgttcatcatcctaagctattcagtaataactctaccctggcactataatgtaagctctactgaggtgctatgttcttagtggatgttctgaccctgcttcaaatatttccctcacctttcccatcttccaagggtactaaggaatctttctgctttggggtttatcagaattctcagaatctcaaataactaaaaggtatgcaatcaaatctgctttttaaagaatgctctttacttcatggacttccactgccatcctcccaaggggcccaaattctttcagtggctacctacatacaattccaaacacatacaggaaggtagaaatatctgaaaatgtatgtgtaagtattcttatttaatgaaagactgtacaaagtataagtcttagatgtatatatttcctatattgttttcagtgtacatggaataacatgtaattaagtactatgtatcaatgagtaacaggaaaattttaaaaatacagatagatatatgctctgcatgttacataagataaatgtgctgaatggttttcaaataaaaatgaggtactctcctggaaatattaagaaagactatctaaatgttgaaagatcaaaaggttaataaagtaattataact

SEQ ID NO: 115625 - DNA, 1000 bp, Homo Sapiens
cagttgggttcctcctggttttcttttgttacaaccacccttgcctgtttacattaattgcaaggagcataacgtacaggctgtatgtacaatcctgggcattgactctgtgacatttctagcatatccaaggcaccaccagtgatttctcctgtttcttggtgggggtgggggggaaggtacgtattctgcaatatggctaaaccctttcctgattgagagttaaagcaataggagtcaagttactggtgccacagatctggaggtatgataggtcaggggctaggtgttgaacttagttaatggaagactgagagcagaacaggtttgtcatctccgcaaggccagaaagtgatcacaaaaagaggcagatgatagacactggggtagggtcataccacagggaaatacctttcctgggcttgttttctagcatatcactgacctgggatctttgggtgatcaagggtgtggttagtggaggctctgtgctgcacgtatgcagtatcctatctctttctacatcagatcaaaacactaagttggtgtactgcctcgaccttttttcagctcatcctggaacatatacagagttgagagttttagacaatctctaggtagaggagacaagatgtagacccagacagaagaaatctgcttccctaccatggctattccagcaccccaacctgtaattgccaagtcctctaaggtactaatttgtagctgctctgaagtaaggatttcggattcagctggtagggaaagactctgcacctgctgtcttagggaagaaatggttcaaatccatgtggtgacattgcattagtctccctttcactgttttcttattctgtaattgtttgttatatttcccaaaaacgtcttgatcactaagcaaagctgctagtgggattctatatttcgtgtcatcttttttattataatttattgcaaatttttttctgaataaatatatgttgtgtgaaaaaaaaaaaaa

SEQ ID NO: 115626 - DNA, 1000 bp, Homo Sapiens
atgtgttatagttaatatatgcacctaccttcttccgttagtgcatcagtaaatgtgttattttgtcatttttccaaagagagtgttgtaggttttccctgtagttcttcctttatagcttttcttctgataaccatgacttcaggagctttaaaactatctatcttgcatttgtgtctggcggagaactagccatcagcctcctgaagcctgccatcattgttaatttgaggactgggctgtcttggggctcagaaggtaaagaactatttgagcagatgtgtgtgggtggcactggattccacccaactgccaagttagtattgttagagatttcattttacaacacaaaaataagcctgtgtcaaagattttaaaatcatggaaagttaaaatctagaaagaccttagagaaccagccaaccaactctctcattttaaaagtgaaggattcatagcacagattacttgcctaagatcatccaggaacgaagacaagaatccaaatgtacttggggacaagaattagtccccaaattcagtgttcttcctagtattaaacattgcccctttcgacaaattttggatttcattcttgttatatttcagtactcttgctgatttattttaggtttaactggtaaagaatgaacatttcagaagtgttaggattagtcagtgtcatcgcttatgtatatgaatcacttgccaaagacactggctctcctcagctgtaaccagcatgtcaaatgtgaagattattgtgtgggatcctttggtttcattgttatgatgtattttataaatgtactagttatatccttgtttatgtatttttgctgatctttcataaagcagaatggtatgtatcggattgttttaatgttatatattggattgtattcgatgttacaaaaccaatattctatggagaatgaaaaaaataaaggactaaattaactggaaaaaaaaaaaaaaaaaaaaaaaaaaaaaaaaaaaa

SEQ ID NO: 115627 - DNA, 1000 bp, Homo Sapiens
catgaagtgtgacgtggacatccgcaaagacctgtacgccaacacggtgctgtcgggcggcaccaccatgtacccgggcattgccgacaggatgcagaaggagatcaccgccctggcgcccagcaccatgaagatcaagatcatcgcacccccagagcgcaagtactcggtgtggatcggtggctccatcctggcctcactgtccaccttccagcagatgtggattagcaagcaggagtacgacgagtcgggcccctccatcgtccaccgcaaatgcttctaaacggactcagcagatgcgtagcatttgctgcatgggttaattgagaatagaaatttgcccctggcaaatgcacacacctcatgctagcctcacgaaactggaataagccttcgaaaagaaattgtccttgaagcttgtatctgatatcagcactggattgtagaacttgttgctgattttgaccttgtattgaagttaactgttccccttggtatttgtttaataccctgtacatatctttgagttcaacctttagtacgtgtggcttggtcacttcgtggctaaggtaagaacgtgcttgtggaagacaagtctgtggcttggtgagtctgtgtggccagcagcctctgatctgtgcagggtattaacgtgtcagggctgagtgttctgggatttctctagaggctggcaagaaccagttgttttgtcttgcgggtctgtcagggttggaaagtccaagccgtaggacccagtttcctttcttagctgatgtctttggccagaacaccgtgggctgttacttgctttgagttggaagcggtttgcatttacgcctgtaaatgtattcattcttaatttatgtaaggttttttttgtacgcaattctcgattctttgaagagatgacaacaaattttggttttctactgttatgtgagaacattaggccccagcaacacgtcattgtgtaaggaaaaataaaagtgctgccgtaacc

SEQ ID NO: 115628 - DNA, 1000 bp, Homo Sapiens
gtctccaagagtgccaactactaccatacgtctcagggagacccaataggcttaatcctgttgggagaagttgcccttggaaacatgtatgaactgaagcacgcttcacatatcagcaggttacccaagggcaagcacagtgtcaaaggtttgggcaaaactacccctgatccttcagctaacattagtctggatggtgtagacgttcctcttgggaccgggatttcatctggtgtgatagacacctctctactatataacgagtacattgtctatgatattgctcaggtaaatctgaagtatctgctgaaactgaaattcaattttaagacctccctgtggtaattgggagaggtagccgagtcacacccggtggctgtggtatgaattcacccgaagcgcttctgcaccaactcacctggccgctaagttgctgatgggtagtacctgtactaaaccacctcagaaaggattttacagaaacgtgttaaaggttttctctaacttctcaagtcccttgttttgtgttgtgtctgtggggaggggttgttttggggttgtttttgttttttcttgccaggtagataaaactgacatagagaaaaggctggagagagattctgttgcatagactagtcctatggaaaaaaccaaagcttcgttagaatgtctgccttactggtttccccagggaaggaaaaatacacttccacccttttttctaagtgttcgtctttagttttgattttggaaagatgttaagcatttatttttagttaaaataaaaactaatttcatactatttagattttcttttttatcttgcacttattgtcccctttttagttttttttgtttgcctcttgtggtgaggggtgtgggaagaccaaaggaaggaacgctaacaatttctcatacttagaaacaaaaagagctttccttctccaggaatactgaacatgggagctcttgaaatatgtagtattaaaagttgcatttg

SEQ ID NO: 115629 - DNA, 1000 bp, Homo Sapiens
aaaagtccataccttatatatgcacttaatttgttggggctttacatactttatcaatgtgtctttctaagaaatcaagtaatgaatccaactgcttaaagttggtattaataaaaagacaaccacatagttcgtttaccttcaaactttaggtttttttaatgatatactgatcttcattaccaataggcaaattaatcaccctaccaactttactgtcctaacatggactttcaaaaagaaaaaatgacaccatcttttattctttttttttttttttttttgagagagagtcttactctgccgcccaaactggagtgcagtggcacaatcttggctcactgcaacctctacctcctgggttcaagtgattctcttgcctcagcctcccgagttgctgggattgcgggcatggtggcgtgagcctgtagtcctagctactcgggaggctgaggcaggagaatagcctgaacctgggaatcggaggttgcagggccaagatcgccccactgcactccagcctggcaatagaccgagctccgtctccaaaaaaaaaaatacaatttttatttcttttactttttttagtaagttaatgtatataaaaatggcttcggacaaaatatctctgagttctgtgtattttcagtcaaaactttaaacctgtagaatcaatttaagtgttgaaaaaaatttgtctgaaacatttcataatttgtttccagcatgaggtatctaaggatttagaccagaggtctagattaatactctatttttacatttaaaccttttattataagtcttacataaaccatttttgttactctcttccacatgttactggataaattgtttagtggaaaataggctttttaatcatgaatatgatgacaatcagttatacagttataaaattaaaagtttgaaaagcaatattgtatatttttatctatataaaataactaaaatgtatctaagaataataaaatcacgttaaacc

SEQ ID NO: 115630 - DNA, 1000 bp, Homo Sapiens
tcggcctcccaaaatgctgggattacaggcctgagccactgcgcccagccaggatttgaattattttaactcatccatgggctgccctagaatgtcacaaatgagggttgtttaatgcctttcttatagctgctactggaacactattatgacctaatttatgagccatccttactcatctacaagtgctgaagcaatgttacatacttttttgctaaactcagattttttagcctaatttcttgtcctcctatccacctgcatccacacatggcctgcatggggctgccttccctgcagtgttctgcagccatgcttcagggtatagctgttggtggacagcctcaggtcttgggggcactatagccactaaacgaggtgtgaaaggctcaagaggatgaccagcaattaattatccccagaaagtgaaggaaaagagacctttagggatgttgctggtcaagtcttgatttgaccggagtcaaatcaatcttcaagcaatcttggaatcctcaactgcagtaagcatttcaaaatgcaaacaaactgcttaacaactgacaagacaccagcccatacgctgctcttccaacagtgggttctagctttgaacaaaagtgctaaacatttccttgaatatattcttcctctttttgtcctcatcactcaatactggtgctcttgtcacaggtagaacagcttgtttcttttccatctattcaagtgtgtttctaattctaaaatgctgatcttctctggagtctatggtaggcaattatggtcactggaatagtttgtcttgttttaaaatattattggtgcatgtacaacagcatccaacatatctgtcttgttcctagatatatagctctgattttaggccttttgtgcataccattacaatatggtggggtaagacattctacagtagcctgtgctgaactgatctcttaaataaacttgcttctggttaactatgttgaaaaaaaaaaaaaaaaaa

SEQ ID NO: 115631 - DNA, 1000 bp, Homo Sapiens
taaattgaaaattaaagtcagatgagaataggaataatactttgccacttctgcattatttagaaacatacgttattgtacatttgtaaaccatttactgtctgggcaatagtgactccgtttaataaaagcttccgtagtgcattggtatggattaaatgcataaaatattcttagactcgatgctgtataaaatattatgggaaaaaaagaaaatatgttattttgcctctaaacttttattgaagttttatttggcaggaaaaaaaattgaatcttggtcaacatttaaaccaaagtaaaaggggaaaaaccaaagttatttgttttgcatggctaagccattctgttatctctgtaaatactgtgatttcttttttattttctctttagaattttgttaaagaaattctaaaatttttaaacacctgctctccacaataaatcacaaacactaaaataaaattacttccatataaatattattttctcttttggtgtgggagatcaaaggtttaaagtctaacttctaagatatatttgcagaaagaagcaacatgacaatagagagagttatgctacaattatttcttggtttccacttgcaatggttaattaagtccaaaaacagctgtcagaacctcgagagcagaacatgagaaactcagagctctggaccgaaagcagaaagtttgccgggaaaaaaaaagacaacattattaccatcgattcagtgcctggataaagaggaaagcttacttgtttaatggcagccacatgcacgaagatgctaagaagaaaaagaattccaaatcctcaacttttgaggtttcggctctccaatttaactctttggcaacaggaaacaggttttgcaagttcaaggttcactccctatatgtgattataggaattgtttgtggaaatggattaacatacccgtctatgcctaaaagataataaaactgaaatatgtcttcaaaaaaaaaaaaaaaaaaaa

SEQ ID NO: 115632 - DNA, 873 bp, Homo Sapiens
acttccccttcctgtacagggcaggttgtgcagctggaggcagagcagtcctctctggggagcctgaagcaaacatggatcaagaaactgtaggcaatgttgtcctgttggccatcgtcaccctcatcagcgtggtccagaatggattctttgcccataaagtggagcacgaaagcaggacccagaatgggaggagcttccagaggaccggaacacttgcctttgagcgggtctacactgccaaccagaactgtgtagatgcgtaccccactttcctcgctgtgctctggtctgcggggctactttgcagccaagttcctgctgcgtttgctggactgatgtacttgtttgtgaggcaaaagtactttgtcggttacctaggagagagaacgcagagcacccctggctacatatttgggaaacgcatcatactcttcctgttcctcatgtccgttgctggcatattcaactattacctcatcttctttttcggaagtgactttgaaaactacataaagacgatctccaccaccatctcccctctacttctcattccctaactctctgctgaatatggggttggtgttctcatctaatcaatacctacaagtcatcataattcagctcttgagagcattctgctcttctttagatggctgtaaatctattggccatctgggcttcacagcttgagttaaccttgcttttccgggaacaaaatgatgtcatgtcagctccgccccttgaacatgaccgtggccccaaatttgctattcccatgcattttgtttgtttcttcacttatcctgttctctgaagatgttttgtgaccaggtttgtgttttcttaaaataaaatgcagagacatgtttt

SEQ ID NO: 115633 - DNA, 1000 bp, Homo Sapiens
aacatcgtttcaaggagcgagattgacttaaatcttatcaaatgtcacttcaagaagatgtacggcaagaccctcagcagcatgatcatggaagacaccagcggcgactacaagaacgccctgctgagcctggtgggcagcgacccctgaggcacagaagaacaagagcaaagaccatgaagccagagtctccaggactcctcactcaacctcggccatggacgcaggttgggtgtgaggggggtcccagcctttcggtcttctatttccctatttccagtgctttccagccgggtttctgacccagaggtggaaccggcctggactcctcttcccaacttcctccaggtcatttcccagtgtgagcacaatgccaaccttagtgtttctccagccagacagatgcctcagcatgaagggcttggggacttgtggatcattccttcctccctgcaggagcttcccaagctggtcacagagtctcctgggcacaggttatacagaccccagccccattcccatctactgaaacagggtctccacaagaggggccagggaatatgggtttttaacaagcgtcttacaaaacacttctctatcatgcagccggagagctggctgggagcccttttgttttagaacacacatccttcagcagctgagaaatgaacacgaatccatcccaaccgagatgccattaacattcatctaaaaatgttaggctctaaatggacgaaaaattctctcgccatcttaataacaaaataaactacaaattcctgacccaaggacactgtgttataagaggcgtgggctcccctggtggctgaccaggtcagctgccctggccttgcacccctctgcatgcagcacagaagggtgtgaccatgccctcagcaccactcttgtccccactgaacggcaactgagactgggtacctggagattctgaagtgcctttgctgtggttttcaaaataataaagatttgtattcaactc

SEQ ID NO: 115634 - DNA, 1000 bp, Homo Sapiens
gcggccggcgcgacctccctctgcttcgtgtacccgctggattttgccagaacccgcctggcagcggacgtgggaaagtcaggcacagagcgcgagttccgaggcctgggagactgcctggtgaagatcaccaagtccgacggcatccggggcctgtaccagggcttcagtgtctccgtgcagggcatcatcatctaccgggcggcctacttcggcgtgtacgatacggccaagggcatgctccccgaccccaagaacacgcacatcgtggtgagctggatgatcgcgcagaccgtgacggccgtggccggcgtggtgtcctaccccttcgacacggtgcggcggcgcatgatgatgcagttcgggcgcaaaggagctgacatcatgtacacgggcaccgtcgactgttggaggaagatcttcagagatgaggggggcaaggccttcttcaagggtgcgtggtccaacgtcctgcggggcatggggggcgccttcgtgctggtcctgtacgacgagctcaagaaggtgatctaagggccgcggcctcctccacacacacacacaccaggggaaccaagagaaccacgtagaatcctcaaccgtgcggaccatcaaccttcgagaaattccagttgtctttttcccagccgcatcctgcctgtagatggccggggaaggctctagaaaaggggcgcattgcgatccaaccatcggcagccgattccgtgtcttgatcacggggtgggagggaaccgtggcgtccctgcgtggggcccatgggtgagacactccagtactgagacctagagtccagatgcttgtaggagccaagtcgtgttctaagtatttatttaaaacaaaagaatcacgttttcccatttgtacttcagcgctagcccctgttttgcacagccgagtactggcgagtatgttctatgttgggcctcctgctgcaaaacaataaacagaggacgcagaggtcaaaaaaaaaaaaaaaaaa

SEQ ID NO: 115635 - DNA, 1000 bp, Homo Sapiens
atgcaggctgtcgttccggttatgttgtgtaagtcaactcttcagcctcattcactgtcctggcttttatttaaagaaaaaaaaggcagtattccctttttaaatgagctttcaggaagttgctgagaaatggggtggaatagggaactgtaatggccactgaagcacgtgagagaccctcgcaaaatgatgtgaaaggaccagtttcttgaagtccagtgtttccacggctggatacctgtgtgtctccataaaagtcctgtcaccaaggacgttaaaggcattttattccagcgtcttctagagagcttagtgtatacagatgagggtgtccgctgctgctttccttcggaatccagtgcttccacagagattagcctgtagcttatatttgacattcttcactgtctgttgtttacctaccgtagctttttaccgttcacttccccttccaactatgtccagatgtgcaggctcctcctctctggactttctccaaaggcactgaccctcggcctctactttgtcccctcacctccaccccctcctgtcaccggccttgtgacattcactcagagaagaccacaccaaggaggggccgcggctggcccaggagagaacacggggaggtttgtttgtgtgaaaggaaagtagtccaggctgtccctgaaactgagtctgtggacactgtggaaagctttgaacaattgtgttttcgtcacaggagtctttgtaatgcttgtacagttgatgtcgatgctcactgcttctgctttttctttctttttattttaaaaaatctgaaggttctggtaacctgtggtgtatttttattttcctgtgactgtttttgttttgtttttttcctttttcctcccctttagccctattcatgtctctacccactatgcacagattaaacttcacctacaaactccttaatatgatctgtggagaatgtacacagtttaaacacatcaataaatactttaacttccaa

SEQ ID NO: 115636 - DNA, 1000 bp, Homo Sapiens
ctaagcttttaggccaaccctcctgactggatgggggcggcgggcgtggcatgcatgaaaagtaaacatcagagacctgaagaagcttataaaatagcttgggagaggccagtcaccaagacaggcatctcaaatcggctgattctgcatctggaaactgccttcatcttgaaagaaaagctccaggtcccttctccagccacccagccccaagatggtgatgctgctgctgctgctttccgcactggctggcctcttcggtgcggcagagggacaagcatttcatcttgggaagtgccccaatcctccggtgcaggagaattttgacgtgaataagtatctcggaagatggtacgaaattgagaagatcccaacaacctttgagaatggacgctgcatccaggccaactactcactaatggaaaacggaaagatcaaagtgttaaaccaggagttgagagctgatggaactgtgaatcaaatcgaaggtgaagccaccccagttaacctcacagagcctgccaagctggaagttaagttttcctggtttatgccatcggcaccgtactggatcctggccaccgactatgagaactatgccctcgtgtattcctgtacctgcatcatccaactttttcacgtggattttgcttggatcttggcaagaaaccctaatctccctccagaaacagtggactctctaaaaaatatcctgacttctaataacattgatgtcaagaaaatgacggtcacagaccaggtgaactgccccaagctctcgtaaccaggttctacagggaggctgcacccactccatgttacttctgcttcgctttcccctaccccaccccccccccataaagacaaaccaatcaaccacgacaaaggaagttgacctgaacatgtaaccatgccctaccctgttaccttgctagctgcaaaataaacttgttgctgacctgctgtgctcgcagtagattccaaaaaaaaaaaaaaaaaa

SEQ ID NO: 115637 - DNA, 1000 bp, Homo Sapiens
attattcagtgttgtgagtaaataaaaatgtgtgctctttactgtttttcatttttaaagaatattattatggaagcacgatttatttaaataggtacattgagacttttttttttttaatgttctgatacattaggatgaagttaaatcttaaatcttattagttgaattgttgtaaggacagtgatgtctggtaacaagatgtgactttttggtagcactgttgtggttcattcttttcaaatctatttttgtttaaaaacaatacaagttttagaaaacaaagcattaaaaaaaaagcctatcagtattatgggcaatatgtaaataaataaatgtaatatttcatcctttatttttcaggtaaaaggtcatgctgttacaggtgtagtttgtgtgcataaataatacttccgaattaaattatttaatatttgactgatttcaataactgtgaaaaataaaaaaggtgttgtattgcttgtgagaacttgaactgtttactagttaattgaagaaaaagtgtaacactaaggtgaacttgcttcccttttcactaattttgctaaactttgtaatgcacattcttagcatataactgaacacagttgaaaaattgtgcctgattataatgtatgtataatggtaggtgtttgtgtgtgattcatttttaaagaaatatttttctcaagctcctattactatttgtggttgtattatttcactaatcattagttaagactgtgctagtcttccctgggaaactaagaagagagcttttttatatacagtatattagaattttcctagtagctgaatttctgtattaggtctaaatattactgtatgttatataaagcaggtatgtcaagtgtatagccgtagtctataattcaggaatgctttataaccatcagaagccattatttgcactacatatatgataagtatagacagcaataaaatgttaagatcatttttaagaaaaaaaaaaaaaaaa

SEQ ID NO: 115638 - DNA, 902 bp, Homo Sapiens
ctccggggcccatggggctcctgaccattctgaagaagatgaagcagaaagagcgggagctgcgactgctcatgcttggcctggacaatgctggaaagacaaccatcctgaagaagttcaatggggaggacatcgacaccatctccccaacgctgggcttcaacatcaagaccctggagcaccgaggattcaagctgaacatctgggatgtgggtggccagaagtccctgcggtcctactggcggaactactttgagagcaccgatggcctcatctgggtagtggacagcgcagaccgccagcgcatgcaggactgccagcgggagctccagagcctgctggtggaggagcgcctggccggagcaaccctcctcatctttgctaataagcaggacctgcctggagcactgtcctctaacgccatccgcgaggccctggagctggactccatccgcagccaccactggtgcatccagggctgcagcgccgtcaccggggagaacctgctgccgggcatcgactggctcctggatgacatttccagccgcattttcacagctgactgaaccactccagatgccccccacctagcagtccaggtccctcaaccttcaccaaacactacccatggggggttgggagtcagccggccaaactaacactccccctcctccaccccagcctgctgctgctactgctgccgctgctgctctgtggccacccggctcccatggcgggaggctgtgccctggctgtctctctggctcctgacctggcctttggctaccataccaagaagagagggctgggcggggaggagctgctactgctgctaccgaggctgtgggcctcatccttcactcagttgtgaaataaaccgctccttgccccgaaaaaaaaaa

SEQ ID NO: 115639 - DNA, 1000 bp, Homo Sapiens
ggatctggagggacacacaggagacacctggcataaccaaaaaatgattaaaaaaaaaaaaaaaaagaaacatctatggagcatgggacacggggagtggaggcagctaaaagccatctcatctttcaccgtattcaacaagcccattataacaagtctttcacgctcaaccattcaaacaatcccaacaatcccagcctaagaatttcctggcatttgatgaaaatggctgtgggttttgctatctttaagctccctgggaagcaggatataagcccagggctggcaggctctttctagctacctgctcttgcacatagagtttgcctcatggttgcaagaaggctgccatagctccagatggcacatagacattccaggcagcaggaaaaaggaaggagcacttaaccgaaggaggtcagggagttggttagtctccacctgaagaagagagccatgaaccagcttcagttgactaacgggctcctgtgagtgcatctttggacttttctggaggttgaaatctagatgtggtatgtgtcttaaagcagccaccaactcctcccattaccttccaagtgagcccaactacacgatggagcctcttccctgcccttggatctgggctgagcctctgacttgcgttgaccaacagaatgcagtgaaagtgatgccgatactaccctccctgccctagacttgggatacctggcagctatattcttccattcctcaggacttgcaaaaacgggtctcagcatgccttcccagagccatgaggtgtttctttgcccattcattgatctgagaagtgagtgtaaggagtttaaatcaacctctgttctgtgctagttaaggtaataaagttgctgcagtccagggggtaggtacctgtggacggctctgcgaataggacagttgcatttcttgggaatcaagtgcatccctaggctggcagtgcagcagaaatactgaataaaatgtgacaaatctccctgga

SEQ ID NO: 115640 - DNA, 1000 bp, Homo Sapiens
agcagctgaaagaagcccaagtacagtatcctctccagacatttgcaattggcatggaagacagccccgatttactggctgctagaaaggtggcagatcatattggaagtgaacattatgaagtcctttttaactctgaggaaggcattcaggctctggatgaagtcatattttccttggaaacttatgacattacaacagttcgtgcttcagtaggtatgtatttaatttccaagtatattcggaagaacacagatagcgtggtgatcttctctggagaaggatcagatgaacttacgcagggttacatatattttcacaaggctccttctcctgaaaaagccgaggaggagagtgagaggcttctgagggaactctatttgtttgatgttctccgcgcagatcgaactactgctgcccatggtcttgaactgagagtcccatttctagatcatcgattttcttcctattacttgtctctgccaccagaaatgagaattccaaagaatgggatagaaaaacatctcctgagagagacgtttgaggattccaatctgatacccaaagagattctctggcgaccaaaagaagccttcagtgatggaataacttcagttaagaattcctggtttaagattttacaggaatacgttgaacatcaggttgatgatgcaatgatggcaaatgcagcccagaaatttcccttcaatactcctaaaaccaaagaaggatattactaccgtcaagtctttgaacgccattacccaggccgggctgactggctgagccattactggatgcccaagtggatcaatgccactgacccttctgcccgcacgctgacccactacaagtcagctgtcaaagcttaggtggtctttatgctgtaatgtgaaagcaaatatttcttcgtgttggatggggactgtgggtagataggggaacaatgagagtcaactcaggctaacttgggtgtgaaaaaaataaaagtcctaaatct

SEQ ID NO: 115641 - DNA, 1000 bp, Homo Sapiens
gatttaggccttaacacactggccattcttatgttccagatggcccccagctggtgtcctgcccgcctttcatctggattctacaaaaaaccaggatgcccaccgttaggattcaggcagcagtgtctgtacctcgggtgggagggatggggccatctccttcaccgtggctaccattgtcactcgtaggggatgtggagtgagaacagcatttagtgaagttgtgcaacggccagggttgtgctttctagcaaatatgctgttatgtccagaaattgtgtgtgcaagaaaactaggcaatgtactcttccgatgtttgtgtcacacaacactgatgtgacttttatatgctttttctcagatctggtttctaagagttttggggggcggggctgtcaccacgtgcagtatctcaagatattcaggtggccagaagagcttgtcagcaagaggaggacagaattctcccagcgttaacacaaaatccatgggcagtatgatggcaggtcctctgttgcaaactcagttccaaagtcacaggaagaaagcagaaagttcaacttccaaagggttaggactctccactcaatgtcttaggtcaggagttgtgtctaggctggaagagccaaagaatattccattttcctttccttgtggttgaaaaccacagtcagtggagagatgtttggaaaccacagtcagtggagcctgggtggtacccaggctttagcattattggatgtcaatagcattgtttttgtcatgtagctgttttaagaaatctggcccagggtgtttgcagctgtgagaagtcactcacactggccacaaggacgctggctactgtctattaaaattctgatgtttctgtgaaattctcagagtgtttaattgtactcaatggtatcattacaattttctgtaagagaaaatattacttatttatcctagtattcctaacctgtcagaataataaatattggaaccaagacatggtaaa

SEQ ID NO: 115642 - DNA, 1000 bp, Homo Sapiens
agaacattgccgagctgtgcccctttctgatctacatcattgtcgggctccccctgcccattggcaccatcaccattctgttcattgacttggggacagacattatcccctccattgccttggcgtacgagaaagctgaaagtgacatcatgaacaggaagcctcgccacaagaataaggacaggctggtgaaccagccgctcgctgtgtactcatacctgcacattggcctcatgcaagccctgggagctttccttgtgtatttcaccgtctatgcacaagagggctttctgccccgcactctcattaacctgcgggtagaatgggagaaggactacgtgaatgacttgaaagacagctatgggcaggaatggacaaggtaccagagggaatacctagaatggacgggctacacggctttctttgttggcatcctagtccagcaaatagcagatctgatcatcaggaaaacccggaggaattccatcttccagcagggtctcttcagaaataaagtcatctgggtggggatcacctcacagatcatcattggtctgatcctctcctatggcctcggaagtgtcacagccttgagtttcaccatgcttagggctcagtactggtttgtggctgtgccgcacgccatcctgatctgggtgtatgatgaggtgcggaagctcttcatcaggctctaccctggaagctggtgggataagaacatgtattattaagaccacctcccttcctatgtctctcagcagcacgttggggcacacttgttcatcttctgaccgtttgctgggctattcccctgcagtgcagacatcgtcaaaattcagacaagaggaaattttcatgcagaaagctgtatgcaggatgctcactgatgttttgcactttaaaactgaaattcaactctttatataggattttcttttctatctccatctcctcattaaaaaatacgtacatttcgaggtaaaaaaaaaaaaaaaaaaaa

SEQ ID NO: 115643 - DNA, 1000 bp, Homo Sapiens
gggagaacatctggctcgtgggctccatctgcctgtccatgtcactccacttcctgatcctctatgtcgaacccttgccactcatcttccagatcacaccgctgaacgtgacccagtggctgatggtgctgaaaatctccttgcccgtgattctcatggatgagacgctcaagtttgtggcccgcaactacctggaacctgcaatactggagtaaccgcttcctaaaccattttgcagaaatgtaagggtgttcggttgcgtgcatgtgcgtttttagcaacacatctaccaaccctgtgcatgactgatgttggggaaaaagaaaagtaaaaaacttcccaactcactttgtgttatgtggaggaaatgtgtattaccaatggggttgttagcttttaaatcaaaatactgattacagatgtacaatttagcttaatcagaaagcctctccagagaagtttggtttctttgctgcaagaggaatgaggctctgtaaccttatctaagaacttggaagccgtcagccaagtcgccacatttctctgcaaaatgtcatagcttatataaatgtacagtattcaattgtaatgcatgccttcggttgtaagtagccagatccctctccagtgacattggaacatgctactttttaattggccctgtacagtttgcttatttataaattcattaaaaacactacaggtgttgaatggttaaaatgtaggcctccagttcattttcagttattttctgagtgtgcagacagctatttcgcactgtattaaatgtaacttatttaatgaaatcagaagcagtagacagatgttggtgcaatacaaatattgtgatgcatttatcttaataaaatgctaaatgtcaatttatcactgcgcatgtttgactttagactgtaaatagagatcagtttgtttctttctgtgctggtaacaatgagcgtcgcacagacatggtttcaggtaaataaatctattctatgat

SEQ ID NO: 115644 - DNA, 1000 bp, Homo Sapiens
tgaatctggtgttatcaacttaaaagatgccacctctaaggtagcgctggtatatggtcaaatgaatgaaccacctggtgctcgtgcccgggtagctctgactgggctgactgtggctgaatacttcagagaccaagaaggtcaagatgtactgctatttattgataacatctttcgcttcacccaggctggttcagaggtgtctgcattattgggccgaatcccttctgctgtgggctatcagcctaccctggccactgacatgggtactatgcaggaaagaattaccactaccaagaagggatctatcacctctgtacaggctatctatgtgcctgctgatgacttgactgaccctgcccctgctactacgtttgcccatttggatgctaccactgtactgtcgcgtgccattgctgagctgggcatctatccagctgtggatcctctagactccacctctcgtatcatggatcccaacattgttggcagtgagcattacgatgttgcccgtggggtgcaaaagatcctgcaggactacaaatccctccaggatatcattgccatcctgggtatggatgaactttctgaggaagacaagttgaccgtgtcccgtgcacggaaaatacagcgtttcttgtctcagccattccaggttgctgaggtcttcacaggtcatatggggaagctggtacccctgaaggagaccatcaaaggattccagcagattttggcaggtgaatatgaccatctcccagaacaggccttctatatggtgggacccattgaagaagctgtggcaaaagctgataagctggctgaagagcattcatcgtgaggggtctttgtcctctgtactgtctctctccttgcccctaacccaaaaagcttcatttttctgtgtaggctgcacaagagccttgattgaagatatattctttctgaacagtatttaaggtttccaataaaatgtacacccctcagaaaaaaaaaaaaaaaa

SEQ ID NO: 115645 - DNA, 1000 bp, Homo Sapiens
cctatgtactcggaactgggcttatcttgtacgctttatccaaagaaatatatgtgattagcgcagagaccttcactgccctatcagtactaggtgtaatggtctatggaattaaaaaatatggtccctttgttgcagactttgctgataaactcaatgagcaaaaacttgcccaactagaagaggcgaagcaggcttccatccaacacatccagaatgcaattgatacggagaagtcacaacaggcactggttcagaagcgccattacctttttgatgtgcaaaggaataacattgctatggctttggaagttacttaccgggaacgactgtatagagtatataaggaagtaaagaatcgcctggactatcatatatctgtgcagaacatgatgcgtcgaaaggaacaagaacacatgataaattgggtggagaagcacgtggtgcaaagcatctccacacagcaggaaaaggagacaattgccaagtgcattgcggacctaaagctgctggcaaagaaggctcaagcacagccagttatgtaaatgtatctatcccaattgagacagctagaaacagttgactgactaaatggaaactagtctatttgacaaagtctttctgtgttggtgtctactgaagttatagtttacccttcctaaaaatgaaaagtttgtttcatatagtgagagaacgaaatctctatcggccagtcagatgtttctcatccttcttgctctgcctttgagttgttccgtgatcacttctgaataagcagtttgcctttataaaaacttgctgcctgactaaagattaacaggttatagtttaaatttgtaattaattctaccatcttgcaataaagtgacaattgaatgaaacagggtttttcaagttgtataattctctgaaatactcagcttttgtcatatgggtaaaaattaaagatgtcattgaactactgtcttgtttatgagaccattcagtggtgaactgtttc

SEQ ID NO: 115646 - DNA, 1000 bp, Homo Sapiens
ttcccattaactctttctgaccaatagtgctggcaccgttgcttcctctttgggaagaggaaagggtgtgtgaacatggctaacaatcttcaaatacccaaattgtgatagcataaataaagtatttattttatgcctcagtatattattatttaattttttaggtaatgcctatctcttggtctattaaggaaagaagcaatcagtagagaattcaggatagttttgtttaaattcttgcagattacatgtttttacagtggcctgctattgaggaaaggtattcttctatacaacttgttttaacctttgagaacattgacagaaattatgcaatggtttgttgagatacggacttgatggtgctgtttaatcagtttgcttccaaagtggcctactcaagaggccctaagactggtagaaattaaaaggatttcaaaaactttctattcctttcttaaacctaccagcaaactaggattgtgatagcaatgaatggtatgatgaagaaagtttgaccaaatttgtttttttgttgttgttgttgttttgaatttgaaatcattcttattccctttaagaatgtttatgtatgagtgtgaagatgctagcgaacctatgctcagatattcatcgtaagtctcccttcacctgttacagagtttcagatcggtcactgatagtatgtatttctttagtaagaatgtgttaaaattacaatgatcttttaaaaagatgatgcagttctgtatttattgtgctgtgtctggtcctaagtggagccaattaaacaagtttcatatgtatttttccagtgttgaatctcacacactgtactttgaaaatttccttccatcctgaataacgaatagaagaggccatatatattgcctccttatccttgagatttcactacctttatgttaaaagttgtgtataattgttaaaatctgtgaaagaataaaaagtggatttaaattaaaaaaaaaaaaaaaaaaaa

SEQ ID NO: 115647 - DNA, 1000 bp, Homo Sapiens
cagcacggggcccagcaccaagaacgagaatgtcgccaccttgtctgtgagctccctggagcggcggaagtcgcggtatgcagaactggactttgagaagatcatgcacacccggaagcggcaccaagacatgttccaggacctgaaccggaagctgcagcacgcagcggagaaggacaaggaggtgctggggccggacagcaagccggaaaagcagcagacgcccaacaagaggccctgggagagcctccggaaagcccacgggacgcccacgtgggtgaagaaggagctggagccgctgcagccgtcgccgctggagcttcgcagcgtggagtgggagaggtcgggcgccacgatcccgctggtgggccaggacatcatcgacctccagaccgaggtctgagcgggtgggcggcggccacgcactgggccacggaggagggatgctgctccgcccgctcctgccgcagacgggcacagacacgctcgcgggcagcgggccaggcccgcaccccggcctcagggcgctcagacggcggccaggcacagggcccgcagtgctgggaccagagccagatgcaggacaggaggcggcccggccagcgggcacagggcaccagaggccgaaggtgcctcagactccgccctcctcgggccgaggcccagcgggcagatgggcggacggctgtggaccgtggacaggcccagcgcggccagcgtcccagggtacccgcctgagctcctgctgcggaggagctgcctgcttggcccggccggcctggcaccgttttttaaacacccccatccctcgggaagcagccagctccccacaccttccagggccctaggcccctcctagacccaggtggagggcacagccctccgaccctcatggcccccaggggcaggactgagtcccctccaggaagaagcaggggggaatctattttttctctccttttcttttcttcaataaaaagaattaaaaacccaaaaaaaa

SEQ ID NO: 115648 - DNA, 1000 bp, Homo Sapiens
tgctgccccggcggactttgagcctgcagcctggcggtgggggtggaggtggtgaggatgcccccagggcccggcccgaggggaccccccggcgagctgccaagacagtggcccacactgaaggctaccccagcttcctgtccgtggaccactcgggcctggggctgggccctgcctatggatctctccagaatccctatggaatgaccttccaaccgccaccgccgacacccagcgcccgccaagtgcccgagccaggggagcgcagccggaccatgcctcgcaccgtgcccggctctaccatgaagatgggctccctggagcgaaagaaattacggtattcagacctggactttgaggtgatgcacacccggaaacggcattcagaactctaccacgagctcaaccagaagttccacactttcgaccgctaccgcagccagtccacggccaagagggagaagcggtggagtgtgtcctcgggtggggcggccgagcggagcgtgtgcaccgataagcccagccctggggagcgccccagcttgtcccaacatcggcgccatcagagctggagcaccttcaaatctatgacactgggctcgctgccccccaagccccgagaacggctgactctgcaccgggcagcagcctgggagcccacagaaccaccggatggtgacttccagacagaggtgtgagtgccacgctggactgcccactgcatataaatatatatatctctctattttcacactccactttggaactacccaggagccagcgccctctcccctctcccgagggctgggcagggaggcgccgtggactcagccaggctgggggagccggacatggcttggcctggggtcccagggcccttccttgtttctcagaggcccctcagccactggaaccccatcttcagcccagcctgtccgtccctgtcccgggctggggaggggggaggggaactttgttgggaataaacttcactctgtgg

SEQ ID NO: 115649 - DNA, 1000 bp, Homo Sapiens
gcaggactatcaagaagtgaaactggatcaacgatatcaatgagttctttagagagaagaaaatcacgatattcagaccttgactttgagaaggtcatgcatacaaggaagaggcatatggaactatttcaagaactaaatcagaaatttcaaactttggacagatttcgggatataccaaatacaagcagtatggaaaaccccgcaccaaacaagaatccatgggacactttcaaaaaccccagtgaatacccgcattacaccacaatcaatgtcttagacacagaggcaaaggatgctttggaactgaggccagcagagtgggagaagtgtctgaatttgcctctggatgtgcaagagggtgactttcaaacagaagtttaaaaaaatcaaaatggactaaggtagagacaaaactttattgcactgacacttaagacttgggaagcctgacatttctatctggacagtgtgactatcttatgtcaggaccttcatgtgccaaacgtcagtggtgttttcatatggtaacttctcactagtcaggctagtggagagatgaccaggtgtacagttctgaccatcctgtgttgtaagtacccgtggaatggatttgtaaggtaatctttatagataaacctcaagcaacgattcatgttgtaaccgcttcatatggtttagttttcaaaaaacttcaccatgaagcacaatgtatatatttatgcagtttttaaagtttataacagtctgtttggccattactacactttttactttataatataaaagcaaagtttttgtcattaaatgaatgtttgttgagctacattcttcattgctttaaatgcaataaagtaataatctcacttttatatgaataatatatttcacatctttattattgcagttttctctagaaagctctgagaagctttctctgctgcagctgtgtataaaatatttaaaatgttgtatggtgtaaataaacttttgtctacat

SEQ ID NO: 115650 - DNA, 1000 bp, Homo Sapiens
acctcgggtccctgaccccagctcgatgccccatcaccgcctctccctggctcccaagggtgcaggtgggcgcaaggcccggcccccatcacatgttcccttggcctcagagctgcccctgctctcccaccacagccacccagaggcaccccatgaagcttttttctcgttcactcccaaacccaagtgtccaaggctccagtcctaggagaacagtccctgggtcagcagccaggaggcggtccataagaatggggacagtgggctctgccagggctgccgcacctgtccagacacacatgttctgttcctcctcctcatgcatttccagcctttcaaccctccccgactctgcggctcccctcagcccccttgcaagttcatggcctgtccctcccagacccctgctccactggcccttcgaccagtcctcccttctgttctctctttccccgtccttcctctctctctctctctctctctctctctctttctgtgtgtgtgtgtgtgtgtgtgtgtgtgtgtgtgtgtgtgtgtgtcttgtgcttcctcagacctttctcgcttctgagcttggtggcctgttccctccatctctccgaacctggcttcgcctgtccctttcactccacaccctctggccttctgccttgagctgggactgctttctgtctgtccggcctgcacccagcccctgcccacaaaaccccagggacagcggtctccccagcctgccctgctcaggccttgcccccaaacctgtactgtcccggaggaggttgggaggtggaggcccagcatcccgcgcagatgacaccatcaaccgccagagtcccagacaccggttttcctagaagcccctcacccccactggcccactggtggctaggtctccccttatccttctggtccagcgcaaggaggggctgcttctgaggtcggtggctgtctttccattaaagaaacaccgtgcaacgtgaaaaaaaaaaaaaaaaaaaaa

SEQ ID NO: 115651 - DNA, 1000 bp, Homo Sapiens
gaattccatccaccgcgacctgcgggcggccaacatcctggtgtctgaggccttgtgctgcaaaattgctgattttggcttggctcgaatcatcgacagtgaatacacggcccaagagggggccaagttccccatcaagtggacagccccggaagccatccacttcggggtcttcaccatcaaagcagacgtgtggtcgtttggagtcctcctgatggaagttgtcacttatgggcgggtgccatacccagggatgagcaaccccgaggtcatccgcaacctggagcgcggctaccgcatgccgcgccccgacacctgcccgcccgagctgtaccgcggcgtcatcgccgagtgctggcgcagccggcccgaggagcggcccaccttcgagttcctgcagtcggtgctggaggacttctacacggccaccgagcggcagtacgagctgcagccctagccggccgcgcccgcctgcgccccgtgcccacctctgcgcggacgaccccgacttccgtgccatcccagacgggccgcgaaggcggggtgtcgcctgtgcccttttctcagacccggaatccagtgggcagaggcagcttcgcagggggtccccggacggactccttcaccgactgcacccccgggcgagttacgcggcctctctgtgccgcttcatttgtagagggctgtaacagtgacctcgcacggtcatccggagtactaagccccagtaaggtgttcaggactggtaagcgactgtcatcaagtaaggcccccgtgctgggcaccccccgtgctggccgcgtccccgcctctgcgccctgcgtggaccccgccctgccccgctacagaagccagactgggtcccgcggacgccagcaggggcagccccagcctaggctgcgctccagcactgcggggcttttctgcaataaagtcacgagcgttcgaaaaaaaaaaaaaaaaaaaaaaaaaaaaaaaaaaaaaaaaaaaaaaaaaaaaa

SEQ ID NO: 115652 - DNA, 1000 bp, Homo Sapiens
atttccacacaggacttaaactgttagaagtatctgagcccctgatgacaggaatttctagcctctactattcttcctaatgggacatgtttaaataactgtgcaaggggtgatgcaggctggttcatgccactttttcagagtatgatgatatcggctacatatgcagtctgtgaattatgtaacatactctatttcttgagggctgcaaattgctaagtgctcaaaatagagtaagttttaaattgaaaattacataagatttaatgcccttcaaatggtttcatttagccttgagaatggttttttgaaacttggccacactaaaatgtttttttttttacgtagaatgtgggataaacttgatgaactccaagttcacagtgtcatttcttcagaactccccttcattgaatagtgatcatttattaaatgataaattgcactcgctgaaagagcacgtcatgaagcaccatggaatcaaagagaaagatataaattcgttcccacagccttcaagctgcagtgttttagattgcttcaaaaaatgaaaaagttttgcctttttctgtatatagtgaccttctttgcatattaaaatgtttaccacaatgtcccatttctagttaagtcttcgcacttgaaagctaacattatgaatattatgtgttggaggaggggaaggattttcttcattctgtgtattttccttacatgtacagtagacgttctctattctatcagccttctatggtacctttttgtcaggacaattaggattgtaatgctaatgcaaaggcagcaattcaaagatcttctagtgcctcatgaataaagttgagatttaaaatttgtaacattgatggaacagctgggaggttagaccaatcattaaggaatgtatgccatagctttctttgctaccataaacattttggaggtgcatctgctatgtgacatggtaaatatggttaagtgaatgaataaaatgttttagtaa

SEQ ID NO: 115653 - DNA, 1000 bp, Homo Sapiens
cgaccaggccatcatcacgctccgcgtgcgcagccacctggccgccctctggcccttcctgggcatcgtggctgaggtgctggtgctggtcaccatcatcttcatctacgagaagcgccggaagcccgaggacgtcctggatgatgacgacgccggctctgcacccctgaagagcagcgggcagcaccagaatgacaaaggcaagaacgtccgccagaggaactcttcctgaggcaggtggcccgaggacgctccctgctccacgtctgcgccgccgccggagtccactcccagtgcttgcaagattccaagttctcacctcttaaagaaaacccaccccgtagattcccatcatacacttccttcttttttaaaaaagttgggttttctccattcaggattctgttccttaggtttttttccttctgaagtgtttcacgagagcccgggagctgctgccctgcggccccgtctgtggctttcagcctctgggtctgagtcatggccgggtgggcggcacagccttctccactggccggagtcagtgccaggtccttgccctttgtggaaagtcacaggtcacacgaggggccccgtgtcctgcctgtctgaagccaatgctgtctggttgcgccatttttgtgcttttatgtttaattttatgagggccacgggtctgtgttcgactcagcctcagggacgactctgacctcttggccacagaggactcacttgcccacaccgagggcgaccccgtcacagcctcaagtcactcccaagccccctccttgtctgtgcatccgggggcagctctggagggggtttgctggggaactggcgccatcgccgggactccagaaccgcagaagcctccccagctcacccctggaggacggccggctctctatagcaccagggctcacgtgggaacccccctcccacccaccgccacaataaagatcgcccccacctccaccctcaaaaaaaaaaaaaaaaaaaa

SEQ ID NO: 115654 - DNA, 1000 bp, Homo Sapiens
ttaggatttgtggtaaggtacctctcaacattaccaaaatcatttctttagagggaaggaataatcattcaaatgaactttaaaaaagcaaatttcatgcactgattaaaataggattattttaaatacaaaaggcattttatatgaattataaactgaagagcttaaagatagttacaaaatacaaaagttcaacctcttacaataagctaaacgcaatgtcatttttaaaaagaaggacttagggtgtcgttttcacatatgacaatgttgcatttatgatgcagtttcaagtaccaaaacgttgaattgatgatgcagttttcatatatcgagatgttcgctcgtgcagtactgttggttaaatgacaatttatgtggattttgcatgtaatacacagtgagacacagtaattttatctaaattacagtgcagtttagttaatctattaatactgactcagtgtctgcctttaaatataaatgatatgttgaaaacttaaggaagcaaatgctacatatatgcaatataaaatagtaatgtgatgctgatgctgttaaccaaagggcagaataaataagcaaaatgccaaaaggggtcttaattgaaatgaaaatttaattttgtttttaaaatattgtttatctttatttattttgtggtaatatagtaagtttttttagaagacaattttcataacttgataaattatagttttgtttgttagaaaagttgctcttaaaagatgtaaatagatgacaaacgatgtaaataattttgtaagaggcttcaaaatgtttatacgtggaaacacacctacatgaaaagcagaaatcggttgctgttttgcttctttttccctcttatttttgtattgtggtcatttcctatgcaaataatggagcaaacagctgtatagttgtagaattttttgagagaatgagatgtttatatattaacgacaattttttttttggaaaataaaaagtgcctaaaaga

SEQ ID NO: 115655 - DNA, 1000 bp, Homo Sapiens
gcccttccaaaaactacaatatgatgactgtatcaggttaagatatagtctgtggatggatcatctgatgatgatccataaatttgatttttgctttgggtgggctcctcttggggatggattatggaatttaaaccatgtcacagctgtgaagatctggcacaagatagaatggtaaaaaaaaaaaaaaattttaagtgacagtgccatagtttggacagtacctttcaatgattaattttaatagcctgtgagtccaagtaaatgatcactttatttgctagggagggaagtcctagggtggtttcagtttctcccagacatacctaaatttttacatcaatccttttaaagaaaatctgtatttcaaagaatctttctctgcagtaaatctcgcaggggaatttgcactattacacttgaaagttgttattgttaaccttttcggcagcttttaataggaaagttaaacgttttaaacatggtagtactggaaattttacaagacttttacctagcacttaaatatgtataaatgtacataaagacaaactagtaagcatgacctggggaaatggtcagaccttgtattgtgtttttggccttgaaagtagcaagtgaccagaatctgccatggcaacaggctttaaaaaagacccttaaaaagacactgtctcaactgtggtgttagcaccagccagctctctgtacatttgctagcttgtagttttctaagactgagtaaacttcttatttttagaaagtggaggtctggtttgtaactttccttgtacttaattgggtaaaagtcttttccacaaaccaccatctattttgtgaactttgttagtcatcttttatttggtaaattatgaactggtgtaaatttgtacagttcatgtatattgattgtggcaaagttgtacagatttctatattttggatgagaaatttttcttctctctataataaatcgtttcttatcttggcatttttaacc

SEQ ID NO: 115656 - DNA, 1000 bp, Homo Sapiens
tcccaggcttttgaaaaacaaacagaaacccgtgtatctgggatatttccatatggcaataggtgtgaacagggaactcagaatacagacaagtagaaagattctcgcttaaaaaaaatgtatttattttatggcaagttggaaaatatgtaactggaatctcaaaagttctttgggacaaaacagaagtccatggagttatctaagctcttgtaagtgagttaatttaaaaaagaaaattaggctgagagcagtggctcacgcctgtaatcccagaactttgggaggctaaggtgggtggatcacctgaggtcaagagttccagaccaggctggccagcatggtgaaaccccgtctgtactaaaaatacaaaaaattaactgggcatggtagtgggtgcctgtaatcccagctacttgggaggctgaggtgggagaattgctcgaaccttggaggtggaggttgtggtgagccatgatcgcaccactgcactctagcctgggtgaccgagggaggctctgtctcaaaagcaaagcaaaaacaaaaacaaaaacacctaaaaaacctgcagttttgtttgtactttgtttttaaattatgctttctattttgagatcattgcaaactcaacacaattgtaagtaatgatacagagggatcttgtgtacccttcacccagcctcccccaatggcaacatcttgcaaaactacaatgtagtctcataaccaggatattgacattgatacagtgaagatacaggacattctcatcaccacagggatccccaggatgcccacttccctccacccccacaccccagccgtgtccctaacccctggcaaccaggaatccactctccatttctataatgttgtcatttcaagaatgttattcaatggaatcatatagtatgtaacctgttttgagcttaaaaaaaaagtatacatgactttaatgaggaaaataaaaatgaatattgaaatgttgtgttaaaaaaaa

SEQ ID NO: 115657 - DNA, 1000 bp, Homo Sapiens
tgttgaaaacaaaaacgccttttcttggttcttttttcagttattttgaaggtccagcatcctgattaaatgtctgacacattaatgaatgaccagcagcagctttcagctcttaaaaagacacttatattttgattttacatgctggttacctgttccattgttgtcaaatgcccactctccatcagatgtgttcctccattttcttatccacaaagtactcctcacttttcaatttgtcatgttactaaatggtgttacattaaagccctgtgttaagtgtctgcttttgactgaatttcttcatagtaaccttcagtgtgtgtgtgtgactatgttcaattagtgggttgatcttcgtataattggccactatgtgagagttcactactaggcagaaactattatggacagtgaaataatgacttttatctcaccacgtgagtttgatgcagtcttttctgtctagcccttgcctcttcctgcccatgtgattgcggtgcagtagtttctgttgtataatagtgtggacagcagctcagaaaaggagggaatgctactgataatttgtagataatattctttaagacttaggggaaccattgaactttgaaatttttattagaaaattatttgttcagaatcagactccattattttacatatacttaaatactttaggggtatttttgaaagttagcccagttttttatgtgctattaaatttttagattacatactaaagaaaagtatgtacacagaatgtagtgctcctagttactattttttctattaagaaatagtttagttctggtgtaaaatttgtttgaatgctaaaaaaaaaaaagcaggactgcattatggcacttttgccttggtggcccactttctccatttaaaacattaggatttgtatttttctgctgcgtttgtatgaagacatatttgattgttgttttctcttgattttaaaataaaacctcatgagccctagtaaaaa

SEQ ID NO: 115658 - DNA, 1000 bp, Homo Sapiens
cgggatgagcagggggcctgtgccgtgctggctgtgcacctcaacacgctgctgggagagcggcctgtgcagcaccgcgaggtgcagggcaatgagtctgacctcttcatgagctacttcccacggggcctcaagtaccaggaaggtggtgtggagtcagcatttcacaagacctccacaggagccccagctgccatcaagaaactctaccaggtgaaggggaagaagaacatccgtgccaccgagcgggcactgaactgggacagcttcaacactggggactgcttcatcctggacctgggccagaacatcttcgcctggtgtggtggaaagtccaacatcctggaacgcaacaaggcgagggacctggccctggccatccgggacagtgagcgacagggcaaggcccaggtggagattgtcactgatggggaggagcctgctgagatgatccaggtcctgggccccaagcctgctctgaaggagggcaaccctgaggaagacctcacagctgacaaggcaaatgcccaggccgcagctctgtataaggtctctgatgccactggacagatgaacctgaccaaggtggctgactccagcccatttgcccttgaactgctgatatctgatgactgctttgtgctggacaacgggctctgtggcaagatctatatctggaaggggcgaaaagcgaatgagaaggagcggcaggcagccctgcaggtggccgagggcttcatctcgcgcatgcagtacgccccgaacactcaggtggagattctgcctcagggccatgagagtcccatcttcaagcaatttttcaaggactggaaatgagggtgggcgtcttcctgccccatgctcccctgccccccaccacctgcctgcttgcttctctggctgcctggtcagtgcagaggtgccccctgcagatgttcaataaaggagacaagtgctttcccagctcttttcctgcaccaccaaaaaaaaaaaaaaaaaa

SEQ ID NO: 115659 - DNA, 1000 bp, Homo Sapiens
accaatagggctgagctctctgtgggctggcagtcctggaagccagctttccctgcctctcatcaactgaatgaggtcagcatgtctattcagcttcgtttattttcaagaataatcacgctttcctgaatccaaactaatccatcaccggggtggtttagtggctcaacattgtgttcccatttcagctgatcagtgggcctccaaggaggggctgtaaaatggaggccattgtgtgagcctatcagagttgctgcaaacctgacccctgctcagtaaagcacttgcaaccgtctgttatgctgtgacacatggcccctccccctgccaggagctttggacctaatccaagcatccctttgcccagaaagaagatgggggaggaggcagtaataaaaagattgaagtattttgctggaataagttcaaattcttctgaactcaaactgaggaatttcacctgtaaacctgagtcgtacagaaagctgcctggtatatccaaaagctttttattcctcctgctcatattgtgattctgcctttggggacttttcttaaaccttcagttatgatttttttttcatacacttattggaactctgcttgatttttgcctcttccagtcttcctgacactttaattaccaacctgttacctactttgactttttgcatttaaaacagacactggcatggatatagttttacttttaaactgtgtacataactgaaaatgtgctatactgcatactttttaaatgtaaagatatttttatctttatatgaagaaaatcacttaggaaatggctttgtgattcaatctgtaaactgtgtattccaagacatgtctgttctacatagatgcttagtccctcatgcaaatcaattactggtccaaaagattgctgaaattttatatgcttactgatatattttacaattttttatcatgcatgtcctgtaaaggttacaagcctgcacaataaaaatgtttaacggtt

SEQ ID NO: 115660 - DNA, 1000 bp, Homo Sapiens
catttggcacctccttacaaatatttttcatggtcacatttattaaatgttactacatttctgaatttttgaaaaatgtattttatcattaaatggcattattttaaagggtgaaaaactgacacagtcaattcagaaaatggactgaagtctgaataaggtcattgcatttaaaaagcatataactgtacttgactgatgagggaggtgttactttcattgtatataggtcttatttcataaacagatatcctgtatcaaataaaagtatttgttatatatttgaagttatgcatggaaaggagtgtgtttaaattgttacaaacaataatgcgtcattaaaggccatgctgatcttgcataactataagtactatgaatgaatttggttggttttggtgttgtacagctcacatgtttacacactcagtgccctaatttcccctgagggaatcgctttttaagtgatccttacagtggtgttttatgttactttattacagagctccttggttttttacttctgcacttaaatttttttaaataacatgatgatggtacattttcctctattgtctagctaagggctttcggtccaccagtaaataagatcaaatgctcttaaatgttcctgttaccatcctaatgtaaatactggatttttctgtcatttagcaccatgctgcttctgtctgtcttaatgctggcattaagatcatgagccctttttctccagtagtacaggctttgaaaactacttctattaagttattgatgcaatttgatattttttcataatctatatttaaacaaaattacatcattgcatcatcttttctaaattcatctccattaaaacttgccttaagctaccagattgcttttgccaccattggccatactgtgtgtttgtttgtttaatttactttcacaataaacttctgtgtagtaaaaaaaaaaaaaaaaaaaaaaaaaaaaaaaaaaaaaaaaaaaaaaaaaa

SEQ ID NO: 115661 - DNA, 1000 bp, Homo Sapiens
gcctggagttgctggagtcattctcagcagacatcaagcactactatgagtcagaggtcttggctatgaatttccaggactgggcaacagccagcagacagatcaacagctatgtcaagaataagacacaggggaaaattgtcgacttgttttcagggctggatagcccagccatcctcgtcctggtcaactatatcttcttcaaaggcacatggacacagccctttgacctggcaagcaccagggaggagaacttctatgtggacgagacaactgtggtgaaggtgcccatgatgttgcagtcgagcaccatcagttaccttcatgacgcggagctcccctgccagctggtgcagatgaactacgtgggcaatgggactgtcttcttcatccttccggacaaggggaagatgaacacagtcatcgctgcactgagccgggacacgattaacaggtggtccgcaggcctgaccagcagccaggtggacctgtacattccaaaggtcaccatctctggagtctatgacctcggagatgtgctggaggaaatgggcattgcagacttgttcaccaaccaggcaaatttctcacgcatcacccaggacgcccagctgaagtcatcaaaggtggtccataaagctgtgctgcaactcaatgaggagggtgtggacacagctggctccactggggtcaccctaaacctgacgtccaagcctatcatcttgcgtttcaaccagcccttcatcatcatgatcttcgaccacttcacctggagcagccttttcctggcgagggttatgaacccagtgtaagagaccacccacccagagcctcagcactgtctgactttgggaaccagggatcccacagaaatgttttggagagcgggaggtttcccccaatctcctccaagttcttctccctccaaccagagttgtgtctaactttaggcatcttttaataaatgtcattgcgactctgaaaaaaaaaaaaaaaaaaa

SEQ ID NO: 115662 - DNA, 1000 bp, Homo Sapiens
cgtgacgcggggccaggcggccgtacagcagctgcaggcggagggcctgagcccgcgcttccaccagctggacatcgacgatctgcagagcatccgcgccctgcgcgacttcctgcgcaaggagtacgggggcctggacgtgctggtcaacaacgcgggcatcgccttcaaggttgctgatcccacaccctttcatattcaagctgaagtgacgatgaaaacaaatttctttggtacccgagatgtgtgcacagaattactccctctaataaaaccccaagggagagtggtgaacgtatctagcatcatgagcgtcagagcccttaaaagctgcagcccagagctgcagcagaagttccgcagtgagaccatcactgaggaggagctggtggggctcatgaacaagtttgtggaggatacaaagaagggagtgcaccagaaggagggctggcccagcagcgcatacggggtgacgaagattggcgtcaccgttctgtccaggatccacgccaggaaactgagtgagcagaggaaaggggacaagatcctcctgaatgcctgctgcccagggtgggtgagaactgacatggcgggacccaaggccaccaagagcccagaagaaggtgcagagacccctgtgtacttggcccttttgcccccagatgctgagggtccccatggacaatttgtttcagagaagagagttgaacagtggtgagctgggctcacagctccatccatgggccccattttgtaccttgtcctgagttggtccaaagggcatttacaatgtcataaatatccttatataagaaaaaaaatgatctcttatcaattagcactcactaatgtactactaattgagcaacctacgcactcagttgactacgtaaatctgtcaggtcttttgtgatttcctctgatgcaggagaggaaaaattgtaattgatgaaaataatgaatgaaaatcaacagatgaataaatggttctttataagtg

SEQ ID NO: 115663 - DNA, 1000 bp, Homo Sapiens
ttgcagactcatggctgggacagtgaatcaggcacaataattttcctgcataactggtccaagggcaacttcagcaatgaagagttgtcagacctagagttgttatttcgtttctacctctttggattaactcgggagattcaagaccatgcaagtcaagattactcgaaatatccctttgaagtacaggtgaaagcgggctgtgagctgcattctggaaagagcccagaaggcttctttcaggtagctttcaacggattagatttactgagtttccagaatacaacatgggtgccatctccaggctgtggaagtttggcccaaagtgtctgtcatctactcaatcatcagtatgaaggcgtcacagaaacagtgtataatctcataagaagcacttgcccccgatttctcttgggtctcctggatgcagggaagatgtatgtacacaggcaagtgaggccagaagcctggctgtccagtcgccccagccttgggtctggccagctgttgctggtttgtcatgcctccggcttctacccaaagcctgtttgggtgacatggatgcggaatgaacaggagcaactgggcactaaacatggtgatattcttcctaatgctgatgggacatggtatcttcaggtgatcctggaggtggcatctgaggagcctgctggcctgtcttgtcgagtgagacacagcagtctaggaggccaggacatcatcctctactggggacaccactcttccatgaattggattgccttggtagtgatagtgcccttggtgattctaatagtccttgtgttatggtttaagaagcactgctcatatcaggacatcctgtgagactcttccccctgactcccccattgtgttaagaacccagcaacccaggagcctagtacaatatagtgatgccatcccgtcgactctccatttaaattgtttctctttctgcataataaacatttgttaataaaaaccaaaaaaaaaaaaaaaa

SEQ ID NO: 115664 - DNA, 1000 bp, Homo Sapiens
gtcctgtcgggtgaagcacagcagtctagagggccaggacatcgtcctctactggggtgggagctacacctccatgggcttgattgccttggcagtcctggcgtgcttgctgttcctcctcattgtgggctttacctcccggtttaagaggcaaacttcctatcagggcgtcctgtgactcgccttgccacatctgtgtctctggaacccaggacctctggacctcaggttcccaagacttcagtcctggtctgctcaggaattgaagatgtaaggaattgaagataggagagataccttgaaaaagtagagaacagtcatgaggcagctttcatcacacccttttaacatttatctaaaagaatttaaattctttttcaaaaattacactacaagtttataagcccaaatggctctgtgaaatcagaagtgcaaaggtgtgcaaacttgtatctgaagacctaccagggacaagcaggtaagagctgatgtgagtgtgtgtgatgggatctgtaaggaactggaacacacatgtcctatccaaaggaatcagctgcagctgcttgttgtcaagtataaagtcaggacctggcttggctttaaccgtttttcaagaaaactggaaatctggattttcagcgaacatgcctgattttaaaaggttgactcaagtttttacaaaatactatgtgggacacctcaaatacatacctactgactgatgacaaacccaggagtttgtgtgtcttttataaaaagtttgccctggatgtcatattggcagttggaggacacagtttctattgtaaatttggatttacgactgaagaaggacattttctctttaaaagaaagttaggttataagaaacagaggcgtctcacatttttacttggtgtaattaataaacgaagataaatcataaaaaaaaaaaaaaaaaaaaaaaaaaaaaaaaaaaaaaaaaaaaaaaaaaaaaaaaaaaaaaaaaaaaaaaaaaaaa

SEQ ID NO: 115665 - DNA, 1000 bp, Homo Sapiens
ctcagggctctttcctccacaccattcaggtctttctttccgaggcccctgtctcagggtgaggtgcttgagtctccaacggcaagggaacaagtacttcttgatacctgggatactgtgcccagagcctcgaggaggtaatgaattaaagaagagaactgcctttggcagagttctataatgtaaacaatatcagactttttttttttataatcaagcctaaaattgtatagacctaaaataaaatgaagtggtgagcttaaccctggaaaatgaatccctctatctctaaagaaaatctctgtgaaacccctatgtggaggcggaattgctctcccagcccttgcattgcagaggggcccatgaaagaggacaggctacccctttacaaatagaatttgagcatcagtgaggttaaactaaggccctcttgaatctctgaatttgagatacaaacatgttcctgggatcactgatgactttttatactttgtaaagacaattgttggagagcccctcacacagccctggcctctgctcaactagcagatacagggatgaggcagacctgactctcttaaggaggctgagagcccaaactgctgtcccaaacatgcacttccttgcttaaggtatggtacaagcaatgcctgcccattggagagaaaaaacttaagtagataaggaaataagaaccactcataattcttcaccttaggaataatctcctgttaatatggtgtacattcttcctgattattttctacacatacatgtaaaatatgtctttcttttttaaatagggttgtactatgctgttatgagtggctttaatgaataaacatttgtagcatcctctttaatgggtaaacagcaaaaaaaaaaaaaaaaaaaaaaaaaaaaaaaaaaaaaaaaaaaaaaaaaaaaaaaaaaaaaaaaaaaaaaaaaaaaaaaaaaaaaaaaaaaaaaaaaaaaaaaaaaaaaaaaaaaaaaaaaaaaa

SEQ ID NO: 115666 - DNA, 1000 bp, Homo Sapiens
tctttgggtaaacgtgtgacgggggaaagccaaggtctggagaagctcccaggaacaactgatggccttgcagcactcacacaggacccccttcccctaccccctcctctctgccgcaatacaggaacccccaggggaaagatgagcttttctaggctacaattttctcccaggaagctttgatttttaccgtttcttccctgtattttctttctctactttgaggaaaccaaagtaaccttttgcacctgctctcttgtaatgatatagccagaaaaacgtgttgccttgaaccacttccctcatctctcctccaagacactgtggacttggtcaccagctcctcccttgttctctaagttccactgagctccatgtgccccctctaccatttgcagagtcctgcacagttttctggctggagcctagaacaggcctcccaagttttaggacaaacagctcagttctagtctctctggggccacacagaaactctttttgggctcttttttctccctctggatcaaagtaggcaggaccatgggaccaggtcttggagctgagcctctcacctgtactcttccgaaaaatcctcttcctctgaggctggatcctagccttatcctctgatctccatggcttcctcctccctcctgccgactcctgggttgagctgttgcctcagtcccccaacagatgcttttctgtctctgcctccctcaccctgagccccttccttgctctgcacccccatatggtcatagcccagatcagctcctaacccttatcaccagctgcctcttctgtgggtgacccaggtccttgtttgctgttgatttctttccagaggggttgaacagggatcctggtttcaatgacggttggaaatagaaatttccagagaagagagtattgggtagatattttttctgaatacaaagtgatgtgtttaaatactgcaattaaagtgatactgaaacacaaaaaaaaaaaaaaaaaa

SEQ ID NO: 115667 - DNA, 1000 bp, Homo Sapiens
cttcttcgtcctcggcagcctgatcttctgcttcggcatctggatcctcatcgacaagaccagcttcgtgtcctttgtgggcttggccttcgtgcctctgcagatctggtccaaagtcctggccatctcaggaatcttcaccatgggcatcgccctcctgggttgtgtgggggccctcaaggagctccgctgcctcctgggcctgtattttgggatgctgctgctcctgtttgccacacagatcaccctgggaatcctcatctccactcagcgggcccagctggagcgaagcttgcgggacgtcgtagagaaaaccatccaaaagtacggcaccaaccccgaggagaccgcggccgaggagagctgggactatgtgcagttccagctgcgctgctgcggctggcactacccgcaggactggttccaagtcctcatcctgagaggtaacgggtcggaggcgcaccgcgtgccctgctcctgctacaacttgtcggcgaccaacgactccacaatcctagataaggtgatcttgccccagctcagcaggcttggacacctggcgcggtccagacacagtgcagacatctgcgctgtccctgcagagagccacatctaccgcgagggctgcgcgcagggcctccagaagtggctgcacaacaaccttatttccatagtgggcatttgcctgggcgtcggcctactcgagctcgggttcatgacgctctcgatattcctgtgcagaaacctggaccacgtctacaaccggctcgctcgataccgttaggccccgccctccccaaagtcccgccccgcccccgtcacgtgcgctgggcacttccctgctgcctgtaaatatttgtttaatccccagttcgcctggagccctccgccttcacattcccctggggacccacgtggctgcgtgcccctgctgctgtcacctctcccacgggacctggggctttcgtccacagcttcctgtccccatctgtcggcctac

SEQ ID NO: 115668 - DNA, 1000 bp, Homo Sapiens
cacatactccttaatttacctgttgttggaaactggagaaatgattgtcgggcaaccgtttattttttattgtattttatttggttgagggatttttttataaacagttttacttgtgtcatattttaaaattactaactgccatcacctgctggggtcctttgttaggtcattttcagtgactaatagggataatccaggtaactttgaagagatgagcagtgagtgaccaggcagtttttctgcctttagctttgacagttcttaattaagatcattgaagaccagctttctcataaatttctctttttgaaaaaaagaaagcatttgtactaagctcctctgtaagacaacatcttaaatcttaaaagtgttgttatcatgactggtgagagaagaaaacattttgtttttattaaatggagcattatttacaaaaagccattgttgagaattagatcccacatcgtataaatatctattaaccattctaaataaagagaactccagtgttgctatgtgcaagatcctctcttggagcttttttgcatagcaattaaaggtgtgctatttgtcagtagccatttttttgcagtgatttgaagaccaaagttgttttacagctgtgttaccgttaaaggtttttttttttatatgtattaaatcaatttatcactgtttaaagctttgaatatctgcaatctttgccaaggtacttttttatttaaaaaaaaacataactttgtaaatattaccctgtaatattatatatacttaataaaacattttaagctattttgttgggctatttctattgctgctacagcagaccacaagcacatttctgaaaaatttaatttattaatgtatttttaagttgcttatattctaggtaacaatgtaaagaatgatttaaaatattaattatgaattttttgagtataatacccaataagcttttaattagagcagagttttaattaaaagttttaaatcagtc

SEQ ID NO: 115669 - DNA, 1000 bp, Homo Sapiens
tgggggtcctcagcgtggtctgcctgctgcactgctttggtttcatcagctgtttttcccaacaaatatatggtgttgtgtatgggaatgtaactttccatgtaccaagcaatgtgcctttaaaagaggtcctatggaaaaaacaaaaggataaagttgcagaactggaaaattctgaattcagagctttctcatcttttaaaaatagggtttatttagacactgtgtcaggtagcctcactatctacaacttaacatcatcagatgaagatgagtatgaaatggaatcgccaaatattactgataccatgaagttctttctttatgtgcttgagtctcttccatctcccacactaacttgtgcattgactaatggaagcattgaagtccaatgcatgataccagagcattacaacagccatcgaggacttataatgtactcatgggattgtcctatggagcaatgtaaacgtaactcaaccagtatatattttaagatggaaaatgatcttccacaaaaaatacagtgtactcttagcaatccattatttaatacaacatcatcaatcattttgacaacctgtatcccaagcagcggtcattcaagacacagatatgcacttatacccataccattagcagtaattacaacatgtattgtgctgtatatgaatggtattctgaaatgtgacagaaaaccagacagaaccaactccaattgattggtaacagaagatgaagacaacagcataactaaattattttaaaaactaaaaagccatctgatttctcatttgagtattacaatttttgaacaactgttggaaatgtaacttgaagcagctgctttaagaagaaatacccactaacaaagaacaagcattagttttggctgtcatcaacttattatatgactaggtgcttgctttttttgtcagtaaattgtttttactgatgatgtagatacttttgtaaataaatgtaaatatgtacacaagtg

SEQ ID NO: 115670 - DNA, 1000 bp, Homo Sapiens
cagctccgcctcaagataacgcagctgggacagagtgcagaggatctgcaggggtccaggagagagctggcgcagagtcaggaagcactacaggtggaacagagggctcatcaggcggccgaagggcagctacaggcctgccaggcagacagacagaagacgaaggagaccttgcaaagtgaggagcaacagaggagggccttggagcagaagctgagcaacatggagaacagactgaagcccttcttcacatgcggctcagcagacacctgctgtccgtcgggatggataatgcatcagaaaagctgcttttacatctcacttacttcaaaaaattggcaggagagccaaaaacaatgtgaaactctgtcttccaagctggccacattcagtgaaatttatccacaatcacactcttactacttcttaaattcactgttgccaaatggtggttcagggaattcatattggactggcctcagctctaacaaggattggaagttgactgatgatacacaacgcactaggacttatgctcaaagctcaaaatgtaacaaggtacataaaacttggtcatggtggacactggagtcagagtcatgtagaagttctcttccctacatctgtgagatgacagctttcaggtttccagattaggacagtcctttgcactgagttgacactcatgccaacaagaacctgtgcccctccttcctaacctgaggcctggggttcctcagaccatctccttcattctgggcagtgccagccaccggctgacccacacctgacacttccagccagtctgctgcctgctccctcttcctgaaactggactgttcctgggaaaagggtgaagccacctctagaagggactttggcctccccccaagaacttcccatggtagaatggggtgggggaggagggcgcacgggctgagcggataggggcggcccggagccagccaggcagttttattgaaatctttttaaataattg

SEQ ID NO: 115671 - DNA, 1000 bp, Homo Sapiens
acctgggccctgggtgccaggccctgtggatgcacaaggtcccagcatcattgatggtgagcctgggggaagacgcccacttccaatgcccgcacaatagcagcaacaacgccaacgtcacctggtggcgcgtcctccatggcaactacacgtggccccctgagttcttgggcccgggcgaggaccccaatggtacgctgatcatccagaatgtgaacaagagccatgggggcatatacgtgtgccgggtccaggagggcaacgagtcataccagcagtcctgcggcacctacctccgcgtgcgccagccgccccccaggcccttcctggacatgggggagggcaccaagaaccgaatcatcacagccgaggggatcatcctcctgttctgcgcggtggtgcctgggacgctgctgctgttcaggaaacgatggcagaacgagaagctcgggttggatgccggggatgaatatgaagatgaaaacctttatgaaggcctgaacctggacgactgctccatgtatgaggacatctcccggggcctccagggcacctaccaggatgtgggcagcctcaacataggagatgtccagctggagaagccgtgacacccctactcctgccaggctgcccccgcctgctgtgcacccagctccagtgtctcagctcacttccctgggacattctcctttcagcccttctgggggcttccttagtcatattcccccagtggggggtgggagggtaacctcactcttctccaggccaggcctccttggactcccctgggggtgtcccactcttcttccctctaaactgccccacctcctaacctaatccccccgccccgctgcctttcccaggctcccctcaccccagcgggtaatgagcccttaatcgctgcctctaggggagctgattgtagcagcctcgttagtgtcaccccctcctccctgatctgtcagggccacttagtgataataaattcttcccaactgca

SEQ ID NO: 115672 - DNA, 1000 bp, Homo Sapiens
gaagtgacctcactggcctgccatgccagtaactgtgctgtactgagcactgaaccacattcagggaaatggcttattaaactttgaagcaactgtgaattcattctggaggggcagtggagatcaggagtgacagatcacagggtgagggccacctccacacccaccccctctggagaaggcctggaagagctgagaccttgctttgagactcctcagcacccctccagttttgcctgagaaggggcagatgttcccggagcagaagacgtctccccttctctgcctcacctggtcgccaatccatgctctctttcttttctctgtctactccttatcccttggtttagaggaacccaagatgtggcctttagcaaaactggacaatgtccaaacccactcatgactgcatgacggagccgagccatgtgtctttacacctcgctgttgtcacatctcagggaactgaccctcaggcacaccttgcagaaggcaaggccctgccctgcccaacctctgtggtcacccatgcatcttccactggaacgtttcactgcaaacacaccttggagaagtggcatcagtcaacagagaggggcagggaaggagacaccaagctcacccttcgtcatggaccgaggttcccactctgggcaaagcccctcacactgcaagggattgtagataacactgacttgtttgttttaaccaataactagcttcttataatgatttttttactaatgatacttacaagtttctagctctcacagacatatagaataagggtttttgcataataagcaggttgttatttaggttaacaatattaattcaggttttttagttggaaaaacaattcctgtaaccttctattttctataattgtagtaattgctctacagataatgtctatatattggccaaactggtgcatgacaagtactgtatttttttatacctaaataaagaaaaatctttagcctgggcaacaaaaaaa

SEQ ID NO: 115673 - DNA, 1000 bp, Homo Sapiens
ccatggaatttataccagttatatgaattgacttaagtatcttgaaaaagaaactttagagaaagcatcaggggtgtgtactcagtatttcaaatcagaacacaagattggaacttttggaaaaatgggttcaagctttcctattagccatggaaatgcaaagtttagcagaagcaagcaattaggcagagaacaaaaatgttaagcatggtgttgtctatcttattgaagtggttggaaatgaaagcttttaatttgatagatttatcagtataaaattagggaaaccacgtgtggggaatgaatcaatttagagcttcgggaattgtgaggtgacttttgtaacttttgttctgtgtgtgacctgtgaaccactaggatgtgatctgcccttgtgggcaggtccagcatagttaggagttaggctttagcataaatttctagctgcatctgagtctcctgggatgggtgctctttggctggttttggctgcggatggtgagatcagagcagctcttcctgctgctggcccctgcaatcagttgttgggatgccagtgcagatcactaagtagtaagattttaatcaaacacgaccaggtccgaaatgcaggtcatgagtgtgaaattctcaaatttacataaaaagtagaagtatagacagtttaacatttggtattaaaggagaggaaattgtagcagcttttcacgtttcccagtccccattagagggcttgagaccttgtacctgaacaacccattttgcactcagtgctttctgatgccttaggagaattgttttgtttcacaaaagctgggaaggaagaagtccattctgcagctgttagatctgcctctcaggaaaaagtactaacttgttctttttgttcctggctttcatcagtttgtgagatttctctattttttttaaatataattttatttctttcaacaaatataaaataaaaaacaactttggaacaatgaaaaaaaaaaaaaaa

SEQ ID NO: 115674 - DNA, 1000 bp, Homo Sapiens
gagaatccgtatactaaccaacaattctcagaccccaatcctaagccctcaggaggttgtgtcttgtagccagtatgctcaaggctgtgaaggcggcttcccataccttattgcaggaaagtacgcccaagattttgggctggtggaagaagcttgcttcccctacacaggcactgattctccatgcaaaatgaaggaagactgctttcgttattactcctctgagtaccactatgtaggaggtttctatggaggctgcaatgaagccctgatgaagcttgagttggtccatcatgggcccatggcagttgcttttgaagtatatgatgacttcctccactacaaaaaggggatctaccaccacactggtctaagagaccctttcaacccctttgagctgactaatcatgctgttctgcttgtgggctatggcactgactcagcctctgggatggattactggattgttaaaaacagctggggcaccggctggggtgagaatggctacttccggatccgcagaggaactgatgagtgtgcaattgagagcatagcagtggcagccacaccaattcctaaattgtagggtatgccttccagtatttcataatgatctgcatcagttgtaaaggggaattggtatattcacagactgtagactttcagcagcaatctcagaagcttacaaatagatttccatgaagatatttgtcttcagaattaaaactgcccttaattttaatatacctttcaatcggccactggccatttttttctaagtattcaattaagtgggaattttctggaagatggtcagctatgaagtaatagagtttgcttaatcatttgtaattcaaacatgctatattttttaaaatcaatgtgaaaacatagacttatttttaaattgtaccaatcacaagaaaataatggcaataattatcaaaacttttaaaatagatgctcatatttttaaaataaagttttaaaaataactgca

SEQ ID NO: 115675 - DNA, 1000 bp, Homo Sapiens
ggcgacgacctggaccccaactacgtgctgagctcgcgggtgcgcacgggccgcagcatccgtggcttctgcctccccccgcactgcagccgcggggagcgccgcgccatcgagaagctcgcggtggaagccctgtccagcctggacggcgacctggcgggccgatactacgcgctcaagagcatgacggaggcggagcagcagcagctcatcgacgaccacttcctcttcgacaagcccgtgtcgcccctgctgctggcctcgggcatggcccgcgactggcccgacgcccgcggtatctggcacaatgacaataagaccttcctggtgtgggtcaacgaggaggaccacctgcgggtcatctccatgcagaaggggggcaacatgaaggaggtgttcacccgcttctgcaccggcctcacccagattgaaactctcttcaagtctaaggactatgagttcatgtggaaccctcacctgggctacatcctcacctgcccatccaacctgggcaccgggctgcgggcaggtgtgcatatcaagctgcccaacctgggcaagcatgagaagttctcggaggtgcttaagcggctgcgacttcagaagcgaggcacaggcggtgtggacacggctgcggtgggcggggtcttcgacgtctccaacgctgaccgcctgggcttctcagaggtggagctggtgcagatggtggtggacggagtgaagctgctcatcgagatggagcagcggctggagcagggccaggccatcgacgacctcatgcctgcccagaaatgaagcccggcccacacccgacaccagccctgctgcttcctaacttattgcctgggcagtgcccaccatgcacccctgatgttcgccgtctggcgagcccttagccttgctgtagagacttccgtcacccttggtagagtttatttttttgatggctaagatactgctgatgctgaaataaactagggttttggcctgcctgcgtctg

SEQ ID NO: 115676 - DNA, 1000 bp, Homo Sapiens
ggatggaaaataagtagaaacaaaaaagcagtggctaagatggtatagggactgtcataccagtgaagaataaaagggtgaagaataaaagggatatgatgacaaggttgatccacttcaagaattgcttgctttcaggaagagagatgtgtttcaacaagccaactaaaatatattgctgcaaatggaagcttttctgttctattataaaactgtcgatgtattctgaccaaggtgcgacaatctcctaaaggaatacactgaaagttaaggagaagaatcagtaagtgtaaggtgtacttggtattataatgcataattgatgttttcgttatgaaaacatttggtgcccagaagtccaaattatcagttttatttgtaagagctattgcttttgcagcggttttatttgtaaaagctgttgatttcgagttgtaagagctcagcatcccaggggcatcttcttgactgtggcatttcctgtccaccgccggtttatatgatcttcatacctttccctggaccacaggcgtttctcggcttttagtctgaaccatagctgggctgcagtaccctacgctgccagcaggtggccatgactacccgtggtaccaatctcagtcttaaagctcaggcttttcgttcattaacattctctgatagaattctggtcatcagatgtactgcaatggaacaaaactcatctggctgcatcccaggtgtgtagcaaagtccacatgtaaatttatagcttagaatattcttaagtcactgtcccttgtctctctttgaagttataaacaacaaacttaaagcttagcttatgtccaaggtaagtattttagcatggctgtcaaggaaattcagagtaaagtcagtgtgattcacttaatgatatacattaattagaattatggggtcagaggtatttgcttaagtgatcataattgtaaagtatatgtcacattgtcacattaatgtcaaaaaaaaaaaaaaaaaa

SEQ ID NO: 115677 - DNA, 539 bp, Homo Sapiens
ctgtctcccgccacccacaccagctgtcccactcaccatggagaagatcctgatcctcctgcttgtcgccctctctgtggcctatgcagctcctggcccccgggggatcattatcaacctggagaacggtgagctctgcatgaatagtgcccagtgtaagagcaattgctgccagcattcaagtgcgctgggcctggcccgctgcacatccatggccagcgagaacagcgagtgctctgtcaagacgctctatgggatttactacaagtgtccctgtgagcgtggcctgacctgtgagggagacaagaccatcgtgggctccatcaccaacaccaactttggcatctgccatgacgctggacgctccaagcagtgagactgcccacccactcccacacctagcccagaatgctgtaggccactaggcgcaggggcatctctcccctgctccagcgcatctcccgggctggccacctccttgaccagcatatctgttttctgattgcgctcttcacaattaaaggcctcctgcaaacctt

SEQ ID NO: 115678 - DNA, 1000 bp, Homo Sapiens
ggcagagccgagcgcagcggaggctccggcggaggcgcggggaaaatggctgatgactttggcttcttctcgtcgtcggagagcggtgccccggaggcggcggaggaggacccggcggccgccttcctggcccagcaggagagcgagattgcaggcatagagaacgacgagggcttcggggcacctgccggcagccatgcggcccccgcgcagccgggccccacgagtggggctggttctgaggacatggggaccacagtcaatggagatgtgtttcaggaggccaacggtcctgctgatggctacgcagccattgcccaggctgacaggctgacccaggagcctgagagcatccgcaagtggcgagaggagcagaggaaacggctgcaagagctggatgctgcatctaaggtcacggaacaggaatggcgggagaaggccaagaaggacctggaggagtggaaccagcgccagagtgaacaagtagagaagaacaagatcaacaaccgggcatccgaggaggctttcgtgaaggaatccaaggaggagaccccaggcacagagtgggagaaggtggcccagctatgtgacttcaaccccaagagcagcaagcagtgcaaagatgtgtcccgcctgcgctcggtgctcatgtccctgaagcagacgccactgtcccgctaggtgcctgctaggtgcatggccacagagcatgggctgggcctgggcacaggaggagcagctgctttggtcggggtggagactcgcagcagctgctacccacagcctattccactcctccccatctccaggcgctgggaggggggccctcaccccatcacgcctcgctccctcctggccctctggtccagcccctcacgcctcctctcagtctactcaattgtgactgtccctcctgatgtattttttttcttggcttaaagggtgtgttgttgactctttttacacttatttattatcattctcacttctctggaagcca

SEQ ID NO: 115679 - DNA, 1000 bp, Homo Sapiens
gtttcaaaatttaggtcccttggtctgtacaaataatagcaatgtaaaaatggttttttgaacctccaaatggaattacagactcagtagccatatcttccaaccccccagtataaatttctgtctttctgctatgtgtggtactttgcagctgcttttgcagaaatcacaattttcctgtggaataaagatggtccaaaaatagtcaaaaattaaatatatatatatattagtaatttatatagatgtcagcaattaggcagatcaaggtttagtttaacttccactgttaaaataaagcttacatagttttcttcctttgaaagactgtgctgtcctttaacataggtttttaaagactaggatattgaatgtgaaacatccgttttcattgttcacttctaaaccaaaaattatgtgttgccaaaaccaaacccaggttcatgaatatggtgtctattatagtgaaacatgtactttgagcttattgtttttattctgtattaaatattttcagggttttaaacactaatcacaaactgaatgacttgacttcaaaagcaacaaccttaaaggccgtcatttcattagtattcctcattctgcatcctggcttgaaaaacagctctgttgaatcacagtatcagtattttcacacgtaagcacattcgggccatttccgtggtttctcatgagctgtgttcacagacctcagcagggcatcgcatggaccgcaggagggcagattcggaccactaggcctgaaatgacatttcactaaaagtctccaaaacatttctaagactactaaggccttttatgtaatttctttaaatgtgtatttcttaagaattcaaatttgtaataaaactatttgtataaaaattaagcttttattaatttgttgctagtattgccacagacgcattaaaagaaacttactgcacaagctgctaataaatttgtaagctttgcataccttaaaaaaaaaaaaaaaaaa

SEQ ID NO: 115680 - DNA, 523 bp, Homo Sapiens
cggaagttttgctgctagtcgcggacgcaatggcttcaaggttacttcgcggagctggaacgctggccgcgcaggccctgagggctcgcggccccagtggcgcggccgcgatgcgctccatggcatctggaggtggtgttcccactgatgaagagcaggcgactgggttggagagggagatcatgctggctgcaaagaagggactggacccatacaatgtactggccccaaagggagcttcaggcaccagggaagaccctaatttagtcccctccatctccaacaagagaatagtaggctgcatctgtgaagaggacaataccagcgtcgtctggttttggctgcacaaaggcgaggcccagcgatgcccccgctgtggagcccattacaagctggtgccccagcagctggcacactgagcacctgcactaaattactcaaaatgtgctgtaaagtttcttctttccagtaaagactagccattgcattggctccttctcccataaaaaaaaaaaaaaaaaaa

SEQ ID NO: 115681 - DNA, 448 bp, Homo Sapiens
caaggtcgtgaaaaaaaaggtcttggtgaggtgccgccatttcatctgtcctcattctctgcgcctttcgcagagcttccagcagcggtatgttgggccagagcatccggaggttcacaacctctgtggtccgtaggagccactatgaggagggccctgggaagaatttgccattttcagtggaaaacaagtggtcgttactagctaagatgtgtttgtactttggatctgcatttgctacacccttccttgtagtaagacaccaactgcttaaaacataaggatgtttcagttcctccatttaacagatatgaagagcattttaagaggtgcagcctctggaagtggatcaaactagaactcatatgccatactagatatgtttgtcaataaacttatgacgtgaaaaaaaaaaaaaaaaaaaaaaaaaaaaaaaaaaaaaaaaaaa

SEQ ID NO: 115682 - DNA, 1000 bp, Homo Sapiens
tgaagaaatgctttttaataggagaagagaacggagtggtaacttcaattttggggcctaccataccctggaagagatttcccaagaaatggataacctcgtggctgagcaccctggtctagtgagcaaagtgaatattggctcttcttttgagaaccggcctatgaacgtgctcaagttcagcaccggaggagacaagccagctatctggctggatgctgggatccatgctcgagagtgggttacacaagctacggcactttggacagcaaataagattgtttctgattatggaaaggacccatccatcacttccattctggacgccctggatatcttcctcctgccagtcacaaaccctgatggatacgtgttctctcaaaccaaaaatcgtatgtggcggaagacccggtccaaggtatctggaagcctctgtgttggtgtggatcctaaccggaactgggatgcaggttttggaggacctggagccagcagcaacccttgctctgattcataccacggacccagtgccaactctgaagttgaagtgaaatccatagtggacttcatcaagagtcatggaaaagtcaaggccttcattatcctccacagctattcccagctgctgatgttcccctatgggtacaaatgtaccaagttagatgactttgatgagctgagtgaagtggcccaaaaggctgcccaatctctgagaagcctgcatggcaccaagtacaaagtgggaccaatctgctctgtcatctaccaagccagtggaggaagcattgactggtcctatgattatggcatcaagtactcatttgcctttgaactgagagacacagggcgctacggcttcctcttgccagcccgtcagatcctgcccacagccgaggagacctggcttggcttgaaggcaatcatggagcatgtgcgagaccacccctattagggccctggggaagaaacaagagccattaaaatctctttggtttgaagc

SEQ ID NO: 115683 - DNA, 1000 bp, Homo Sapiens
gagtcgagtataattggagttactctcttttcctcaaccaaggaggaatttcagcaatatgcagcagcccttcaagctggaatggaaattggctggttgaaacctgtgataggttctcaatatccattggagaaggtggccgaggctcatgaaaatatcattcatggtagtggggctactggaaaaatgattcttctcttatgatgattaattctttcatggatttcctatgtaattagaggtactgtctttcccccagttgtacttaccctatcttttctttaattaacattcgattccatgagcttcttatgtgaaaaaataagatttttctttagagagcagaagcagaagagtaaaatttattgtatagctagcaatatttttttatgccatctgtctcaaatcaaagagtcatcatagtaggaaataacatgttagttgtcatttggcatgagtgtgcattccagtaattcttaattgatatttgattaattccatacctttgattaaaacatgctagttcaaaataagactgctcagtttccaagggttttcaagcctacttacctttataaaggttctctagtctctgattagccatgactgtattggactttgaacattttctgaactaaaaacctctattctaaactaatctcatttggatgtgtaagtcttttgtaaaggcaagaataaataatatccaggacaatttattagttttctcagtattttcccaaatattagaatatttacttcattattggttggctgccaatgaccccatatgttctgtgagaatagtagctttatctttgatataatacatagtctccaaataggtaatacttcgcaattgattagattttcagagtagatttagagttatctgtttttctggtgagggtcaaatatttttgttaattaagctcacaaatttgataaattaagaattatctgcatttgtctggtaacataataatgtgtaataaagtct

SEQ ID NO: 115684 - DNA, 1000 bp, Homo Sapiens
ctttgaaaggagatgtcttggaacattggaatgttctcagatttctggttgttatgtgatcatgtgtggaagttattaactttaatgttttttgccacagcttttgcaacttaatactcaaatgagtaacatttgctgttttaaacattaatagcagcctttctctctttatacagctgtattgtctgaacttgcattgtgattggcctgtagagttgctgagagggctcgaggggtgggctggtatctcagaaagtgcctgacacactaaccaagctgagtttcctatgggaacaattgaagtaaactttttgttctggtcctttttggtcgaggagtaacaatacaaatggattttgggagtgactcaagaagtgaagaatgcacaagaatggatcacaagatggaatttagcaaaccctagccttgcttgttaaaattttttttttttttttttaagaatatctgtaatggtactgactttgcttgctttgaagtagctcttttttttttttttttttttttttttttgcagtaactgttttttaagtctctcgtagtgttaagttatagtgaatactgctacagcaatttctaatttttaagaattgagtaatggtgtagaacactaattaattcataatcactctaattaattgtaatctgaataaagtgtaacaattgtgtagcctttttgtataaaatagacaaatagaaaatggtccaattagtttcctttttaatatgcttaaaataagcaggtggatctatttcatgtttttgatcaaaaactatttgggatatgtatgggtagggtaaatcagtaagaggtgttatttggaaccttgttttggacagtttaccagttgccttttatcccaaagttgttgtaacctgctgtgatacgatgcttcaagagaaaatgcggttataaaaaatggttcagaattaaacttttaattcattcaaaaaaaaaaaaaaaaaaaaaaaaaaaaaaaaa

SEQ ID NO: 115685 - DNA, 1000 bp, Homo Sapiens
tcacccagggacacctatagtgacaggagtggaagcagctcccctgactctgaaatcaccgaactgaagtttccatcaataaatcatgactgatcttgtagcggatgattcttcaagagacccttcaaacttgggtagagtttacagctctgactttacactcggctttggagactttctttaaattatgtttttattaagattattttattatgcggaaaggtatttgggaaacttgtcacttgcatgtcccatcacgtgtactggctcctctgtggtgtctgcctgttgcgtgacactctccttgcagttcttgagttgcggcagaacatcgcgatgggaaccgatggtgggtggggctgcagatgtccccatcggtcaccttgtttctcaactacctcgcatcattgcagatcgtagcgcgttgcctgtcgctttcccttggatacctagaccgttataaagtgtgccacatggacttaccgagcatggagagaggattttagctaggatttgaacacttggtgctgggaacctcagggtattgcttgccactaagccatgaaaccagagacaaaatctctatactgccctgagttggggggaattctcagtgccaactgtggctggtcctcattcaaagggacggtcagtttggtgtcaacatgaaacaccaagatgtctgtctctgaagcgtgattttaaaatccccatgcctgtgcgtgcgcttcctatttctagggctgggaaacactccttgcatcaaggggtcacttacagaacaaagaatcttttgggggaaacttcctctaaaaccctctcatatatagacagctttgactggagggtccatttttcttccaggatggtgttactgcagttgaagggcaatatgaagttactttcttaatgtgacctagcaataggcatagctacgtggcactatattctggccagactcgatgtgtactctaacttaagaaataaatcagtaaggcag

SEQ ID NO: 115686 - DNA, 1000 bp, Homo Sapiens
tgtcgcaggccgggaagaccctctgcctgagcggcttcatgggcatggacatcccgccacccagcgggccactctggatcctgggcgacgtcttcatcggccgctactacactgtgtttgaccgtgacaacaacagggtgggcttcgccgaggctgcccgcctctagttcccaaggcgtccgcgcgccagcacagaaacagaggagagtcccagagcaggaggcccctggcccagcggcccctcccacacacacccacacactcgcccgcccactgtcctgggcgccctggaagccggcggcccaagcccgacttgctgttttgttctgtggttttcccctccctgggttcagaaatgctgcctgcctgtctgtctctccatctgtttggtgggggtagagctgatccagagcacagatctgtttcgtgcattggaagaccccacccaagcttggcagccgagctcgtgtatcctggggctcccttcatctccagggagtcccctccccggccctaccagcgcccgctgggctgagcccctaccccacaccaggccgtcctcccgggccctcccttggaaacctgccctgcctgagggcccctctgcccagcttgggcccagctgggctctgccaccctacctgttcagtgtcccgggcccgttgaggatgaggccgctagaggcctgaggatgagctggaaggagtgagaggggacaaaacccaccttgttggagcctgcagggtggtgctgggactgagccagtcccaggggcatgtattggcctggaggtggggttgggattgggggctggtgccagccttcctctgcagctgacctctgttgtcctccccttgggcggctgagagccccagctgacatggaaatacagttgttggcctccggcctcccctcaaaaaaaaaaaaaaaaaaaaaaaaaaaaaaaaaaaaaaaaaaaaaaaaaaaaaaaaaaaaaaaaaaaaaaaaaaaaaaaaaaaaa

SEQ ID NO: 115687 - DNA, 1000 bp, Homo Sapiens
aaccgtaagcccaggaaggggaaagtgttccaggaacctctgttttatgaggcccccagatctgtggattggagagagaaaggctacgtgactcctgtgaagaatcagggtcagtgtggttcttgttgggcttttagtgctactggtgctcttgaaggacagatgttccggaaaactgggaggcttatctcactgagtgagcagaatctggtagactgctctgggcctcaaggcaatgaaggctgcaatggtggcctaatggattatgctttccagtatgttcaggataatggaggcctggactctgaggaatcctatccatatgaggcaacagaagaatcctgtaagtacaatcccaagtattctgttgctaatgacaccggctttgtggacatccctaagcaggagaaggccctgatgaaggcagttgcaactgtggggcccatttctgttgctattgatgcaggtcatgagtccttcctgttctataaagaaggcatttattttgagccagactgtagcagtgaagacatggatcatggtgtgctggtggttggctacggatttgaaagcacagaatcagataacaataaatattggctggtgaagaacagctggggtgaagaatggggcatgggtggctacgtaaagatggccaaagaccggagaaaccattgtggaattgcctcagcagccagctaccccactgtgtgagctggtggacggtgatgaggaaggacttgactggggatggcgcatgcatgggaggaattcatcttcagtctaccagcccccgctgtgtcggatacacactcgaatcattgaagatccgagtgtgatttgaattctgtgatattttcacactggtaaatgttacctctattttaattactgctataaataggtttatattattgattcacttactgactttgcattttcgtttttaaaaggatgtataaatttttacctgtttaaataaaatttaatttcaaatgta

SEQ ID NO: 115688 - DNA, 1000 bp, Homo Sapiens
tggtggcttctgtgcgagtcccggcgcgcgttctgctccgcgcgggggcccggctcccgggcgcggccctcgggcggacggagcgggcggccggcggcggagacggcgcgcggcgcttcgggagccagcgggtgctggtggagccggacgcgggcgcaggggtcgctgtgatgaaattcaagaaccccccagtgaacagcctgagcctggagtttctgacggagctggtcatcagcctggagaagctggagaatgacaagagcttccgcggtgtcattctgacctcggaccgcccgggtgtcttctcggccggcctggacctgacggagatgtgtgggaggagccccgcccactacgctgggtactggaaggccgttcaggagctgtggctgcggttgtaccagtccaacctggtgctggtctccgccatcaacggagcctgccccgctggaggctgcctggtggccctgacctgtgactaccgcatcctggcggacaaccccaggtactgcataggactcaatgagacccagctgggcatcatcgcccctttctggttgaaagacaccctggagaacaccatcgggcaccgggcggcggagcgtgccctgcagctggggctgctcttcccgccggcggaggccctgcaggtgggcatagtggaccaggtggtcccggaggagcaggtgcagagcactgcgctgtcagcgatagcccagtggatggccattccagaccatgctcgacagctgaccaaggccatgatgcgaaaggccacggccagccgcctggtcacgcagcgcgatgcggacgtgcagaacttcgtcagcttcatctccaaagactccatccagaagtccctgcagatgtacttagagaggctcaaagaagaaaaaggctaacgattgggctgccacaggcttacggccacacgtgcccctgtgggtcccagggaggtcttaaacaaggtatttttcaacttaaaaaaaaaaaaaaaaaa

SEQ ID NO: 115689 - DNA, 1000 bp, Homo Sapiens
ggctggtgacctcactgtcagagagctggtacaacctcctgctggacatgcagaatcgactcaataaagtcatcaaaagtgtggggaagatcgagcactccttctggagatcctttcacaccgagcggaagacagaaccagccacaggtttcatcgacggtgacttgattgagagtttcctggatattagccgccccaagatgcaggaggtggtggcaaacctacagtatgacgatggcagcggtatgaagcgagaggccactgcagacgacctcatcaaggttgtggaggagctaactcggatccattagccaagggcagggggcccctttgctgaccctccccaaaggctttgccctgctgccctccccctcctctccaccatcgtcttcttggccatgggaggcctttccctaagccagctgcccccagagccacagttcccctatgtggaagtggggcgggcttcatagagacttgggaatgagctgaaggtgaaacattttctccctggatttttaccagtctcacatgattccagccatcaccttagaccaccaagccttgattggtgttgccagttgtcctccttccggggaaggattttgcagttctttggctgaaaggaagctgtgcgtgtgtgtgtgtgtatgtgtgtgtgtgtatgtgtatctcacactcatgcattgtcctctttttatttagattggcagtgtagggagttgtgggtagtggggaagagggttaggagggtttcattgtctgtgaagtgagaccttccttttacttttcttctattgcctctgagagcatcaggcctagaggcctgactgccaagccatgggtagcctgggtgtaaaacctggagatggtggatgatccccacgccacagcccttttgtctctgcaaactgccttcttcggaaagaagaaggtgggaggatgtgaattgttagtttctgagttttaccaaataaagtagaatataagaagaaaaaaa

SEQ ID NO: 115690 - DNA, 1000 bp, Homo Sapiens
aagatggccctggatgtggagattgccacctaccggaagctgctggagggagaggagagccggatcaatctccccatccagacctactctgccctcaacttccgagaaaccagccctgagcaaaggggttctgaggtccataccaagaagacggtgatgatcaagaccatcgagacacgggatggggaggtcgtcagtgaggccacacagcagcagcatgaagtgctctaaagacagagaccctctgccaccagagaccgtcctcacccctgtcctcactgctccctgaagccagccttcttccatcccaggacaccacacccagcctcagtcctcccctcacagcctctgacccctcctcactggccatccctcgtggtccccaacagcgacatagcccatccctgcctggtcacagggcatgccccggccacctctgcggaccccagctgtgagccttggctgttggcagtgagtgagcctggctcttgtgctggatggagcccaggcgggagcggtggccctgtccctcccacctctgtgacctcaggcactagcctttggctctggagacagccccagagcagggtgttgggatactgcagggccaggactgagccccgcagacctccccagcccctagcccaggagagagaaagccaggcaggtagccagggggactagcccctgtggagactggggggcttgaaattgtccccgtggtctcttactttcctttccccagcccagggtggacttagaaagcaggggctacaagagggaatccccgaaggtgctggaggtgggagcaggagattgagaaggagagaaagtgggtgagatgctggagaagagaggagaggagagaggcagagagcggtctcaggctggtgggaggggcgcccacctccccacgccctcccctcccctgctgcaggggctctggagagaaacaataaagagattcacacacaagccaaaaaaaaaaaaaaaaaaaaaa

SEQ ID NO: 115691 - DNA, 1000 bp, Homo Sapiens
ggacctgacccagagccgccgcccacttaccagctgcaccattttcctgggatatacatccaacctcatcagttcaggcatccgtgagaccattcgctaccttgtgcagcacaacatggtggacgtattggtgaccacagctggcggcgtggaggaagacctcatcaagtgcctggcgcccacatacttgggcgagtttagcctcagggggaaggagctccgggagaacgggatcaataggatcggaaacctgctggtgcccaatgagaattactgcaagtttgaggactggctgatgcccattctggaccagatggtgatggagcagaacacagagggtgtaaagtggacgccttctaagatgatcgcccggctgggcaaggagatcaacaacccagagtccgtgtattactgggcccagaagaaccacatccctgtgtttagtcccgcacttacagacggctcgctgggcgacatgatcttcttccattcctacaagaacccgggcctggtcctggacatcgttgaggacctgaggctcatcaacacacaggccatctttgccaagtgcactgggatgatcattctgggcgggggcgtggtcaagcaccacattgccaatgccaacctcatgcggaacggggccgactacgctgtttacatcaacacagcccaggagtttgatggctctgactcaggtgcccgaccagacgaggctgtctcctggggcaagatccgggtggatgcacagcccgtcaaggtctatgctgacgcctccctggtcttccccctgcttgtggctgaaacctttgcccagaagatggatgccttcatgcatgagaagaacgaggactgagcggctgcggtcccaggaaggtcttaccccctcttctatttattaatttgcagacccagcccctcccctactttttggtcagctacgtctctagaataagatggtatctgaagtccttaaaaaaaaaaaaaaaaaaaaaaaaaa

SEQ ID NO: 115692 - DNA, 1000 bp, Homo Sapiens
cttattgtttttagaattacttttacattttcccaactagatggcctagagtccaacattaccttttgagatgacattattgtctccataattgagtgatagctttaaaaaaaagattagttttgcttaagaagttatgttacaactgatcagccctatatgaattaactgatcagccctatatgaaacataagttgtgttataacttatcagccgtatatggaacataaatagtttctacctgcttgttagagaagctttaatttggttctaataaatacagtatggtagtgtttataggaatccaggatgttgaagaaatggcataatgtctatattttggaaacagaaaggaaaagtcacttaagatagtattaagtaattaaattcctatgtcagttgccaaatcttttaaacttatgtattcaccaagcccaaaaatagattgtggctcccaggattccaattttaattggagagctaagtaagtaaagttttataactgttaggtttcttaatgatcatattttgcagttttagtaaaagggaaatattgttatacatttattaaatatacttcccccatgaagtgaaaaggttaattttgctgaatgttttaagttgaagttacttcatggatgtcatacccatgaagtgcatttggatgagatagaagaaattgttttttaaaaagtttaagtaccaaaggtagtctagtctagaacgataagttaatacgtgttggcttttctaatttgtactgtaacatccttatactttctattttaagtatatctgtttcttaagtaaacaacttagatattttccacacctttttttttttttctgatgcagagttcaggttaatattttactgcatctgataatgtattatacgtttgaagcctagtgacttttcattttgacattcttgtgatttcatatgctgtattcttcaagcaataaaattgtgatgtgttttataaaaaaaaaaaaaaaa

SEQ ID NO: 115693 - DNA, 1000 bp, Homo Sapiens
taataagtcttaaaagttccttcatgcataagatttttttccagttactgggcttaactggtgtacattaattagatgtccatactgtattttgtttgcattaagtaattttctttttgacttagtatccggcacacaaagtgggttagtactacagtatttgcgttactttaagtactaagtatgcaggtttcctggtaccattgagttgctgctattaaagctcacacacgaaatggctaaaagttacaagtgtgcaaattatgactgcgtgagccttagaaaataaaatgtataaagggcaacacatgagctgtcaaacagtgttaggagtgtgtttatatgtacagagttgtgcatagcaatcgttttatttaagttgatatgtagtctactcacattttcattatttagcaattttgtacaaaaatagcaattaatttgtaaacactgccagaatactttctagctgctttgtaattttttaagagtgttattttgtttttgtttttctgttctttgttgtggctcttgttttcatttttgttgtacgtgtagatctgtaaataaaattgcagtatttaaagcttaagctttcaggaaaaagaaaataagaattcagtgtgtgcatgacaactcgtgtgtatgagaaggagggatatgaaggaagatggcttgcagagtaagtcgggtggcaattgtcagggtgtgggaatttcttttcctacggggtacgtgattttgtaaaaaggaagtatttctcccaaaattgggagtaggcaaactactaatcagtttagctttgtgttgtatgctagtttaaaaaagaaaatatgtaatataatgtaaaaaaaaacaaaaaaaagcttttatgatggattttgtaaatagatttgttacagggtgacctgttctctagctgtgatcttaccacttcaaatgggtgtaatttgaataaattttgtatggtaaaggatcaataaaatgattttttttaaga

SEQ ID NO: 115694 - DNA, 1000 bp, Homo Sapiens
ttataattattcactgctttttgtcagtgaaatagacatcttgcctcctgaagtagcttcatcacagagtgtcatgaagacagacagtcaggctgaaatggacagttctttgtggactctacccttcccttcaaggagtatgtcatatatcacaaaagaaattgccttacactggttcatgtttgcagttactgttgtacattgcatagatgtacacacgaatttaaatgtgatgtctttgtatatatctgtataatgttgagattacttacgaaatatgtctgagtgacacttttcacccttgtacagccaaaataatgtatatatggaaagtgacagacaaattctctaatctctttggtacctataacttattagaatcctctggatgagggttagaagagactttttccaaacttctacatgtagaagtatcataaatgtgctacacatttatgtttgtggatttaattaaagtattttaatatggttttcagtgctaaaattggagtcagatacttcttggttttaagctgtctacctaattgctgtctcccagcagactggtggcatgcccagtggctttgggggcaaggatagaaatgccatcaggaaatagctgaattcattgtgaaacatgaattcagtcatggtgataattggaaactcctttcaggtttttgcaagtagattttgtaatgtttgtgtatgcagccttgctgttgagtcagtccaaggggttttacttaggacaagttgtaccttgccctctctccagctctgctcccacattttcacatacctagctgtttctacctcattgggtaagtcatttaccactctgtgcctcagtttactctgtagtttaccattagactgtgagctccttgagggactttgtcataatcactgttacatcccagtgcctcacaccatgcctggcccttaagaagtgctcaataaatgtctgaacaaataagtgaaaaaaaaaaaaaaaaaa

SEQ ID NO: 115695 - DNA, 1000 bp, Homo Sapiens
taagctggagtctattcctggattcaatgtcatccagagcccagagcagatgcaagtgctgctggaccaggcgggctgctgtatcgtgggtcagagtgagcagctggttcctgcggacggaatcctatatgcagccagagatgtgacagccaccgtggacagcctgccactcatcacagcctccattctcagtaagaaactcgtggaggggctgtccgctctggtggtggacgttaagttcggaggggccgccgtcttccccaaccaggagcaggcccgggagctggcaaagacgctggttggcgtgggagccagcctagggcttcgggtcgcggcagcgctgaccgccatggacaagcccctgggtcgctgcgtgggccacgccctggaggtggaggaggcgctgctctgcatggacggcgcaggcccgccagacttaagggacctggtcaccacgctcgggggcgccctgctctggctcagcggacacgcggggactcaggctcagggcgctgcccgggtggccgcggcgctggacgacggctcggcccttggccgcttcgagcggatgctggcggcgcagggcgtggatcccggtctggcccgagccctgtgctcgggaagtcccgcagaacgccggcagctgctgcctcgcgcccgggagcaggaggagctgctggcgcccgcagatggcaccgtggagctggtccgggcgctgccgctggcgctggtgctgcacgagctcggggccgggcgcagccgcgctggggagccgctccgcctgggggtgggcgcagagctgctggtcgacgtgggtcagaggctgcgccgtgggaccccctggctccgcgtgcaccgggacggccccgcgctcagcggcccgcagagccgcgccctgcaggaggcgctcgtactctccgaccgcgcgccattcgccgccccctcgcccttcgcagagctcgttctgccgccgcagcaataaagctcctttgccgcgaaa

SEQ ID NO: 115696 - DNA, 1000 bp, Homo Sapiens
gcctgcctgcccgcagggcctatatgagctgatgcttcggtgctggagccgggagtctgagcagcgaccacccttttcccagctgcatcggttcctggcagaggatgcactcaacacggtgtgaatcacacatccagctgcccctccctcagggagcgatccaggggaagccagtgacactaaaacaagaggacacaatggcacctctgcccttcccctcccgacagcccatcacctctaatagaggcagtgagactgcaggtgggctgggcccacccagggagctgatgccccttctccccttcctggacacactctcatgtccccttcctgttcttccttcctagaagcccctgtcgcccacccagctggtcctgtggatgggatcctctccaccctcctctagccatcccttggggaagggtggggagaaatataggatagacactggacatggcccattggagcacctgggccccactggacaacactgattcctggagaggtggctgcgcccccagcttctctctccctgtcacacactggaccccactggctgagaatctgggggtgaggaggacaagaaggagaggaaaatgtttccttgtgcctgctcctgtacttgtcctcagcttgggcttcttcctcctccatcacctgaaacactggacctgggggtagccccgccccagccctcagtcacccccacttcccacttgcagtcttgtagctagaacttctctaagcctatacgtttctgtggagtaaatattgggattggggggaaagagggagcaacggcccatagccttggggttggacatctctagtgtagctgccacattgatttttctataatcacttggggtttgtacatttttggggggagagacacagatttttacactaatatatggacctagcttgaggcaattttaatcccctgcactaggcaggtaataataaaggttgagttttccacaaaaaaaaaaaaaaaaaa

SEQ ID NO: 115697 - DNA, 1000 bp, Homo Sapiens
ctggcggctccgccggtccaagcgctgctcctgctcgtccctgatggataaagagtgtgtctacttctgccacctggacatcatttgggtcaacactcccgagcacgttgttccgtatggacttggaagccctaggtccaagagagccttggagaatttacttcccacaaaggcaacagaccgtgagaatagatgccaatgtgctagccaaaaagacaagaagtgctggaatttttgccaagcaggaaaagaactcagggctgaagacattatggagaaagactggaataatcataagaaaggaaaagactgttccaagcttgggaaaaagtgtatttatcagcagttagtgagaggaagaaaaatcagaagaagttcagaggaacacctaagacaaaccaggtcggagaccatgagaaacagcgtcaaatcatcttttcatgatcccaagctgaaaggcaatccctccagagagcgttatgtgacccacaaccgagcacattggtgacagaccttcggggcctgtctgaagccatagcctccacggagagccctgtggccgactctgcactctccaccctggctgggatcagagcaggagcatcctctgctggttcctgactggcaaaggaccagcgtcctcgttcaaaacattccaagaaaggttaaggagttcccccaaccatcttcactggcttccatcagtggtaactgctttggtctcttctttcatctggggatgacaatggacctctcagcagaaacacacagtcacattcgaattcgggtggcatcctccggagagagagagaggaaggagattccacacaggggtggagtttctgacgaaggtcctaagggagtgtttgtgtctgactcaggcgcctggcacatttcagggagaaactccaaagtccacacaaagattttctaaggaatgcacaaattgaaaacacactcaaaagacaaacatgcaagtaaagaaaaaaaaaaaaaaaaa

SEQ ID NO: 115698 - DNA, 1000 bp, Homo Sapiens
aggagaacatgcggggtgtgcgcttcgacgtccacgacgtcaccctgcacgccgacgccatccaccgcggagggggccagatcatccccacagcacggcgctgcctctacgccagtgtgctgaccgcccagccacgcctcatggagcccatctaccttgtggagatccagtgtccagagcaggtggtcggtggcatctacggggttttgaacaggaagcggggccacgtgttcgaggagtcccaggtggccggcacccccatgtttgtggtcaaggcctatctgcccgtcaacgagtcctttggcttcaccgctgacctgaggtccaacacgggcggccaggcgttcccccagtgtgtgtttgaccactggcagatcctgcccggagaccccttcgacaacagcagccgccccagccaggtggtggcggagacccgcaagcgcaagggcctgaaagaaggcatccctgccctggacaacttcctggacaaattgtaggcggcccttcctgcagcgcctgccgccccggggactcgcagcacccacagcaccacgtcctcgaattctcagacgacacctggagactgtcccgacacagcgacgctcccctgagaggtttctggggcccgctgcgtgccatcactcaaccataacacttgatgccgtttctttcaatatttatttccagagtccggaggcagcagacacgccctcttagtagggacttaatgggccggtcggggagggggaggcgggatgggacacccaacactttttccatttcttcagagggaaactcagatgtccaaactaattttaacaaacgcattaagaggtttatttgggtacatggcccgcagtggcttttgccccagaaaggggaaaggaacacgcgggtagatgatttctagcaggcaggaagtcctgtgcggtgtcaccatgagcacctccagctgtactagtgccattggaataataaatttgataaggtggtgaaaaaa

SEQ ID NO: 115699 - DNA, 1000 bp, Homo Sapiens
tccaagttcttcacctctatccaaagaacttgatttgcatggattttggataaatcatttcagtatcatctccatcatatgcctgaccccttgctcccttcaatgctagaaaatcgagttggcaaaatggggtttgggcccctcagagccctgccctgcacccttgtacagtgtctgtgccatggatttcgtttttcttggggtactcttgatgtgaagataatttgcatattctattgtattatttggagttaggtcctcacttgggggaaaaaaaaaaaagaaaagccaagcaaaccaatggtgatcctctattttgtgatgatgctgtgacaataagtttgaacctttttttttgaaacagcagtcccagtattctcagagcatgtgtcagagtgttgttccgttaacctttttgtaaatactgcttgaccgtactctcacatgtggcaaaatatggtttggtttttctttttttttttttttgaaagtgttttttcttcgtccttttggtttaaaaagtttcacgtcttggtgccttttgtgtgatgcgccttgctgatggcttgacatgtgcaattgtgagggacatgctcacctctagccttaaggggggcagggagtgatgatttgggggaggctttgggagcaaaataaggaagagggctgagctgagcttcggttctccagaatgtaagaaaacaaaatctaaaacaaaatctgaactctcaaaagtctatttttttaactgaaaatgtaaatttataaatatattcaggagttggaatgttgtagttacctactgagtaggcggcgatttttgtatgttatgaacatgcagttcattattttgtggttctattttactttgtacttgtgtttgcttaaacaaagtgactgtttggcttataaacacattgaatgcgctttattgcccatgggatatgtggtgtatatccttccaaaaaattaaaacgaaaataaagtagctgcgattggg

SEQ ID NO: 115700 - DNA, 1000 bp, Homo Sapiens
ttcccaattctgtgatagagtaatgacaccagttttcctgtcatgacaagcctctgtgatgttacatatggaaatggttgaatcttgaaaaatctaaaattgttgcaaaacatattttgtatgattttgttgtaagagttcttctctttttactttttgccttgtgtagttaaaaattaaggggctggtcaatacaaaaacttgtacacaaatatttatagcagaattattcataatggccaaaagctgaatacaacccaaatgtctatgaactaatgaatagataaaccaaatctggtatatccatacaatggactatattattcagccataaaaagaaataaagggccaggcacagtggctcacacctgtaatcccagcactttgggaggctgaggcaggaggattgtttgaggccagaaatttgagaccagcctgggcaacatagcaaaaccctgtctctacaaaaaatactttccgtacattagtggttgcctaaggctagaattgggggtgatgaatggggagtacaggattcatctaatgggtacaggatttctttatggttcatgaaaatggtctaaacttattgtggtaatggtcacataacaatatattaaaaaccattgagttgtatattttaagtgggtgaattatatggtatgtgaattatatctcaataaagttgttagtaaataaatggggctgaagatgttatccttcattgtggtgtaaatgaactttcacaatattttcacctgtgaacccaaataaaatgattaaagttctgatggaaaaatcttgaatggagtataagttttccgttgttaaaaagcaaacaaaaaaccaacaaaaaatccaagtgtgccttgaattgtacagagcacaattattatgtttgaaatgtgtactacttaattttatataatttggtttgtgaaattaaagacatcaataaaaatgattcctgaaagtagtaaaaaaaaaaaaaaaaaaaaaa

SEQ ID NO: 115701 - DNA, 1000 bp, Homo Sapiens
tccatctggttggtattgacatctttactgggaagaaatatgaagatatctgcccgtcaactcataatatggatgtccccaacatcaaaaggaatgacttccagctgattggcatccaggatgggtacctatcactgctccaggacagcggggaggtacgagaggaccttcgtctccctgagggagaccttggcaaggagattgagcagaagtacgactgtggagaagagatcctgatcacggtgctgtctgccatgacagaggaggcagctgttgcaatcaaggccatggcaaaataactggctcccaggatggcggtggtggcagcagtgatcctctgaacctgcagaggccccctccccgagcctggcctggctctggcccggtcctaagctggactcctcctacacaatttatttgacgttttattttggttttccccaccccctcaatctgtcggggagcccctgcccttcacctagctcccttggccaggagcgagcgaagctgtggccttggtgaagctgccctcctcttctcccctcacactacagccctggtgggggagaagggggtgggtgctgcttgtggtttagtcttttttttttttttttttttttttttaaattcaatctggaatcagaaagcggtggattctggcaaatggtccttgtgccctccccactcatccctggtctggtcccctgttgcccatagccctttaccctgagcaccaccccaacagactggggaccagccccctcgcctgcctgtgtctctccccaaacccctttagatggggagggaagaggaggagaggggaggggacctgccccctcctcaggcatctgggagggccctgcccccatgggctttacccttccctgcgggctctctccccgacacatttgttaaaatcaaacctgaataaaactacaagtttaatatgaaaaaaaaaaaaaaaaaaaaaaaaaaaaaaaaaaaaaaaaaaaaaaaaaaa

SEQ ID NO: 115702 - DNA, 1000 bp, Homo Sapiens
ctgaacgtctggctaaatacaaccagctcatgagaattgaggaagagctgggggatgaagctcgctttgccggacataacttccgtaatcccagtgtgctgtgattcctctgcttgcctggagacgtggaacctctgtctcatcctcctggaaccttgctgtcctgatctgtgatagttcaccccctgagatcccctgagccccagggtgcccagaacttccctgattgacctgctccgctgctccttggcttacctgacctcttgctgtctctgctcgccctcctttctgtgccctactcattggggttccgcactttccacttcttcctttctctttctctcttccctcagaaactagaaatgtgaatgaggattattataaaagggggtccgtggaagaatgatcagcatctgtgatgggagcgtcagggttggtgtgctgaggtgttagagagggaccatgtgtcacttgtgctttgctcttgtcccacgtgtcttccactttgcatatgagccgtgaactgtgcatagtgctgggatggaggggagtgttgggcatgtgatcacgcctggctaataaggctttagtgtatttatttatttatttattttatttgtttttcattcatcccattaatcatttccccataactcaatggcctaaaactggcctgacttgggggaacgatgtgtctgtatttcatgtggctgtagatcccaagatgactggggtgggaggtcttgctagaatgggaagggtcatagaaagggccttgacatcagttcctttgtgtgtactcactgaagcctgcgttggtccagagcggaggctgtgtgcctgggggagttttcctctatacatctctccccaaccctaggttccctgttcttcctccagctgcaccagagcaacctctcactccccatgccacgttccacagttgccaccacctctgtggcattgaaatgagcacctccattaaagtctgaatcagtgc

SEQ ID NO: 115703 - DNA, 1000 bp, Homo Sapiens
ggagagtatcaaagccaacccagtatttgattaccagctctacttccaagaaccaggagtggctgaggctgaactggaacagaacctgagtcggactttcaaaagcctcttcagagcaagcgatgagagtgttttatccatgcataaagtctgtgaagcgggaggactttttgtaaatagcccagaagagcccagcctcagcaggatggtcactgaggaggaaatccagttctatgtgcagcagttcaagaagtctggtttcagaggtcctctaaactggtaccgaaacatggaaaggaactggaagtgggcttgcaaaagcttgggacggaagatcctgattccggccctgatggtcacggcggagaaggacttcgtgctcgttcctcagatgtcccagcacatggaggactggattccccacctgaaaaggggacacattgaggactgtgggcactggacacagatggacaagccaaccgaggtgaatcagatcctcattaagtggctggattctgatgcccggaacccaccggtggtctcaaagatgtagaacgcagcgtgtgcccacgctcagcaggtgtgccatccttccacctgctggggcaccattcttagtatacagaggtggccttacacacatcttgcatggatggcagcattgttctgaaggggtttgcagaaaaaaaagattttctttacataaagtgaatcaaatttgacattattttagatcccagagaaatcaggtgtgattagttctccaggcatgaatgcatcgtccctttatctgtaagaacccttagtgtcctgtagggggacagaatggggtggccaggtggtgatttctctttgaccaatgcatagtttggcagaaaaatcagccgttcatttagaagaatcttagcagagattgggatgccttactcaataaagctaagatgactatgctgctggctgtctttgttcttggagaggtggagtgactgttcacggagaa

SEQ ID NO: 115704 - DNA, 1000 bp, Homo Sapiens
atttccaaaatgtatagggattcatgataattaaacctttttattgctcatttttttagtagaagaatatcacttatttttagacttgtaaaatgtatgaactggtgagcggacatctgttaagagagtcactagtcagaatgttaaaggagtgcatgcaggatgccccaaatgtcgtgaactcttgttactcctgtatgtagtagtgtaagcatgtgacttttaacaccatttggtttgaaactaatgtagagatgcctgattccaaacaggtgtggagaatattgaatggctcagaagccgcgtcccttacttaacacaattccgaatctccctcatccatgatgcgtccattggatcactcgctggtggtcactgtgtggcagttactaggggaattctgcctctgactgttctttttcttttggtctttaaacaccctgtcgtgggatgtgctcactgatttgtggctatgttgaaggtatcacttgtcttgagggttttcaatatttcaggatcatgctggtggcaaaaggactccacgcctctgtggaatcatgtccacagggggacctgcctcccgtgatgtcccacctttccttcaaggtctgtcatatgagtcctccccttttacaacacttattatggtatttttcaagttattcttcttagatttgcagtacctactgaaatttgtgtttttatagttgaagttaggaaaatgctatttgatttgtatttagatatttaagtcacttgtccaatgatgtgtatgtctaagcctcatgtaccgatttgaagtcagacttaaaaatgtatttacagattcacttgagactttttaatcggttcttcaaatatttcatgtttacattaaaaatttccagagaagcataaaagtattcactttcctgccttgtcatttctggaaagattttggggagatattttattgcatattaattaataaattgttctactaggaaaaaaaaaaaaaaaa

SEQ ID NO: 115705 - DNA, 1000 bp, Homo Sapiens
aaataaattccaaaatatccaattcatttcttcttgaaatggtgcttgttttgttttctttccattacacaattagactcctacagtttaaaacaaactttaaaccactatcttgcactgctaacttttttctacctttgtaaatagaaacatttctgcataaaagtcatacatatgaagcaagggctgaatcataatcacaaggcttaattttgataaacgaatccagtgacctaaggattttctgcaaaatttgactgggagttgtgataggtggtatttttgtttattttcttcctcttactccttaggataaaggtaagttgacttgaacaactttcttttgcactgggaaaataagcaaatgtttaaatgcttcaaaaaaattttcaattaaactcaaatattaaatatctataacttataaacaccaactttcaatgtaataaatgtatcctaatcttatgtatgtttaactggattacatagatttttatcttttgttaaaatgtgtataccccgtggaccaacataatattaaagtatgtatatattatataaatatatatgtatatgtgctcgcttgtgtaggatgaatgtcttagagtcgtttgtggtattttatgttgttgactctggctccagggcctgtgcttgaaaaggacagataagtattgcccagagctaagtggcactacttacaaagttttaaatgtcttctacatactgattcatgtttatttgagctctctttatagaattttctcttaaagtttcaaacctctaagttgtagcctgtaattatgagaacagtaaactttaagtaataataaagaatcccatccatatatccaatttgcaattgagttttgcatggttctctgattatgtccatgctgtgtccaaggaggagtaggtacatacaatcagcacagattaatatatgtaaagggtttgggacagcacctggtatagaataaataataaatgtaaactatta

SEQ ID NO: 115706 - DNA, 1000 bp, Homo Sapiens
aacatgaactctaagatcttgacccagggcgacttggttttgcttaaggtggcatcaccaatgttccaaatcctttagggagatgagggtatccccacagaaaaagaggaataatagaccaatggattttctcctttcaccagtatgtttggaaccctctgatccaatgtcctttgatactgatctcttgtccaaatgagaatgtcgctttagctgaaattcaaatggctgtgacaatttaccgaaatgatgaagtaaccaccattcccacctttcactgcctaggctccaagtctgaatacatttttgaaataggaactcccttttgcaaaaaagaaacctgggtgtcagggaggtgaagtgacttgccctaggagcagacagcatgccaagaatggaattaggctcaggatccagcctgggctcaccctgtgtggctcattcccacccaggaaactgaagataaaagatttgggaaaacacaccaagaaaaaggggcagttttctttgcccaagcatttggtgctagttagaggctgttcactctctcctgctcctcttcggagtagaaataaaggctgtgacacaaggaagccagtggggtgggagggaggcaccataatccctccctaaaacccacagaagactaacctgatactcttttgacccaactgcatcaacactaaacagctgcagaccccctgaatctttcacacatgccaagtgaacattcttgatgatttctctttgtgaccgcaaccacctgcaaaccagaacgactctagaatttccttccccgcccccctttttgtttagtttctaatctcttgtttatgaggtgtggggtttataagggactgaatcaaatgaatgtaacaaaaaagaaaaaaaaaacaaaaaaaaatgccttttctcagggccagtgagttgcaaataatttttaaagaaaagcctataattacatcatctcaataaattttttataaaaaaaaaaaaaaaa

SEQ ID NO: 115707 - DNA, 1000 bp, Homo Sapiens
attaccattagcattctggttttgacatcagcattagtcactttgaaatgtaacgaatggtactacaaccaattccaagttttaatttttaacaccatggcaccttttgcacataacatgctttagattatatattccgcacttaaggattaaccaggtcgtccaagcaaaaacaaatgggaaaatgtcttaaaaaatcctgggtggacttttgaaaagcttttttttttttttttttttgagacggagtcttgctctgttgcccaggctggagtgcagtagcacgatctcggctcacttgcaccctccgtctctcgggttcaagcaattgtctgcctcagcctcccgagtagctgggattacaggtgcgcactaccacgccaagctaatttttgtattttttagtagagatggggtttcaccatcttggccaggctggtcttgaattcctgacctcagtgatccacccaccttggcctcccaaagatgctagtattatgggcgtgaaccaccatgcccagccgaaaagcttttgaggggctgacttcaatccatgtaggaaagtaaaatggaaggaaattgggtgcatttctaggacttttctaacatatgtctataatatagtgtttaggttcttttttttttcaggaatacatttggaaattcaaaacaattgggcaaactttgtattaatgtgttaagtgcaggagacattggtattctgggcagcttcctaatatgctttacaatctgcactttaactgacttaagtggcattaaacatttgagagctaactatatttttataagactactatacaaactacagagtttatgatttaaggtacttaaagcttctatggttgacattgtatatataattttttaaaaaggtttttctatatggggattttctatttatgtaggtaatattgttctatttgtatatattgagataatttatttaatatactttaaataaaggtgactgggaattgtt

SEQ ID NO: 115708 - DNA, 1000 bp, Homo Sapiens
ttttgacggcatcagcaggatgtgtgtcgatgtcaacgagtgccagcgctaccccgggcgcctgtgtggccacaagtgcgagaacacgctgggctcctacctctgcagctgttccgtgggcttccggctctctgtggatggcaggtcatgtgaagacatcaatgagtgcagcagcagcccctgtagccaggagtgtgccaacgtctacggctcctaccagtgttactgccggcgaggctaccagctcagcgatgtggatggagtcacctgtgaagacatcgacgagtgcgccctgcccaccgggggccacatctgctcctaccgctgcatcaacatccctggaagcttccagtgcagctgcccctcgtctggctacaggctggcccccaatggccgcaactgccaagacattgatgagtgtgtgactggcatccacaactgctccatcaacgagacctgcttcaacatccagggcggcttccgctgcctggccttcgagtgccctgagaactaccgccgctccgcagccacccgctgtgagcgcttgccttgccatgagaatcgggagtgctccaagctgcctctgagaataacctactaccacctctctttccccaccaacatccaagcgcccgcggtggttttccgcatgggcccctccagtgctgtccccggggacagcatgcagctggccatcaccggcggcaatgaggagggctttttcaccacccggaaggtgagcccccacagtggggtggtggccctcaccaagcctgtccccgagcccagggacttgctcctgaccgtcaagatggatctctctcgccacggcaccgtcagctcctttgtggccaagcttttcatctttgtgtctgcagagctctgagcactcgcttcgcgtcgcggggtctccctcctgttgctttcctaaccctgccctccggggcgttaataaagtcttagcaagcgtcccacacagtgaaaaaaaaaaaaaaaaaaa

SEQ ID NO: 115709 - DNA, 1000 bp, Homo Sapiens
caaggacgtggatgagtgtgcactgggtacccacaactgttccgaggctgagacctgccacaacatccagggtagcttccgctgcctgcgcttcgagtgtcctcccaactatgtccaagtctccaaaacgaagtgcgagcgcaccacgtgccatgacttcctggagtgccagaactcgccagcgcgcatcacgcactaccagctcaacttccagacgggcctcctggtgcctgcgcatatcttccgcattggccccgcgccagccttcacgggggacaccatcgccctgaacatcatcaagggcaatgaggagggctactttggcacgcgcaggctcaatgcctacacgggtgtggtctacctgcagcgggccgtgctggagccccgggactttgccctggacgtggagatgaagctctggaggcagggctccgtcaccaccttcctggccaagatgcacatcttcttcaccacctttgccctgtgaggtgccagcacgggccacctgcgggtgtggcgcagcccagggctcacactgcgtgggagggactgggtcactattgtggtttttactataactttgtaaattaacttaattttgctgacttgactcctgtggcttctggacccctcctctgccccgcaggaggaagttccacggcaggtggtgcgttcccacgcaggcaccaagtggaagcttgcacggtgggccacggccgtggcgggtgccctgtgggtgaggctgggtgatgacctgaggaccagagacacgcgaccatgttggggctcttggactcctctggatgacccgtccccaaagttgacattccatttcatgttccactgtgattaattcttttcttttttaaaaaatcattttaaagttttttgtttaactataaagtagtacatgtacattatataaaaaaaagttcaactagtatgaaagggttataaagtaacagaggaaaacgcctcttggtccctttaaaaaaaaaaa

SEQ ID NO: 115710 - DNA, 1000 bp, Homo Sapiens
tgtcattggagagagaggagaacgcggtctccctggagcccctggaaaggcaggaccagtggggcccaaaggagaccgaggagagaaggggatgcgtggagagaaaggagacgctgggcagtctcagtcgtgtgcgacaggcccacgcaactgcaaggacctgctagaccgggggtatttcctgagcggctggcacaccatctacctgcccgactgccggcccctgactgtgctctgtgacatggacacggacggagggggctggaccgttttccagcggaggatggatggctctgtggacttctatcgggactgggccgcatacaagcagggcttcggcagtcagctgggggagttctggctggggaacgacaacatccacgccctgactgcccagggaagcagcgagctccgtgtagacctggtggactttgagggcaaccaccagtttgctaagtacaaatcattcaaggtggctgacgaggcagagaagtacaagctggtactgggagcctttgtcgggggcagtgcgggtaattctctaacgggccacaacaacaacttcttctccaccaaagaccaagacaatgatgtgagttcttcgaattgtgctgagaagttccagggagcctggtggtacgccgactgtcatgcttcaaacctcaatggtctctacctcatgggaccccatgagagctatgccaatggtatcaactggagtgcggcgaaggggtacaaatatagctacaaggtgtcagagatgaaggtgcggcccgcctagacgggccaggacccctccacatgcacctgctagtggggaggccacacccacaagcgctgcgtcgtggaagtcaccccatttccccagccagacacactcccatgacgcccacagctgcccctttgcccccagctcagtcaagccgccacatgcccacaacctcaccagagggagaattatgtttctaaatatgtttactttgggacagaaaaaaaaaaa

SEQ ID NO: 115711 - DNA, 1000 bp, Homo Sapiens
tgggtgagcagattggacgggggaactttggcgaagtgttcagcggacgcctgcgagccgacaacaccctggtggcggtgaagtcttgtcgagagacgctcccacctgacctcaaggccaagtttctacaggaagcgaggatcctgaagcagtacagccaccccaacatcgtgcgtctcattggtgtctgcacccagaagcagcccatctacatcgtcatggagcttgtgcaggggggcgacttcctgaccttcctccgcacggagggggcccgcctgcgggtgaagactctgctgcagatggtgggggatgcagctgctggcatggagtacctggagagcaagtgctgcatccaccgggacctggctgctcggaactgcctggtgacagagaagaatgtcctgaagatcagtgactttgggatgtcccgagaggaagccgatggggtctatgcagcctcagggggcctcagacaagtccccgtgaagtggaccgcacctgaggcccttaactacggccgctactcctccgaaagcgacgtgtggagctttggcatcttgctctgggagaccttcagcctgggggcctccccctatcccaacctcagcaatcagcagacacgggagtttgtggagaaggggggccgtctgccctgcccagagctgtgtcctgatgccgtgttcaggctcatggagcagtgctgggcctatgagcctgggcagcggcccagcttcagcaccatctaccaggagctgcagagcatccgaaagcggcatcggtgaggctgggacccccttctcaagctggtggcctctgcaggcctaggtgcagctcctcagcggctccagctcatatgctgacagctcttcacagtcctggactcctgccaccagcatccacactgccggcaggatgcagcgccgtgtcctctctgtgtccctgctgctgccagggcttcctcttccgggcagaaacaataaaaccacttgtgcccactgaa

SEQ ID NO: 115712 - DNA, 1000 bp, Homo Sapiens
cggccccgcgctccctccctctgcctttcattcccagctgtcaacatcctggaagctttgaagctcaggaaagaagagaaatccactgagaacagtctgtaaaggtccgtagtgctatctacatccagacggtggaagggagagaaagagaaagaaggtatcctaggaatacctgcctgcttagaccctctataaaagctctgtgcatcctgccactgaggactccgaagaggtagcagtcttctgaaagacttcaactgtgaggacatgtcgttcagatttggccaacatctcatcaagccctctgtagtgtttctcaaaacagaactgtccttcgctcttgtgaataggaaacctgtggtaccaggacatgtccttgtgtgcccgctgcggccagtggagcgcttccatgacctgcgtcctgatgaagtggccgatttgtttcagacgacccagagagtcgggacagtggtggaaaaacatttccatgggacctctctcaccttttccatgcaggatggccccgaagccggacagactgtgaagcacgttcacgtccatgttcttcccaggaaggctggagactttcacaggaatgacagcatctatgaggagctccagaaacatgacaaggaggactttcctgcctcttggagatcagaggaggaaatggcagcagaagccgcagctctgcgggtctactttcagtgacacagatgtttttcagatcctgaattccagcaaaagagctattgccaaccagtttgaagaccgcccccccgcctctccccaagaggaactgaatcagcatgaaaatgcagtttcttcatctcaccatcctgtattcttcaaccagtgatcccccacctcggtcactccaactcccttaaaatacctagacctaaacggctcagacaggcagatttgaggtttccccctgtctccttattcggcagccttatgattaaacttccttctctgctgcaaaaaaaaaaaaaaa

SEQ ID NO: 115713 - DNA, 1000 bp, Homo Sapiens
aatgactttgaactggcacgggctgatttccagaaggtcctgcagctctaccccaacaacaaagccgccaagacccagctggctgtgtgccagcagcggatccgaaggcagcttgcccgggagaagaagctctatgccaatatgtttgagaggctggctgaggaggagaacaaggccaaggcagaggcttcctcaggagaccatcccactgacacagagatgaaggaggagcagaagagcaacacggcagggagccagtctcaggtggagacagaagcatagcccctctccaccagccctactcctgcggctgcctgccccccagtctccccactccaccctgttagttttgtaaaaactgaagaattttgagtgaattagacctttatttttctatctggttggatggtggctttaggggaagggggaaaggtgtaggctgggggattgaggtggggaatcattttagctggtgtcagcccctcttcccttcctccattgcacatgaacatatgtccatccatatatattcatcagaatgttaatttattttgctccctctgttaggtccattttctaagggtagaagaggcaagtggtagggatgaggtctgataagaacccagggtggagagggagactcctgggcagccgttttcctcatcctttccctctcccagtccatttccaaatgtggcctccatgtgggtgctagggacatgggaaaaaccactgctatgccatttcttctctctgttcccttcctcacccccgacggtgtggctgatgatgtcttctggtgtcatggtgaccaccccctgttccctgttctggtatttcccctgtcagtttcccctctcggccaggttgtgtcccaaaatcccctcagcctcttctctgcacgttgctgaaggtccaggcttgcctcaagttccatgcttgagcaataaagtggaaacaataaaacctgggtgtcagacaaaaaaaaaaaaaaaaaaaa

SEQ ID NO: 115714 - DNA, 1000 bp, Homo Sapiens
tgaaatcctgtcatgaatccttggtagctctctgagaacagtgaagtccagggaaaggcatctggtctgtctggaaagcaaacattatgtggcctctggtagtttttttcctgtaagaatactgactttctggagtaatgagtatatatcagttattgtacatgattgctttgtgaaatgtgcaaatgatatcacctatgcagccttgtttgatttattttctctggtttgtactgttattaaaagcatattgtattatagagctattcagatattttaaatataaagatgtattgtttccgtaatatagacgtatggaatatatttaggtaatagatgtattacttggaaagttctgctttgacaaactgacaaagtctaaatgagcacatgtatcccagtgagcagtaaatcaatggaacatcccaagaagaggataaggatgcttaaaatggaaatcattctccaacgatatacaaattggacttgttcaactgctggatatatgctaccaataaccccagccccaacttaaaattcttacattcaagctcctaagagttcttaatttataactaattttaaaagagaagtttcttttctggttttagtttgggaataatcattcattaaaaaaaatgtattgtggtttatgcgaacagaccaacctggcattacagttggcctctccttgaggtgggcacagcctggcagtgtggccaggggtggccatgtaagtcccatcaggacgtagtcatgcctcctgcatttcgctacccgagtttagtaacagtgcagattccacgttcttgttccgatactctgagaagtgcctgatgttgatgtacttacagacacaagaacaatctttgctataattgtataaagccataaatgtacataaattatgtttaaatggcttggtgtctttcttttctaattatgcagaataagctctttattaggaattttttgtgaagctattaaatacttgagttaa

SEQ ID NO: 115715 - DNA, 1000 bp, Homo Sapiens
ctctcaccgcgatacagccagtcatgtacagtcttcacctgtacagtcagactctagtaccgctaaggaacatggtcactttagtagtctttcacaagattctgcgtatcactcaggaatacagtcacgtggcagtcctcacagttctagttcttatcattatcaatctgagggcactgaaaggcaaaaaggtcaatcaggtttagtttggagacatggcagctatggtagtgcagattatgattatggtgaatccgggtttagacactctcagcacggaagtgttagttacaattccaatcctgttgttttcaaggaaagatctgatatctgtaaagcaagtgcgtttggtaaagatcatccaaggtattatgcaacgtatattaataaggacccaggtttatgtggccattctagtgatatatcgaaacaactgggatttagtcagtcacagagatactattactatgagtaagaaattaatggcaaaggaattaatccaagaatagaagaatgaagcaagttcactttcaatcaagaaacttcataatactttcagggaagttatcttttcctgtcaatctgtttaaaatatgctatagtatttcattagtttggtggtagcttatttttattgtgtaatgatctttaaacgctatatttcagaaatattaaatggaagaaatcaatatcatggagagctaactttagaaaactagctggagtattttaggagattctgggtcaagtaatgttttatgtttttgaaagtttaagttttagacactccccaaatttctaaattaatctttttcagaaatatcgaaggagccaaaaatataaaacagttctgtataccaaagtggctatatcaacatcagggctagcacatctttctctattatccttctattggaattctagtattctgtattcaaaaaatcatcttggacataattaatattatagtaagctgcatctaaattaaaaataaactatt

SEQ ID NO: 115716 - DNA, 1000 bp, Homo Sapiens
atacgccacatcatgctgaactgctggtccggagaccccaaggcgagacctgcattctcggacctggtggagatcctgggggacctgctccagggcaggggcctgcaagaggaagaggaggtctgcatggccccgcgcagctctcagagctcagaagagggcagcttctcgcaggtgtccaccatggccctacacatcgcccaggctgacgctgaggacagcccgccaagcctgcagcgccacagcctggccgccaggtattacaactgggtgtcctttcccgggtgcctggccagaggggctgagacccgtggttcctccaggatgaagacatttgaggaattccccatgaccccaacgacctacaaaggctctgtggacaaccagacagacagtgggatggtgctggcctcggaggagtttgagcagatagagagcaggcatagacaagaaagcggcttcaggtagctgaagcagagagagagaaggcagcatacgtcagcattttcttctctgcacttataagaaagatcaaagactttaagactttcgctatttcttctactgctatctactacaaacttcaaagaggaaccaggaggacaagaggagcatgaaagtggacaaggagtgtgaccactgaagcaccacagggaggggttaggcctccggatgactgcgggcaggcctggataatatccagcctcccacaagaagctggtggagcagagtgttccctgactcctccaaggaaagggagacgccctttcatggtctgctgagtaacaggtgccttcccagacactggcgttactgcttgaccaaagagccctcaagcggcccttatgccagcgtgacagagggctcacctcttgccttctaggtcacttctcacaatgtcccttcagcacctgaccctgtgcccgccgattattccttggtaatatgagtaatacatcaaagagtagtattaaaagctaattaatcatgtttataaaaa

SEQ ID NO: 115717 - DNA, 1000 bp, Homo Sapiens
tctttgaagatgggacagtggaagaaaacattgatgttgtgatcttcactacaggatatacattttcttttccattttttgaagaacctcttaaaagcctctgtacaaagaagatatttctatacaagcaagtctttcccttaaacctagagagagcgacattagccatcatcggccttatcggccttaaaggatccatcttatcaggcacagagctccaagcacgatgggtcacaagagtattcaaaggactctgtaagatacctccatcccaaaaattgatgatggaggctactgaaaaggaacagctcattaaaaggggagtgtttaaagacaccagcaaagacaaatttgactacattgcctacatggatgatatcgctgcctgcataggcacaaagcccagcatcccacttctgttcctcaaggatcccagactagcttgggaagttttctttggaccatgtactccttatcagtaccgcctcatgggccctggaaaatgggatggagccagaaatgccatcctgacccagtgggacagaacattgaaacctttaaaaactcgaattgtccctgattcctccaagcctgcctccatgtcacattatttaaaagcctggggggcacctgtcctacttgcctctcttctacttatctgtaaatcttcacttttcttgaaattggtgagagataaactacaggacagaatgtccccttacctagtaagtctttggcgaggatgaacctgattgttacaagggttacaccaagtcatgctaattctatctccaagtatcttgtgcatccctcctctgctctccatcataactgctattagccaaattcaggcccagtcatctcctatctgaattattgtattatcttcttctttgttttcagtaccctctttcttgccaccctttccaatgcatcttctaccctgctacctcagtgattattctaaaataaatatatatgatatggtttaaaaaaaaaa

SEQ ID NO: 115718 - DNA, 1000 bp, Homo Sapiens
agatcaatgtatagggctatattttggcagctgggtagctctttgaaggtggataagacttcagaagaggaaaggccagactttgcttaccatcagcatctgcaatgggccaaacacacctcaaattggctgagttgagaaagcagccccagtagttccattcttgcccagcactttctgcattccaaacagcatcctacctgggtttttatccacaaaggtagcggccacatggtttttaaagtatgagaaacacagtttgtcctctccttttatccaagcaggaagattctatatcctgatggtagagacagactccaggcagccctggacttgctagcccaaagaaggaggatgtggttaatctgtttcacctggtttgtcctaaggccatagttaaaaagtaccagctctggctggggtccgtgaagcccaggccaggcagccaaatcttgcctgtgctgggcatacaaccctctgctttcacatctctgagctatatcctcattagtgaaggtggcttttgctttatagtttggctggggagcacttaattcttcccatttcaaaaggtaatgttgcctggggcttaacccacctgccctttgggcaaggttgggacaaagccatctgggcagtcaggggcaaggactgttggaggagagttagcccaagtataggctctgcccagatgccatcacatccctgatactgtgtatgctttgaagcaccttccctgagaagggaagaggggatctttggactacgttcttggctccagacctggaatccacaaaagccaaaccagctcatttcaacaaaggagctccgatgtgaggggcaaggctgccccctgccccagggctcttcagaaagcatctgcatgtgaacaccatcatgcctttataaaggatccttattacaggaaaagcatgagtggtggctaacctgaccaataaagttattttatgattgcatctaaaaaaaaaaaaaaaaaaaa

SEQ ID NO: 115719 - DNA, 1000 bp, Homo Sapiens
tcctagcagtaatttaggggagacagaggagtttcatgtaaagagcatgcagtttggagtcagaacctgggtatgactctgtggccttgatgaagcaagttacttaaactcttgagttttagctttctcctttacaatgcatgaatgcctatccccctacaaaacaaagattaaatgtgatgatgtatgccaaggtgctttgtatattgtaaagtgctatataattataagatgttctaaattttcaaggatctaaaccagggattggcaaacgtttttccagggagtaaatattttacgctttgcatatataatttatggaggtgttgagaggatagattagacacttgaagtactcaggatagtgcctggcatgtaggaagcacctggaaaatattcgctgtgattaccatcagtccattttaccgaggaaggagccaaggtccaggcccactgaaggacttgcataacattacaatagcagtggcagaaccagccatgcttctgcaaatcacaacctctttgagcctctgtcacctgaactgcaaaatgagtgggttagacaaaatcatctgttgggacctcctagttccacgtgctatcattctactaactggcaccctaaggttgaaagtgcttatctgctttccaatgtggcttccttacagtctggaactgacaatatgcaggagcagtaaactggcagaaaaccaggaatcagagaaagaaaatataatttaactttaaagatgtaaattatatatatagtatattatatatatttttaaagctttatatgcctcaaatatcagggaaaggagccaagtccttggtatttagtttggtgaatacttgcattgaatacatgtcaagatgtcaagtcatttttgaatgtgtctcagggatttctatgctacacattcttttaacaaatcaagtatttatgtacacatgttcagattttttgacaaaatgattaaaataatgagatggaaaatga

SEQ ID NO: 115720 - DNA, 1000 bp, Homo Sapiens
ctcctgacagtattattaatactatgcaaatatggaataggagaccatttgattttctaggctttgtggtagagaggtgaaggtatgagaattaatagcgtgtgaacaaagtaaagaacaggattccagaatgatcattaaatttgtttctatttattcttttttgcccccctagagattaagtccagaaatgtactttctggcacataaagaaatcttgaggactttgtttaaaccttccataaaaaaacaattttcggtttctcgggttctctctctctgtctctctgtctctctgtctctctgtctctctgtctctctctctctctctctttctttctttgtgtattttattcaagatgagttggacccattgccagtgagtctgaatgtcactgacagccctgtgttgtgctcaggactcactctgctgctggtggaaactcatggcttctctctctctttgatcccataaagctacgagggggacgggagagggcagtgcaatgggaagtaaagagatattttccagtaggaaaagcaatgctttcttgtctttagactcaaatgcttagggaacgtttcatttctcattcatggggaaaggcagcctccttaaatgttttctgaagagcggtaaaatctagaagcttaagaatttacagttccttcaataaccatgatgacctgaagttcacctatcccattttagcatctacttgtttttcccatctcttcctttccaattttgcttatactgctgtaatatttttgtaaaaaaaaaaaaaaaggaaaaaaaagaccagctaaaattttcgacttgactttttaacttaactcatgaattaattaaagcaaatgaaaaaattaaaaagtgtgactttttctcggagcatatatgtagcttttaggaaaggctgatgatggtataaagtttgctcattaagaaaaaaagacaaggctgattttgaagagagttgcttttgaaataaaatgatca

SEQ ID NO: 115721 - DNA, 1000 bp, Homo Sapiens
atggaaatcccatcaccatcttccaggagcgagatccctccaaaatcaagtggggcgatgctggcgctgagtacgtcgtggagtccactggcgtcttcaccaccatggagaaggctggggctcatttgcaggggggagccaaaagggtcatcatctctgccccctctgctgatgcccccatgttcgtcatgggtgtgaaccatgagaagtatgacaacagcctcaagatcatcagcaatgcctcctgcaccaccaactgcttagcacccctggccaaggtcatccatgacaactttggtatcgtggaaggactcatgaccacagtccatgccatcactgccacccagaagactgtggatggcccctccgggaaactgtggcgtgatggccgcggggctctccagaacatcatccctgcctctactggcgctgccaaggctgtgggcaaggtcatccctgagctgaacgggaagctcactggcatggccttccgtgtccccactgccaacgtgtcagtggtggacctgacctgccgtctagaaaaacctgccaaatatgatgacatcaagaaggtggtgaagcaggcgtcggagggccccctcaagggcatcctgggctacactgagcaccaggtggtctcctctgacttcaacagcgacacccactcctccacctttgacgctggggctggcattgccctcaacgaccactttgtcaagctcatttcctggtatgacaacgaatttggctacagcaacagggtggtggacctcatggcccacatggcctccaaggagtaagacccctggaccaccagccccagcaagagcacaagaggaagagagagaccctcactgctggggagtccctgccacactcagtcccccaccacactgaatctcccctcctcacagttgccatgtagaccccttgaagaggggaggggcctagggagccgcaccttgtcatgtaccatcaataaagtaccctgtgctcaacc

SEQ ID NO: 115722 - DNA, 1000 bp, Homo Sapiens
ataattgaaacaattttagaatttggaacaagcgtcactacatttgataataattagatcttgcatcataacaccaaaagtttataaaggcatgtggtacaatgatcaaaatcatgttttttcttaaaaaaaaaaaaaagactgtaaattgtgcaacaaagatgcatttacctctgtatcaactcaggaaatctcataagctggtaccactcaggagaagtttattcttccagatgaccagcagtagacaaatggatactgagcagagtcttaggtaaaagtcttgggaaatatttgggcattggtctggccaagtctacaatgtcccaatatcaaggacaaccaccctagcttcttagtgaagacaatgtacagttatccattagatcaagactacacggtctatgagcaataatgtgatttctggacattgcccatgtataatcctcactgatgatttcaagctaaagcaaaccaccttatacagagatctagaatctctttatgttctccagaggaaggtggaagaaaccatgggcaggagtaggaattgagtgataaacaattgggctaatgaagaaaacttctcttattgttcagttcatccagattataacttcaatgggacactttagaccattagacaattgacactggattaaacaaattcacataatgccaaatacacaatgtatttatagcaacgtataatttgcaaagatggactttaaaagatgctgtgtaactaaactgaaataattcaattacttattatttagaatgttaaagcttatgatagtcttttctaattcttaacactcatacttgaaatctttccgagtttccccagaagagaatatgggattttttttgacatttttgacccatttaataatgctcttgtgtttacctagtatatgtagactttgtcttatgtgtcaaaagtcctaggaaagtggttgatgtttcttatagcaattaaaaattatttttgaactga

SEQ ID NO: 115723 - DNA, 1000 bp, Homo Sapiens
tccttaattcagggccgacattatctacttaaacaactttgagatatggtcttaattattttaaagcagaataatataattgaaagtttatagctaaaagagactatataggtcatttagtataattcttcattagtttacgaaccacaaaattgcaaataaataagctatgaactttgatgtacactataaatctccttaattctataaatttgtgtctgtaacctgaatagtttgaaaacttctttaaaaatctcttgtatttcatccgggcgcagtggctcacacctgtaatcccagcactttgggaggccgaggtgggcagatcacgaggtcaggagtttgagaccagcctgaccaacatggtaaaaccccatctctactaaaatacaaaaattggctgggcgtggtggcactcgcctgtaatctcagctacttgggaggctgaggcaggagaatcgcttgaacccgggaggcggaggttacagtgagccgagatcacatcactgcactccagcctgggcgacagagcgagactccatctcaaaaaaaaaaaaaaactcttgtatctcaatatttttaaaccacaggcctaaataaaactaattttgctcaagttttctcaacctagggaaaaagaactatggttccatattcaaaataaatattatagacccttttcctaagtaggattttgtggtttactgattgggtaatttgatcattaaaattatgtgaaatctgcccgggcacacctcatgcctgtaatcccagcactctgggaggccaaggcagatgatcacctgaggtcaggagttctagaccagcctggctaacatggtgaaaccctgtatctgctaaaaatacaaaaattagccaggcgtggtggcgggctcctgtaatcccagctactttggaggcgaggcacgagaatcgcttgaacctgggaggcggagtttgcagtgagccgagatcacgccattgcactccagcctgggcg

SEQ ID NO: 115724 - DNA, 1000 bp, Homo Sapiens
tgcagtaaccacagaacaggccccatgctgacgtccctcctcaagagctggatggcattgcaaatgatgacagcacttctggtggatgaatttgggggcacaaacagcttttttcctcttttggctcagtatttaaaagtggaccaacttgctcttaatcacagggcaagaaggttgaccgggccatcttggttttcttctggatgagctctttggttttcagaagactgtgacaagttctggcccaggattcgctcactgaccctcaattgtcctctttggcatgcgtttcttactgttctccatgtgtcggcatgtctctacctctaagccagtgtttttcaactatgtttatccagactccttctccacaatgatgaatccacagttggttatctgctactgcccattagctaaaatcattttgctgcttgactttatggagtttgtattatgaaatcagtggtattttgaatgtgttctttctaactacatgcatctctccactcaactccaccccatcccatcccaccttgaaaatcgctgctctgaaccagtgttctccaccttgtcctccacacatctcataggaaatgttcaacaattctgtgaaaggtcacaggacccaattggagaaatcatatgaaaagcatagttggtcttggtgtcatatggatcagaggcacaagtgcagaggctgtggtcatgcggaacactctgttatttaagatggctatccagataatcctgaacactgtgtatttattttatttagactaccagcaaagattaaagcatgaaatgtaaaacatctgataaaacttacagccccctacaccaagagtgtatctgtgaaagagctcctacactttgaaaacttaagaatcccttatcatgaagtttgcctgttctagaattgtaagattgttaatttccttcaatctctagtgacaacacttaatttcttttctaataaaaaaaacctatagatgattcagtg

SEQ ID NO: 115725 - DNA, 1000 bp, Homo Sapiens
gagaaggtgaccaccttcgagcatcagtacgtcagtgccatcaagaccctgtgggaggacccgggcatccaggaatgctacgaccgcaggcgcgagtaccagctctccgactctgccaagtactacctgaccgacgttgaccgcatcgccaccttgggctacctgcccacccagcaggacgtgctgcgggtccgcgtgcccaccaccggcatcatcgagtaccctttcgacctggagaacatcatcttccggatggtggatgtggggggccagcggtcggagcggaggaagtggatccactgctttgagaacgtgacatccatcatgtttctcgtcgccctcagcgaatacgaccaagtcctggtggagtcggacaacgagaaccggatggaggagagcaaagccctgttccggaccatcatcacctacccctggttccagaactcctccgtcatcctcttcctcaacaagaaggacctgctggaggacaagatcctgtactcgcacctggtggactacttccccgagttcgatggtccccagcgggagccccaggcggcgcgggagttcatcctgaagatgttcgtggacctgaaccccgacagcgacaagatcatctactcacacttcacgtgtgccaccgacacggagaacatccgcttcgtgttcgcggccgtgaaggacaccatcctgcagctcaacctcaaggagtacaacctggtctgagcgccccaggcccagggagacgggatggagacacggggcaggaccttccttccacggagcctgcgctgccgggcgggtggcgctgccgagtccgggccggggctctgccgcgggaggagattttttttttttcatatttttaacaaatggtttttatttcacagttatcaggggatgtacatctctccctccgtacacttcgcgcaccttctcaccttttgtcaacggcaaaggcagcctttttctggccttgacttatggctcgcttttttct

SEQ ID NO: 115726 - DNA, 1000 bp, Homo Sapiens
agcttcaaaatatgcagcaaaaaccaatacaacaaaacgagtggcacgatttatttcaaactaggccagctgggattccagcttttcttctactagtctgatgttttataaatcaaaacctggttttccttctctgacattttttttttgttttgttttttggtttttttttttttttggccaaatctcgtggtgtttcgcagaaaaaaatccagaaaatttcaaatgcagttgagtattcttttttaaatgcagattttcaaaacatattttttttcaggtggtcttttttgtgtctggcttgctgagtgtaaaagttgttatctggacgatctgtctctctgctccaaagaaattttggagtgagtggcagtcctgcgccagcctcgcgggacacgtgttgtacataagcctctgcagtgtcctcttgttaatggtggggttttctgctttgtttttatttaagaaaataaacacgacatatttaaagaaggttctttcacctgggagcaaatgaacaatagctaagtgtcttggtatttaaagagtaaattatttgtggctttgctgagtgaaggaaggggagcaaggggtggtgcccctggtcccagcatgccccgcgcctgagactggctggaaatgctctgactcctgtgaaggcacagccagcgttgtggcctgagggaggccctgctgggaccctgatctgggccttcctgtcccagggcctatgggcaactgcgttgaaaggacgttcgccaagggccgtgtgtaaatacgaactgcgccatggagaggagaggcactgccggagcccttgccagatctccctccctctctccgtgcagtagctgtgtgtccgaggtcagtgtgcggaatcacagccaaggacgtgaagagatgtacgggggaaagagaagctggggattggatgaaagtcaaaggttgtctactttaagaaaataaaataccctgaatggagcacaaaaaaaaaaaaaaa

SEQ ID NO: 115727 - DNA, 1000 bp, Homo Sapiens
ttaatctcactttgggtttccttgtgaagttggagggaagtttataatagcctaacactaccccacccccaactaggaggaacctctgttttcaagagagatgcctgtcctgtgcttggatagtcagtcaattatttgtgtatgaaacaatgtacaaatcaatgttttgaaaataatgatctcagactttctaagttaaattttaaaaattttgattgtttgccatattgggtgggtttactcttagaatcgcatgctgtagaaatgctcaaaagtgcatatgggactcagtccttaggtgttctttttcttttaagaaataacctcttacagttgtaaccattgcggctctgtccacttctcgttgctgctctgtggcacatatcggaagcagtacagcgcgcggctctacacgcttgggtagcgggataagtcactgttttctttatttctttaaaaaaaaaaaagttctgttgcaaacgactgctgttggattctgagggtggggagggagagagagggagggagagggagtgaagagcctgccctcctatatggattcttcagggccctccacatctgaggtggctcattcccatcacacacagattgtcctggtgttcatttcaaggccagtgttcagcagcagcgtttggaaagcaggttctgtgggaccccccgccccgccccccgcactccttcatagcagcagtagtggcttctccatcctgttttctgcaacattctatacaaaactgtgctgtgaccttgcggtaggcctggatctggcaaagagaatacaaatgaaaccccttctttctctttccgtccaacaactctgtagagctctctgcacccttacccctttccaccttttgtatttaattttaaagtcagtgtactgcaaggaagctggatgcaagatagatactatattaaactgtactgttatttaagatgtaataaagcagtttgacatgaaaaaaaaaaaaaaaaaaaa

SEQ ID NO: 115728 - DNA, 1000 bp, Homo Sapiens
atgcactgatgttttcataatgtttaagggacccactgcaagaagcttgctgcctccttttaattgtattcatttagattttgattttccatgttaagaaggtgaggtccatgttggtgcccttcagagtagagaaccatgtaaacattaggaatgaacagaggccttaggaatgaatagagagtttgccttatacaatttcctgttacaaagctctccctctcatgcaaagtagggaacaccttttgagcatctttgaatttgacaaatggtgctgttgcaaacactttttttttgagatgaagtctcgcggttgtcacccgggctggagtgcagtggcgtgatctcggctcactgcaacttccacctcctgggttccagcagttctcctgcctcagcctcccaagtagctgagattacaggcgcctgccaccccacctggctgatttttgtaattttagtagagacggggtttcaccatgttggccaggctgattaactcctgacctcaggtgatccacctttctcggcctcccaaagtgctgggattacgggtgtgagccaccgtgcccggcctgcaaacacattttaattgacaacactagggctgttgtacaaaatagtaatgatagccatggaagttttaccttattctgtgagaagtgttcttaaacttattaagtgtctaaactaaggtttagtgcttttttaaaggaaagttgtcccaggattcatcctaaagaaagcaaaagttaattcaactgatccaccaatggaattagatgggtagagttgggttcttgagttttaccaccacttagttcccactgaattttgtaacttcctgtgtttgcatcctctgttcctattctgcccttgctctgtgtcatctcagtcatttgacttagaaagtgcccttcaaaaggaccctgttcactgctgcacttttcaatgaattaaaatttatttctgttctagtgggaaaaaaaaaaaaaaaaaa

SEQ ID NO: 115729 - DNA, 1000 bp, Homo Sapiens
ctactccgagcgccgtttacagttttgcacagtgatcttccccattgtccactcaagtcgtggcctggggaacacagacggagctgtccccagtgtcctccgtccctcagcccctggcctggctgagtttggcagggcctgggccatccctgggacaaaggtgcgtcccttcagctcttctccgtggagctcggggctttctgtatttatgtatttgtacgaatgtatatagcgaccagagcattcttaattcccgccgcagacctggcgcccccgccttggctcctgggggcagccagccctggctgggagagcgggagctggcagaggagccactgccaaactcaaggctcctctggcccagcttggatggctgagggtggtcacacccctgagccttcagcactgtgctggccaccccggcctctgagtaagactcgtgcctccccctgctgccctgggctcaggctgctaccctctggggcccaaagctgtcccttctcagtgcttgtcagcgctgggtctggggcctctgtatgccctaggcctgtgccaaagtggccagagattgggctgcctgtgatacccatcagcccactgccccggccggcccagataggtctgcctctgccttccagctcccacagcctggtccctgatactgggctctgtcctgcagacacctctttcagaaacgcccaagcccagcccctaggagggggtggggcatccctggtcaaccctcaaacattccggactcccctcataacaatagacacatgtgcccagcaataatccgccccttcctgtgtgcgcctgtggggtgcgtgcgcgcgcgtgtgtacctgtgtgggtgaaggggatagggcgaggctgtgcctgtgccccaggtcccagccctggcccttcccagactgtgatggccatcctggtcccagtgttagggtagcatgggattacagggccctgttttttccatatttaaagccaatttttatta

SEQ ID NO: 115730 - DNA, 923 bp, Homo Sapiens
gagcgctctggagggcgtggccgtgggaaaggaggcgcggaaagccgacgcgcgtccattggtcggctggacgaggggaggagccgctggctcccagccccgccgcgatgagcctcggccgcctttgccgcctactgaagccggcgctgctctgtggggctctggccgcgcctggcctggccgggaccatgtgcgcgtcccgggacgactggcgctgtgcgcgctccatgcacgagttttccgccaaggacatcgacgggcacatggttaacctggacaagtaccggggcttcgtgtgcatcgtcaccaacgtggcctcccagtgaggcaagaccgaagtaaactacactcagctcgtcgacctgcacgcccgatacgctgagtgtggtttgcggatcctggccttcccgtgtaaccagttcgggaagcaggagccagggagtaacgaagagatcaaagagttcgccgcgggctacaacgtcaaattcgatatgttcagcaagatctgcgtgaacggggacgacgcccacccgctgtggaagtggatgaagatccaacccaagggcaagggcatcctgggaaatgccatcaagtggaacttcaccaagttcctcatcgacaagaacggctgcgtggtgaagcgctacggacccatggaggagcccctggtgatagagaaggacctgccccactatttctagctccacaagtgtgtggccccgcccgagcccctgcccacgcccttggagccttccaccggcactcatgacggcctgcctgcaaacctgctggtggggcagacccgaaaatccagcgtgcaccccgccggaggaaggtcccatggcctgctgggcttggctcggcgcccccacccctggctaccttgtgggaataaacagacaaattagaaaaaaaaaaaaaaa

SEQ ID NO: 115731 - DNA, 1000 bp, Homo Sapiens
agttttaaattttgctgtatttgattacttagagataggaatttttaaaaatcaaaacaaaaaataccacagcttagtgtaaatgacaatttggcggttttatgtctttagaaatgttttgcctttctaagccttgtgctaaaggcgtataacggtggtgcctatctacttaagggggcattctagtcttaacttaaaagttgtctaaactgtccctccctggctttttttggtttggggtagacctaagggtgtttgttagtctcaaaactgtgaagtgacatgtcagaacagtccagactggtaagaaaattaatggcttcacttgaatttaaaccagctctagataggaaaaaaatcagtctcctcatttgctttttaaatggagtagtacatcccatattttagaacaagtaggggtgccttgcttaaataaaaatagcatttaatgtataattgtgtgaagggtttatggataaagctgtacttctgtcacaatgtggcagtactttctgctttaatattaaacagcttgttatttaaatattggacaaaatggctggcttcaaaatatagtcattaataaactaactttatgtgcacctgtgtaggagaatcaaaatcctgtatgctttctttgccttgttcctgttctcagggtgacgactgccaccaggagatgcagttctagttcttaaaattaaatttgcccaggtttctgacaggtgatacctggaagagagactatgtcttctcttacttaatacataaccatctttgattaccagctaagatgcgaaatcactgtactgtagtcaataaatgaagacttgtttcaggctgaagattacctaagagtatttattattggagtctgtgagtcaactgaatatattattacctcaagtcctgctatattaatataagtagtaagggttaattttcgtgtgtgtgttctctaaaatcctgtgaacatgacttaaccagcttaacatcatca

SEQ ID NO: 115732 - DNA, 1000 bp, Homo Sapiens
ggaaacagtatacagagttgccagacactatagtcgagccaaacagacgctccctgtgatttatgtcaagttgtatatgtatcagctgttccgaagtttagcctatatccattcctttggaatctgccatcgggatattaaaccgcagaacctcttgttggatcctgatactgctgtattaaaactctgtgactttggaagtgcaaagcagctggtccgaggagaacccaatgtttcgtatatctgttctcggtactatagggcaccagagttgatctttggagccactgattatacctctagtatagatgtatggtctgctggctgtgtgttggctgagctgttactaggacaaccaatatttccaggggatagtggtgtggatcagttggtagaaataatcaaggtcctgggaactccaacaagggagcaaatcagagaaatgaacccaaactacacagaatttaaattccctcaaattaaggcacatccttggactaaggattcgtcaggaacaggacatttcacctcaggagtgcgggtcttccgaccccgaactccaccggaggcaattgcactgtgtagccgtctgctggagtatacaccaactgcccgactaacaccactggaagcttgtgcacattcattttttgatgaattacgggacccaaatgtcaaactaccaaatgggcgagacacacctgcactcttcaacttcaccactcaagaactgtcaagtaatccacctctggctaccatccttattcctcctcatgctcggattcaagcagctgcttcaacccccacaaatgccacagcagcgtcagatgctaatactggagaccgtggacagaccaataatgctgcttctgcatcagcttccaactccacctgaacagtcccgagcagccagctgcacaggaaaaaccaccagttacttgagtgtcactcagcaacactggtcacgtttggaaagaatattaaaaaaaaaaaaaaaaaa

SEQ ID NO: 115733 - DNA, 1000 bp, Homo Sapiens
ggcactgtggtcctgggaaagctggaatcaggatctatttgtaaaggccagcagcttgtgatgatgccaaacaagcacaacgtggaagttcttggaatactttccgatgatgtagagactgataccgtagccccaggtgaaaacctcaaaatcagactgaaaggaattgaagaagaggagattcttccagggtttatactttgtgatcctaataatctttgtcattctggacgcacatttgatgcccagatagtgattatagagcacaaatccatcatctgcccaggctataatgcggtgctgcatattcatacctgtattgaggaggtggaaataacagccttaatctgcttggtagacaaaaaatcaggagaaaaaagtaagacccgaccccgttttgtgaaacaagatcaagtatgcattgctcgcttaaggacagcaggaaccatctgccttgagacctttaaagacttccctcagatgggtcgtttcaccttaagagatgagggtaagaccattgcaattggaaaagttctgaaactggttccagagaaagactaagcattttcttgatgaccctgcacaatactgtgaggaaaattgactgcagaagcctacttcacaccgccttctcttattttctgcccattgataaacctctccccatattttgcaaagaggaaattcacagcaaaagtccacattatgtcagctttctcatattgagagctctgctatgccactgttgaatttttcccaagattcctgtccctagccctcacttcaaactctgcttccttggacagatttggcaatagctttgtaagtgatgtggacataattgcctacaataatgaaaacctacaggaatttttttatttttcattttccccttaggcatatttagtatttttcccccaggccagatcattcgtgagtgtgcgagtgtgtgtgcacatgttacaaaggcaactaccatgttaataaaatattcaatttg

SEQ ID NO: 115734 - DNA, 1000 bp, Homo Sapiens
atctatatgactttttattattgtgtgataaccaagtaaatgttttctattttgcatattttcaggcatggtaacagaaatttaccttttaataaattaaaaaatctaaattttaacctacttgtatgttcggagagtgtttttgtactatattgactacttaaaatagagaatgagactaagaagggaacatttctgttgatacatgttttttaaaagtaattttaagagcattattaggttaattaatccaattaatgacccaaatgccaaggtaattttaaatttacatttttaataaaagcaacatgttgaaacaagagagggtgagattaacctttttgctaaagtaatttacaagtcaaagacaggaagagatcagagtgaatgtgccttcttaaccagagctacagaatttagtgaataattaaagtacaaactgctttgacctccttgaacttttccaagcaatttctctgtacttctatatatgaatgtcttagccaattttctgctactataacagaatacgacagactgggtaatttaaaaagaaaagaaatttattttcttcctagttctggaggctgggaaggcgaagggcatggcactgacatctgccttgtaactgatgagaaccttcttactgcatgataacaaagcagcaaggcaagcaaaagcgtaagatgaagagagaggaaatgaagccaaacacatcctttcatcagaagcccattccctctataaggcgttattacatttatgagaatggagtcctcatgacctaatcgtgaccttaaaggcccctcccaacactgttacaatggcaattaaatttcaacaaaggttccagaggtgacattcgaatcagcaatgaaattttcatagttaaatttggtattcgtgggggaagaaatgaccatttcccttgtatttttataattaaatcagcaaaatattgtaataaagaaatctttcctgtgaagataccatgacccca

SEQ ID NO: 115735 - DNA, 1000 bp, Homo Sapiens
aatccacaaagccgtgcctttctctggctccagaatatgcataatcagcgccctggagtcccctgggcctggaccgcttcccagaggccaggaatctgccattactctgcggtggtgccagaggttttaggaaacctggcatggtgctttcaggtctggggcttttagagccccccgtgtggcttacaaattctacagcatacagagcaggccacgctcaggcccggcatgcgggccaccaagttctggaaaccacgtggtgtccctgcgaatggggcgatcaagtccagagccggggcactttcagagtttgaaggtaactgagagcagatggtcctccatttcaactccagaagtggggctctgggagggatgttctagccctccctggcatgtcagagccaggctctgcctggaggatccctccatccggctcctgtcatcccctacactttggccaagcaagaggtggtagaaccacttggctgctcattccttctggaggacacacagtctcagtccagatgccttcctgtctttctggccctttctggaccagatcctactcttcctttctaaatctgagatctccctccagggaatccgcctgcagaggacagagctggctgtcttcccccacccctaacctggcttattcccaactgctctgcccactgtgaaaccactaggttctaggtcctggcttctagatctggaaccttaccacgttactgcatactgatccctttcccatgatccagaactgaggtcactgggttctagaacccccacatttacctcgaggctcttccatccccaaactgtgccctgccttcagctttggtgaaagggagggcccctcatgtgtgctgtgctgtgtctgcaccgcttggtttgcagttgagaggggagggcaggaggggtgtgattggagtgtgtccggagatgagatgaaaaaaatacatctatatttaagaatcccaaaaaaaaaaaaaaaaaa

SEQ ID NO: 115736 - DNA, 1000 bp, Homo Sapiens
cgcccgccttcgccgcccggcctcgagtccccgcccgcccccgctcccgtcccgcaccgcctgccgcgtcggcctcgggccctgccctgtccgccgtccgccctccggtagggttcgggccttccggatgcggcttgggcgctcttcggggacctccgtggcgcggaagacccgagcctgccggggggaggccggcggcgccgcacctgcccgcctcggcgttcgtgactcagccgccccatcccgagtcgctaaggggctgcggggaggccgcagcaccttctggaagacttggccttccgctctgacgcagggccgaggtgggcagtccaggccgagaggccggcggccctgaaggtgagtgaggccctcggcagctgcagccggggtgtctggtacccccccggcgtggtgcttagcccaggactttcagacgcggccgctggccgggaggctttggtgggagagacgcgatcgccgatttcggtctggcgccccttctgcggccgggacccaggcctttcacatcagctctccctccatcttcattcataggtctgcgctggggccgggacgaagcacttggtaacaggcacatcttcctcccgagtgactgcctcctaggaggacatttaggggagggcagaggcctgcagtttggcttcacggctggctatgtggacagcaagagtcgttttcgcggaagccgactggcagccaggcctgtcgggccccccgacgccgccccatttcccttccagcaaactcaactcggcaatccaagcacctagataccagcacaagtcggttaatccctgtctggactgagcctccgttggcttctgaactggaattctgcagctaacccttccacgactagaaccttaggcattggggagttttagatggactaattttattaaaggattgttttttttttaaaaaaaaaaaaaaaaaaaaaaaaaaaaaaaaaaaaaaaaaaaaaaaaaaaaaaaaaaaa

SEQ ID NO: 115737 - DNA, 1000 bp, Homo Sapiens
agacctgaagttgctctttgagtacctgaccctatttggcattgatgacaaaatctcctttgacctgagccttgctcgagggctggattactacactggggtgatctatgaggcagtgctgctacagaccccagcccaggcaggggaagagcccctgggtgtgggcagtgtggctgctggaggacgctatgatgggctagtgggcatgttcgaccccaaagggcgcaaggtgccatgtgtggggctcagcattggggtggagcggattttctccatcgtggaacagagactagaggctttggaggagaagatacggaccacggagacacaggtgcttgtggcatctgcacagaagaagctgctagaggaaagactaaagcttgtctcagaactgtgggatgctgggatcaaggctgagctgctgtacaagaagaacccaaagctactgaaccagttacagtactgtgaggaggcaggcatcccactggtggctatcatcggcgagcaggaactcaaggatggggtcatcaagctccgttcagtgacgagcagggaagaggtggatgtccgaagagaagaccttgtggaggaaatcaaaaggagaacaggccagcccctctgcatctgctgaactgaacaaactatcagaggaaaggaagtgggactggcactatttgaggttaagacaaactgcatatgtacttcaattgctttgcacttttccgtttcagcggaagacctgaagagtggtcagaacagagcctttgatttttattatggttattttattgattattactggcaaaaacggccaggtacaacacctttttcatacaaggcccaggaggcttagtccagtctgtgctcctgggctacaaggacccagcctgagatggtcccatctgcagggccccgcaccagttggagcagatgcctccccaccaccaattgccaaaggtccaataaaatgcctcaaccacggaaaaaaaaaaaaaaaaaa

SEQ ID NO: 115738 - DNA, 1000 bp, Homo Sapiens
gctgaaccccctccagacacccagaatgtagcatctgagaaggccctgtgccctaaaggacacccctcgcccccatcttcatggagggggtcatttcagagccctcggagccaatgaacagctcctcctcttggagctgagatgagccccacgtggagctcgggacggatagtagacagcaataactcggtgtgtggccgcctggcaggtggaacttcctcccgttgcggggtggagtgaggttagttctgtgtgtctggtgggtggagtcaggcttctcttgctacctgtgagcatccttcccagcagacatcctcatcgggctttgtccctcccccgcttcctccctctgcggggaggacccgggaccacagctgctggccagggtagacttggagctgtcctccagaggggtcacgtgtaggagtgagaagaaggaagatcttgagagctgctgagggaccttggagagctcaggatggctcagacgaggacactcgcttgccgggcctgggcctcctgggaaggagggagctgctcagaatgccgcatgacaactgaaggcaacctggaaggttcaggggccgctcttcccccatgtgcctgtcacgctctggtgcagtcaaaggaacgccttcccctcagttgtttctaagagcagagtctcccgctgcaatctgggtggtaactgccagccttggaggatcgtggccaacgtggacctgcctacggagggtgggctctgacccaagtggggcctccttgtccaggtctcactgctttgcaccgtggtcagagggactgtcagctgagcttgagctcccctggagccagcagggctgtgatgggcgagtcccggagccccacccagacctgaatgcttctgagagcaaagggaaggactgacgagagatgtatatttaattttttaactgctgcaaacattgtacatccaaattaaaggaaaaaaatggaaaccatcaaaaaaaaaaaaaaaaaa

SEQ ID NO: 115739 - DNA, 1000 bp, Homo Sapiens
gagctccagaaatgccagcttcccaaagcaaagcatgcgagacacaacccaagcagacttctgtagccagcgcaaaccaggtcagcaggaccgagtctcctcaggggttacctacagtccagcgggaaaatgcaaaaaaagttctgaatccacctgcccctgcaggtgaccatgcaaggcttgatggcctgagtaaaatggacacagagaaggctgcctcggcaaatcacgtgaagcccaagcctgaactcacttccatacagggccaaccagcgtccacgtcacaacctctgctgaaggcacattctgaagtttttacaaagccctcaggccagcagactctctctccagacagacaggttcccaggcccacaggactaccgcggaggcagcccactgtgcacttcagcgacgtgagcagcgatgatgacgaggacaggcttgtgatagcaacctgatggattttattttttatttgctttttttttatataacacttaaaggtttctttgaaaaccctcctttccttaaagcacatttttctgacataaactcatgactaatctttgtgcaatcatgaacttttgaccaataattgttgttttgtgtcagctccagccatttttgtacatgttgtatagacaattgtgccttttaggagctttatgtttagaaactgtacagattgttgaatatctatatacataaaaatatattatatatgtatatgaaaaccaggtagttatttgtgtttagtaaggaaaacctgtcaaataaatcaaatgattaaattatatgttccactgttgaatataaattttatggctatggggcagagtttctgtgtataaattagtatgtaaactccatatttatgtattcatattagtctttgaaaatgggtctgtcctccttgtgtaagacagtaactttacacttcagacagattttctgtgttatgaaatgtttcagtaaaatattgtttactgacctttaaaaa

SEQ ID NO: 115740 - DNA, 1000 bp, Homo Sapiens
ctctccaagagtgatcattccttcttcaagatcagttacctcaccttcctcccttctgctgatgagatttatgactgcaaggtggagcactggggcctggaccagcctcttctgaaacactgggagcctgagattccagcccctatgtcagagctcacagagactgtggtctgtgccctggggttgtctgtgggcctcatgggcattgtggtgggcactgtcttcatcatccaaggcctgcgttcagttggtgcttccagacaccaagggccattgtgaatcccatcctggaagggaaggtgcatcgccatctacaggagcagaagaatggacttgctaaatgacctagcactattctctggcccgatttatcatatcccttttctcctccaaatatttctcctctcaccttttctctgggacttaagctgctatatcccctcagagctcacaaatgcctttacattctttccctgacctcctgattttttttttcttttctcaaatgttacctacaaagacatgcctggggtaagccacccggctacctaattcctcagtaacctccatctaaaatctccaaggaagcaataaattccttttatgagatctatgtcaaatttttccatctttcatccagggctgactgaaactatggctaataattggggtactcttatgtttcaatccaatttaacctcatttcccagatcatttttcatgtccagtaacacagaagccaccaagtacagtatagcctgataatatgttgatttcttagctgacattaatatttcttgcttccttgtgttcccacccttggcactgccacccacccctcaattcaggcaacaatgaaattaatggataccgtctgcccttggcccagaattgttatagcaaaaattttagaaccaaaaaataagtctgtactaatttcaatgtggcttttaaaagtatgacagagaaataagttaggataaaggaaatttgaatctca

SEQ ID NO: 115741 - DNA, 1000 bp, Homo Sapiens
gcccattttgaatcacatgaattattacagtgtctatcctttcatatagttagctaataaaaagcttttgtctacacaccctgcatatcataatgggggtaaagttaagttgagatagttttcatccataactgaacatccaaaatcttgatcagttaagaaatttcacatagcccacttacatttacaaactgaagagtaatcaatctactcaaagcatgggattattagaatcaaacattttgaaagtctgtccttgaaggactaatagaaaagtatgttctaacctttacatgaggactctattctttaactcccattaccatgtaatggcagttatattttgcagttcccacattaaagaagacctgagaatgtatccccaaaagcgtgagcttaaaatacaagactgccatattaaattttttgttgacattagtctcagtgaagactatgaaaatgctggctatagatgtcttttcccatttatctaaatatggactgctcaggaaacgagactttcattacaagtatttttaattaattgggccagcttttcaaacaaagatgccacattcaaaatagggtatattttcctatattacggtttgcccctttataaatccaagtagataggaagaaagaagacaaactttgcatctcagtatgaattattcaatttatttgaatgatttttctttacaaaacaaactcattcattagtcatgtttatctgcttaggagtttagggaacaatttggcaattttgtggttttcgagattatcgttttcttaaagtgccagtattttaaaatagcgttcttgtaattttacacgcttttgtgatggagtgctgttttgttatataatttagacttggattctttccatttgcatttgtttatgtaatttcaggaggaatactgaacatctgagtcctggatgatactaataaactaataattgcagtaaaaaaaaaaaaaaaaaaaaaaaaaaaaaa

SEQ ID NO: 115742 - DNA, 1000 bp, Homo Sapiens
caacagcaacagtggggatctagaggaggatttgcaggaagagctcgtggaagaggtggtgaccagcagagtggttatgggaaggtatccaggcgaggtggtcatcaaaatagctacaaaccatactaaattattccatttgcaacttatccccaacaggtggtgaagcagtattttccaatttgaagattcatttgaaggtggctcctgccacctgctaatagcagttcaaactaaattttttgtatcaagtccctgaatggaagtatgacgttgggtccctctgaagtttaattctgagttctcattaaaagaaatttgctttcattgttttatttcttaattgctatgcttcagaatcaatttgtgttttatgccctttcccccagtattgtagagcaagtcttgtgttaaaagcccagtgtgacagtgtcatgatgtagtagtgtcttactggttttttaataaatccttttgtataaaaatgtattggctcttttatcatcagaataggaaaaattgtcatggattcaagttattaaaagcataagtttggaagacaggcttgccgaaattgaggacatgattaaaattgcagtgaagtttgaaatgtttttagcaaaatctaatttttgccataatgtgtcctccctgtccaaattgggaatgacttaatgtcaatttgtttgttggttgttttaataatacttccttatgtagccattaagatttatatgaatattttcccaaatgcccagtttttgcttaatatgtattgtgctttttagaacaaatctggataaatgtgcaaaagtacccctttgcacagatagttaatgttttatgcttccattaaataaaaaggacttaaaatctgttaattataatagaaatgcggctagttcagagagatttttagagctgtggtggacttcatagatgaattcaagtgttgagggaggattaaagaaatatataccgtgtttatgtgtgtgtgctt

SEQ ID NO: 115743 - DNA, 1000 bp, Homo Sapiens
actcacgtagtgctccacctacacgagggcccccgccatcttatggtggaagcagtcgctatgatgattacagcagctcacgtgacggatatggtggaagtcgagacagttactcaagcagccgaagtgatctctactcaagtggtcgtgatcgggttggcagacaagaaagagggcttcccccttctatggaaagggggtaccctcctccacgtgattcctacagcagttcaagccgcggagcaccaagaggtggtggccgtggaggaagccgatctgatagagggggaggcagaagcagatactagaaacaaacaaaactttggaccaaaatcccagttcaaagaaacaaaaagtggaaactattctatcataactacccaaggactactaaaaggaaaaattgtgttactttttttaaattccctgttaagttcccctccataatttttatgttcttgtgaggaaaaaagtaaaacatgtttaattttatttgactttcgcattgcttttcaacaagcaaatgttaaatgtgttaagacttgtactagtgttgtaactttccaagtaaaagtatcccctaaaggccacttcctatctgatttttcccagcaaatgaggcaggcaattctaagatcttccacaaaacatctagccatctaaaatggagagatgaatcattctacctatacaaacaagctagctattagagggtggttggggtatgctactcataagatttcagggtgtcttccaactgaaatctcaatgttctcagtacgaaaaacctgaaatcacatgcctatgtaaggaaagtgctattcacccagtaaacccaaaaaagcaaatggataatgctggccattttgcctttctgacatttccttgggaatctgcaagaacctcccctttcccttcccccaataagaccatttaagtgtgtgttaaacaactacagaatactaaataaaaagtttggccaaaaccaacaaaaaaaaaa

SEQ ID NO: 115744 - DNA, 1000 bp, Homo Sapiens
tttaataagtacctgtgccggccacgccgcgtcgagatcgcggccttgctggacctcaccgaaaggcaggtcaaagtctggtttcagaaccggcgcatgaagcacaagcggcagacgcagcaccgagagccgccggatggggagcctgcctgcccgggagccctggaggacatctgcgaccctgccgaggaacccgcggccagcccgggcggcccctccgcctcgcgggcggcgtgggaagcctgctgtcacccgccggaggtggtgccgggggccttaagcgcggacccccggcctttagccgttcgcttagagggcgcaggcgcgtcgagtcccggctgcgcgctgcgcggggccggcgggctggagcccgggccattgccagaagacgtcttctcggggcgccaggattcacctttccttcccgacctcaacttcttcgcggccgactcctgtctccagctatccggaggcctctcccctagcctacagggttctctcgacagcccggtccctttttccgaggaagagctggattttttcaccagtacgctctgtgccatcgacctgcagtttccctaacctgtttcctcctcccggtcctttcgacccccgcgctccttggccgtctactggaaaaatcgagcctctcccaccctcagtcgcatagacttatgtgttttgctaaaattcaggtattactgaattagcgtttaatccacttcctttcttcttcttctaaaatattgggcactcggttatcttttaaaattcacacagaaaaattccgtttggtagactccttccaatgaaatctcaggaataattaaactctagggggactttcttaaaaataactagagggacctattttcctcttttttatgttttagactgtagattatttattaaaattctttaataataggaaaaggggaaagtatttattgtacattattttcatagattaaataaatgtctttataataccaaaaaaaaa

SEQ ID NO: 115745 - DNA, 1000 bp, Homo Sapiens
ctgtgctgcagacgtatggggacaccacacacaccctggtggagaagatgaactacatcggccaattcttgcctggatatgaggccccagcgttcatggaccccctacttcctaaactgcccaaatgcagtctggagatgatcgaccacattgtgggaaaccagcctgatcaggagatggtgtccgcctccgaatggtacctgaaaaacctgcagttccaccgcttctggtccgtggatgacacgcaggtgcacacggaatatagctctctgcgatccattgtggtggccaactatgaagagtccatcaagatgcccatcaatgagccagcgcctggcaagaagaagtcccagatccaggaatatgtggactataacgggggcgctggggtccagcacatcgctctcaagaccgaagacatcatcacagcgattcgccacttgagagagagaggcctggagttcttatctgttccctccacgtactacaaacaactgcgggagaagctgaagacggccaagatcaaggtgaaggagaacattgatgccctggaggagctgaaaatcctggtggactacgacgagaaaggctacctcctgcagatcttcaccaaaccggtgcaggaccggcccacgctcttcctggaagtcatccagcgccacaaccaccagggttttggagccggcaacttcaactcactgttcaaggctttcgaggaggagcagaacctgcggggtaacctcaccaacatggagaccaatggggtggtgcccggcatgtaagccccgcccaccccacggaggccacagccacacagccacgccccctgattctggaactcgcccaacttccctactggctgctccccttgggtcccgcccaccagcggactcggcccccaaggctccgcccacactgaccacgcccctcggcggggccgccctctgctccagccctcccgattaaagcgtgccccggtccaaaaaaaaaaaaaaaaaaa

SEQ ID NO: 115746 - DNA, 1000 bp, Homo Sapiens
ttcgctatgatggagcacacctctgtgggggatccctgctctccggggactgggtgctgacagccgcccactgcttcccggagcggaaccgggtcctgtcccgatggcgagtgtttgccggtgccgtggcccaggcctctccccacggtctgcagctgggggtgcaggctgtggtctaccacgggggctatcttccctttcgggaccccaacagcgaggagaacagcaacgatattgccctggtccacctctccagtcccctgcccctcacagaatacatccagcctgtgtgcctcccagctgccggccaggccctggtggatggcaagatctgtaccgtgacgggctggggcaacacgcagtactatggccaacaggccggggtactccaggaggctcgagtccccataatcagcaatgatgtctgcaatggcgctgacttctatggaaaccagatcaagcccaagatgttctgtgctggctaccccgagggtggcattgatgcctgccagggcgacagcggtggtccctttgtgtgtgaggacagcatctctcggacgccacgttggcggctgtgtggcattgtgagttggggcactggctgtgccctggcccagaagccaggcgtctacaccaaagtcagtgacttccgggagtggatcttccaggccataaagactcactccgaagccagcggcatggtgacccagctctgaccggtggcttctcgctgcgcagcctccagggcccgaggtgatcccggtggtgggatccacgctgggccgaggatgggacgtttttcttcttgggcccggtccacaggtccaaggacaccctccctccagggtcctctcttccacagtggcgggcccactcagccccgagaccacccaacctcaccctcctgacccccatgtaaatattgttctgctgtctgggactcctgtctaggtgcccctgatgatgggatgctctttaaataataaagatggttttgatt

SEQ ID NO: 115747 - DNA, 1000 bp, Homo Sapiens
tagggaaacagatccaacagtatatgaaaataatcagctctttcaaaaacaaggaggaccagtatgatcatttggatgctgctgacatgacaaaggtagaaaaaagcacaaatgaagcaatggagtggatgaataacaagctaaatctgcagaacaagcagagtttgaccatggatccagttgtcaagtcaaaagagattgaagctaaaattaaggagctgacaagtacttgtagccctataatttcaaagcccaaacccaaagtggaacctccaaaagaggaacaaaaaaatgcagagcagaatggaccagtggatggacaaggagacaacccaggcccccaggctgctgagcagggtacagacacagctgtgccttcggattcagacaagaagcttcctgaaatggacattgattgattccaacacttgtttctattaaaacagactattataaagctttaagttgtcaactttgttctaaatatcaactagcgcaagtgaatactgaagatttcttagtcagtttttaggggattttcggggaggggaaataggtaatgtatggagcattttcacttctaaatagttagatacagaaattaagtgcattgtatctttttcataatggtactatttagaagcccagttagtcttactgagcttatgcttcactcctttatgtttaaccatgtgtctacaagaataagtttgttttggaaagttgagctatagctacagctctagctatccagcagacttttcattatgacttacatggcaggagctctaattatgctttaaaaatctgttgtggagattgctttaaatgctccctgcctggtgtggggatggggtccccctctttgtgagggctggagcatggcacggcatggattaacacggcagaggaacaaaggtgtgctctgagcttcttcatatttcaccttcaccctcacctgtgttctcttccctctctcccaataaaagggctcccatta

SEQ ID NO: 115748 - DNA, 1000 bp, Homo Sapiens
cggggacacgctaacggccacagccacagccacggcgcgcgcggatcaggagggtgcccgggagatcgtctgcaacgtgaccctagggggcgagagacgggaggcccgggagaacttgacggtctttagcttcctaggacccattgtgaacctcagcgagcccaccgcccatgaggggtccacagtgaccgtgagttgcatggctggggctcgagtccaggtcacgctggacggagttccggccgcggccccggggcagccagctcaacttcagctaaatgctaccgagagtgacgacggacgcagcttcttctgcagtgccactctcgaggtggacggcgagttcttgcacaggaacagtagcgtccagctgcgagtcctgtatggtcccaaaattgaccgagccacatgcccccagcacttgaaatggaaagataaaacgagacacgtcctgcagtgccaagccaggggcaacccgtaccccgagctgcggtgtttgaaggaaggctccagccgggaggtgccggtggggatcccgttcttcgtcaacgtaacacataatggtacttatcagtgccaagcgtccagctcacgaggcaaatacaccctggtcgtggtgatggacattgaggctgggagctcccactttgtccccgtcttcgtggcggtgttactgaccctgggcgtggtgactatcgtactggccttaatgtacgtcttcagggagcaccaacggagcggcagttaccatgttagggaggagagcacctatctgcccctcacgtctatgcagccgacagaagcaatgggggaagaaccgtccagagctgagtgacgctgggatccgggatcaaagttggcgggggcttggctgtgccctcagattccgcaccaataaagccttcaaactccctaaaaaaaaaaaaaaaaaaaaaaaaaaaaaaaaaaaaaaaaaaaaaaaaaaaaaaaaaaaaaaaaaaaaaaaaaaaaaaaaaaaaaa

SEQ ID NO: 115749 - DNA, 1000 bp, Homo Sapiens
ggcgggggcggggccgaggcgggccattttgaataaagaggcgtgccttccaggcaggctctataagtgaccgccgcggcgagcgtgcgcgcgttgcaggtcactgtagcggacttcttttggttttctttctctttggggcacctctggactcactccccagcatgaaggcgctgagcccggtgcgcggctgctacgaggcggtgtgctgcctgtcggaacgcagtctggccatcgcccggggccgagggaagggcccggcagctgaggagccgctgagcttgctggacgacatgaaccactgctactcccgcctgcgggaactggtacccggagtcccgagaggcactcagcttagccaggtggaaatcctacagcgcgtcatcgactacattctcgacctgcaggtagtcctggccgagccagcccctggaccccctgatggcccccaccttcccatccagacagccgagctcgctccggaacttgtcatctccaacgacaaaaggagcttttgccactgactcggccgtgtcctgacacctccagaacgcaggtgctggcgcccgttctgcctgggaccccgggaacctctcctgccggaagccggacggcagggatgggccccaacttcgccctgcccacttgacttcaccaaatcccttcctggagactaaacctggtgctcaggagcgaaggactgtgaacttgtagcctgaagagccagagctagctctggccaccagctgggcgacgtcaccctgctcccaccccacccccaagttctaaggtcttttcagagcgtggaggtgtggaaggagtggctgctctccaaactatgccaaggcggcggcagagctggtcttctggtctccttggagaaaggttctgttgccctgatttatgaactctataatagagtatataggttttgtaccttttttacaggaaggtgactttctgtaacaatgcgatgtatattaaactttttataaaagtt

SEQ ID NO: 115750 - DNA, 1000 bp, Homo Sapiens
aggcccgggggcccccgcggacgtccagtacgacctgtacttgaacgttgccaacaggcgtcaacagtacgagtgtcttcactacaaaacggatgctcagggaacacgtatcgggtgtcgtttcgatgacatctctcgactctccagcggttctcaaagttcccacatcctggtgcggggcaggagcgcagccttcggtatcccctgcacagataagtttgtcgtcttttcacagattgagatattaactccacccaacatgactgcaaagtgtaataagacacattcctttatgcactggaaaatgagaagtcatttcaatcgcaaatttcgctatgagcttcagatacaaaagagaatgcagcctgtaatcacagaacaggtcagagacagaacctccttccagctactcaatcctggaacgtacacagtacaaataagagcccgggaaagagtgtatgaattcttgagcgcctggagcaccccccagcgcttcgagtgcgaccaggaggagggcgcaaacacacgtgcctggcggacgtcgctgctgatcgcgctggggacgctgctggccctggtctgtgtcttcgtgatctgcagaaggtatctggtgatgcagagactctttccccgcatccctcacatgaaagaccccatcggtgacagcttccaaaacgacaagctggtggtctgggaggcgggcaaagccggcctggaggagtgtctggtgactgaagtacaggtcgtgcagaaaacttgagactggggttcagggcttgtgggggtctgcctcaatctccctggccgggccaggcgcctgcacagactggctgctggacctgcgcacgcagcccaggaatggacattcctaacgggtggtgggcatgggagatgcctgtgtaatttcgtccgaagctgccaggaagaagaacagaactttgtgtgtttatttcatgataaagtgatttttttttttttaacccaaaaaaaaaaaaaaaaa

SEQ ID NO: 115751 - DNA, 1000 bp, Homo Sapiens
aggatgttgcctttactgacccaactctggattccacagagatcaatgttccacaggacattttgggaatttgggtggaccccatagattcaacttatcagtatataaaaggttctgctgacattaaatccaaccagggaatcttcccctgtggacttcagtgtgtcaccattttaattggtgtctatgacatacagacaggggttcccctgatgggagtcatcaatcaaccttttgtgtcacgagatccaaacaccctcaggtggaaaggacagtgctattggggcctttcttacatggggaccaacatgcattcactacagctcaccatctctagaagaaacggcagtgaaacacacactggaaacaccggctctgaggcagcattctcccccagtttttcagccgtaattagtacaagtgaaaaggagactatcaaagctgcattgtcacgtgtgtgtggagatcgcatatttggggcagctggggctggttataagagcctatgtgttgtccaaggcctcgttgacatttacatcttttcagaagataccacattcaaatgggactcttgtgctgctcatgccatactgcgggccatgggtgggggaatagtagacttgaaagaatgcttagaaagaaatccagaaacagggcttgatttgccacagttggtgtaccacgtggaaaatgagggtgctgctggggtggatcggtgggccaacaagggaggactcattgcatacagatccaggaagcggctggagacattcctgagcctcctggtccaaaacctggcacctgcagagacgcatacctagaggaactctaaccccggtgtacctgtataaactgaactgtgaaactgtttcggttatctctgtcttttgaggatggctttgtcctgttgctggttaacattcaccttcctcttttgaggagtatttttccattatgtattcataataatgttaatttcaataaatgacattcatgcagc

SEQ ID NO: 115752 - DNA, 1000 bp, Homo Sapiens
ttgacagcccagggggggatattgggctgagtctacagcgtgtcttcacagatctgaagaacatggatgccacctggctggacagcctgctgaccccagtccggttgccctccatccaggccattccctgtgcaccgtagcagggcccctgggcccctcttattcctctaggcaagcaggacctggcatcatggtggatatggtgcagagaagctggacttctgtgggcccctcaacagccaagtgtgaccccactgccaagtggggatgggcctccctccttgggtcattgacctctcagggcctggcaggccagtgtctgggtttttcttgtggtgtaaagctggccctgcctcctgggaagatgaggttctgagaccagtgtatcaggtcagggacttggacaggagtcagtgtctggctttttcctctgagcccagctgcctggagagggtctcgctgtcactggctggctcctaggggaacagaccagtgaccccagaaaagcataacaccaatcccagggctggctctgcactaagcgaaaattgcactaaatgaatctcgttccaaagaactaccccttttcagctgagccctggggactgttccaaagccagtgaatgtgaaggaaactcccctccttcggggcaatgctccctcagcctcagaggagctctaccctgctccctgctttggctgaggggcttgggaaaaaaacttggcactttttcgtgtggatcttgccacatttctgatcagaggtgtacactaacatttcccccgagctcttggcctttgcatttatttatacagtgccttgctcggggcccaccaccccctcaagccccagcagccctcaacaggcccagggagggaagtgtgagcgccttggtatgacttaaaattggaaatgtcatctaaccattaagtcatgtgtgaacacataaggacgtgtgtaaatatgtacatttgtctttttataaaaagtaaaattgtt

SEQ ID NO: 115753 - DNA, 1000 bp, Homo Sapiens
gaaatgaatgctccatgaaatgcacgaagtctgttttaatgacaaggtgatatggtagcaacactgtgaagacaatcatgggattttactagaattaaacaacaaacaaaacgcaaaacccagtatatgctattcaatgatcttagaagtactgaaaaaaaaagacgtttttaaaacgtagaggatttatattcaaggatctcaaagaaagcattttcatttcactgcacatctagagaaaaacaaaaatagaaaattttctagtccatcctaatctgaatggtgctgtttctatattggtcattgccttgccaaacaggagctccagcaaaagcgcaggaagagagactggcctccttggctgaaagagtcctttcaggaaggtggagctgcattggtttgatatgtttaaagttgactttaacaaggggttaattgaaatcctgggtctcttggcctgtcctgtagctggtttattttttactttgccccctccccactttttttgagatccatcctttatcaagaagtctgaagcgactataaaggtttttgaattcagatttaaaaaccaacttataaagcattgcaacaaggttacctctattttgccacaagcgtctcgggattgtgtttgacttgtgtctgtccaagaacttttcccccaaagatgtgtatagttattggttaaaatgactgttttctctctctatggaaataaaaaggaaaaaaaaaaggaaactttttttgtttgctcttgcattgcaaaaattataaagtaatttattatttattgtcggaagacttgccacttttcatgtcatttgacattttttgtttgctgaagtgaaaaaaaaagataaaggttgtacggtggtctttgaattatatgtctaattctatgtgttttgtctttttcttaaatattatgtgaaatcaaagcgccatatgtagaattatatcttcaggactatttcactaataaacatttggcatagat

SEQ ID NO: 115754 - DNA, 1000 bp, Homo Sapiens
atctgctagaagcccatcctgtgccagaggaaggaaaaggaggaaatttcctttctcttttaggaggcacaacagttctcttctaggatttgtttggctgactggcagtaacctagtgaatttttgaaagatgagtaatttctttggcaaccttcctcctcccttactgaaccactctcccacctcctggtggtaccattattatagaagccctctacagcctgactttctctccagcggtccaaagttatcccctcctttacccctcatccaaagttcccactccttcaggacagctgctgtgcattagatattaggggggaaagtcatctgtttaatttacacacttgcatgaattactgtatataaactccttaacttcagggagctattttcatttagtgctaaacaagtaagaaaaataagctagagtgaatttctaaatgttggaatgttatgggatgtaaacaatgtaaagtaaaacactctcaggatttcaccagaagttacagatgaggcactggaaaccaccaccaaattagcaggtgcaccttctgtggctgtcttgtttctgaagtactttttcttccacaagagtgaatttgacctaggcaagtttgttcaaaaggtagatcctgagatgatttggtcagattgggataaggcccagcaatctgcattttaacaagcaccccagtcactaggatgcagatggaccacactttgagaaacaccacccatttctactttttgcaccttattttctctgttcctgagcccccacattctctaggagaaacttagattaaaattcacagacactacatatctaaagctttgacaagtccttgacctctataaacttcagagtcctcattataaaatgggaagactgagctggagttcagcagtgatgctttttagttttaaaagtctatgatctgatctggacttcctataatacaaatacacaatcctccaagaatttgacttggaaaag

SEQ ID NO: 115755 - DNA, 1000 bp, Homo Sapiens
tcattctactgaaaaggaggggtctgggtacttcttgaaggtgctgacggccagggagaagctcctctccccagcccagagacatacttgaagggccagagccaggggggtgaggagctggggatccctcccccccatgcactgtgaaggacccttgtttacacataccctcttcatggatgggggaactcagatccagggacagaggccccagcctccctgaagcctttgcattttggagagtttcctgaaacaacttggaaagataactaggaaatccattcacagttctttgggccagacatgccacaaggacttcctgtccagctccaacctgcaaagatctgtcctcagccttgccagagatccaaaagaagcccccagctaagaacctggaacttggggagttaagacctggcagctctggacagccccaccctggtgggccaacaaagaacactaactatgcatggtgccccaggaccagctcaggacagatgccacacaaggatagatgctggcccagggcccagagcccagctccaaggggaatcagaactcaaatggggccagatccagcctggggtctggagttgatctggaacccagactcagacattggcacctaatccaggcagatccaggactatatttgggcctgctccagacctgatcctggaggcccagttcaccctgatttaggagaagccaggaatttcccaggaccctgaaggggccatgatggcaacagatctggaacctcagcctggccagacacaggccctccctgttccccagagaaaggggagcccactgtcctgggcctgcagaatttgggttctgcctgccagctgcactgatgctgcccctcatctctctgcccaacccttccctcaccttggcaccagacacccaggacttatttaaactctgttgcaagtgcaataaatctgacccagtgcccccactgaccagaactagaaaaaaaaaaaaaaaaaaa

SEQ ID NO: 115756 - DNA, 1000 bp, Homo Sapiens
tccataaagaaaactcaagtattaataaaagagactttactggcttaagagggctgtgaaagatttttgatagtgaatcatgaccctaagggagagatttgtgtgataaaagtattgtatataatagatcagcgatttttgtaaggcaaacagaatttgtaagttggcagatcttcctaagttgcaaaatgtaatgatgagcttggtggagaagaatgagtcgttcttggaatacctatgtgcagccactacccatctcaatgtcaccttgtttgcattcttggatagcttgtatatgtagtagtttgatgaataatttaaagaaaaacacctaaaatttgaaaaatgattgtaggatcaaaaaaggcagatgaaattacttaatactcagtgttttggagagtattccttttagtttgttggttggctggtttgaacgatagaaatatgcagcatgcaatatatgcttatatttcattttaatttctgatatataatgaacttcttgggagaggtactgaatctttgatgttttttgtcattgttctcaagtgcaatataacaatgtaaccaaatctagataatttcaaagttgtcattaatttagtaagcctaatataaacaaatatttgtattatttttgttagcaggaaagagtgattaagtgaggttatttacccctaaatggtccattctgcattgtatttcaggctggaaatgaattattctttaccagttttgaaacactttgaaatatcctaaggtaacttggaagctgtgtagtatatcaaattaatttgctacctaataacatagaaagtaaatatctttgtggtcacccacattgggtgagacagaaaatgaatctgttctaaaatttgtaatttgctaacttgatttgagttagtgaaaactggtacagtgttctgcttgatttacaacatgtaacttgtgactgtacaataaacataagcatatggtaccaaaaaaaaaaaaaaaa

SEQ ID NO: 115757 - DNA, 1000 bp, Homo Sapiens
cagggactgacaaaagacttgagacaggatggttattcttgtcagctaaggtcacattgtgcctttttgaccttttcttcctggactattgaaatcaagcttattggattaagtgatatttctatagcgattgaaagggcaatagttaaagtaatgagcatgatgagagtttctgttaatcatgtattaaaactgatttttagctttacaaatatgtcagtttgcagttatgcagaatccaaagtaaatgtcctgctagctagttaaggattgttttaaatctgttattttgctatttgcctgttagacatgactgatgacatatctgaaagacaagtatgttgagagttgctggtgtaaaatacgtttgaaatagttgatctacaaaggccatgggaaaaattcagagagttaggaaggaaaaaccaatagctttaaaacctgtgtgccattttaagagttacttaatgtttggtaacttttatgccttcactttacaaattcaagccttagataaaagaaccgagcaattttctgctaaaaagtccttgatttagcactatttacatacaggccatactttacaaagtatttgctgaatggggaccttttgagttgaatttattttattatttttattttgtttaatgtctggtgctttctatcacctcttctaatcttttaatgtatttgtttgcaattttggggtaagacttttttatgagtactttttctttgaagttttagcggtcaatttgcctttttaatgaacatgtgaagttatactgtggctatgcaacagctctcacctacgcgagtcttactttgagttagtgccataacagaccactgtatgtttacttctcaccatttgagttgcccatcttgtttcacactagtcacattcttgttttaagtgcctttagttttaacagttcactttttacagtgctatttactgaagttatttattaaatatgcctaaaatacttaaatcgga

SEQ ID NO: 115758 - DNA, 1000 bp, Homo Sapiens
tccccagtgggaagtccaacctgaccgtcctcagggagccagagtgtggaaacacccccaacgccatgaccatcctcctggctgtggtcggtagcatcctccttgttgggcttgcactcctggctatctggaagctgcttgtcaccatccacgaccggagggagtttgcaaagtttcagagcgagcgatccagggcccgctatgaaatggcttcaaatccattatacagaaagcctatctccacgcacactgtggacttcaccttcaacaagttcaacaaatcctacaatggcactgtggactgatgtttccttctccgaggggctggagcggggatctgatgaaaaggtcagactgaaacgccttgcacggctgctcggcttgatcacagctccctaggtaggcaccacagagaagaccttctagtgagcctgggccaggagcccacagtgcctgtacaggaaggtgcctggccatgtcacctggctgctaggccagagccatgccaggctgcgtccctccgagcttgggataaagcaaggggaccttggcactctcagctttccctgccacatccagcttgttgtcccaatgaaatactgagatgctgggctgtctctcccttccaggaatgctgggcccccagcctggccagacaagacgactgtcaggaagggtcggagtctgtaaaaccagcatacagtttggcttttttcacattgatcatttttatatgaaataaaaagatcctgcatttatggtgtagttctgagtcctgagacttttccgcgtgatggctatgccttgcacacaggtgttggtgatggggctgttgagatgcctgttgaaggtacatcgtttgcaaatgtcagtttcctctcctgtccgtgtttgtttagtacttttataatgaaaagaaacaagattgtttgggattggaagtaaagattaaaaccaaaagaatttgtgtttgtctgataaaaaaaaaaaaaaaaaaaaa

SEQ ID NO: 115759 - DNA, 1000 bp, Homo Sapiens
gactggttcccccggatgcgggccatgtcccttgtcagcaatgagggcgagggggagcagaatgagattcggattctccaggacaagctcaactccaccatgaagctggtgtcccacctcactgcccagctcaacgagctcaaggagcagatgacggagcagcggaaacgcaggcaacgcctaggctttgtggatgtccagaactgcattagccgctgaggagagccaccgaaggccccaacaggggatgctcatcactggagactgcgactgggaagaacactgccccctccctcgggttgggtggcccagccagctggccagcctccactcccactctgccagacaccctgacacccacccaggctttgaagagcatggagggggagcctcagagctgacagtcctgcttagagcccttaaaaagacttgaaagttcactgggactcagtttaccttaatgccttagcagaagataaatcctacctagagacctttgttccttaaagcaataactgacaactctttgtagtcctccttgtgggtagttaagagtggggtcacccctttaactccaagcactacattttggcggctgcggcctctgggggaggtggcagttatgctgttactagtgattttagggctttgttatttaacttatttcaagggtgctgtgctcagccctgcccatggctgtgcagctccctccgtgcctcagatctgctgtagccagtgcagacctcactgtcgtgtccatgccacccccggcatggctccaggtggcctggtgactccatgatggacgatcttgctcccaggacctgcctcttcccaggcttcctggggaagagttgtacgcccaggcaacaagggctgagctgcgcttgcgtggctgtttcatgaccgcttgtttttctccttttggtgtaatgttttacaaatcctttggcctgagaactaatatgttaattgccttaaataaattaatagaaatcta

SEQ ID NO: 115760 - DNA, 1000 bp, Homo Sapiens
cggtcaggagcatcaatgaggcccgctacgccggcaaggagtaggggcggctgccagctgggccgggacccagggccctcggtgggagccatgccgtctgccggacccggaggccgaggccatgtgcatagtttctttattttgtgtaaaaaaaccaccaaaaacaaaaaccaaatgtttattttctacgtttctttaaccttgtataaattattcagtaactgtcaggctgaaaacaatggagtattctcggatagttgctatttttgtaaagtttccgtgcgtggcactcgctgtatgaaaggagagagcaaagggtgtctgcgtcgtcaccaaatcgtagcgtttgttaccagaggttgtgcactgtttacagaatcttccttttattcctcactcgggtttctctgtggctccaggccaaagtgccggtgagacccatggctgtgttggtgtggcccatggctgttggtgggacccgtggctgatggtgtggcctgtggctgtcggtgggactcgtggctgtcaatgggacctgtggctgtcggtgggacctacggtggtcggtgggaccctggttattgatgtggccctggctgccggcacggcccgtggctgttgacgcacctgtggttgttagtggggcctgaggtcatcggcgtggcccaaggccggcaggtcaacctcgcgcttgctggccagtccaccctgcctgccgtctgtgcttcctcctgcccagaacgcccgctccagcgatctctccactgtgctttcagaagtgcccttcctgctgcgcagttctcccatcctgggacggcggcagtattgaagctcgtgacaagtgccttcacacagacccctcgcaactgtccacgcgtgccgtggcaccaggcgctgcccacctgccggccccggccgcccctcctcgtgaaagtgcatttttgtaaatgtgtacatattaaaggaagcactctgtatatttgattgaataatgccacca

SEQ ID NO: 115761 - DNA, 1000 bp, Homo Sapiens
gaactgcatggacctaacattcgatctcattcagtattaaaggggggagggggagggggttacaaactgcaatagagactgtagattgcttctgtagtactccttaagaacacaaagcggggggagggttggggaggggcggcaggagggaggtttgtgagagcgaggctgagcctacagatgaactctttctggcctgccttcgttaactgtgtatgtacatatatatattttttaatttgatgaaagctgattactgtcaataaacagcttcatgcctttgtaagttatttcttgtttgtttgtttgggtatcctgcccagtgttgtttgtaaataagagatttggagcactctgagtttaccatttgtaataaagtatataatttttttatgttttgtttctgaaaattccagaaaggatatttaagaaaatacaataaactattggaaagtactcccctaacctcttttctgcatcatctgtagatactagctatctaggtggagttgaaagagttaagaatgtcgattaaaatcactctcagtgcttcttactattaagcagtaaaaactgttctctattagactttagaaataaatgtacctgatgtacctgatgctatggtcaggttatactcctcctcccccagctatctatatggaattgcttaccaaaggatagtgcgatgtttcaggaggctggaggaaggggggttgcagtggagagggacagcccactgagaagtcaaacatttcaaagtttggattgtatcaagtggcatgtgctgtgaccatttataatgttagtagaaattttacaataggtgcttattctcaaagcaggaattggtggcagattttacaaaagatgtatccttccaatttggaatcttctctttgacaattcctagataaaaagatggcctttgcttatgaatatttataacagcattcttgtcacaataaatgtattcaaataccaaaaaaaaaaaaaaaaa

SEQ ID NO: 115762 - DNA, 1000 bp, Homo Sapiens
attcagagagctctataagattgggatcacgtgttacctgctacttggccttattgccatgttggtagttctggaaaccttctgtgaactccatgagctgaaaaaattcagaaaaatgttctatgtgaagaaggacaaggacgaggatcaggtgcacatcatagagcatgaccaactgtccttctcctcgatcacagaccaggcagctggcatgaaagaggaccagaagcaaaatgagccttttgtggccacccagtcatctgcctgcgtggatggccctgcaaaccattgagcgtaggatttgttgcattatgctagagcaccagggtcagggtgcaaggaagaggcttaagtatgttcatttttatcagaatgcaaaagcgaaaattatgtcactttaagaaatagctactgtttgcaatgtcttattaaaaaacaacaaaaaaagacacatggaacaaagaagctgtgaccccagcaggatgtctaatatgtgaggaaatgagatgtccacctaaaattcatatgtgacaaaattatctcgaccttacataggaggagaatacttgaagcagtatgctgctgtggttagaagcagattttatacttttaactggaaactttggggtttgcatttagatcatttagctgatggctaaatagcaaaatttatatttagaagcaaaaaaaaaaagcatagagatgtgttttataaataggtttatgtgtactggtttgcatgtacccacccaaaatgattatttttggagaatctaagtcaaactcactatttataatgcataggtaaccattaactatgtacatataaagtataaatatgtttatattctgtacatatggtttaggtcaccagatcctagtgtagttctgaaactaagactatagatattttgtttcttttgatttctctttatactaaagaatccagagttgctacaataaaataaggggaataataaacttgagagtgaataaccat

SEQ ID NO: 115763 - DNA, 1000 bp, Homo Sapiens
acaggcagtggcaagaccttcacaatggagggtgggcctgggggagacccccagttggaggggctgatccctcgggccctgcggcacctcttctctgtggctcaggagctgagtggtcagggctggacctacagctttgtagcaagctacgtagagatctacaatgagactgtccgggacctgctggccactggaacccggaagggtcaagggggcgagtgtgagattcgccgtgcagggccagggagtgaggagctcactgtcaccaatgctcgatatgtccctgtctcctgtgagaaagaagtggacgccctgcttcatctggcccgccagaatcgggctgtggcccgcacagcccagaatgaacggtcatcacgcagccacagtgtattccagctacagatttctggggagcactccagccgaggcctgcagtgtggggcccccctcagtcttgtggacctggccgggagtgagcgacttgaccccggcttagccctcggccccggggagcgggaacgccttcgggaaacacaggccattaacagcagcctgtccacgctggggctggttatcatggccctgagcaacaaggagtcccacgtgccttaccggaacagcaaactgacctacctgctgcagaactctctgggtggtagtgctaagatgctcatgtttgtgaacatttctccactggaagagaacgtctccgagtccctcaactctctacgctttgcctccaaggtgaaccagtgtgttattggtactgctcaggccaacaggaagtgaagacggatccagatctgtgtgtgtgtgtgtgtgtgtgtgtgtgtgtgtgtgtgtgtgtgtgtgtgtgtccctatgtctatgtatcgggtgaggggtgggagggttgctggagggtgctttattgggtggagggcaccatgtcccagggctatcaaataaagaatagtttggttttttttttaaaaaaaaaaaaaaaaaaaaaaaaaaaaaa

SEQ ID NO: 115764 - DNA, 1000 bp, Homo Sapiens
catcttggaaaagagaaaaacaatggagttacttatttaaaaaaaaagaaagaaagttatctcttcccaggagaggctagaagtagcttttctgtcttttggccagtgccgagtggaatgcctggtttgggggaggaggagggactgggttcagctgtggtgctttgttgtaaaaggcagcctggcctttgctactgaggagaaagatggagcctgggtctcaagcccaccttcgctgtacctttgccacatggtactgtatgcttgccagctagaaggagggtcagggattttttacagtctgagaatgagtgtgtgtgagtgaggcggtatccacattctcaacttcaagtcattgcagtttctttttcccagaaaacaaggggttagatgttgcatttcataaaactaaccgaagttctgtctactgatgcagcacaagagatgtaaaaaaaaaaaaaaaaaaaaaaaaaaaaacacacacacagaggaaagacgctctttaggttttgttttgttttttttttttggttttgttttttgttttttttactctagggaaaacactgacgaatggtcagagctcctatcctgatcttttcatcaaggcgcctttcctaataatatggttcaactgtgaatgtagaagtgggggggaggggggagaaaaagaaaactctggcgttagaggatatagaaaaatataagtacaattgttacaaataacgcagacttcaaaaacaaaaaaatcacaacccaaacaaaccaaaatttaaatgatcagaattggcagcacaaagaaaacgccctctcctgacttgtattgtggcagtctgaacgcccccagaaaattgtgccaaagagtttagaaaaataaatatacaataaaagtaaacacatacacacaaaacagcaaacttcaggtaactattttggattgcaaacaggataaattaaatgttcaaacaatctgataaaataaccatttggaaactgaaaa

SEQ ID NO: 115765 - DNA, 1000 bp, Homo Sapiens
gttgtgccccaacttgtgaagcttctaggagcttctgaattgccaattgtgactcctgccctaagagccatagggaatattgtcactggtacagatgaacagactcaggttgtgattgatgcaggagcactcgccgtctttcccagcctgctcaccaaccccaaaactaacattcagaaggaagctacgtggacaatgtcaaacatcacagccggccgccaggaccagatacagcaagttgtgaatcatggattagtcccattccttgtcagtgttctctctaaggcagattttaagacacaaaaggaagctgtgtgggccgtgaccaactataccagtggtggaacagttgaacagattgtgtaccttgttcactgtggcataatagaaccgttgatgaacctcttaactgcaaaagataccaagattattctggttatcctggatgccatttcaaatatctttcaggctgctgagaaactaggtgaaactgagaaacttagtataatgattgaagaatgtggaggcttagacaaaattgaagctctacaaaaccatgaaaatgagtctgtgtataaggcttcgttaagcttaattgagaagtatttctctgtagaggaagaggaagatcaaaacgttgtaccagaaactacctctgaaggctacactttccaagttcaggatggggctcctgggacctttaacttttagatcatgtagctgagacataaatttgttgtgtactacgtttggtattttgtcttattgtttctctactaagaactctttcttaaatgtggtttgttactgtagcactttttacactgaaactatacttgaacagttccaactgtacatacatactgtatgaagcttgtcctctgactaggtttctaatttctatgtggaatttcctatcttgcagcatcctgtaaataaacattcaagtccacccttttcttgacttcaaaaaaaaaaaaaaaaaaaaaaaaaaaaaaaa

SEQ ID NO: 115766 - DNA, 1000 bp, Homo Sapiens
ccatatcatcaaaactaatttgtgtagatttttgcatgaaaaaaatcataaatttccctcaaaatagactgtgttgcagtacacaagttgccataatagtataaaacagtaaaatgtgcttaaaaggccatccttttcattttcagagataacataaagatctttgcatgaggtaaatctacagcatagttcatttttagattttgttgagtcctgtaaagaagaagaagaaaaaagtttcagttgtggtagaataccgtgctgtgtttaaatgttacttgttttcaaactttgttttctatgaaaatgatatggaaacttctaaaatggaatttggtgcatatgtactgctgaataaagaccgatgaagaggtttgagtagatgtacaaatcaagtaatggtttgaacacctttaataatatgcctaatctgttcaattgttttagaatctttttatcttagatgtaggcagccatgaacaatctattttgagccactttagggagaaaactttgtatttttaaaacttgcataaaagttatgcaagtggtttttataaattggaataatacctcagttttgaggttatgcacactaaattaaatgtgacataaattaatttgtacaaaaagaactctttataaggtggctcattgtaggaaatcctgtgccttcccctttgagcacaagtgttgcatgaacaacagtttgctataagaaacataccagattagccaccattagcatctatatctactttgtgtttaaaaatcaactggtaattctgaaacactgtagaatggataaaaattattttgtgatcataactctttgttgaactagagtatttttgcagcattccttgtcatcagaaacatggttaaagtttaaaactagaagcagcagaaaactagcttgtaaaatttatccaagtagagtgcaggctaggctgtcttggggaaataaacattaaaacttaaagcaaaaaaaaaaaaaaaa

SEQ ID NO: 115767 - DNA, 1000 bp, Homo Sapiens
gatccagaggctgcgggcagagatcgagaacatcaagaagcagtgccagactcttcaggtatccgtggctgatgcagagcagcgaggtgagaatgcccttaaagatgcccacagcaagcgcgtagagctggaggctgccctgcagcaggccaaggaggagctggcacgaatgctgcgtgagtaccaggagctcatgagtgtgaagctggccttggacatcgagatcgccacctaccgcaaactgctggagggcgaggagtacagaatgtctggagaatgccagagtgccgtgagcatctctgtggtcagcggtagcaccagcactggaggcatcagcggaggattaggaagtggctccgggtttggcctgagtagtggctttggctccggctctggaagtggctttgggtttggtggcagtgtctctggcagttccagcagcaagatcatctctaccaccaccctgaacaagagacgatagaggagacgaggtccctgcagctcactgtgtccagctgggcccagcactggtgtctctgtgcttccttcacttcacctccatcctctgtctctggggctcatcttactagtatcccctccactatcccatgggctctctctgccccaggatgatcttctgtgctgggacagggactctgcctcttggagtttggtagctacttcttgatttgggcctggtgacccacctggaatgggaaggatgtcagctgacctctcacctcccatgggcagagaagaaaatgaccaggagtgtcatctccagaattattggggtcacatatgtcccttcccagtccaatgccatctcccactagatcctgtattatccatctacatcagaaccaaactacttctccaacacccggcagcacttggccctgcaagcttaggatgagaaccacttagtgtcccattctactcctctcattccctcttatccatctgcaggtgaatcttcaataaaatgcttttgtcattc

SEQ ID NO: 115768 - DNA, 1000 bp, Homo Sapiens
atccgggagctgcagtcccagatctcggacacatctgtggtgctgtccatggacaacagccgctccctggacatggacagcatcattgctgaggtcaaggcacagtacgaggatattgccaaccgcagccgggctgaggctgagagcatgtaccagatcaagtatgaggagctgcagagcctggctgggaagcacggggatgacctgcggcgcacaaagactgagatctctgagatgaaccggaacatcagccggctccaggctgagattgagggcctcaaaggccagagggcttccctggaggccgccattgcagatgccgagcagcgtggagagctggccattaaggatgccaacgccaagttgtccgagctggaggccgccctgcagcgggccaagcaggacatggcgcggcagctgcgtgagtaccaggagctgatgaacgtcaagctggccctggacatcgagatcgccacctacaggaagctgctggagggcgaggagagccggctggagtctgggatgcagaacatgagtattcatacgaagaccaccagcggctatgcaggtggtctgagctcggcctatgggggcctcacaagccccggcctcagctacagcctgggctccagctttggctctggcgcgggctccagctccttcagccgcaccagctcctccagggccgtggttgtgaagaagatcgagacacgtgatgggaagctggtgtctgagtcctctgacgtcctgcccaagtgaacagctgcggcagcccctcccagcctacccctcctgcgctgccccagagcctgggaaggaggccgctatgcagggtagcactgggaacaggagacccacctgaggctcagccctagccctcagcccacctggggagtttactacctggggaccccccttgcccatgcctccagctacaaaacaattcaattgctttttttttttggtccaaaataaaacctcagctagctctgccaatgtc

SEQ ID NO: 115769 - DNA, 1000 bp, Homo Sapiens
ctgcgccgggtgctggatgagctcactctgtctaagactgacctggagatgcagatcgagagcctgaatgaagagctagcctacatgaagaagaaccatgaagaggagatgaaggaatttagcaaccaggtggtcggccaggtcaacgtggagatggatgccaccccaggcattgacctgacccgcgtgctggcagagatgagggagcagtacgaggccatggcagagaggaaccgccgggatgctgaggaatggttccacgccaagagtgcagagctgaacaaggaggtgtctaccaacactgccatgattcagaccagcaagacagagatcacggagctcaggcgcacgctccaaggcctggagattgagctgcagtcccagctgagcatgaaagcggggctggagaacacggtggcagagacggagtgccgctatgccctgcagctgcagcagatccagggactcatcagcagcatcgaggcccagctgagcgagctccgcagtgagatggagtgccagaaccaagagtacaagatgctgctggacatcaagacacgtctggagcaggagatcgccacctaccgcagcctgctcgagggccaggacgccaagaagcgtcagcccccgtagcacctctgttaccacgacttctagtgcctctgttaccaccacctctaatgcctctggtcgccgcacttctgatgtccgtaggccttaaatctgcctggcgtcccctccctctgtcttcagcacccagaggaggagagagccggcagttccctgcaggagagaggaggggctgctggacccaaggctcagtccctctgctctcaggaccccctgtcctgactctctcctgatggtgggccctctgtgctcttctcttccggtcggatctctctcctctctgacctggatacgctttggtttctcaacttctctaccccaaagaaaagattattcaataaagtttcctgcctttctgcaaacataaaaa

SEQ ID NO: 115770 - DNA, 1000 bp, Homo Sapiens
tcaggataaggttgcttcagttattaacatcaaccccaatacaactcactccacaggcagctgccgttctcacactgctctacttagactcaatagcagcaccattaagtatctagactttgtctttgctgtgaaaaatgaaaaccgattttatctgaaggaagtgaacatcagcatgtatttggttaatggctccgttttcagcattgcaaataacaatctcagctactgggatgcccccctgggaagttcttatatgtgcaacaaagagcagactgtttcagtgtctggagcatttcagataaatacctttgatctaagggttcagcctttcaatgtgacacaaggaaagtattctacagctcaagactgcagtgcagatgacgacaacttccttgtgcccatagcggtgggagctgccttggcaggagtacttattctagtgttgctggcttattttattggtctcaagcaccatcatgctggatatgagcaattttagaatctgcaacctgattgattatataaaaatacatgcaaataacaagattttcttacctctcagttgttgaaacactttgcttcttaaaattgatatgttgaaactttaattcttttatcaatcccagcattttgagatcagtctttattaataaaacctgttctctttaatcagcttaaaatccaaagtgtcatatttactggtcctggagacaaacttgttcaaaagaacatcaacgtgcaatgttttaaggtctatcttaagaagccctggccaaattttgatcctaaccttgaagtatgccttgaacttattaacatggccattataagaataaaatatgtagttgtgtcttaatggaattaataaatgtcatttcactactggtgttctgttttcaatgtataaggactatagtgatttaaactcatcaatgtgcctttgcataaagttgattaaataaatattgatgtggtataaatgcccatcagatatgct

SEQ ID NO: 115771 - DNA, 1000 bp, Homo Sapiens
ctggagtcccaaatgtcatcaggttttgttttttttcagccactaagaacccctctgcttttaactctagaatttgggcttggaccagatctaacatcttgaatactctgccctctagagccttcagccttaatggaaggttggatccaaggaggtgtaatggaatcggaatcaagccactcggcaggcatggagctataactaagcatccttagggttctgcctctccaggcattagccctcacattagatctagttactgtggtatggctaatacctgtcaacatttggaggcaatcctaccttgcttttgcttctagagcttagcatatctgattgttgtcaggccatattatcaatgtttacttttttggtactataaaagctttctgccacccctaaactccaggggggacaatatgtgccaatcaatagcacccctactcacatacacacacacctagccagctgtcaagggcagaatgaatctatgctggataagaaatggtggaactgcgttatgaagagctaatttactggacaaagaattccaaagcaaaaccagaacagtatgaatttgagcaggtctcataggttgagcaatttccccctaaaccaactgaaggctaaaaagcaacaggccattgtgaaccaatgcaagacgccctctatcatggtgaaaagctccatcaatgaggtatcttctttagtggtggtatgtaatggaacttagccatttttcaaagcaattgaaatgcattgctctggatctgttccttggcagtggactcagaaagccaacatgtggctcctcccagcccataaccagtatttttgctgcttctgaatacaaattggttggttttgacttcagattgaacttactgtagcctcagatgatttcccccctccgcctcccaggaagaaagaatgttactgccttaataaaaaatgaaaagagaatgatgctcaaaatctttccaaataaaatgttccctat

SEQ ID NO: 115772 - DNA, 1000 bp, Homo Sapiens
aaatgagagatgcagaattctaaggctaaatagctaggaagtattcattcaaacttgaatattcttcaaagagagtgtgggggcaactctaatcagaggaagaaactaaaggaagtaaaaccagatgttttccaccaaagccctccttttggctggtctgatttctaccgcactggcagggccatgggctaatatatgtgctggcaagtcttccaatgagatccggacgtgtgaccgccatggctgtggacagtactctgctcaaagaagtcagaggcctcaccagggtgtggacatcttgtgctctgctggatctactgtgtacgcaccattcactggaatgattgtgggccaggagaaaccttatcaaaacaagaatgctatcaataatggtgttcgaatatctggaagaggtttttgtgtcaaaatgttctacattaagccaattaagtataaaggtcctattaagaagggagaaaaacttggaactctattgcccttgcagaaagtttatcctggcatacaatcgcatgtgcacattgaaaactgtgactcgagtgaccctactgcatacctgtaaatcgaaggccaatggtcagatcttcaaaataaaaagtcatcttaaaaacctggatgcatacccttctcttcaagaaatttgtgttcacaaaggaaaaatgcatgaagggatggataccccattttccatgacatgattattacacattgcatgcctgtatcaaaacatctcacgtacctcataaacatatacacctatgtacccacaaaaattttttaattaaaaaaaggaaatttgagtttaaatagaaacatgataaatgcaagaaagaaaacattttgattttaactcattgtcactctgatgttcatgtgaactggttgcttcgggctctttgatctgtcacctatggaatctgagtggttttattttttagatttctcagtcccaaagatctaagataaataaacaagagaactt

SEQ ID NO: 115773 - DNA, 1000 bp, Homo Sapiens
ttgggacttgagatttgcagtgataccaacttatagcaatgatgtactttaagggaactacccaactatgttgtgatagaagaaagagaaaccttcactttggcatttttttttaatcactgtttatttttctgtttgcggcccaggaagcagtgggaggtggtggcagatatgctttgcatatggattgttatgtttttatttgggcaagtttaatcatggaaaactcaaaaagaaggggggaaatggtcagtttaagccaaaagaaactttctaaacaatgtataggtacacagcaaaattaaacaaatccaacaatttctgaagcttagtgtaattgagtggtggttgttattcaataaaattattcccaaaagtgtttctcctaagagtgcagttcccatgagtcacttcctgaacccattgaccaaaggtggacagagacaatcctgtagaccttgacattcagaaagatgtgagctgcttactgatcatatatgcatacgtttctttacagcagaggaaaccattgtccacaaaactgatgttcttttggggttttatgtacagacttgtccaatcatgtgtgtggttcctgcgagttgctgatgactccgcattgaagctctctgagttctttgattttaagttgggtttatggaattttttcaaatgttggaaggtgtgtggttcttcctgccctccctccccttttggaaatatgaaagcaaatgtttagaagaattccttttgaaaagctgtgtcgtgttccctgtgaaactgagcaggtgtgtgttggcgcgctaagtgccacatgcttgtgtgtagaggaggaggtggccctgccggctccgcgctgctgtgcctgtgatccctacctgctccccgctcctgttgccagcagcactcactgcactcctttgtcatatactctgcatcactgtcatactcacaacttcgtgaataaagttgtgtgctttattcgtagaaaaaaaaaaaa

SEQ ID NO: 115774 - DNA, 1000 bp, Homo Sapiens
tcaggaggaaagggaccctcccatcattcatggggggctgctacctgacccttggggcctgagaaggccttgcgggggtggggtttgtccacagagctgctggagcagcaccaagagccagtcttgaccgggatgaggcccacagacaggttgtcatcagcttgtcccattcaagccaccgagctcaccacagacacagtggagccgcgctcttctccagtgacacgtggacaaatgcgggctcatcagcccccccagagagggtcaggccgaaccccatttctcctcctcttaggtcattttcagcaaacttgaatatctagacctctcttccaatgaaaccctccagtctattatagtcacatagataatggtgccacgtgttttctgatttggtgagctcagacttggtgcttccctatccacagcccccaccccttgtttttcaagatactattattatattttcacagacttttgaagcacaaatttattggcatttaatattggacatctgggcccttggaagtacaaatctaaggaaaaaccaacccactgtgtaagtgactcatcttcctgttgttccaattctgtgggtttttgattcaacggtgctataaccagggtcctgggtgacagggcgctcactgagcaccatgtgtcatcacagacacttacacatacttgaaacttggaataaaagaaagatttatgaaacgtgtctgtgtttcctttgacccacagcacctgggccctgagcagcaggcttcctatgttcagtggccagaagcagagcttcaggtacattcgtggttttctccggtggacatgggtcctcagatcccctccagcccagtgtggccaccagggcacctccttcaatagactccaaaaggggcagctcctaccatctgggagaagcaatctaaggagatcacaaaaagtaacggaacaggagtcataatctttcttgaactcctgtggtttttactgaaacttg

SEQ ID NO: 115775 - DNA, 1000 bp, Homo Sapiens
ggtgaggggctcggacggagccgtggggggacagcgactgggggcctccatgccttcaccacgcgctctacggaggcttctccattgtccctgctggagattgggtccctcggtctcccttgcaccaggcacccttgggctccaggggagggtgcgtgggggcggtgtggctgcagcctcagtccctgcccctccagcccacagcccccatcccgtagcccttcctggatctggagagagcagctgctgctgccccaccacctgccaggcccggccactgagcagccccccggagccccagatccccgttccccccaggtggcctgggaggtggccccctcgaggatgactccactagcgccctgggaccccaagtatgaagccaaagcaggacctcggccggtgtggggggccaactgtagctcaggagcctcgttctcaggccggacgctgtgtcacccctcattctggccgctgtatgaagcagcctcgggcaggggtctcaggcccgtggcccctgccacagggcactggaatggacagcaggcgcccccagatgcagggttcccggtggtgtgctgtgaagatgtcttcctctcggaccctctgctgccccgggggcagcgtgttcccctgtacctgtccaaggccccccagcagatgatgggctccctgaaactgctgccgccgccccccatcatgtctgccagggtgctcccccgcccatcaccctcccggggcccctccactgcctggctcagcgggccggagctgatcgctctcactggcctgctgcagatgagccagggggagcctaggcccagctcctccgcggttggccccccagaccatacctctgacccacccagcccctgtggtagccccagcagttctcagggtgctgacctctctctcccacagaccccagacacccattgtccatagccttctcagggcagagtgggctggttgtgttgacaataaaacagtgttggtttgc

SEQ ID NO: 115776 - DNA, 1000 bp, Homo Sapiens
aggcggagagcctgatgatgtgggaggcctactggacgctgactttgccctggaccctgacaagcccaccaacttcaccaaccccgtgtatgccacactctacatggggggccatggcagtcgccactccctggccagcacggacgagaagcgagaactcctgggccggggccctgaggacgagataggggaccccttggcatagggccctgccccgtcggactgcccccagaaagcctcctgccccctgccggtgaagtccttcagtgagcccctccccagccagcccttccctggccccgccggatgtataaatgtaaaaatgaaggaattacattttatatgtgagcgagcaagccggcaagcgagcacagtattatttctccatcccctccctgcctgctccttggcacccccatgctgccttcagggagacaggcagggagggcttggggctgcacctcctaccctcccaccagaacgcaccccactgggagagctggtggtgcagccttcccctccctgtataagacactttgccaaggctctcccctctcgccccatccctgcttgcccgctcccacagcttcctgagggctaattctgggaagggagagttctttgctgcccctgtctggaagacgtggctctgggtgaggtaggcgggaaaggatggagtgttttagttcttgggggaggccaccccaaaccccagccccaactccaggggcacctatgagatggccatgctcaacccccctcccagacaggccctccctgtctccagggcccccaccgaggttcccagggctggagacttcctctggtaaacattcctccagcctcccctcccctggggacgccaaggaggtgggccacacccaggaagggaaagcgggcagccccgttttggggacgtgaacgttttaataatttttgctgaattctttacaactaaataacacagatattcttataaataaaattgtaaaaaaaaaaa

SEQ ID NO: 115777 - DNA, 1000 bp, Homo Sapiens
taccaccaaactcatcgacaggaccgagtccctaaaccgctccatagagaagagtaacagtgtgaagaaatcccagccagacttgcccatctccaagattgatcagtggctggaacaatacacccaggccatcgagaccgctggccggacccccaagctagcccgccaggcctccatagagctgcccagcatggctgtggccagtaccaagagtcggtgggagacgggtgaggtacaggctcagtctgcggccaagactccgtcctgcaaggatattgtggctggagacatgagcaagaaaagcctctgggagcagaagggaggctccaagacctcatcaacaattaagagcaccccatctgggaagaggtataagtttgtggccaccgggcatgggaagtatgagaaggtgcttgtggaagggggcccggctccctaggcgtcccatctcgcttcctgggtctgcaggtccagccggctggcaccctccatgtacccaggggagattccagccagacacccgccccccggccctggctaagaagttgcttcctgttgccagcatgacctaccctcgcctctttgatgccatccgctgccacctccttttgctcctggaccctttagcctctctgcccttccactctctgaccaccgcccccgccctccccacccagctccgcttcttgttacttgggggaggaaagaaactcctgatcattggccaaagggacttacccctggagaggccaagtgccttctaggaagttaggaggttgaggcacagcctgtgcagagagggtgggtcacccccccagatccaaggagaaactgcaggtcaagggctgataacggccatgcaggatgcttgatgctgcgtcccccgctgcttgccgccccccaccccgccattttgtataataaagctccctgtgtattctcaaaaaaaaaaaaaaaaaaaaaaaaaaaaaaaaaaaaaaaaaaaaaaaaaaaaaaaaaa

SEQ ID NO: 115778 - DNA, 1000 bp, Homo Sapiens
atagtggaatacctggaaattctttcaatgtgtcatccctggttgagctggatctgtcctataacaagcttaaaaacataccaactgtcaatgaaaaccttgaaaactattacctggaggtcaatcaacttgagaagtttgacataaagagcttctgcaagatcctggggccattatcctactccaagatcaagcatttgcgtttggatggcaatcgcatctcagaaaccagtcttccaccggatatgtatgaatgtctacgtgttgctaacgaagtcactcttaattaatatctgtatcctggaacaatattttatggttatgtttttctgtgtgtcagttttcatagtatccatattttattactgtttattacttccatgaattttaaaatctgagggaaatgttttgtaaacatttattttttttaaagaaaagatgaaaggcaggcctatttcatcacaagaacacacacatatacacgaatagacatcaaactcaatgctttatttgtaaatttagtgtttttttatttctactgtcaaatgatgtgcaaaaccttttactggttgcatggaaatcagccaagttttataatccttaaatcttaatgttcctcaaagcttggattaaatacatatggatgttactctcttgcaccaaattatcttgatacattcaaatttgtctggttaaaaaataggtggtagatattgaggccaagaatattgcaaaatacatgaagcttcatgcacttaaagaagtatttttagaataagaatttgcatacttacctagtgaaacttttctagaattatttttcactctaagtcatgtatgtttctctttgattatttgcatgttatgtttaataagctactagcaaaataaaacatagcaaatggcatcactgtgtttgacttcttgtgaaatttctgtactttgtatataaaatacataaaacaatagattagaaatcaaaagatatctctggcctgca

SEQ ID NO: 115779 - DNA, 1000 bp, Homo Sapiens
tcttgccagtgctgctggctgcccttctgggtgtggagcgagccagctcgctgatgtgcttctcctgcttgaaccagaagagcaatctgtactgcctgaagccgaccatctgctccgaccaggacaactactgcgtgactgtgtctgctagtgccggcattgggaatctcgtgacatttggccacagcctgagcaagacctgttccccggcctgccccatcccagaaggcgtcaatgttggtgtggcttccatgggcatcagctgctgccagagctttctgtgcaatttcagtgcggccgatggcgggctgcgggcaagcgtcaccctgctgggtgccgggctgctgctgagcctgctgccggccctgctgcggtttggcccctgaccgcccagaccctgtcccccgatcccccagctcaggaaggaaagcccagccctttctggatcccacagtgtatgggagcccctgactcctcacgtgcctgatctgtgcccttggtcccaggtcaggcccaccccctgcacctccacctgccccagcccctgcctctgcccaagtgggccagctgccctcacttctggggtggatgatgtgaccttccttgggggactgcggaagggacgagggttccctggagtcttacggtccaacatcagaccaagtcccatggacatgctgacagggtccccagggagaccgtgtcagtagggatgtgtgcctggctgtgtacgtgggtgtgcagtgcacgtgagagcacgtggcggcttctgggggccatgtttggggagggaggtgtgccagcagcctggagagcctcagtccctgtagccccctgccctggcacagctgcatgcacttcaagggcagcctttgggggttggggtttctgccacttccgggtctaggccctgcccaaatccagccagtcctgccccagcccacccccacattggagccctcctgctgctttggtgcctcaaataaatacagatgtcccc

SEQ ID NO: 115780 - DNA, 1000 bp, Homo Sapiens
tgaaggtggcaaagtgctgcttccaaagctcattgacttttctgctcagattgcagagggaatggcatacatcgagcggaagaactacattcaccgggacctgcgagcagctaatgttctggtctccgagtcactaatgtgcaaaattgcagattttggccttgctagagtaattgaagataatgagtacacagcaagggaaggtgctaagttccctattaagtggacggctccagaagcaatcaactttggatgtttcactattaagtctgatgtgtggtcctttggaatcctcctatacgaaattgtcacctatgggaaaattccctacccagggagaactaatgccgacgtgatgaccgccctgtcccagggctacaggatgccccgtgtggagaactgcccagatgagctctatgacattatgaaaatgtgctggaaagaaaaggcagaagagagaccaacgtttgactacttacagagcgtcctggatgatttctacacagccacggaagggcaataccagcagcagccttagagcacagggagacccgtccatttggcaggggtggctgcctcatttagagaggaaaagtaaccatcactggttgcacttatgatttcatgtgcggggatcatctgccgtgcctggatcctgaaatagaggctaaattactcaggaagaacaccctctaaatgggaaagtattctgtactcttagatggattctccactcagttgcaacttggacttgtcctcagcagctggtaatcttgctctgcttgacaacatctgagtgcagccgtttgagaagaaaacatctattctctccaaaaatgcacccaactagctctatgtttacaaatggacataggactcaaagtttcagagaccattgcaatgaatccccaataattgcagaactaaactcatttataaagctaaaataaccggatatatacatagcatgacatttctttgtgctttggcttacttgttt

SEQ ID NO: 115781 - DNA, 1000 bp, Homo Sapiens
tgtatcccctttcggtccaacaacaggaaacctgactggggcagtgaaggaagggatggcacagcgttatgtgtaaaaaacaagtatctgtatgacaacccgggatcgtttgcaagtaactgaatccattgcgacattgtgaaggcttaaatgagtttagatgggaaatagcgttgttatcgccttgggtttaaattatttgatgagttccacttgtatcatggcctacccgaggagaagaggagtttgttaactgggcctatgtagtagcctcatttaccatcgtttgtattactgaccacatatgcttgtcactgggaaagaagcctgtttcagctgcctgaacgcagtttggatgtctttgaggacagacattgcccggaaactcagtctatttattcttcagcttgcccttactgccactgatattggtaatgttcttttttgtaaaatgtttgtacatatgttgtctttgataatgttgctgtaattttttaaaataaaacacgaatttaataaaatatgggaaaggcacaaaccagaagtcggcatttgtgaaaagtccctccagatttctatcactttggtctctaatttcccaagacttgtattttttttttatttcaaattataacacttttttttcccccagaagtgggtgtttcatgttgctactctggtgtgtcccaagatatcctaactggccagtgtaaatgctattctttctaaataagattatttggaaacttccttcaaactgcaggagggcgagctctgagggcacgagaagctaaaactagctgcttttgatgaaaaagagtgccagtctttggtcatctctaaacaaggcttatcaccaatggagacagaaaactctagttcaagagctgtacctcctttgaatcccagccctactcgaaataagtggtactatttccatttagcctttgagcaaatcacttaactcaaaggcgttgtggctctaagattaaacgacttt

SEQ ID NO: 115782 - DNA, 1000 bp, Homo Sapiens
tttacagtctatttcttcccccaagtcttggtctttttttattttctattttttcatgaaccacacaggagactttaacatcctggtcttttctgtttcttctttgtttccccaagtttgtctgtccccctttgccttccctgagtgttgaacatcaggtagtaaaaggctaaacgcaatttcttgcatgtcaatctattctttttctatgtttgactctgatgcagtgtgtttagcgtgtctagtagctggctactcctatttaaaaactcttcctggtagaagacaacccaaagacccttttcgatgaggtggtttctcattctacatcctctgatctctatagactgtaggatgctttgctttcaaagataactgggttagagggtggggtgtgcaataggtgatttatcatggtttttttcattatcaatattacatggatgattttctcagattcttctgaaagaagaaattgacaggcactgctagattcagctattgaatggctgaagagattgagtatttgaccttctctcaaaatcataaagtgagaattcataaggcacccaatgttaagatttatccagatttttacattttgatttcttctctctgtggggtggcaagttgagggagcattcttcattttagcttttacctgacaaccaaacttgcctttaccccatccctagaattggtgctcttggaatattgctgttaccatcatttttggggggccatcttcctaatgctacacacagcctgacaggggagcagcagatgaaagggtatgctattctgtttccagatgtttctttatgtaaatatgacgccaatgtaaatcctgtgtcaagatcatagagaatggtgctttttactacagttagcacatgcatttttagaaactactacatgttttagagaatctttgctgtgtatatgtaaactgtattgttcaactgttaacaaataataaattatttcattattaaagaaa

SEQ ID NO: 115783 - DNA, 1000 bp, Homo Sapiens
tcaaaggtgggcaatgggcactccaatgaggcagccttgatcctccacagaaaagggtttgattgtcggttctctagcaaaggcacagggctgttttgttctactactcagggaaagatattggtacagaaacttttaaacaagtttattgtcgaaagtctcacaccttcatcactatccttgatgcattcacctcccggcactcagaatataagtgagatcaacttgagtccaatggaaatcagcacattccgaatccagttgaggtgaacctgactttcacatttggattgagaatcattggcttttatacctttcttggtttgacgtgcaataaagaagcacattattttagcttctggctactgtgagaacatgaattctgtgattctgtgggttttttcttttttcttttaccagtacagtaagaaaaaaaaaaaaaaaaaaaaagccatgctatcaatcaagattctttttttttaaactttctcccatgaactaccaccatcagtatgaattgatgcaacaaatgaagaaatatttaaagacagcctctcaacagattgtatctcaggttaaatgctaactaattatgtctgtgttgggggttgcgaagagattcttaaaagtatctgtgtgttgatcatcagttttacaaaaacacctatttggctgaaatggaataaaatgtttgtgggtaaaagctaatggccaaaatggttgcaatcattcatactagttagaaaaattatgtgttgaaataagtggaaaagtgcaatccatccacccttatgattaacgtagatgatttttatacctttttctgatgtacctcttgaccttctccttcccttcctaccctttctaagtatttccagaaatacctgattttgaatcattcaacagtagaaaaagaggcatattttcattacttgacaatgtgggatgggtgcaatttattccatcttcactaaaatagaagcaattccataggtaccat

SEQ ID NO: 115784 - DNA, 1000 bp, Homo Sapiens
tctctttagtaaattaacttcaaaactcacaaggagtcgcaatgtatctgctgagcaaaaagatgaaaacaaagaagcaaagcctcgatccctacgcttcacctggagcatgaaaaccactagttcaatggatcccggggacatgatgcgggaaatccgcaaagtgttggacgccaataactgcgactatgagcagagggagcgcttcttgctcttctgcgtccacggagatgggcacgcggagaacctcgtgcagtgggaaatggaagtgtgcaagctgccaagactgtctctgaacggggtccggtttaagcggatatcggggacatccatagccttcaaaaatattgcttccaaaattgccaatgagctaaagctgtaacccagtgattatgatgtaaattaagtagcaattaaagtgttttcctgaacactgatggaaatgtatagaataatatttaggcaataacgtctgcatcttctaaatcatgaaattaaagtctgaggacgagagcacgcctgggagcgaaagctggccttttttctacgaatgcactacattaaagatgtgcaacctatgcgccccctgccctacttccgttaccctgagagtcggtgtgtggccccatctccatgtgcctcccgtctgggtgggtgtgagagtggacggtatgtgtgtgaagtggtgtatatggaagcatctccctacactggcagccagtcattactagtacctctgcgggagatcatccggtgctaaaacattacagttgccaaggaggaaaatactgaatgactgctaagaattaaccttaagaccagttcatagttaatacaggtttacagttcatgcctgtggttttgtgtttgttgttttgtgtttttttagtgcaaaaggtttaaatttatagttgtgaacattgcttgtgtgtgtttttctaagtagattcacaagataattaaaaattcactttttctcagtaaaaaaaaaaaaaaaaaa

SEQ ID NO: 115785 - DNA, 1000 bp, Homo Sapiens
gaggcttctacagactgtaggattcaagtctgcagggcaggcactcgggaagggaagatggatgtaaagtgtgggagaccgaggacacagtggagcccacgagcacgagctggaacccacgaggatggcctggaacccatgtcagtctctcaccacctccagcttcgatgatgtgggtgtcctgcagaagaagctggtgcccttcctcacagagttaaatatgcatctggcccaggaattagagaagctgaaaggatgatcctggggaaggtggagcagctgcaggcctggctgcaggcctgactactgcccacaccaacgaggtgatctagcagatacatggcaacgtgtgaactgcaacaacgcctggtgccccagcaccaaccttccaagtgtaaaaacaatgtgctgctgcttcacttccgccctccggttatcaagcaaaatgtctcttgtggcccatcttactggaagagagttccgggaaacatagcctcaccaaggtgacacattacaaagccaccctaccatgaatccgctcccaagggtctcactgctcacctgaggataactcaatataactatgttgctgaaaatgcaaagctgaagaccatggatttcatggtgattccagcaagtacagagattctatgaagcccacccagaaaaaacttgctggtcctggctatttttgtgtcatttattcaagtattgagaacctggcctgtggtaggcactgtacttaatactaggatacagaaatgcaaaagatacggcccatgcaattttattaaatgcatcaatatgtattacaaatggtgaatggatttccaactttatcatggaatttaatgctgaatatatagaattcagaaaattgttgggaggacagcccttttgtgaaccttgtttggggcacagtaggaattggaaataatttagtttctatctctaagctgttctattttaaaattatttttaaatttttattgtcccactt

SEQ ID NO: 115786 - DNA, 1000 bp, Homo Sapiens
ggagaaaagccaagaggaccaggagcagaagaggaagagaaggaagactcgccagccagatgccaaagatggggattcatacgacccctatgacttcagtgacacagaggaggaaatgcctcaagtacacactccaaagacggcagactcacaggagaccaaggaatcccagaaagtggagttgagtgaatccaggttgaaggcattcaaggtggccctcttggatgtgttccgggaagctcatgcgcagtcaatcggcatgaatcgcctcacagaatccatcaaccgggacagcgaagagcccttctcttcagttgagatccaggctgctctgagcaagatgcaggatgacaatcaggtcatggtgtctgagggcatcatcttcctcatctgaggaggcctcgtctctgaacttgggttgtgccgagagagtttgttctgtgtttcccaccctctccctgacccaagtctttgcctctactcccttaacagtgttgaattcaactgaaggcgaggaatgttggtgatgaagctgagttcaggactcggtggaccctttgggaatgggtcatgaaagctgccatggggtgaggaaagaggagacagtgggagaggacaatgactattgcatcttcattgcaaaagcactggctcatccgccctacttcccatcccacacaaacccaattgtaaataacatatgacttctgagtacttttgggggcacaactgttttctgtttgctgtttttttgttttgttttttttctccagagcactttggtctagactaggctttgggtggttccaattggtggagagaagctctgaggcacgtcatgcaggtcaagaaagctttctttgcagtagcaccagttaaggtgaatatgtattgtatcacaaaacaaacccaatatccagatgaatatccgagatgttgaataaacttagccatttcgtacacatggtaaaaaaaaaaaaaaaaaaaaaaaaaaaaaaaa

SEQ ID NO: 115787 - DNA, 1000 bp, Homo Sapiens
atactagtttctttcatgctatttttattttgttttttgcatttttatcaaatgcagggcccctttctgatctcaccatttcaccatgcatcttggaattcagtaagtgcatatcctaacttgcccatattctaaatcatctggttggttttcagcctagaatttgatacgctttttagaaatatgcccagaatagaaaagctatgttggggcacatgtcctgcaaatatggccctagaaacaagtgatatggaatttacttggtgaataagttataaattcccacagaagaaaaatgtgaaagactgggtgctagacaagaaggaagcaggtaaagggatagttgctttgtcatccgtttttaattattttaactgacccttgacaatcttgtcagcaatataggactgttgaacaatcccggtgtgtcaggacccccaaatgtcacttctgcataaagcatgtatgtcatctattttttcttcaataaagagatttaatagccatttcaagaaatcccataaagaacctctctatgtccctttttttaatttaaaaaaatgactcttgtctaatattcgtctataagggattaattttcagaccctttaataagtgagtgccataagaaagtcaatatatattgtttaaaagatatttcagtctaggaaagattttccttctcttggaatgtgaagatctgtcgattcatctccaatcatatgcattgacatacacagcaaagaagatataggcagtaatatcaacactgctatatcatgtgtaggacatttcttatccattttttctcttttacttgcatagttgctatgtgtttctcattgtaaaaggctgccgctgggtggcagaagccaagagaccttattaactaggctatatttttcttaacttgatctgaaatccacaattagaccacaatgcacctttggttgtatccataaaggatgctagcctgccttgtactaatgttttatatatt

SEQ ID NO: 115788 - DNA, 1000 bp, Homo Sapiens
acgttgtttcttatagattttttaaaaaaaatgtgaaatttttccacactatgtgtgttgtttccatagctcttcacttcctccagaagcctccttacattaaaaagccttacagttatcctgcaagggacaggaaggtctgatttgcaggatttttagagcattaaaataactatcaggcagaagaatctttcttctcgcctaggatttcagccatgcgcgcgctctctctctttctctctcttttcctctctctccctctttctagcctggggcttgaatttgcatgtctaattcatttactcaccatatttgaattggcctgaacagatgtaaatcgggaaggatgggaaaaactgcagtcatcaacaatgattaatcagctgttgcaggcagtgtcttaaggagactggtaggaggaggcatggaaaccaaaaggccgtgtgtttagaagcctaattgtcacatcaagcatcattgtccccatgcaacaaccaccaccttatacatcacttcctgttttaagcagctctaaaacatagactgaagatttatttttaatatgttgactttatttctgagcaaagcatcggtcatgtgtgtattttttcatagtcccaccttggagcatttatgtagacattgtaaataaattttgtgcaaaaaggactggaaaaatgaactgtattattgcaatttttttttgtaaaagtagcagtttggtatgagttggcatgcatacaagatttactaagtgggataagctaattatactttttgttgtggataaacaaatgcttgttgatagcctttttctatcaagaaaccaaggagctaattattaataacaatcattgcacactgagtcttagcgtttctgatggaaacagtttggattgtataataacgccaagcccagttgtagtcgtttgagtgcagtaatgaaatctgaatctaaaataaaaacaagattatttttgtcaaaaaaaaaaaaaaaaaa

SEQ ID NO: 115789 - DNA, 1000 bp, Homo Sapiens
tctgacaccaccccggcctgcctctttgttgccatgagagctgcctacctcttcctgctattcctgcctgcaggcttgctggctcagggccagtatgatctggacccgctgccgccgttccctgaccacgtccagtacacccactatagcgaccagatcgacaacccagactactatgattatcaagaggtgactcctcggccctccgaggaacagttccagttccagtcccagcagcaagtccaacaggaagtcatcccagccccaaccccagaaccaggaaatgcagagctggagcccacagagcctgggcctcttgactgccgtgaggaacagtacccgtgcacccgcctctactccatacacaggccttgcaaacagtgtctcaacgaggtctgcttctacagcctccgccgtgtgtacgtcattaacaaggagatctgtgttcgtacagtgtgtgcccacgaggagctcctccgagctgacctctgtcgggacaagttctccaaatgtggcgtgatggccagcagcggcctgtgccaatccgtggcggcctcctgtgccaggagctgtgggagctgctagggtggtgctggcatcctgagtcctggccctcctgggatctggggccctcgggctacctgacctggtgcttttttccccatccccatgttccttttattctgaaaaagttagtggactgcagccctgggggttgcaggctgcggtgcctcaggcccctccttcagcctgtggccacctctggggcacgatgggggctccccactgcccagtctgcccctcgggttgggggagtatcccaggcctctctgtgggacctgggcctgacgggcccttctcagcccgttttgaggacagacagtcccccgaggtaggctacatccccccaccccagctggtctgcttggatttcctacagcccccgtgggcatggaccacctttattttatacaaaattaaaaacaagtttttacaaaaa

SEQ ID NO: 115790 - DNA, 1000 bp, Homo Sapiens
cccttctccccggaggaggacccctccagatttcgctccctccattgtctgctctatccagatacaccctggtgtccccagctgggtgcccgatgaatcctgaactgctgggcaaaggttgggcagagacttctgggtgtgccttggctcccaaggtggcactgtgggtccctggcaagtgtcttgtgataggcagtccctggcagggccttcgggtggttggcaagcccaggatctgagtggcaattggcactgaaggcaccccaggcccctgggaggtgagttagacagcccaggggaccaggtggaccaggtggtggccagagaggctccaggggctagactccctcaggaggctgaattgaaaaagggcagggggcacttgagctgggctggggctcaggggtcctaaccctttaggcagtgacatggcctctgggtggggtctggccgttggccctggctaatgtctctcagtcattcccctggggctcaagcgctgggccgcccactcctgcctccctcatctgtgtcccgagttcctgaagggacatgggtggaatgatggcagaatccagggtctgcagcacctgctgttgttgccaaccagtctcccaaagctccttgctccccaccccttgcgaacaggaccagattttgtttggagcctcagcatgccggggcccagatgatggagcataacgggtcccagccaattgtgatgatcctttttgctcatttcccagcctttcttgctgttaggggctaccatgggaccagctctggccagagggaactaagcaaatccaatagagatgtttctggggaaggttttgcagcccactccccatcttcctgctataaatgtgggtgtgatggctggatctggggcagccaccttgctaccatgaaggaaaggccaagacaatcatccacagctattccctccagcatctggttctgtacaaaaattaaatgcttatttgtttaagtcaaaaaa

SEQ ID NO: 115791 - DNA, 1000 bp, Homo Sapiens
atttatctttttgatttttccgagtggcatttaagtgcacaaatgataacaagaggattattctcccgttctcaagggagtcagatcaggggaactattctagggtatgttgcggggtattaagcaggaaaccactgtgtggtggggggcactgggcttgttggggccagaaatgtccacgtcctgagctttctcctggagcatgtgcagagagtttggcaacgttcgctctcttgaccagaccccttctccctgacctggctcttccagccagggcacgagccctccttctatacctgctccccttcccccagtggggactgagttatgggagaaggggacatatttgtggccaaaatgatactaaccaaaggggcttccttgtcagggcctggtggagttggtgggtcatcggggctcactgcctcctgcccttctctcctgtctgacccccacttagcccttctctccttgcagcctagcagtttatagttctgagatggaaagttgaagggggcaagcaagacctctcctcagcccatgcccagctgtcaggagagaggtgcagggaggaaggccttgtgctgggacaacctctctcttgccttacctcagagagggactatgccctgacccctcctttctgaaaatcagtgccctccctgttgctctaggaggctcctgctggcttggtagaagacagaattcgatctgcctgtccctttttcccctggggtttgacacacaggctcctctcagcatgaggtggagcagtgaccaggtggagcagtgaccaggacgcctctggcccagtgctgcccagcctccccgcccgctcccaggcgccccatgtcctcacaggccaggacgccatggcaggatggagaggacttggtggatttttgtttcttgcctgacctcagtttcatgaaagaaagtggaagctacagaattattttctaaaataaaggctgaattgtctgaaaaaaaaaaaaaaaaa

SEQ ID NO: 115792 - DNA, 1000 bp, Homo Sapiens
ctaactatcagtgaaaagtttactgtggtagccatttccccacctagaaaaaatggagggtggggagatattagggaccatgaactctgtaaaagttatagaagactgcagtgaaaatcacagttacaaaagcgacagtcttctatttttgatatttgtccaaacaggacatacaattgaataaaagagtttaggaactggtttctgctttaatacaaaaacaaaatcttgtaaaaggtgtccaaatacatagtaatcttttccagttatgtctgattaagatttaaaactgaaggtttcattttgggagtagggttttaaagctcaatctgttatctgctaaaattgattattgttgatatgagagaagaggggaaattttatttaaattgcatttattaatctttttatctgaaactttgtacacttttccactttcaaaacctattttaagtacagcaaaatttatttaaaactgtcatagcagtaaaaagtattacgatgaaattgttagggtattaatggaacaaacccagtttcactctcttgacacacttattaggaagggattgcttcactggtttaataatttaaaagttatgtttgttaaacaccctgtcagaacagtcattttcagtattagattcctgtactattgtgttttgagtgtgttttggaaccttcatagaacacactttcttttggaatgtatttgattgataagaaagtttaaacattgttttcacctcaatgtagaaatacagtggttttgtttttttttttcttttagtgctgacaaaataaaatactcatttttgcataaaaaggttcctaatccttttgcagaataagttttgtttactctttataccaaaattcagtgaaggcattctacaagttttgagttagcattacattttaatatttactattgctacattgtataattgagtttgaaataaaacccagcttatgacaatgcaaaaaaaaaaaaaaaaaa

SEQ ID NO: 115793 - DNA, 1000 bp, Homo Sapiens
gctcatctgcttctcgctcaagacgcccgactccccgcccactcctgcacccctgttgctggacctgggtatccctgtgggccagcggtcagccaagagcccccgacgtgaggaggagccccgcggaggcactgtctcacccccaccggggacatcacgctctgctcctggcaccccaggcaccccacgttcaccacccctgggcctcatcagccgacctcggccctcgccccttcgcagccgcattgatccctggagctttgtgtcagctgggccacggccttctcccctgccatcaccacagcctgcaccccgccgagcaccctggaccttgttcccggactcagaccccttctgggactccccacctgccaaccccttccaggggggcccccaggactgcagggcacagaccaaagacatgggtgcccaggccccgtgggtgccggaagcggggccttgagtgggccaggccactcccccgagctccagctgccttaggaggagtcacagcatacactggaacaggagctgggtcagcctctgcagctgcctcagtttccccagggaccccacccccctttgggggtcaggaacactacactgcacaggaagccttcacactggaagggggacctgcgcccccacatctgaaacctgtaggtccccccagctcacctgccctactggggcccaacactgtacccagctggttgggaggaccagagcctgtctcagggaattgcctgctggggtgatgcagggaggaggggaggtgcagggaagaggggccggcctcagctgtcaccagcacttttgaccaagtcctgctactgcggcccctgccctagggcttagagcatggacctcctgccctgggggtcatctggggccagggctctctggatgccttcctgctgccccagccagggttggagtcttagcctcgggatccagtgaagccagaagccaaataaactcaaaagctgtctccccacaa

SEQ ID NO: 115794 - DNA, 1000 bp, Homo Sapiens
ctacatgcgcacaaatcccttctacccggaagttgagctcaatttcatttctgttttctggccacaactgccaaatgggcttgaagctgcttacgaatttgccgacagagatgaagtccggtttttcaaagggaataagtactgggctgttcagggacagaatgtgctacacggataccccaaggacatctacagctcctttggcttccctagaactgtgaagcatatcgatgctgctctttctgaggaaaacactggaaaaacctacttctttgttgctaacaaatactggaggtatgatgaatataaacgatctatggatccaggttatcccaaaatgatagcacatgactttcctggaattggccacaaagttgatgcagttttcatgaaagatggatttttctatttctttcatggaacaagacaatacaaatttgatcctaaaacgaagagaattttgactctccagaaagctaatagctggttcaactgcaggaaaaattgaacattactaatttgaatggaaaacacatggtgtgagtccaaagaaggtgttttcctgaagaactgtctattttctcagtcatttttaacctctagagtcactgatacacagaatataatcttatttatacctcagtttgcatatttttttactatttagaatgtagccctttttgtactgatataatttagttccacaaatggtgggtacaaaaagtcaagtttgtggcttatggattcatataggccagagttgcaaagatcttttccagagtatgcaactctgacgttgatcccagagagcagcttcagtgacaaacatatcctttcaagacagaaagagacaggagacatgagtctttgccggaggaaaagcagctcaagaacacatgtgcagtcactggtgtcaccctggataggcaagggataactcttctaacacaaaataagtgttttatgtttggaataaagtcaaccttgtttctactgtttt

SEQ ID NO: 115795 - DNA, 1000 bp, Homo Sapiens
aggctcaggactatctcaagagattttatctctatgactcagaaacaaaaaatgccaacagtttagaagccaaactcaaggagatgcaaaaattctttggcctacctataactggaatgttaaactcccgcgtcatagaaataatgcagaagcccagatgtggagtgccagatgttgcagaatactcactatttccaaatagcccaaaatggacttccaaagtggtcacctacaggatcgtatcatatactcgagacttaccgcatattacagtggatcgattagtgtcaaaggctttaaacatgtggggcaaagagatccccctgcatttcaggaaagttgtatggggaactgctgacatcatgattggctttgcgcgaggagctcatggggactcctacccatttgatgggccaggaaacacgctggctcatgcctttgcgcctgggacaggtctcggaggagatgctcacttcgatgaggatgaacgctggacggatggtagcagtctagggattaacttcctgtatgctgcaactcatgaacttggccattctttgggtatgggacattcctctgatcctaatgcagtgatgtatccaacctatggaaatggagatccccaaaattttaaactttcccaggatgatattaaaggcattcagaaactatatggaaagagaagtaattcaagaaagaaatagaaacttcaggcagaacatccattcattcattcattggattgtatatcattgttgcacaatcagaattgataagcactgttcctccactccatttagcaattatgtcacccttttttattgcagttggtttttgaatgtctttcactccttttaaggataaactcctttatggtgtgactgtgtcttattcatctatacttgcagtgggtagatgtcaataaatgttacatacacaaataaataaaatgtttattccatggtaaatttaaaaaaaaaaaaaaaaaaaaaaaaaaaaa

SEQ ID NO: 115796 - DNA, 1000 bp, Homo Sapiens
gagaatacaatgatttcttggaagaagtggaagaaattgttttcaacttgaccaacaatgtggatttggacaacaccaaaaagaaaatggagatataccaaaaggaaaacaaagatgttattcagaaaaataaattaaagctgactcgagaacaggaagaactggaagaagctttagaagtggaacgacaggaaaatgaacaaagaagattatttatacaaaaagaagaacaactgcagcagattctaaaaaggaagaataagcaggcttttttagatgagctggagagttctgatctccctgttgctctgcttttggctcagcataaagatagatctacccaattagaaatgcaacttgagaaacccaaacctgtaaaaccagtgacgttttccacaggcatcaaaatgggtcaacatatttcactggcacctattcacaagcttgaagaagctctgtatgaataccagccactgcagatagagacatatggaccacatgttcctgagcttgagatgctaggaagacttgggtatttaaaccatgtcagagctgcctcaccacaggaccttgctggaggctatacttcttctcttgcttgtcacagagcactacaggatgcattcagtgggcttttctggcagcccagttaaccatttataagatttggaccttggagctgaaccagggagctagcaaaagtaaagcagacttataaaattatagctatgtgcagctgcacaacacagtccttccactagcagctgtgttaaagtatttataaggagaaaatttcagaactaagttgagtaatataggggatatatatttgtgaaaaataatttttacttatatttttcagaggatttgacacgataagcctcatctgatggaagagaggaataaataattcacctatatgtgtttgaggttgtgacagacttataaaatctttttaaaaaataaagctataatttatattaaaaaaaaaaaaaataaa

SEQ ID NO: 115797 - DNA, 1000 bp, Homo Sapiens
tgatgctaaacctactcatgaattacttacaacaaaagctgacacaaggaagatggacccttctaaaccgtcttccaacgtggccggagtagtcatcattgtgatcctcctgattttaacgggtgctggccttgccgcctatttcttttataagaaaagacgtgtgcacctacctcaagagggcgcctttgaaaacactctgtattttaacagtcagtcaagcccaggaactagtgatatgaaagatctcgtgggcaatattgaacagaatgaacactcggtcatctagtacctcaatgcgattctgagatatttgaatttcataaaattgtaactgaaatttaaaatttttagttcaatgtgattgttttctttaaaatgagtactgaattgtactggtctgtccttttttcctttgcctaattgaagaaataattgcttgttttctagcctggcaagatattttcataaaagagggataacaatgctgattactaccttttaaaatattttagataaatgcacagcaccacagcaccacatctaagcattagtgatgggtagctgatgtcagcttcatgtggattttaagcactctagaaacaatgaagcttcttggcatattttaaggagctcccaaaatgtgttacctattaaattgtaactcagcaagtagaagaccatttgaaaagtcaggtacaaatttcctcaagtggcataaaaatgtagtcagttttctcttttaccagtttttatttccactccaattatttagaactttatttgtacatgtgcagaagaataaggcagctgagaatcttgtttcccccaagagagttttacaggctgagtgttgcaaatgtgttctttgtcctgttatatgtatatcaggaatacaaggatgtgaaataaaactgtaaatttgcataactggatgtacttagataatgtgaaataaacattaaagacaaggtctatttttaataaaaaaaaaaaaaaa

SEQ ID NO: 115798 - DNA, 572 bp, Homo Sapiens
gtacctgtctataaggagtcctgcttatcacaatgaatgttctcctgggcagcgttgtgatctttgccaccttcgtgactttatgcaatgcatcatgctatttcatacctaatgagggagttccaggagattcaaccaggaaatgcatggatctcaaaggaaacaaacacccaataaactcggagtggcagactgacaactgtgagacatgcacttgctacgaaacagaaatttcatgttgcacccttgtttctacacctgtgggttatgacaaagacaactgccaaagaatcttcaagaaggaggactgcaagtatatcgtggtggagaagaaggacccaaaaaagacctgttctgtcagtgaatggataatctaatgtgcttctagtaggcacagggctcccaggccaggcctcattctcctctggcctctaatagtcaatgattgtgtagccatgcctatcagtaaaaagatttttgagcaaacacttgaatatgtgtgtccttttaatttataatttatgtatgcattgatttaatacacattataaagaatacaaaacatttaaaaa

SEQ ID NO: 115799 - DNA, 1000 bp, Homo Sapiens
caccctccgcaaacacaagacgaaccgtaagccgcggacgcccttcaccaccgcgcagctgctggcgctggagcgcaagttccgccagaagcagtacctgtccatcgccgagcgcgcggagttctccagctcgctcagcctcactgagacgcaggtgaagatatggttccagaaccgccgcgccaaggcaaagagactacaagaggcagagctggagaagctgaagatggccgccaagcccatgctgccaccggctgccttcggcctctccttccctctcggcggccccgcagctgtagcggccgcggcgggtgcctcgctctacggtgcctctggccccttccagcgcgccgcgctgcctgtggcgcccgtgggactctacacggcccatgtgggctacagcatgtaccacctgacatagagggtcccaggtccccacctgtgggccagccgattcctccagccctggtgctgtacccccgacgtgctcccctgctcggcaccgccagccgccttccctttaaccctcacactgctccagtttcacctctttgctccctgagttcactctccgaagtctgatccctgccaaaaagtggctggaagagtcccttagtactcttctagcatttagatctacactctcgagttaaagatggggaaactgagggcagagaggttaacagatttatctagggtccccagcagaattgacagttgaacagagctagaggccatgtctcctgcatagcttttccctgtcctgacaccaggcaagaaaagcgcagagaaatcggtgtctgacgattttggaaatgagaacaatctcaaaaaaaaaaaaaaaaaaaaaaaaaaaagaaaagagaaaaaaaagactagccagccaggaagatgaatcctagcttcttccattggaaaatttaagacaagttcaacaacaaaacatttgctctggggggcagggaaaacacagatgtgttgcaaaggtaggttgaaggga

SEQ ID NO: 115800 - DNA, 1000 bp, Homo Sapiens
caatttgataaggtttcaaggagtatctgatgggttaggaagtcacgaaatgaggagttcttgccacatttgcagagtccctccttgataaggtttggcggtgtccccacccaaatctcatgttgaattgtagttcccataatccccacatgttgtgggagggacccagtgggaggtaattaaatcatgggggtggttacccccacactgctgttctcatgatactgagttctcacaagtcctgtttgttttataaggggcttttcccccttttgctcaacacttcttcctgccatcatgtgaagaaggacgtgtttgtttccccttctgccacgattgtaagtttcctgaggccttcccagctatgtggaactgtgagttaattaaacctctttcctttataaattacccagtcatgggcagtcctttacagcagcatgagaatggactaatacactcctcaaatgttttgaagattgttgcaccttggaactaccagtgtgcacacaatctggctcaatgtatatattggcccagcaaggcaaagaactgaagttccaggatggaagaacctgtgttctcctcataatagtatagaataattcaagataggcaagaaggacagcagtaaatgaagaccatggaagaaaagaaggaatgccaaagatcgaggaaatctaccaagactagtagggtagtccagaagaagctgtttcagggcctgttgccagctatgcctttgagaacctcgggatcccaaagaatgaggggaatttcttcagaaagacaatctcggcatgcattatttctttgttttgaagattcactcatgttgcatgcatctgtagcttgtgccttttttattgcctagtagtattctgtcatatgcctatcttacaatttgattatctattcacctgttgatgaatgtttgaattttttccatttgaggaattttatgaataaagctgctataagcatgaaaaaaaaaaaaaaaaaa

SEQ ID NO: 115801 - DNA, 1000 bp, Homo Sapiens
tactgagaagaatgctttgtctactggggtctctttctttttcctgtcttttcacatttcaaacctccagtttaattcctctctggaagatcccagcaccgactactaccaagagctgcagagagacatttctgaaatgtttttgcagatttataaacaagggggttttctgggcctctccaatattaagttcaggccaggatctgtggtggtacaattgactctggccttccgagaaggtaccatcaatgtccacgacgtggagacacagttcaatcagtataaaacggaagcagcctctcgatataacctgacgatctcagacgtcagcgtgagtgatgtgccatttcctttctctgcccagtctggggctggggtgccaggctggggcatcgcgctgctggtgctggtctgtgttctggttgcgctggccattgtctatctcattgccttggctgtctgtcagtgccgccgaaagaactacgggcagctggacatctttccagcccgggatacctaccatcctatgagcgagtaccccacctaccacacccatgggcgctatgtgccccctagcagtaccgatcgtagcccctatgagaaggtttctgcaggtaatggtggcagcagcctctcttacacaaacccagcagtggcagccacttctgccaacttgtaggggcacgtcgcccgctgagctgagtggccagccagtgccattccactccactcaggttcttcagggccagagcccctgcaccctgtttgggctggtgagctgggagttcaggtgggctgctcacagcctccttcagaggccccaccaatttctcggacacttctcagtgtgtggaagctcatgtgggcccctgagggctcatgcctgggaagtgttgtggtgggggctcccaggaggactggcccagagagccctgagatagcggggatcctgaactggactgaataaaacgtggtctcccactgcgccaaaaaaaaaaaa

SEQ ID NO: 115802 - DNA, 1000 bp, Homo Sapiens
acaccttcccgcccatctcttacctcaatgccatctcctggcgcatcatccacctggtgcaccgcttcaacgcccaccacggggacaccaaggtggcgtacacctttgacgcgggccccaatgccgtgatcttcaccctggacgacactgtggctgagtttgtggctgctgtgtggcacggctttcccccaggctcgaatggagacacgtttctgaaggggctgcaggtgaggccggcccctctctcagctgagcttcaggctgcgctggccatggagccgacccccggtggggtcaaatacatcattgtcactcaggtggggccagggcctcaaatcctggatgacccctgcgcccacctcctgggtcctgacggcctgccgaagccagctgcctgactgcctcagcagggaccgcatgccgcttggagaaggggtggcctcgccggagctagggagcggatgtggtgggctggccggactcctgggacatgtgggtggtggcttgaccccgggcccatgggcagcttgctgtggggcagtgcagggagtcctgcggccgcccaggtgtcaggagaggtccccgccgagtgcttcagctgccctaagctgcaccagcgctttgccaagatgggatggggagggggtatgagaactggcagagcctcggtgcagcagggctgaagggctttctcaccccagctctggctatgcccagttctctgagaaaggagctcagtggggaggtggtccctccagcggaccagggaaggggtcactgtgctgggagcagcctccttgggcctcaggaaaccaccaagtgcctcggatggtggctgcccacggcgcttctgctgagaccctgcccccggcccaggtgtctcggagggtggctgcccacggcctgggtgtggctggaatggtggcaggagtgggcaccagtgcggccccggtggccatggggaataaaccagcattgctgccaaaaaaaaaaaaaaaaa

SEQ ID NO: 115803 - DNA, 1000 bp, Homo Sapiens
gcttgctttcacagatgtttcgataaaaaattttgaagagttttttaacctccacagaaccgccaagtccaaaattgaagacattagagcagaacaagagagagaaggtgagaagctgatccgcctccacttccagatggaacagattgtctactgccaggaccaggtatacaggggtgcattgcagaaggtcagagagaaggagctggaagaagaaaagaagaagaaatcctgggattttggggctttccagtccagctcggcaacagactcttccatggaggagatctttcagcacctgatggcctatcaccaggaggccagcaagcgcatctccagccacatccctttgatcatccagttcttcatgctccagacgtacggccagcagcttcagaaggccatgctgcagctcctgcaggacaaggacacctacagctggctcctgaaggagcggagcgacaccagcgacaagcggaagttcctgaaggagcggcttgcacggctgacgcaggctcggcgccggcttgcccagttccccggttaaccacactctgtccagccccgtagacgtgcacgcacactgtctgcccccgttcccgggtagccactggactgacgacttgagtgctcagtagtcagactggatagtccgtctctgcttatccgttagccgtggtgatttagcaggaagctgtgagagcagtttggtttctagcatgaagacagagccccaccctcagatgcacatgagctggcgggattgaaggatgctgtcttcgtactgggaaagggattttcagccctcagaatcgctccaccttgcagctctccccttctctgtattcctagaaactgacacatgctgaacatcacagcttatttcctcatttttataatgtcccttcacaaacccagtgttttaggagcatgagtgccgtgtgtgtgcgtcctgtcggagccctgtctcctctctctgtaataaactcatttctagcag

SEQ ID NO: 115804 - DNA, 1000 bp, Homo Sapiens
tgcctgtggtcatgctctcagctccacctggcatgagaagggatcctggcctctggcatattcatcaagtatgagttctggggatgagtcactgtaatgatgtgagcagggagccttcctccctgggccacctgcagagagctttcccaccaactttgtaccttgattgccttacaaagttatttgtttacaaacagcgaccatataaaagcctcctgccccaaagcttgtgggcacatgggcacatacagactcacatacagacacacacatatatgtacagacatgtactctcacacacacaggcaccagcatacacacgtttttctaggtacagctcccaggaacagctaggtgggaaagtcccatcactgagggagcctaaccatgtccctgaacaaaaattgggcactcatctattccttttctcttgtgtccctactcattgaaaccaaactctggaaaggacccaatgtaccagtatttatacctctaatgaagcacagagagaggaagagagctgcttaaactcacacaacaatgaactgcagacacagctgttctctccctctctccttcccagagcaatttatactttaccctcaggctgtcctctggggagaaggtgccatggtcttaggtgtctgtgccccaggacagaccctaggaccctaaatccaatagaaaatgcatatctttgctccactttcagccaggctggagcaaggtaccttttcttaggatcttgggagggaatggatgcccctctctgcatgatcttgttgaggcatttagctgccatgcacctgtccccctttaatactgggcattttaaagccatctcaagaggcatcttctacatgttttgtacgcattaaaataatttcaaagatatctgagaaaagccgatatttgccattcttcctatatcctggaatatatcttgcatcctgagtttataataataaataatattctaccttggaaaaaaaaaaaaaaa

SEQ ID NO: 115805 - DNA, 1000 bp, Homo Sapiens
tcttctatgttttcacggctttttcattacagaaaagaacacttgctcttctgtgattattgtcatgtattaggctaatgctgtgttgtctcccacctggaactgaattgcttggtggaacatatgctttcactgtttgtgcaatatgcatttatttcttatatgaatgctttaaagtcatttgaggttagatcttttaattcctattttctgcttcattggtcactttttttttattgtagtataagatgttagattctgtaatcttcacattcattttagcaggtactgagtgatgctgtatatacaaataagtgtattgttttgatttttagaccaccacatggcatgcttgactatttcttatttcaaatgtctgctaatgcagagtaggctactccatgatagtgttaaaaaacaaaatttgctaacaatgtgatataaagactttaaaagttacacattatgtggagccctatctttacaaaagtttcctactgtaaagtgcttttattttcagttttcatttgatagtactcaaccataattaaagttgcataagataattgctttacatttcacatacctatatttatctgagtgctgtctaaaactgttgtgctagccaaagtaatgctatgaaatcatttgcagaattaacccgtgagttaatgttaaatgcactgttattgccatgtgaagaggcatcgactttgataccaccatcatgttcagaccattttatacatttcagtggcctttttttttttaaggaaaaaaaagcgcaaaaccaagtacatagtgacgatggcttttatttggacaaatagcttttatattttcattaaaccatgcaaaaaatactacatctttctggcacataactgtctccttaaccactggaacagttcagccatttgaataaattgtacattgtaaagcttatagtagctgattgtattattgattgtattgtatactatattaaatgtgaatttgt

SEQ ID NO: 115806 - DNA, 1000 bp, Homo Sapiens
tcaatcccaacgttttacataaaataagagatcctttagtgcacccagtgactgacattagcagcatctttaacacagccgtgtgttcaaatgtacagtggtccttttcagagttggacttctagactcacctgttctcactccctgttttaatttcaacccagccatgcaatgccaaataatagaattgctccctaccagctgaacagggaggagtctgtgcagtttctgacacttgttgttgaacatggctaaatacaatgggtatcgctgagactaagttgtagaaattaacaaatgtgctgctggtaaaatggctacactcatctgactcattctttattctattttagttggtttgtatcttgcctaaggtgcgtagtccaactcttggtattaccctcctaatagtcatactagtagtcatactccctggtgtagtgtattctctaaaagctttaaatgtctgcatgcagccagccatcaaatagtgaatggtctctctttggctggaattacaaaactcagagaaatgtgtcatcaggagaacatcataacccatgaaggataaaagccccaaatggtggtaactgataatagcactaatgcttaagatttggtcacactctctcacctaggtgagcgcattgagccagtggtgctaaatgctacatactccaactgaaatgttaaggaagaagatagatccaattaaaaaaaattaaaaccaatttaaaaaaaaaaagaacacaggagattccagtctacttgagttagcataatacagaagtcccctctactttaacttttacaaaaaagtaacctgaactaatctgatgttaaccaatgtatttatttctgtggttctgtttccttgttccaatttgacaaaacccactgttcttgtattgtattgccaggggggagctatcactgtacttgtagagtggtgctgctttaattcataaatcacaaataaaagccaattagctctataact

SEQ ID NO: 115807 - DNA, 1000 bp, Homo Sapiens
tgctgtactagtggataagatgattcgtacacaaatagttgattgtgctgccgtagcaaattggatcttctcttcagaactatctcgtgactttaccagattgtttgtttgggaaattttgcactctacaattcgtaagatgaacaaacatgtcctgaagatccagaaagagctggaagaagctaaagagaaacttgctaggcaacacaaacggcgaagtgatgatgacgacagaagcagtgacaggaaagacggggttcttgaggaacaaatagaacgacttcaggaaaaagtggaatctgctcagagtgaacaaaagaatcttttcctcgttatatttcagcggtttatcatgatcttgaccgagcacctagtacgatgcgaaactgatgggaccagtgtattaacaccatggtataagaactgtatagagaggctgcagcagatcttcctacagcatcaccaaataatccagcagtacatggtgaccctggagaaccttctcttcactgctgaattagaccctcatatcttggccgtgttccagcagttctgtgccctgcaggcctaagggtcattttttcctcatgtcaaggtttttttgatatcttaaaataatttgtcttattttttgatggtttgaatgcttgctttcttgtagtatcctttcacttgttaaaggaaacaaaggggaagaggacagtgaatgaacatggcattacttttaattgccctgaaaagcaaatacttcctaacggcagtaatgtgactatgaccatgatatattatatatgtgacagatacaaattctctgtgatcagtttgttattttttttctccttaaggcacaaaataattggtttgaggtatgtgaaacactagaggtcaaccttacatagtatatagaactgatgggtttacccagctacccagtagcataacttttcacagctcggggatgaattaacatggctgaaataaaactaaaagtatggttttt

SEQ ID NO: 115808 - DNA, 1000 bp, Homo Sapiens
cagtcgggacatgaacgaggccaagcggagggtgcgcgagctctaccgcgcctggtatcgggaggtgccgaacactgtgcaccaattccagctggacatcactgtgaaaatgggacgggataaagtccgagaaatgtttatgaagaatgcccatgtcacagaccccagggtggttgatcttctggtcattaagggaaagatcgaactggaagaaacaattaaagtatggaagcagcggacacatgttatgcggttcttccatgaaacagaagcgccaaggccaaaggatttcctatccaagttctatgttggccacgatccatgaagtcattcagtggaaagatgcacgttgatactattttagagcacaaataaactcactatacaatggtcactttgtgatagaattccattgatgaaccaattttctgcagcctctttttgcctgagcaagtgggaccttggtatacacatcacctgttctttcccttttcttgaaatgtggtgtttgctgtaaattggattgaattatttttctcagagccttgcatgtcagtaaacaggaaggaaggaggccatctgttcaaaaattgtgacattgggcatgaggctggacgacttgttaatgtagttgtttctatagcccctatgattagacacttcagtgtcagggcacagattatctaaaattagccagctcttcctgtcagggatcagggcagcactaacaggcgcaaaagtagagctgtcaagatgggctagttttccttgggttctgaagaaaatggatgtgcaaaggcttggctccgctacttgtaacaagctccagcccttaaaatgaaattaacttcctactcaggcaccctgcttaggtgcacagctgttcaatatacacagagaacagaaatattcctactgtctttggaaaccctggtgtacctctcagtggcagaataaacatcaacacaggttcaagaactgaaaaaaaaaaaaaaaaaaa

SEQ ID NO: 115809 - DNA, 1000 bp, Homo Sapiens
ccggccccttggcactcgcctcggatttgggggcttcctcactcgtggctttccgaaggctgctgctcctgttcgacacagtggagaccatgggaaaagactatttgtcatcagaccttctagattctatgacaggcgttttttgaagttattgagattctacattgcattgactgggattccagtagcaattttcataactctggtgaatgtattcattggtcaagctgaactagcagaaattccagaaggctatgtcccagaacactgggaatattataagcatcccatatcaagatggattgcccgtaatttctatgatagtcctgaaaagatatatgaaagaacaatggccgtccttcagattgaagctgaaaaggctgaattacgggtaaaggagctggaagtgcgaaaattgatgcatgtgagaggagatggaccctggtattactatgagacaattgacaaggaacttattgatcattctccgaaagcaactcctgacaattaagcatttttttctccaaatacaaagtatattctctttattggaaaataaattaataaatatattctgtatttttgctctccgtgaaaaacaaaagagcctctgacattactgtctctcagtgttggttcagattgaggcttttgtttgaggagtttggcttccagtccccaaagaaggtttaaaatgtactaataaaaactggagaaataggaatttgtgaactcctaaaattgtagcaactttgaaaggttagtgttttatttacctgacaaatggaagttatagaagtctaataatgttaagcaccagtaattatagtattttgtacaaatgcctgtactgtagatgtctgtattattgaggggcaactcaggattttaagttccataaagtattgaaccaactctaaaatgttaactccttaataaacagattctcagtaaacaaattttaaagtttaaaaaaaaaaaaaaaaaaaaaaaaaaaaaa

SEQ ID NO: 115810 - DNA, 1000 bp, Homo Sapiens
caagctctgaaccatcacattcactcagtgaagacagcctccatcgggactctaggaaggagccggcctcctatgccagtggttgttcccagtgcccctgaagtgcaggagaccacaaggatgttggaagactccgagagtagctatgaaccagatgagctgaccaaagagatggcccacctggaaggactaatgaaggacctaaacgctatcacaacagcatgacgaccttcaccaggacctgacttcaaacctgagtctggaagtcttggaacttaacccttgaaaacaaggaattgtacagagtacgagaggacagcacttgagaacacagaatgagccagcagactggccagcgcctctgtgtagggctggctccaggcatggccacctgccttcccctggtcagcctggaagaagcctgtgtcgaggcagcttccctttgcctgctgatattctgcaggactgggcaccatgggccaaaattttgtgtccagggaagaggcgagaagtgcaacctgcatttcactttgtggtcaggccgtgtctttgtgctgtgactgcatcacctttatggagtgtagacattggcatttatgtacaattttatttgtgtcttattttattttaccttcaaaaacaaaaacgccatccaaaaccaaggaagtccttggtgttctccacaagtggttgacatttgactgcttgttccaattatgtatggaaagtctttgacagtgtgggtcgttcctggggttggcttgttttttggtttcatttttattttttaattctgagtcattgcatcctctaccagctgttaatccatcactctgagggggaggaaatgttgcattgctgtttgtaagctttttttattatttttttattataattattaaaggcctgactctttcctctcatcactgtgagattacagatctatttgaattgaatgaaatgtaacattgaaaaaaaaaaaaaaaaaaaaaaaaaaaaa

SEQ ID NO: 115811 - DNA, 1000 bp, Homo Sapiens
gtgcctggatctgctggtggacagtggggctgaagtggaggccacagagcggcaggggggacgaacagccttgcatctagccacagagatggaggagctggggttggtcacccatctggtcaccaagctccgggccaacgtgaacgctcgcacctttgcgggaaacacacccctgcacctggcagctggactggggtacccgaccctcacccgcctccttctgaaggctggtgctgacatccatgctgaaaacgaggagcccctgtgcccactgccttcaccccctacctctgatagcgactcggactctgaagggcctgagaaggacacccgaagcagcttccggggccacacgcctcttgacctcacttgcagcaccttggtgaagaccttgctgctaaatgctgctcagaacaccatggagccacccctgaccccgcccagcccagcagggccgggactgtcacttggtgatacagctctgcagaacctggagcagctgctagacgggccagaagcccagggcagctgggcagagctggcagagcgtctggggctgcgcagcctggtagacacgtaccgacagacaacctcacccagtggcagcctcctgcgcagctacgagctggctggcggggacctggcaggtctactggaggccctgtctgacatgggcctagaggagggagtgaggctgctgaggggtccagaaacccgagacaagctgcccagcacagaggtgaaggaagacagtgcgtacgggagccagtcagtggagcaggaggcagagaagctgggcccaccccctgagccaccaggagggctctcgcacgggcacccccagcctcaggtgactgacctgctgcctgcccccagcccccttcccggaccccctgtacagcgtccccacctatttcaaatcttatttaacaccccacacccacccctcagttgggacaaataaaggattctcatgggaaggggaggaccccgaattcct

SEQ ID NO: 115812 - DNA, 1000 bp, Homo Sapiens
tcccctcgtcttcggctacgtcactgaggatggggacacggcactgcacttggctgtgattcatcagcatgaacccttcctggattttcttctaggcttctcggccggcactgagtacatggacctgcagaatgacctaggccagacagccctgcacctggcagccatcctgggggagacatccacggtggagaagctgtacgcagcaggcgccgggctgtgtgtggcggagcgtaggggccacacggcgctgcacctggcctgccgtgtgggggcacacgcctgtgcccgtgccctgcttcagccccgcccccggcgccccagggaagcccccgacacctacctcgctcagggccctgaccgtactcccgacaccaaccatacccctgtcgccttgtaccccgattccgacttggagaaggaagaagaggagagtgaggaggactggaagctgcagctggaggctgaaaactacgagggccacaccccactccacgtggccgttatccacaaagatgtggagatggtccggctgctccgagatgctggagctgaccttgacaaaccggagcccacgtgcggccggagcccccttcatttggcagtggaggcccaggcagccgatgtgctggagcttctcctgagggcaggcgcgaaccctgctgcccgcatgtacggtggccgcaccccactcggcagtgccatgctccggcccaaccccatcctcgcccgcctcctccgtgcacacggagcccctgagcccgagggcgaggacgagaaatccggcccctgcagcagcagtagcgacagcgacagcggagacgagggcgatgaatacgacgacattgtggttcacagcagccgcagccaaacccggctgcctcccaccccagcctcaaaacctcttcctgacgacccccgccccgtgtgatttgtttcattgttaatataatttccagtttaataaacaaaaccctagttctgacaaccagaaaaaaaa

SEQ ID NO: 115813 - DNA, 822 bp, Homo Sapiens
gcgagggcgcgccccggctgggcgtggacactgttctccggccgcgtcgggccgggcgggtggggcgttcctgcgggttgggcggctgggccctccggggtgtggccaccccgcgctccgccctgcgcccctcctccgccgccggctcccgggtgtggtggtcgcaccagctctctgctctcccagcgcagcgccgccgcccggcccctccagcttcccggaccatggccaacctggagcgcaccttcatcgccatcaagccggacggcgtgcagcgcggcctggtgggcgagatcatcaagcgcttcgagcagaagggattccgcctcgtggccatgaagttcctccgggcctctgaagaacacctgaagcagcactacattgacctgaaagaccgaccattcttccctgggctggtgaagtacatgaactcagggccggttgtggccatggtctgggaggggctgaacgtggtgaagacaggccgagtgatgcttggggagaccaatccagcagattcaaagccaggcaccattcgtggggacttctgcattcaggttggcaggaacatcattcatggcagtgattcagtaaaaagtgctgaaaaagaaatcagcctatggtttaagcctgaagaactggttgactacaagtcttgtgctcatgactgggtctatgaataagaggtggacacaacagcagtctccttcagcacggcgtggtgtgtccctggacacagctcttcattccattgacttagaggcaacaggattgatcattcttttatagagcatatttgccaataaagcttttggaagccgg

SEQ ID NO: 115814 - DNA, 1000 bp, Homo Sapiens
acaggaaccaggtgccccgtgtaggcatcgtcggtcggtttgccgtcagagatggcgcatctcgctgcatcccccgagagtacaccggttgctctagccacctgcggcccgcccatctgcgctagctggccttcacgctcttgatcgtctttcctttgtattggagaaggactgggtcagagatctgttggagagagagaataaagagattatttttcattatttttaaatggttgtttttgttttaatttgcacagctacacagaggaaataacttaggcactttctgttttttttaaaaaaataataaggtctcatggcttcatttagagaccacagtaacaacagcagcccaccaatcagagaagctggttgttattaaccaagctacagattcacactttctggcctaaaccctaatgggatgaggcttttcaccccaggccatgctggtggtgattttttagcccctaaataaaacactggactatttcctgtttacttcattgattgcaactacaaaggtggactcaaagcaaagcacaatcatgccagccaacattccagaattctgctgagaactccaagtctgtgaggggagaggttttacaagccagacaggcctgggggactgcagtccccaaggagaccctgccacatgctggccctttgagtgagaatgctgcatctttctacatatcttcatgagaatactgagaattggattttccttttcaaaatgcactttgctttttttgtatgttttgttatgttgagatgtttctaaagaaaagattttatgtaattataagatgaagcgtagtgaattgtacagctgttgtaataatgacctatttctatataaaataaaattgtatggcttatgtgtaaattattttgtatctgagataccagttccttttcccaaatataaaagtataaaagttttcttgtgtttttctgtgagtgaaaattttgtaataaattaacaaatttgtac

SEQ ID NO: 115815 - DNA, 1000 bp, Homo Sapiens
gcctttcccttgagtctctgctgagcttcgtcaaagaattcaaatcccagctctttgtggagggcctggtacaagggaatgtcacaagcacagaatctatggatttcctgaaatatgttgttgacaaactaaacttcaagcctctggagcaggagatgcctgtgcagttccaggtggtagagctgcccagtggccaccatctatgcaaagtgaaagctctgaacaagggtgatgccaactctgaagtcactgtgtactaccagtcaggtaccaggagtctaagagaatatacgcttatggagctgcttgtgatgcacatggaagaaccttgttttgacttccttcgaaccaagcagacccttgggtaccatgtctaccctacctgtaggaacacatccgggattctaggattttctgtcactgtggggactcaggcaaccaaatacaattctgaagttgttgataagaagatagaagagtttctttctagctttgaggagaagattgagaacctcactgaagaggcattcaacacccaggtcacagctctcatcaagctgaaggagtgtgaggatacccaccttggggaggaggtggataggaactggaatgaagtggttacacagcagtacctctttgaccgccttgcccacgagattgaagcactgaagtcattctcaaaatcagacctggtcaactggttcaaggctcatagagggccaggaagtaaaatgctcagcgttcatgttgttgggtatgggaagtatgaactggaagaggatggatccccttctagtgaggattcaaattcttcttgtgaagtgatgcagctgacctacctgccaacctctcctctgctggcagattgtatcatccccattactgatatcagggctttcacaacaacactcaaccttctcccctaccataaaatagtcaaataaataaactgcagtcacgttggcctgaaaaaaaaaaaaaaaaaaaaaaaaaaaaaaaa

SEQ ID NO: 115816 - DNA, 1000 bp, Homo Sapiens
gccagaggctgcaaagacagtcaaaggacacgagagaaaggaaggggaagaacaggactccaggactgttttatattatagaaaagcaagagctaaagagcatttacacatgttaaacagatacttgttaagcatagtgcctgacacacggcattagctgttattttatgagattccatcagctctgcctctgtcctctttcttctaacatgaaggtatcatgagaagagaaccttctaacataagctgtaattctaaacctgcacttgtccctctccagcaagaggctagcactgaattcattctactcatactacacacccagttatggaatgtccagagttctcgaagaaaataaatgactttaggaagaggtatacattttttaagtcgctctgcctccaaatctgaacagtcactgtaaatcattcttaagcccagatatgagaacttctgctggaaagtgggaccctctgagtgggtggtcagaaaatacccatgctgatgaaatgacctatgcccaaagaacaaatacttaacgtgggagtggaaccacatgagcctgctcagctctgcataagtaattcaagaaatgggaggcttcaccttaaaaacagtgtgcaaatggcagctagaggttttgataggaagtatgtttgtttcttagtgtttacaaatattaagtactcttgatacaaaatatacttttaaacttcataacctttttataaaagttgttgcagcaaaataatagcctcggttctatgcatatatggattgctataaaaaatgtcaataagattgtacaaggaaaattagagaaagtcacatttagggtttattttttacacttggccagtaaaatagggtaaatcctattagaaattttttaaagaactttttttaagtttcctaaatctgtgtgtgtattgtgaagtggtataagaaatgactttgaaccactttgcaattgtagattcccaacaataaaattgaagat

SEQ ID NO: 115817 - DNA, 1000 bp, Homo Sapiens
gctgggccgcgggggtgtagggaggagcccgggcctctccggagaagagaggctgcagcagaagcgaggaaaagccacagccccgtgaagcgtccgcggaaagcacagagactgcgtgtggcctatgagggctcggacagtgagaaaggtgagggggctgagcccctcaaggtgccagtctgggagccccaggactggcagcaacagctggtcaacatccgtgccatgaggaacaaaaaggatgcacctgtggaccatctggggactgagcactgctatgactccagtgcccccccaaaggtacgcaggtaccaggtgctgctgtcactgatgctctccagccaaaccaaagaccaggtgacggcgggcgccatgcagcgactgcgggcgcggggcctgacggtggacagcatcctgcagacagatgatgccacgctgggcaagctcatctaccccgtcggtttctggaggagcaaggtgaaatacatcaagcagaccagcgccatcctgcagcagcactacggtggggacatcccagcctctgtggccgagctggtggcgctgccgggtgttgggcccaagatggcacacctggctatggctgtggcctggggcactgtgtcaggcattgcagtggacacgcatgtgcacagaatcgccaacaggctgaggtggaccaagaaggcaaccaagtccccagaggagacccgcgccgccctggaggagtggctgcctagggagctgtggcacgagatcaatggactcttggtgggcttcggccagcagacctgtctgcctgtgcaccctcgctgccacgcctgcctcaaccaagccctctgcccggccgcccagggtctctgatggccgcatggctctggccgaggtgccgctgtggccaccgtctgtgaagtggctttacgcttcaggaagccacgcctgttgaataaagctttggtgtgtttgcagatggaaaaaaaaaaaaaaaaaaaaaaaaaaaaaa

SEQ ID NO: 115818 - DNA, 1000 bp, Homo Sapiens
cctttgtacgaagccattgccctgcaggcagccagctccaattcgaggattttggattgtacctgacattctgggacccacgatgatctgcatcaccagtacctatgaatgcctcatatggccgttattaagtacagtccatccagcgtctcctcccctgctttgtactcgagaagatgttgaagtggcagagtctcccctccgtgttctggctgaaaccccagattcctttgaaaagcatattagaagcattttgcaacgtagtgttgccaatccagcatttttgaaagcttctgaaaaggacatagcccctcctcctgaagaatgccttcagctcctcagcagagccacccaggtgttcagagagcagtacattctcaaacaggacttggcaaaggaggagattcagcggagggtcaaattattatgtgaccaaaaaaagaaacaactagaagatctcagttattgtcgagaagagaggaaaagtctgcgggaaatggctgagcgtttagctgacaaatatgaggaagctaaagaaaaacaagaggatatcatgaacaggatgaaaaaactacttcacagttttcactctgagctcccagttctctctgatagtgagcgagacatgaagaaagaattacagctgatacctgatcaacttcgacatttgggcaatgccatcaaacaggttactatgaaaaaggattatcaacagcaaaagatggagaaggtgttgagtcttccaaaacccaccattattctcagtgcctaccagcgaaagtgcattcagtccatcctgaaagaggagggtgaacatataagggaaatggtgaagcaaatcaatgatatccgcaatcatgtaaacttctgacaccaccaggagctgactcacacctgaactgaacaccattgaaggcttaaacccatattgtaaaacaggtagaattatctaatttataaaaaggtgttttgatgacaaaaaaaaaaaaaaaaaaaaaaa

SEQ ID NO: 115819 - DNA, 1000 bp, Homo Sapiens
ctattgtgttctcggagttgactcgttgaaattgttttccataaagaacagtataaacatattattcacatgtaatcaccaatagtaaatgaagatgtttatgaactggcattagaagctttctaaactgcgctgtgtgatgtgttctatctagcctaggggaggacattgcctagagggggagggactgtctgggttcaggggcatggcctggagggctggtgggcagcactgtcaggctcaggtttccctgctgttggctttctgttttggttattaagacttgtgtattttctttctttgcttcctgtcaccccaggggctcctgagtataggcttttcagtccctgggcagtgtccttgagttgttttttgacactcttacctgggcttctctgtgtgcatttgcgtctggcctggagtaagcaggtccgacccctcgttctttacagcttagtgttattctggcatttggttaagctggcttaatcttgtttaatgttatcagtacattttaaataggggcattgaaatttactcccaccaccagggcttttttgggggatgcctgggcctttaaaacactagccaaactctaattaattctcaaatcactgccaggagttcttgctcctggctgcaggcccaggccccaaggtctccttcttggggtcacaaacagcagtaaggaagaggaatatatagcaactcagggcctgggaattgtggggcaatccgttcttagggactggatacttctggctggctgagtatagtactagctgcctccccaccaggttccgagtagtgtctgagactctgctctgcagggcctagggtagcgctgggagtgtagaagtggcctgcccttaactgttttcactaaacagctttttctaaggggagagcaagggggagagatctagattgggtgagggggacggggatgtcagggaggcaagtgtgttgtgttactgtgtcaataaactgatttaaagtt

SEQ ID NO: 115820 - DNA, 1000 bp, Homo Sapiens
accaaaacggaattgagccagctgcggcggagccgtgatgatgcggaccgccgctaccagagccggctgcaagacctgaaagatcgcctggagcagtccgagagcaccaaccgcagcatgcagaactacgtccagttcctcaaatcatcatacgccaacgtgtttggggatggtccctattccaccttcctgactagctctcccatccgctcccgatctcctcctgcctgaggccacttatcagggcctggagccctgatggaagccataggaactccagagttgccaagccatagctgagaagcctggtggttttcctctcccagtgaaaaaatgggttcagggtcttgtccttagctactagctctagaaaagtcccaaaagcagcagaaggtgaagcaggaagcacttggttttctccttcctgatatagtcacctgttggaagtgttaaaatttcctcgacaggccttaaatttactactacattagggtaccacattttaacttaccatgactttgctccttcctttcctgagaaaatatttccactggattttttccaccagtccccttacagccctcattgttttaggaatctctctcaggttttttctgacctaaaccagcaggaagtcgtcctgggctgtaagcaccatcacttgctttttttttttttctgatttcacaagtgtggtgttttcccaaggctcccttcccaagctcagtgcaaacctctcactcccaagtttctttgaggccacttgcccccaagcacttcacaatagaccctcgagggcttgtgtccatttggccttttacaagtgtaatgccaatttcattgatttttgtttcttttggcctgatttgtatctctggaatgcatttattcttgaaatatttgtgtgattttacaaaaagcttttgtaatcagttaaaaaaaaaaaaaaaaaaaaaaaaaaaaaaaaaaaaaaaaaaaaaaaaaaaaaaaaaaaaaaaaa

SEQ ID NO: 115821 - DNA, 1000 bp, Homo Sapiens
gcctcagcgctgcccacaccaccgccctcctcgctgtgccaccacccctccctctgctctcataggagttaggctgtcgtccccctccagtgcttggctgccccacaggccacacgctgcccaggctctgctgacttctgagcagttttccaggaggccggggggagcaggaggaggaaaggtagcccccgagggatgtccttggggaggggtcagctctggccacaatcctccccaccagtctcacccactaggataggaactgggccttgtgtgctggcttccgctgtcacccagcaaggcacaggctcctgtatttgagactaggatagcttcatcttgagcctgagccttagaatctgtagaggagcctggagtcggatctagccatggctggcagaggtttctagggtgggccccagccgtggcgtgaactgaggatgacccggggcagctggcaggagagagccttggcctgacctggcacagaaagggcagcttcagtctctgcagtgtccattatctgctgttccttcgagggttccaggctgtgtgtggggcccaagcatgccccacccacccctcctgggcccaggcagcacctggagcccacagagtctgtgtgtagccaggaagccccgctcaggtagccaccaccggggcactggctgctctgtcttggtcctgttaaccctccacctcctctcttggactccctccccaccccaaccactctttctttctcctttaacccaatggagactttctgatgcatcgttttctttgctgtgccaaagcaggtcagaagagggagaggaggggctgggggtgaggggccaggccatggccaaggggccagctgcccctcatttatcactctgaccttcacagggacagatctgatttatttattttggttaaaaaaaaaaaaaaggaacagaaacaactttgcattgcattggcttgacccataaactaagttatatccgtgggcaaaaaa

SEQ ID NO: 115822 - DNA, 1000 bp, Homo Sapiens
tttgggacaagtggggagcccaagaaagtaattagtaagtgagtggtcttttctgtaagctaatccacaacctgttaccacttcctgaatcagttattatttcttcatttttttttctaccagaggacagattaatagatttaacccttcacaacagttcttgttagaatcatgggatgtgtggcccagaggtaagaatagaatttctttccctaaagaacataccttttgtagatgaactcttctcaactctgttttgctatgctataattccgaaacatacaagacaaaaaaaatgaagacactcaatctagaacaaactaagccaggtatgcaaatatcgctgaatagaaacagatggaattagaaatatatcttctatttttaggcttctatttcctttccacccactcttcacaggctattctactttaaaggaagcctttttattttgctgcacacaatctagcaggaatctttttttttttttaagagctgtgtcatccttatgtaggcaagagatgtttgcttttgttaaaagctttattgagatataattaacataaaataaactgaacatatttaaagtgtactatttgataagttttcacaccttgtggagaacatgcatactacaattaagagagtgaacatatccatcatccctcaaagtgtcacaatgctcctcctgatgactcctccccagaaaaccaccaatcggctttcattttgcattttgtagttttatgtgaatggaatcatatagtatgtcttttttttttgtctggcttctttcactttgcataattattttgagattcatatgtctccatcttgatgctcgtatgaattcattcttttaaatgttgaatattcccttgtatggatataccacaattcatttacccatttacttgttgatgacatttgggttgttttagttttgggatattacaaataaagctgctgtgaacatttgtgtacaaaaaaaaaaaaaaaa

SEQ ID NO: 115823 - DNA, 1000 bp, Homo Sapiens
gagtaaaaaaaacaatggtaagcactgaagtataataagtaacctttggtacagcaggtttgctgcagtgtttttttctgtccacatgcaaattttggattctatcccagacccaggttttctagttcagaagactaaccagcttagtcagaagatggttccatggaagaaaaaggccaaggagtttgaagatttttcttctagacatctcaaaatgtggtactcataccatccacatcagaatcccttgtaggattttctaaaattacagattgttgagcctaccataggtcaaaaggactggaattttccttcttaacaagtatagtcatggcaccacgtaacattttggtcaatgacattgtataaagggtggtctcataagattataccatatttttactgtaccttttctatgtctaaatatacaaatgttttaccattgtgttacagttgcctacagtatgattacagtaacattctgtacagtgctatagctgaagagtaataggctaggctatctgtatagcctaagtgtgtaacaggctatatacatatcatcagggtctgtgtaagtatactctgtgatgttcatacagtgatgaaatcacccaaagacacatttctcagaacgtagccccatcatgaagtgacgtgactaccagagatttctggaaaagcactcccaaaagtaatgagatgtgtatggcaatgttaactgaacctgtttgtattaaaaagtaaatccctatgaggaatgtggaaatgtccgtcaaagcattgtcttttaagtaagttccaagatccatgaattaacagaggcatatatttaaaatgaaatttaatgagcacttagtgacttcatttgttcaagaatatttgatttcctattgtgtgcatgggaggtttacaaaagacagactgtccctatgcttgtgcagcttacaatctatttaactattagaggccctgtgagatgtaggcagttatttacagatga

SEQ ID NO: 115824 - DNA, 1000 bp, Homo Sapiens
cttttatgggcagagagatttcaaaacctgagcaggatcatgtctggcagttactaaacagggactttgtccatggtttgtatcatggggtgcctactgctgtctaaactctgctctcctaattagctgactcttgaaaatgaaatcctaacctctttcctgcctcttttctttctcttttcaggaagagtgtgggtagaaagtccggagggcaacttccaatttaattctgctctgtccggcgcataggctgaattccaaaagaactttcttcctaggatgtggggcttaaagcaccgtcatgtggggtggatcagataattgctcctgtggggccctggcttccttctctgtttgtgcagtatttgtttttgttgtcttgttgagaaatatcccctgtgcaacccacccttggttgaggatcacaaattgaggtgccttccttgtatgctttttgttagtattttttgtttttgttccttaactgctgagcctcagccagcgtgggtcctgggggaaataccattccaaaggaagccatccctatggggaaattggttttactgggtaaattaatacttttatttcttcccctatcccttccttcctagttgtgataaacatgggagaggagtgactttgactgctggggaatttcctcctaagaaccttattcccaaaataagccagggattatgtcaaggcttctttcaaggaggctcataaaagcagtgacctcatccggggctttggatagagtgagaattccccaactaaattggacttctctgctttatccccttctcttccttcaccatctgcactacatttctggctgatcccaatcagattcccgctaatggaagaagtttagaatctttcaggtggaataaagtcacatgaaaacaaaacacaactatatatattttcagtttttttgccttattgatttttttccaaaaaaaaaaaactactaaattaaataattttttaaaagtca

SEQ ID NO: 115825 - DNA, 1000 bp, Homo Sapiens
ccgtggagggaggcatcatgggcatccaggtcaactgggactgcaacctggacagagccgcctccctctgcttgcccaggtactccttccgccgcctcgatacacgggacgttgagcacaacgtatctcctggctacaatttcaggtttgccaagtactacagagacctggctggcaacgagcagcgcacgctcatcaaggcctatggcatccgcttcgacatcattgtgtttgggaaggcagggaaatttgacatcatccccactatgatcaacatcggctctggcctggcactgctaggcatggcgaccgtgctgtgtgacatcatagtcctctactgcatgaagaaaagactctactatcgggagaagaaatataaatatgtggaagattacgagcagggtcttgctagtgagctggaccagtgaggcctaccccacacctgggctctccacagccccatcaaagaacagagaggaggaggagggagaaatggccaccacatcaccccagagaaatttctggaatctgattgagtctccactccacaagcactcagggttccccagcagctcctgtgtgttgtgtgcaggatctgtttgcccactcggcccaggaggtcagcagtctgttcttggctgggtcaactctgcttttcccgcaacctggggttgtcgggggagcgctggcccgacgcagtggcactgctgtggctttcagggctggagctggctttgctcagaagcctcctgtctccagctctctccaggacaggcccagtcctctgaggcacggcggctctgttcaagcactttatgcggcaggggaggccgcctggctgcagtcactagacttgtagcaggcctgggctgcaggcttccccccgaccattccctgcagccatgcggcagagctggcatttctcctcagagaagcgctgtgctaaggtgatcgaggaccagacattaaagcgtgattttcttaaaaaaaaaaaaaaaaa

SEQ ID NO: 115826 - DNA, 1000 bp, Homo Sapiens
cttgtttgggtttgctttcacagtctctcttccttctgactagaagtatgtataataaaacaatactacctagttaaacatttactttctcttttgcctttaaaatgtgcaggcttttctgtttaaagtgtgtgtgcacatgagtactggggctgtttttgatattagtaatttctctaagaaaactagccccctgcaacttgagtttgtggtttatctagcctttattgtttttttaaaatccacagtaggaataaaaaatctatattctcagaaatatctagcatggtatataacaaaacactaaactcatcagttcatccggcatcagatcaatggatctctgagcggggtgtttttttcagtgtcttataagcatagatgatagttgactgagtttctttagggcattgaatagacaagtaaagctaatgaatttaaaagcctgaaaagtgattgttttccagttatttctggaaaaggtctcattatatattgggtgctaaatgtttgatggggaaagcctgcatatattatcgtactggtaaaatgcattcaaaataattaaagtgcatgtattttccttgtaaacaccatgagctctcttagacatcttgtgataaagagcatttacttgccccactgctgtgcaatgccttaggactttgtttgtgttccaggacaagtgttcactcacatctgtaaaaacaattttaagaattgcaaataaattacagaccaaagattgagtaaagtcaaataactgttagtaagttgaaggatattggacaggaggacagtatttcagaaaaggagaggttgacagtcatccacaaggcatagcctccaagtatactctcaaatgtatgaagcaactggggtgggcagaagacattttagaatgagggctttagtttaaattaaagtcatggtggagaagactcttgcttcctccaagtgtttgaaaacacaaaatgcgatatgaaaaaaaaaaaaaaaa

SEQ ID NO: 115827 - DNA, 1000 bp, Homo Sapiens
aaaggcgcttggcatcacacatcactcttctccccgtgcttttctgcggctgtgtagtaaatctccccggcccagctggcgaaccctgggccatcctcacatgtgacaaagggccagcagtctacctgctcgttgcctgccactgagcagtctggggacggtttggtcagactataaataagataggtttgagggcataaaatgtatgaccactggggccggagtatctatttctacatagtcagctacttctgaaactgcagcagtggcttagaaagtccaattccaaagccagaccagaagattctatcccccgcagcgctctcctttgagcaagccgagctctccttgttaccgtgttctgtctgtgtcttcaggagtctcatggcctgaacgaccacctcgacctgatgcagagccttctgaggagaggcaacaggaggcattctgtggccagccaaaaggtaccccgatggccaagcaattcctctgaacaaaatgtaaagccagccatgcattgttaatcatccatcacttcccattttatggaattgcttttaaaatacatttggcctctgcccttcagaagactcgtttttaaggtggaaactcctgtgtctgtgtatattacaagcctacatgacacagttggatttattctgccaaacctgtgtaggcattttataagctacatgttctaatttttaccgatgttaattattttgacaaatatttcatatattttcattgaaatgcacagatctgcttgatcaattcccttgaatagggaagtaacatttgccttaaattttttcgacctcgtctttctccatattgtcctgctcccctgtttgacgacagtgcatttgccttgtcacctgtgagctggagagaacccagatgttgtttattgaatctacaactctgaaagagaaatcaatgaagcaagtacaatgttaaccctaaattaataaaagagttaacatcccatggcaaaaaa

SEQ ID NO: 115828 - DNA, 1000 bp, Homo Sapiens
ttgagcgctgcgcacacccctctcgtgggccccccacgtaggtgcgggaacctggttgaaccccaagctgataggaagatgtcttcaggaaatgctaaaattgggcaccctgcccccaacttcaaagccacagctgttatgccagatggtcagtttaaagatatcagcctgtctgactacaaaggaaaatatgttgtgttcttcttttaccctcttgacttcacctttgtgtgccccacggagatcattgctttcagtgatagggcagaagaatttaagaaactcaactgccaagtgattggtgcttctgtggattctcacttctgtcatctagcatgggtcaatacacctaagaaacaaggaggactgggacccatgaacattcctttggtatcagacccgaagcgcaccattgctcaggattatggggtcttaaaggctgatgaaggcatctcgttcaggggcctttttatcattgatgataagggtattcttcggcagatcactgtaaatgacctccctgttggccgctctgtggatgagactttgagactagttcaggccttccagttcactgacaaacatggggaagtgtgcccagctggctggaaacctggcagtgataccatcaagcctgatgtccaaaagagcaaagaatatttctccaagcagaagtgagcgctgggctgttttagtgccaggctgcggtgggcagccatgagaacaaaacctcttctgtattttttttttccattagtaaaacacaagacttcagattcagccgaattgtggtgtcttacaaggcaggcctttcctacagggggtggagagaccagcctttcttcctttggtaggaatggcctgagttggcgttgtgggcaggctactggtttgtatgatgtattagtagagcaacccattaatcttttgtagtttgtattaaacttgaactgagaccttgatgagtctttaaaaaaaaaaaaaaaaaaaaaaaaaaaaa

SEQ ID NO: 115829 - DNA, 1000 bp, Homo Sapiens
agcacaaccagtgtctctgaagaagatgtctcaagtagatattctcgaacagatagaagtgggttccctagatataacagggatgcaaatgtttcaggtactctggtttcaagtagcacactggaaaagaaaattgaagatcttgaaaaggaagtagtaagagaaagacaagaaaacctaagacttgtgagactgatgcaagataaagaggaaatgattggaaaactcaaagaagaaattgatttattaaatagagacctagatgacatagaagatgaaaatgaacagctaaagcaggaaaataaaactcttttgaaagttgtgggtcagctgaccaggtagaggattcaagactcaatgtggaaaaaatattttaaactactgattgaatgttaatggtcaatgctagcacaatattcctatgctgcaatacattaaaataactaagcaagtatatttatttctagcaaacagatgtttgttttcaaaatacttctttttcattattggttttaaaaaagcattatccttttatctcacaaataagtaatatctttcagttattaaatgatagataatgcctttttggttttgtgtggtattcaactaatacatggtttaaagtcacagccgtttgaatatattttatcttggtagtacattttctcccttaggaatatacatagtctttgtttacatgagttcaaatacttttgggatgttaccttcacatgtcctattactgatgtgtgcaaccttttatgtgttgatgactcactcataaaggtttttgtctactgtcatttgttctttccacttattctaagcatttagagtaatagagtcatacttttttataacagcaaccttttaaaaggaaagctcttataaagtcactgtcatgttttagttgactaaatataaatttaagagaatacttgaattgtgctatagtaaataaaaatttactattttgtgtttgaaaaaaaaaaaaaaaaaa

SEQ ID NO: 115830 - DNA, 1000 bp, Homo Sapiens
tattgactgggctttggggttgaacttttttttttttaaagaaagaaaaagaaaccctgggatccatctgttttttttgttgttgttgttgtttttgttgttgttggtggtggtggtggtggtggttcttaatttttaatttagtttggggaagtagcttgtttttttttttataaatatgttgatttcttgtcttttttttttatttcttactttcccatattaggggtgatagccaaaggggttctggtaagagaaagggggacaaacagaactggtaaagaggcccccctggctccaggcctgtccatcaggaagtaaattttacagggcaccaagctttgccccctaaaatcccttaggtgttctttgttcatgcaggcaggtttctgccgcatttgatgtggaggcagtgaagggcttgccctgctggcctctcatcccccttcttcccacaacccttgggcagggctggactcagtaattttgaggaaattgaagatgccatcttcccctgtgagtgacatgtctttaattttttaaaaaactactatttgaaaattggagggggaagaatgggaagggagttattgccaaatatgttaaatatgggttggggtgcttgtatatgtatcttcctcaatttccccataaatgaggtatctttttgtcacaccaaaatcaaggggtagggagagggaggaggttgcaaaaagccagatgtgggggaaaagtaacatcaacactgtcccatcctcagccctgaactagctaccatctgatcccctcagacattctcaggattttacaagactgtcagagtggggaacccctcccattaaagatccgggcaggactggggacaggttggaagtgtgatgggtgggggggtgggaggcatgggccgggggcagttctctcctcacttgtaaacttgtgtagtttcacagaaaaaaaacaaaatgcagttttaaataaagaaatttctttttaaaaaaaa

SEQ ID NO: 115831 - DNA, 1000 bp, Homo Sapiens
gtggattcctggagcctagcaccacaccagaagcacgaggcccttgagaactgtgtgttgagtgaactaataactgtattatagaaagcataatgaaaatgtcctgtgactgaagtatgtgtagcttgttgcaggagtcacaggaaagttgactaggattgagtgtgttgggctttgggtataaaggagggggattctacgggggcagtagctcaacaaggaatagagggaggagtgtaattttggtagctggtgttgaatagggcctttgagaatcagactgaacacagtgaaatatgtgcccaaagttcagaaagatgaagtttccagaaactaagaaggtagcacaatatgtggcatcatactcagaaaggaagaccatgccatggggccagaaattcagaaacgtaattcttacattgtgattgcaatggatactcatgaaagaaagtgggtagtggccgatttgccttcagagtgacaggtagagaagggaagagcgtgtagaactgtggccatactttaggagtgtgagggatgctgaatctcccagagagctcacactggccaggaatgctgagagtagcagatgcttttcttttgggaggatagtaaaacaatttagaaccagatatgctttgtcttgattctcaagtagaataatcttcaaatgcaaaagaatacattagaaatggacaaaagtggccaggagcggtagctcatacttgtaacccagcactttgggaagccgaggcgggctgatcgcttgaggtcaggagttcgagaccagcctggccaaaatagtgaaactcacgtttctactaaaaatacaaaaattagctgggtgtgatggccacttgggaggctgagataggagaatcgcttgaacctgggaggcagaggttgcagtgagccaatatcgtgccactgcattccagcctgggtgacagaatgaaactccatcactccatctcaaaaaaaaaaaaaaaaaaaaaaaaaa

SEQ ID NO: 115832 - DNA, 1000 bp, Homo Sapiens
gtcagctaagggccgccgtgcatctgcacctgagaggacggactgccgcctctgggtccccccaccgtggtgcccctcaccatcctcctgggggagcagggggtgggttctccctgatgaccaggttctgtctctatggaagtcactgcggtgataggtctgtgatggtccctaagtgccagtccatctctgtggagacccctcggtggcctccctatctctgtgggcgatgcctgagggttagggatgtctccaccctgatggggtgtcccagagacattttcccatggcagtcctcctctctgagaccagggctgtcacttttctgccaggggtactgggtccccctcagcaccctccacagcacaggccttccaagtggatgtcccgttgccttattcccccagcccacaaaggcaccctggccttggtctgctgaagtgttaggaagagggtgggtgccctccagacctggggactgagtggggaaaggagttacacccgtgagtggggaatgaggctggtcctgcagcctctccctccgctcagggcttgaaggtcggtggcggagggggtggctctcacagggcccaactctaaagtggaagaaccttgttagaccgagagcttgccatccagccaagctgctcgaggccctgcagtggccttggcaatgtctgtgccacctcctgagccctcccagcatgtcctcacatgctcatgcccacccgctcctccacaagcctagtccatcctgcctgagctccagcccccagcccccactgtgcccagacatgtgtgctcagggtggctttctccctaggaccttctgtgtatatagttagttttataaccctgaatgcccccacccttcccctaagcacacaggggttaaagctgtgtgtccctcccagtggctgtggcagtgacagtgacacccacacccacagtaaagaggagactgaatgagaaaaaaaaaaaaaaaaaaaaaaaaaaaaaa

SEQ ID NO: 115833 - DNA, 1000 bp, Homo Sapiens
tcactgccccccagaagaacctcaagagtgcctcccggatcgtctttgagaagaagctgcgcataaaatccagctttgtggcacctctggaaaagtcatatgggaccaggcccagagtcctgacgggcaaccctcgcttggacctgcaagagatcaacaactgggtgcaggcgcagatgaaagggaagctcgccaggtccacaaaggaaattcccgatgagatcagcattctccttctcggtgtggcgcacttcaaggggcagtgggtaacaaagtttgactccagaaagacttccctcgaggatttctacttggatgaagagaggaccgtgagggtccccatgatgtcggaccctaaggctgttttacgctatggcttggattcagatctcagctgcaagattgcccagctgcccttgaccggaagcatgagtatcatcttcttcctgcccctgaaagtgacccagaatttgaccttgatagaggagagcctcacctccgagttcattcatgacatagaccgagaactgaagaccgtgcaggcggtcctcactgtccccaagctgaagctgagttatgaaggcgaagtcaccaagtccctgcaggagatgaagctgcaatccttgtttgattcaccagactttagcaagatcacaggcaaacccatcaagctgactcaggtggaacaccgggctggctttgagtggaacgaggatggggcgggaaccacccccagcccagggctgcagcctgcccacctcaccttcccgctggactatcaccttaaccagcctttcatcttcgtactgagggacacagacacaggggcccttctcttcattggcaagattctggaccccaggggcccctaatatcccagtttaatattccaataccctagaagaaaacccgagggacagcagattccacaggacacgaaggctgcccctgtaaggtttcaatgcatacaataaaagagctttatccctaacttctgtta

SEQ ID NO: 115834 - DNA, 1000 bp, Homo Sapiens
gccaggcctgcaccagtcactcccgcttcaaccccagcgagtcgtccacctactccaccaatgggcagaccttctccctgcagtatggcagtggcagcctcaccggcttctttggctatgacaccctgactgtccagagcatccaggtccccaaccaggagttcggcttgagtgagaatgagcctggtaccaacttcgtctatgcgcagtttgatggcatcatgggcctggcctaccctgctctgtccgtggatgaggccaccacagctatgcagggcatggtgcaggagggcgccctcaccagccccgtcttcagcgtctacctcagcaaccagcagggctccagcgggggagcggttgtctttgggggtgtggatagcagcctgtacacggggcagatctactgggcgcctgtcacccaggaactctactggcagattggcattgaagagttcctcatcggcggccaggcctccggctggtgttctgagggttgccaggccatcgtggacacaggcacctctctgctaactgtgccccagcagtacatgagtgctcttctgcaggccacaggggcccaggaggatgagtatggacagtttctcgtgaactgtaacagcattcagaatctgcccagcttgaccttcatcatcaatggtgtggagttccctctgccaccttcctcctatatcctcagtaacaacggctactgcaccgtgggagtcgagcccacctacctgtcctcccagaacggccagcccctgtggatcctcggggatgtcttcctcaggtcctactattccgtctacgacttgggcaacaacagagtaggctttgccactgccgcctagacttgctgcctcgacacgtgggctcccctcttcctcttgaccctgcaccctcctagggcattgtatctgtctttccactctggattcagccttctttttctggactctggactttctctaataataaatagttcttctaaaaaaaaaaa

SEQ ID NO: 115835 - DNA, 1000 bp, Homo Sapiens
caccaggtatgattacgaggaggtggaagctgagggcgcaaacaaaatgatgaaggacttggaggccctgatgtttgatcgctcctttgtggggaagcagttctcagcaaatgacaaagtttacactgtggagaaggccgataactttgaatacagcgacccagtggatggaagcatttcaagaaatcagggcttgcgcctcattttcacagatggttctcgaatcgtcttccgactgagcggcactgggagtgccggggccaccattcggctgtacatcgatagctatgagaaggacgttgccaagattaaccaggacccccaggtcatgttggccccccttatttccattgctctgaaagtgtcccagctgcaggagaggacgggacgcactgcacccactgtcatcacctaagaagacaggcctgatgtggtacgtccctccacccccggacccatccaagtcatctgattgaagagcatgacagaaacaaaatgtattcaccaagcattttaggatttgactttttcactaaccagttgacgagcagtgcatttacaaggcactgccaaacaagatgcccttgggagctgtgagggaaagaggacctgcgggcttagatcaatctcaattccttttcatgccctcctgcattgctgctgcgtgggtatttgtctccttagccatcaggtacagtttacactacaatgtaagctataggtggagcatcagcagtgagtgaggccattcttcatccttaggatgtggcaatgaaatgatggtgcaagttcctttctcttttgtgaatctttccccccatttcctgtttacatgtaacccaacaaaatgcaatttctagtgccttctgtccaatcagttctttcctctgagtgagacgtacttggctacagatttctgccttgttttgcgacattgtcccattcacacagatattttgggataataaaggaaaataagctacaaaaaaaaaaaaaaaaa

SEQ ID NO: 115836 - DNA, 1000 bp, Homo Sapiens
tgtggttatctggtggtatatggatgagggtcttctggccccccattggcttttagggactggtctggcttcttcactgattgggtatgttttgtttgatctcattgatggaggtgaagggcggaagaagagtgggcagacccggtgggctgacctgaagagtgccctagtcttcattactttcacttatgggttttcaccagtgctgaagacccttacagagtctgtcagcactgacaccatctatgccatgtcagtcttcatgctgttaggccatctcatcttttttgactatggtgccaatgctgccattgtatccagcacactatccttgaacatggccatctttgcttctgtatgcttggcatcacgtcttccccggtccctgcatgccttcatcatggtgacatttgccattcagatttttgccctgtggcccatgttgcagaagaaactaaaggcatgtactccccggagctatgtgggggtcacactgctttttgcattttcagccgtgggaggcctactgtccattagtgctgtgggagccgtactctttgcccttctgctgatgtctatctcatgtctgtgtccattctacctcattcgcttgcagctttttaaagaaaacattcatgggccttgggatgaagctgaaatcaaggaagacttgtccaggttcctcagttaaattaggacatccattacattattaaagcaagctgatagattagcctcctaactagtatagaacttaaagacagagttccattctggaagcagcatgtcattgtggtaagagaatagagatcaaaaccaaaaaaaatgaaccaaaggcttgggtggtgagggtgcttatcctttctgttattttgtagatgaaaaaactttctggggacctcttgaattacatgctgtaacatatgaagtgatgtggtttctattaaaaaaataacacatccaaaaaaaaaaaaaaaaaaaaaaaaaaaaaaaaaaaaaa

SEQ ID NO: 115837 - DNA, 1000 bp, Homo Sapiens
cgcctgcgcgtgggcctgggccgcccgtcgtacctgatggtaggaggcagtagttccccgcttcccttccgcgggagggagagttagctagccatccaagaaaacaccatgaaagataacgatatcaagagactactgtatacccatcttttatgcatattttcaattatcctaagtgtcttcattccatcactcttcttggagaacttctcaatattggaaacacacttgacatggttgtgcatctgttctggttttgtaactgctgtcaatctagtactatatttagtagtgaaaccaaatacatcctctaaaagaagttcattatcacacaaggtaactggatttttgaaatgctgtatctactttcttatgtcttgtttctcctttcatgtaatttttgttctgtatggagcaccactgatagagttggcattggaaacatttttatttgcagttattttgtctacttttactactgtgccttgcttatgtttgttaggaccaaacctcaaagcatggctaagagtgttcagtagaaatggagttacatccatatgggagaatagtctccagatcactacaatttctagctttgtaggagcatggcttggagcacttcctattccactggattgggaaagaccatggcaggtatggcccatctcctgtacgcttggagcgacctttggctacgtggctggccttgttatttcaccactctggatatactggaatagaaagcaacttacatacaagaacaattaactggagcaaagggagatatttctttgtgcagattctgtaagggctgggcagaaatgtgtatggtcaaagccaagcagttccatttacagctctgttttttacgtagttacaacatgatgtgattgtagctttttaaactatgaaacccctgagagattgtaccttctagttgaaataaagtatttataatagattgtggctaaaaaaaaaaaaaaaaaaaaaaaaaaaaaaa

SEQ ID NO: 115838 - DNA, 1000 bp, Homo Sapiens
cgcccaggctggagtgcagtggcgcaatctcggctcactgcaacctccgcctcccaggttgacaccattctcctgcctcaccctcccaagtagctgggactacaggcgcctgccagcacgcctggctaattttttgtatttttagtagagacagggtttcaccgtgttagccaggatggtctcgatctcctgacctcgtgatccgcctgcctctgcctcccaaagtgctgggattacaggcgtgagccaccgcgtccggcctctttttttcttttcttttttttgagacaaagtctcactgtgtcacccagactggaatgcagtgacacaatctcggctcactgaaacctctgccttccaggttcaagctattctcatgcctcagcctctcaagtagctgggactacagatgtgggccaccatgtctggctaattttttttttttttttttttttttgtagagacagggtttcgccatgttgacgagactggtctcgaactcctggcctcaagtgatctgccgcctcagcttctcaaagtactgggattatataggcatgagccactgagcctggccctgaagcgtttttctcaaaggccctcagtgagataaattagatttggcatctcctgtcctgggccagggatctctctacaagagcccctgcccctctgttggaggcacagttttagaataaggaggaggagggagaagagaaaatgtaaaggagggagatctttcccaggccgcaccatttctgtcactcacatggacccaagataaaagaatggccaaaccctcacaacccctgatgtttgaagagttccaagttgaagggaaacaaagaagtgtttgatggtgccagagaggggctgctctccagaaagctaaaatttaatttcttttttcctctgagttctgtacttcaaccagcctacaagctggcacttgctaacaaatcagaaatatgacaattaatgattaaagactgtgattgcc

SEQ ID NO: 115839 - DNA, 1000 bp, Homo Sapiens
ggagcagatggtggatggcagtatgcggtctatcaccaccaaactctatgacggcttccagtacctcaccaacggcatcatgtgacacgctcctcagcccaggagtggtggggggtccggggcaccctccctagagggcccttgtctgagaaaccccaaaccaggaaaccccacctacccaaccatccacccaagggaaatggaaggcaagaaacacgaaggatcatgtggtaactgcgagagcttgctgaggggtgggagagccagctgtggggtccagacttgttggggcttccctgcccctcctggtctgtgtcagtattaccaccagactgactccaggactcactgccctccagaaaacagaggtgacaaatgtgagggacactggggcctttcttctccttgtaggggtctctcagaggttctttccacaggccatcctcttattccgttctggggcccaggaagtggggaagagtaggttctcggtacttaggacttgatcctgtggttggccactggccatgctgctgcccagctctacccctcccagggacctacccctcccagggaccgacccctggcccaagctccccttgctggcgggcgctgcgtgggccctgcacttgctgaggttccccatcatgggcaaggaagggaattcccacagccctccagtgtactgagggtactggcctagccatgtggaattccctaccctgactccttccccaaacccagggaaaagagctctcaattttttatttttaatttttgtttgaaataaagtccttagttagccacttgtgtcatttccaggttttctgggggagtgcagggggagatgggtgatgaggtatgaacggatgcctcagtgtccaagatacaaaaggcaccacatagaagtttgctttttccctgcctgtcttggtcactaccacctcttccctgagaagggcgggccttccatgttctctcacccgcttcaactccacat

SEQ ID NO: 115840 - DNA, 591 bp, Homo Sapiens
cttctctgggacacattgccttctgttttctccagcatgcgcttgctccagctcctgttcagggccagccctgccaccctgctcctggttctctgcctgcagttgggggccaacaaagctcaggacaacactcggaagatcataataaagaattttgacattcccaagtcagtacgtccaaatgacgaagtcactgcagtgcttgcagttcaaacagaattgaaagaatgcatggtggttaaaacttacctcattagcagcatccctctacaaggtgcatttaactataagtatactgcctgcctatgtgacgacaatccaaaaaccttctactgggacttttacaccaacagaactgtgcaaattgcagccgtcgttgatgttattcgggaattaggcatctgccctgatgatgctgctgtaatccccatcaaaaacaaccggttttatactattgaaatcctaaaggtagaataatggaagccctgtctgtttgccacacccaggtgatttcctctaaagaaacttggctggaatttctgctgtggtctataaaataaacttcttaacatgcttaaaaaaaaaaaaaaa

SEQ ID NO: 115841 - DNA, 1000 bp, Homo Sapiens
ggtaaggggatgacatgcccaggtgtcagctcaaaggatctctgcatcatcttgaggtgggaggcagggaaaggagcgccaatgaggttccctgcaacccccgccctccagcccaccgcccagccttttacaaatggcattttcttaattgaaaatccgggaagcaggtgtgattacttttttgctcgtagatattgtcctaagttggaattctcccactgccctaaaactttccctagtagtcctttaaactcccccctccctttttggtagctgtttctccgtcctctctccacctgccctcttatctaggagctgtttgtaagcacgatttttttaacaggttatattgtacaggatcaatattttgctttttaacaaggatatttatgtaataagaaactttgccttaggcaggtgttggccagaaaagtccagattcctctgggatcccaccctggcctctcctggaactctgaacctgctgtggaaggaattggccatgaccttcacctctggagagtagggtctatggcgagggaaaagggtgttcaccatgataacctagtgcctccatagaggggtttggaaaaattccagtccgatttctttgtgtgtcagctgacttccttagctgattgttcccacttgcacctctccacctttggcactagaactcctgagacaccacttctcatgcttctccctccctaccagcggtcaaggctttggagccactcttttgtaactccagattatttaaagagaaaagtacaagacagaaatcttctagcactttgtaaacacagtgaataacctcttggagtatttttggctttatataaaacaaggtttttaattgtaaagtataagtgccattagaaaatgcacagggcatatctttgttaaagtagatttttcaatgttttacagaattacattttcaaaaaaaggtttttataatgaagttgtttattaaaaacttctgaatgatgtgttc

SEQ ID NO: 115842 - DNA, 1000 bp, Homo Sapiens
ttcttaccctggatccgcagtcacaccaaggaagagaatggcctggccctctgagggtccccagggaggaaacgggcaccacccgctttcttgctggttgtcatttttgcagtagagtcatctccatcagctgtaagaagagactgggaagataggctctgcacagatggatttgcctgtgccacccaccagggcgaacgacaatagctttaccctcaggcataggcctgggtgctggctgcccagacccctctggccaggatggaggggtggtcctgactcaacatgttactgaccagcaacttgtctttttctggactgaagcctgcaggagttaaaaagggcagggcatctcctgtgcatgggtgaagggagagccagctcccccgacggtgggcatttgtgaggcccatggttgagaaatgaataatttcccaattaggaagtgtaacagctgaggtctcttgagggagcttagccaatgtgggagcagcggtttggggagcagagacactaacgacttcagggcagggctctgatattccatgaatgtatcaggaaatatatatgtgtgtgtatgtttgcacacttgtgtgtgggctgtgagtgtaagtgtgagtaagagctggtgtctgattgttaagtctaaatatttccttaaactgtgtggactgtgatgccacacagagtggtctttctggagaggttataggtcactcctggggcctcttgggtcccccacgtgacagtgcctgggaatgtattattctgcagcatgacctgtgaccagcactgtctcagtttcactttcacatagatgtccctttcttggccagttatcccttccttttagcctagttcatccaatcctcactgggtggggtgaggaccactcctgtacactgaatatttatatttcactatttttatttatatttttgtaattttaaataaaagtgatcaataaaatgtgatttttctgatgaaaaaaaaaaaaaaa

SEQ ID NO: 115843 - DNA, 1000 bp, Homo Sapiens
gcaaaaactgtactgtgtttcgcattaagcacacacatctggccctgacttctggagatggatccttccatcttgtggggccaggaccatggccgaagccccttggagagagaggctgcctcagccagtggcacaggagactccaaggagctactgacattcctaagagtggaggaggaggaggagccttgctgggccagggaaacaaagtttacattgtcctgtagctttaaaaccacagctgggcagggtgagaagctagatgcccctgcagtttggccctggagccagggcagaggaatgtagggcctgcatggagaagggttctgccctgcctgaggaggaggacacagcacaagggcacattgcccatggctgggaacatgacccagcctgaaagatacaggggatcatgttaaaaatagcagtattatttttcgtctcaatggtattgtaactaagttatttactcctcctgctcctcacccctgtagggaaaccttggagaggagagtggcaggtgggctgcctgctgtgttaagaggacttagtttgtgatgtaaggcactgtcaggaatggggggcgggccagggtgggaagagaagaaatagcagagcctattttggtgaggttttttgtttttaagtcaaagaagactcagtatgctttccctgaggaatgaaaaagggattgaggagttgcctgactcctgggtgggtggggtacaggcagttaggtgctgaatgaagctgccatccttgctgcagcttctaactggtaaaaagatccagggatggagatgggaaggttagaaaggcagccctcacctctgaggacagaggccggggtccaggcccgtgggcgcaaaggtgcctcatagcatagccagcattcagcacacacaaacctactgcccacatttgggctcagggttggccatttgctagttctgctgccctcttaagatctgactgccaaataaatcatcctcatgtcctt

SEQ ID NO: 115844 - DNA, 1000 bp, Homo Sapiens
tggttttgagggttttgacttctattacttttggcagcctggaaagttgtgtcttctgggaaagagacccggggaggccaggagtagctgagggtcctttctgtgcccttaaaccgcccagaggagccctattccactctggttttaggctgatctgagagggtctccctttgttcctttctggagcatttctctaacgtttattacaattaggagggggaccccacatctgtgagattctgtttcatttgaggtttacagaaaaaaaaaagtggccagatgtgttccccccatgggtgagaggcctgggcaactgcctggtgaatgtgtcttgcggcagctgcagcaagtggaggggctgaactactggccagctcactggatgatgggttaatacaacaactgcactgtaaggactcagagccacacagaacttctgagaggggctgttagcattgcgcagcatcttcagttctccagtaaatgatattgcgttcgtgcctcagctttaagcacaagtagcagcagctcctgcttgagttctgagggcatcatggccctatgattaaccagagtgatctaacctagactaaaattgggaacttatttgcaatttttgaccctgaccactaactagtgattcttctccaaaattgagaaagacagcacccattgaaacagatatgtgtgtgaaagtatatttttcaattccagatttttaattttaaggctccaggaaagaaaggagagtagaacatttttcctcattttatcaaatcctctcttgccctccctcaattcccctgtaacattcctgaagctgttcccactcccagatggttttatcaatagcctagaggtaaagaactgtctttttctctgattctttaataaattatctttatagaatatgcacaagtttttctacactcagtgttaaagtatttattaatgggaagtcaacttaatgttttgaaataaatatatgactctgtttaat

SEQ ID NO: 115845 - DNA, 1000 bp, Homo Sapiens
tacaatgccaaaaccccagtggcacccaccgtggaaactctacagggttatcagtgggcatcttggctgggttcgatgtattgctgtggaacctggaaatcagtggtttgttactggatctgctgacagaactataaagatctgggacttggctagtggcaaattaaaactgtcattgactgggcatattagtactgtgcggggcgtgatagtaagcacaaggagcccatatctgttctcttgtggagaagacaaacaagtgaaatgctgggatctcgaatacaataaggttatacggcattatcatggacatttaagtgcagtgtatggtttggatttgcacccgacaatcgatgtgttggtaacctgtagtcgagattcaactgcacggatttgggatgtgagaactaaagccagtgtacacacattatctggacatacaaatgcagttgctacagtgagatgtcaggctgcagaaccacaaattattacaggaagccatgatactacaattcgattatgggatctggtggctggaaaaacaagagtgacattaacaaatcacaaaaaatcagttagggctgtggttttacatccaagacattacacatttgcatctggttctccagataacataaagcagtggaaattccctgatggaagtttcattcaaaatctttccggtcataatgctattattaacacattgacggtaaattctgatggagtgcttgtatctggagctgacaatggcaccatgcatctttgggactggagaactggctacaattttcagagagttcacgcagctgtgcaacctgggtctttggacagtgaatcaggaatatttgcttgtgcttttgatcagtctgaaagtcgattactaacagctgaagctgataaaaccattaaagtatacagagaggatgacacagccacagaagaaactcatccagtcagctggaaaccagaaattatcaagagaaagagattttaatga

SEQ ID NO: 115846 - DNA, 1000 bp, Homo Sapiens
acagaccttcatggacgcctgcaccctggccgaccacaagctgggccgggactccccgatcaacaaacttctgtatgcacgggacattccccggtacaagcggatggtggaaaggtactatgcagacatcagacagactgtcccagccagcgaccaagagatgaactctgtcctggctgaactgtcctggaactactccggagacctcggggcgcgagtggccctgcatgaactctacaagtacatcaacaagtactatgaccagatcatcactgccctggaggaggatggcacggcccagaagatgcagctgggctatcggctccagcagattgcagctgctgtggaaaacaaggtcacagatctataggaacccaggagccacggcctgctgttgcttcagcctggcctgggcagccctggaagctcggaggagaggccaccttcttaggtgcctgtagtgactgacaagcagagttagtggaaggtgactcccagtctcctggtggctctggcctcggccctgctggatccacctcctagacccggggcctcaaggctcatggggtagtacccagcctgctccccgagtccagcgaccctgtgacaccggtctgcagggagttggggactaagggcttccagagagtggctggaagagactccaggcccctggggagactgtactgttcctgaacactggccttggccacactgggattcggagaggaaggaggagagccccatgcttcctgtctgcctcctccaccatccctgacctcagttgagctgcctctggccttgttgctgctgccacatcctaggtctaagagttgaacgcctctcctaggccactacaaactgacccctcagcagggctggctgccacagggctgccctgcctcataggtagccatggtgagggctatctgctgcaggggggtcttggggagagtggtgactccattgacccagcttttcattaaaggataacacactg

SEQ ID NO: 115847 - DNA, 1000 bp, Homo Sapiens
gagagcattgctacgtctgacataccacgtaccccggtgctgggctgctgcatcagccgagccctggagccctcggctgtccaggaagagtttatgaccagccgtgtgaattgggtggtacagagctctgctgttgactacttacacctcatgcttgtggccatgaagtggctgtttgaagagtttgccatagatgggcgcttctgcatcagcatccatgacgaggttcgctacctggtgcgggaggaggaccgctaccgcgctgccctggccttgcagatcaccaacctcttgaccaggtgcatgtttgcctacaagctgggtctgaatgacttgccccagtcagtcgcctttttcagtgcagtcgatattgaccggtgcctcaggaaggaagtgaccatggattgtaaaaccccttccaacccaactgggatggaaaggagatacgggattccccagggtgaagcgctggatatttaccagataattgaactcaccaaaggctccttggaaaaacgaagccagcctggaccatagcactgcctggaggctctgtatttgctcccgtggagcttcatcggggtggtgcaggctcccaaactcaggctttcagctgtgctttttgcaaaagggcttgcctaaggccagccatttttcagtagcaggacctgccaagaagattccttctaactgaaggtgcagttgaattcagtgggttcagaaccaagatgccaacatcggtgtggactacaggacaaggggcattgttgcttgttgggtaaaaatgaagcagaagccccaaagttcacattaactcaggcatttcatttattttttccttttcttcttggctggttctttgttctgtcccccatgctctgatgcagtgccctagaaggggaaagaattaatgctctaacgtgataaacctgctccaaggcagtggaaataaaaagaaggaaaaaaaagaaaaaaaaaaaaaaaaaaaaaaaaaaaaaat

SEQ ID NO: 115848 - DNA, 1000 bp, Homo Sapiens
ataaatattattgcaattaagtgatcaagtacagacacaataggggccagttttgtttaaggatcaaagagacaaccactttggggaattagtatcaacttacaatccaagtccaagtatcatcttataatcacttttttctactatattaagatctaatgaatttgatttcttttttgaagttttttcttgtaacatctgagattagaagtttaagatgacttgaccccaaacctttgtttatgtaagaatttttaaacataaaagtgtttgtttctgttatgttaccataatttgatgtatatagtgtccagatccatttagaaatttaatatttattaataactgaaactgtttgtcttcctttggtatatagtctcgcatattatattatagcaggccaagataaaattttgacagctctttaagcccacatgcagcagtgggtcagataaccctgtggcagtgacacgggcaaattggcatttgaataaagccctgggaccacctcaacatgcgtagcctcttgtcttaaatgtactccccatggcagcatggaggaggcaagacctgtgggtcaattttgaactggccttactttgatttttaaaacaagagactcagggaaagtactaaaccaaaatctctgattttactttgcgttttctgtagtttttgttttactgagatgcttttgtaaaggaaaataatactgtgacagtttagtaattctacagattcttaatatttctccatcatggccttttacttcacaattttctgaagtctgaattcaattacaatttttttttaccaatttaatctcaaatgttgtttaactgctttaaattcatatacgtagagtattataaactgcagagatgaaaaatgtgttttcacgggatttatattgtgaactaaactaagcctactttttgtgacttatttgtgatgccttgttgataaatatgtgtaataagtatgtttaaaaaaaaaaaaa

SEQ ID NO: 115849 - DNA, 1000 bp, Homo Sapiens
ggtactgaagaaagtgaagactctctgcctccgccaaaatttaattaaatgcattgagaatctggaggagctacagagtcttcgagagctggatctttacgacaaccagatcaagaagattgagaatctggaggcgctaacagagctggagattctagatatttcttttaatctgctgagaaacatcgaaggggttgacaagttgacacgactgaaaaaactcttcttggtcaacaataaaatcagtaaaattgagaacttaagcaacttacatcaactacagatgctagagctgggatctaaccgcatccgggcaatcgaaaatatcgacaccttaaccaacctggagagtttgtttttggggaaaaacaaaattactaaacttcagaacctggatgcgctcaccaacctgacagtcctcagtatgcagagcaaccggctgaccaagatcgagggtctgcagaacctggtgaacctgcgggagctgtaccttagccacaatggcatcgaggtcatcgagggcctggagaacaataacaaactcacgatgttggacattgcatcaaatagaatcaaaaagattgaaaatatcagccatctaacagagctgcaagagttctggatgaacgacaatctccttgagagctggagcgacctcgacgagctgaagggagccaggagcctggagacagtgtacctggagcggaaccccttgcagaaggacccccagtaccggcggaaggtcatgctcgccctcccctccgtgcggcagatcgatgccacgttcgtcaggttctgagtccttcttggctcctcatgtggtccctctcctcggaagaactgcccagccacgggtttttaacccacctgttgctcctgaggtcgtcactatatcaacagtcacaaacccaatggcaataaaggcactgacgatagctggcgcgcgcgacgccacacaccattttcagatgccgttgcaattaaatcttgccacactgtc

SEQ ID NO: 115850 - DNA, 1000 bp, Homo Sapiens
gtgcgcattgatgtacatattttcctccagtctggggaggagagagactggaaacgttcctggactgctgaagaggagacccagttggcttcactttttgagaagattcgccctgtaccccaaacccctttccagtattacccttaatgcttgagaacctaaagctggttatcctggcgaacacccctacccttctattgcgggtccccacatgcacacagaactctgacacaggatcagctgcacttaagaaatcatcccagctaagttcattattcctcatggggtggggagatgctgaaaggggtattgtatatcccactgcactgagagggctcaatcagctggatttgagttctggaacacacatcatccccacccctcccccagcgtgggctcaccattcttagtcctttctcaagtgggaccttcaactttctgtgaacacccagtctgcgtcctgggtctgctaggttcgatgatggcgaactcgtatctgcatccggtgcaagttttagctggcagaggtgagaccggtggtgctggtctgcctttgccaactatagccagtctggagacttgataaaatacttcagtgagaccagcttctcatcaacttgggcccggcgtgctgggcctgaaagtcacactacatgcactgcctttgggagtcagctcactccctgctcccacctggaaccttgccagcgtgaaggaggcttccaggtacttcaccctgtcaaccacctctgaatccccaccaggcgccttcctgggtggattcaacaagatgattttgccctttcccagttctctccttcactttggcatcagttgttttctatgaaaacagtggattggttgggttttgtgcagggtcttgggttagagccaaaatggatttgaggatgagtatttttttttttggttttgtatattttgtacattaataataaacagtggaaagagaagcagcttaaaaaaaaaaaaaaaaaaaaaa

SEQ ID NO: 115851 - DNA, 1000 bp, Homo Sapiens
catataacctatgccaataaaaatgtctcagcaacagtggaattcaccttggtgtttctctctgtaatttgtgtggggtttacccctcacaggtttaagagaccaggtcttgtttctctctctgtgctaccaagaagatgtgaacctgaggatgcatcttgtttcataagaaggaaggcaggtgaatatgtggtttctaacgaggtcttgttgaaataacgggctgccctcagctcacagaaataccacagctcagccactgtgatgcagagccccaggggtctttgccagacaacttgtcctgactcaacagagacggcagcctgacctttgagctggcttgtccaggcattcaggttgcttgcgtagacttccagggaagcaagcctgtccttcctgacccggcggttaacctggtgcacttttgttcctttgttaactgttgtgttgtcactaaactgaaaggctggggcttgcccttagacgtcacattggctctgtccctgtggcgatggcagggcagggtggccaaacaggtcaggtgcttgttctgtcctcttgccttttacttaaattcctctgacttttaaaaatggtgacactcttatcgtaaagcttcttatttttctccactgcttggatatgaaactgtagagggagaggccctgttgcccagtgttctcctggtttagcagctgaggtgactgcagtctgatgtgatgtaactgtttccctttgattctccagtattcctgtttccatccagttccttactctcctctttcctcttccctcgcatgtctccctccagtcctctgtacctagaatagtctcactgtcccccgtttgcctccacgagcctgctgtttccaggaaattacataacgttcagttgggatggaaatcttccggaggacgaatagagtttaattactcattgcgtcggaaagccaagccatttctgtctccagagttgttctcttaaactgatatgagttct

SEQ ID NO: 115852 - DNA, 1000 bp, Homo Sapiens
tacaataatttcttcagaatgtttgacagaaacacaaagcgagacataaccctagaagcatcgcgggaaaacaataagcctcgcacagttctgaagcctcgcaaagtctgtgcaagtggcaagcgaaagaaagatgaaataagtgttgacagcctagacttcaataagaaaatccttcacacagcctggcaccccaaggaaaatatcattgccgtagctactacaaacaatctgtatatatttcaagacaaagtgaattagggttggcattcctagcagaagaacccacttcctgcttagttgagatagttgaatctagcattcgttcctataaaagagagaggtccattgtggcgcccctttccagtgtttgacagtgtgccattcgacaacacattgttatagctacatggagaaagctctgtggattcatcactgtggtgttctccatgtctgctagccatttaggtaagggtagggcacttttaatttaaatgacttcttgcaccatcttgcctaatggactagattggactgtatcaacattgatttactccactttttatgccttccattgtgatgacgtcaaacacagtgaaagccttcagtcatgctatgggatttaattgtgtatcctcattactgtatcatttgtggggtacaccccttccccctttttttaaattaaatacagctcattcttactgtggcttgtagcattcctcctcttctggcctcctggactgctccccttcatctcttacccttgccccctccacccggtcttggtggtggtatattaaaaaaagaaagaatgaaagcacacaaaatgagtcagtttggggtcagtggtataaagggggtatatgttgcaaacaaatgttttagtaacagttggctgtaatcactcctcgccgtgtctggcactgaaaataaggaaaaaaaacctactactgaataaaagtgacaaagaatggaaaaaaaaaaaaaaaaaaaaaaa

SEQ ID NO: 115853 - DNA, 1000 bp, Homo Sapiens
cactgatccggggcaaccatgagagtcgccagatcacgcaggtctatggcttctacgatgagtgcctgcgcaagtacggctcggtgactgtgtggcgctactgcactgagatctttgactacctcagcctgtcagccatcatcgatggcaagatcttctgcgtgcacgggggcctctccccctccatccagaccctggatcagattcggacaatcgaccgaaagcaagaggtgcctcatgatgggcccatgtgtgacctcctctggtctgacccagaagacaccacaggctggggcgtgagcccccgaggagccggctacctatttggcagtgacgtggtggcccagttcaacgcagccaatgacattgacatgatctgccgtgcccaccaactggtgatggaaggttacaagtggcacttcaatgagacggtgctcactgtgtggtcggcacccaactactgctaccgctgtgggaatgtggcagccatcttggagctggacgagcatctccagaaagatttcatcatctttgaggctgctccccaagagacacggggcatcccctccaagaagcccgtggccgactacttcctgtgaccccgcccggcccctgccccctccaacccttctggccctcgcaccactgtgactctgccatcttcctcagacggaggctgggcgtggggggggctgtcctggctctgctgtcccccaagagggtgcttcgagggtgaggacttctctggagaggcctggagacctagctccatgttcctcctcctctctccccacttgaaccatgaagtttccaataatttttttttctttttttccttcttttttctgtttgtttttagataaaaattttgagaaaaaaaatgaaaaaattctaataaaagaagaaaaatgaaaaaaaaaaaaaaaaaaaaaaaaaaaaaaaaaaaaaaaaaaaaaaaaaaaaaaaaaaaaaaaaaaaaaaaaaaaaaaaaaaaaaaaaa

SEQ ID NO: 115854 - DNA, 1000 bp, Homo Sapiens
ttatctcctgatatcaaaacactggatcaaattcgaaccatcgaacggaatcaggaaattcctcataaaggagcattttgtgatctggtttggtcagatcctgaagatgtggatacctgggctatcagtccccgaggagcaggttggctttttggagcaaaggtcacaaatgagtttgttcatatcaacaacttaaaactcatctgcagagcacatcaactagtgcacgaaggctataaatttatgtttgatgagaagctggtgacagtatggtctgctcctaattactgctatcgttgtggaaatattgcttcgatcatggtcttcaaagatgtaaatacaagagaaccaaagttattccgggcagttccagattcagaacgtgttattcctcccagaacgacaacgccatatttcctttgaggccttcgcccatcctgctgacccatttttctgccctcttcttaccccaattttcttgtattaccctctacaatatactttttattgagcactttgctgctgaaatgctgcctcttgccttttttttttttaaattttaaattatctaaatttattgtttgttgtggtgtctatagcaaagtttttctatcaattttcccccatcccatccccaccctggactcatttgagaagacttgagaaatgtcttaatactcacactgctgcatgtagctcttgcttatttactggtctgggaaacaggatgtgtttccttttttttaaaagccaattgacagattacacctaaatactcctccttttgtatcattcagccttttgttttagtttggtaagttttaagaaatttcagcagcaaagttgttattcagtgggcacgatggactccaaatgcctcaagttatgtatacctgtcccagatgtaaacttcattgtcctttgttggatgatattttaaatggatataaaataaattggtctaaaggacaaaaaaaaaaaaaaaaaaaaaaaaaaaaaa

SEQ ID NO: 115855 - DNA, 944 bp, Homo Sapiens
cagagttgggagtgactccagagcctccagcgagatgctgctgattctgctgtcagtggccctgctggccctgagctcagctgagagttcaagtgaagatgtcagccaggaagaatctctcttcctaatatcaggaaagccagaaggacgacgcccacaaggaggaaaccagccccaacgtcccccacctcctccaggaaagccacaaggaccacccccacaaggaggaaaccagtcccaaggtcccccacctcctccaggaaagccagaaggacgacccccacaaggaggcaaccagtcccaaggtcccccacctcatccaggaaagccagaaagaccacccccacaaggaggaaaccagtcccaaggtaccccacctcctccaggaaagccagaaagaccacccccacaaggaggcaaccagtcccaccgtcccccacctcctccaggaaagccagaaagaccacccccacaaggaggtaaccagtcccaaggtcccccacctcatccaggaaagccagaaggaccacccccacaggaaggaaacaagtcccgaagtgcccgatctcctccaggaaagccacaaggaccaccccaacaagaaggcaacaagcctcaaggtcccccacctcctggaaagccacaaggcccacccccagcaggaggcaatccccagcagcctcaggcacctcctgctggaaagccccaggggccacctccacctcctcaagggggcaggccacccagacctgcccagggacaacagcctccccagtaatctaggattcaatgacaggaagtgaataagaagatatcagtgaattcaaataattcaattgctacaaatgccgtgacattggaacaaggtcatcatagctctaactttaatataccaataaaataatcagcttgcaaaaaaaaaaaaaaaaaaaaaaaaaaaaaaa

SEQ ID NO: 115856 - DNA, 1000 bp, Homo Sapiens
tattaatggaggttcaaatggaggcctcttagtggctgcttgtgcaaatcagagacctgacctctttggttgtgttattgcccaagttggagtaatggacatgctgaagtttcataaatataccatcggccatgcttggaccactgattatgggtgctcggacagcaaacaacactttgaatggcttgtcaaatactctccattgcataatgtgaagttaccagaagcagatgacatccagtacccgtccatgctgctcctcactgctgaccatgatgaccgcgtggtcccgcttcactccctgaagttcattgccacccttcagtacatcgtgggccgcagcaggaagcaaagcaaccccctgcttatccacgtggacaccaaggcgggccacggggcggggaagcccacagccaaagtgatagaggaagtctcagacatgtttgcgttcatcgcgcggtgcctgaacgtcgactggattccataaacagttttcgtgcttcctcctgacagcgacagaaaacctcaagggctttcccacgttgacaccaagaaaccactgggcataatgcttccccacgggaacattattcctgcactcacaggctacagttgaacagaactgccgtgggaattttatcttttttaggcttctcctttttagcaaggccttggtgtttctttttccaccctgtctaggcacatgtggttttttggtgttttttttaagggcatgttgggataaatagctaaatggcaacaaacacattgtgaatattagattgctgaattaaggatcatagtcgggcatacttatctatatccataacctctatatctttaaataaatgtgagaactgttctcatggagaagacttctttgcaacaataataaatgttatttaagaatgacaggcttttacttccggtttcttcatattgaggggcaactccagaagtggagttttctgtgagaataaagcatttcacctttctgcaa

SEQ ID NO: 115857 - DNA, 1000 bp, Homo Sapiens
tttcgccaagcgcgtgaagggccgcacttggaccttgtgcgggaccccagagtacctggcccccgagatcatcctgagcaaaggctacaacaaggccgtggactggtgggccctaggggtgctcatctatgagatggccgtgggcttcccacccttctacgccgaccagcccatccagatctacgagaagatcgtctctgggagggtgcggtttccctccaaactcagctctgacctcaagcatctgctgcggagcctgctgcaggtggacctcaccaagcgcttcggaaacctcaggaacggggttggcgacatcaagaaccacaagtggttcgccacaaccagctggatcgccatctatgagaagaaggtggaagctcccttcatcccgaagtacacaggccctggggatgccagtaactttgacgactacgaggaggaagagctccggatctccatcaatgagaagtgtgccaaggagttttctgagttttaggggtgtgcttgtgcccctgtgggttttctttcctttttgtttttggtggtttgggggatgggagggttggattgaacagccagagggccccagagttccttgtatctaatttcatcctcaccccaccctccagggttgggggagcaggaagcccagatatttggaggaacagaaacaccagctgctccctcaccccccgccccatgccttcctggtccctctgtgcttctctctttctcctcccacagggtcccccttgccccagcccccttctgcctgttttaaacgagtttctcagctctattcaggccaggtcttgctgttgtatcaagggacacggtgtggaaagaggggctcaaacttaactccagccctgaacaggcaccacttactaagagaggatgaatgaaaagcacacctaccctttggagtaatcctgcctgggaaggagagaggtttagtgccatgttcagtgggctgtttgctagaataaaaaattaaaac

SEQ ID NO: 115858 - DNA, 1000 bp, Homo Sapiens
atgtgttacattattccaatgatacccaacagtttatttttattatttttttaaacaaaatttcacagttctgtaatgtaggcacttttattttcattgtgatttatatataaggtaatgtagggttatatttgggagtgactgcaagcatttttccatctgtgtgcaactaactgactctgttattgatcccttctcctgccctttcccaggtaatttaaattggtcatggtagatttttttcatagatttgaaaaacttttaggttgttaccaagtatgaagtataaatctggggaagaggttttatttacattttagggtgggtaagaaagccaccttgttacaaattttttaatttccaaaataatctatattaaatgagggtttctgatctgtactttgtgtttagctacctttttatatttaaaaaattaaaaatgaaaattacgttcttacaagcttaaagcttgatttgatctttgtttaaatgccaaaatgtacttaaatgagttacttagaatgccataaaattgcagtttcatgtatgtatataatcatgctcatgtatatttagttacgtataatgctttctgagtgagttttactcttaaatcatttggttaaatcatttggcttgctgtttactcccttctgtagtttttaattaaaaactttaaagataagtctacattaaacaatgatcacatctaaagctttatctttgtgtaatctaagtatatgtgagaaatcagaattggcataatttgtcttagttgatattcaaggctttaaaagtcattattcctgggcttggtaagtgaatttatgagatttactgctctagaaagtatagatggccaaaggaccgttttgtattgcttcctgattaccagtctgattataccatgtgtgctaatatactttttttgttatagattgtcttaatggtaggtcaagtaataaaaagagatgaaataatttaaattcttaaaaaaaaa

SEQ ID NO: 115859 - DNA, 1000 bp, Homo Sapiens
aaagacatttttagtgtcccccatccagaggcagccctggaataggattcccaggggtttctgggacccctttccttgctccgtgaggctctgtggccatcttttggcaggaggaggatgcttccttggctctgtgcccagacccgcctggtccccaggtctctcaccttgggtgaagattcagagatgccctgtaaggattttgcccactgggcaactcagaaatacttcgatctcccaagatataagaggcagcagcaaacgtgcctattgacgtctgtttcatagttaccacttacgcgagtagacagaactcggcttttcagaaaataggtgtcaagtccactttataagaacctttttttctaaaataagataaaaggtggctttgcattttctgattaaacgactgtgtctttgtcacctctgcttaactttaggagtatccattcctgtgattgtagacttttgttgatattcttcctggaagaatatcattcttttcttgaagggttggtttactagaatattcaaaatcaatcatgaaggcagttactattttgagtctaaaggttttctaaaaattaacctcacatcccttctgttagggtctttcagaatatcttttataaacagaagcatttgaagtcattgcttttgctacatgatttgtgtgtgtgaaggacataccacgtttaaatcattaattgaaaaacatcatataagccccaactttgtttggaggaagagacggaggttgaggtttttccttctgtataagcacctactgacaaaatgtagaggccattcaaccgtcaaacaccatttggttatatcgcagaggagacggatgtgtaaattactgcattgctttttttttcagtttgtataacctctaatctccgtttgcatgatacgctttgttagaaacattaattgtagtttggaagcaagtgtgtatgaataaagataatgatcattccaaaaaaaaaaaaaaaaa

SEQ ID NO: 115860 - DNA, 1000 bp, Homo Sapiens
aacataagtctgaaagcaatgaaaacgtcaaaggaaaatgtttatatacatccacatgtttatttaatatgtttctcttaacacctgaaacttgttttaaaacaaaaagcagtattcacttcaaatcataaacttagaattctgtatctcatgtcagaaatatgtttatggccttgcttttaagtggtgctgtttcccatagggcattagttctcagattttggaatgtgaaataatcacctaggaagttggtttaaaatgcacactagtgagcccaccttagacttcttttggggccttcgacctcactttgagaaataccttcttcaggttattctttatgtttgtcctgtggttaaatattagagtattcatgataaaacattttgagaaggggtaagcagtgagttattacccacaatttaaagcaaattttgaatgaatctttaagttaggtatctaccttcccaccagccccccaaaaaacctctcagtagtttctttcagtgtacaaaatgatgagcatttttctatgatgaggttttaaccattattcagggtggtcttttgtttttaaatctttttttaactaataagatttacggtgtgtattttatacagaaatgcattataaatgtttttaattgtgttctgttttttgcagtctttaagtgccatgccaattgttcttatattctatagaagttcgctcaaaatactcaacaggggaataggcagcggacagtcagaatggttggaattttggctttctaagaaaaactttattttgcataagcatgtggtcagatcattttgtgcatatgcagcctggattggatgttaagtaaatgcttgttcagtgccggtacatttacttaaatctgtttttatttttgtcatgtagaatactactgtggtcatcataatgtaatctatttctgtaccttttttttttttttttactttgaagtctttaaataaaatgtataatacccaaaaa

SEQ ID NO: 115861 - DNA, 1000 bp, Homo Sapiens
gccttcttggtattgtaccccaaaattctgcatagattatttagtataatggtaagttaaaaaatgttaaaggaagattttattaagaatctgaatgtttattcattatattgttacaatttaacattaacatttatttgtggtatttgtgatttggttaatctgtataaaaattgtaagtagaaaggtttatatttcatcttaattcttttgatgttgtaaacgtactttttaaaagatggattatttgaatgtttatggcacctgacttgtaaaaaaaaaaaactacaaaaaaatccttagaatcattaaattgtgtccctgtattaccaaaataacacagcaccgtgcatgtatagtttaattgcagtttcatctgtgaaaacgtgaaattgtctagtccttcgttatgttccccagatgtcttccagatttgctctgcatgtggtaacttgtgttagggctgtgagctgttcctcgagttgaatggggatgtcagtgctcctagggttctccaggtggttcttcagaccttcacctgtgggggggggggtaggcggtgcccacgcccatctcctcatcctcctgaacttctgcaaccccactgctgggcagacatcctgggcaaccccttttttcagagcaagaagtcataaagataggatttcttggacatttggttcttatcaatattgggcattatgtaatgacttatttacaaaacaaagatactggaaaatgttttggatgtggtgttatggaaagagcacaggccttggacccatccagctgggttcagaactaccccctgcttataactgcggctggctgtgggccagtcattctgcgtctctgctttcttcctctgcttcagactgtcagctgtaaagtggaagcaatattacttgccttgtatatggtaaagattataaaaatacatttcaactgttcagcatagtacttcaaagcaagtactcagtaaatagcaagtctttttaaa

SEQ ID NO: 115862 - DNA, 1000 bp, Homo Sapiens
ccaggaggacctgaattgtatcatcaacatgaaggcccgaaactacctacagtctctgccctccaagaccaaggtggcttgggccaagcttttccccaagtcagactccaaagcccttgacctgctggaccggatgttaacctttaaccccaataaacggatcacagtggaggaagcgctggctcacccctacctggagcagtactatgacccgacggatgagccagtggccgaggagcccttcaccttcgccatggagctggatgacctacctaaggagcggctgaaggagctcatcttccaggagacagcacgcttccagcccggagtgctggaggccccctagcccagacagacatctctgcaccctggggcctggacctgcctcctgcctgcccctctcccgccagactgttagaaaatggacactgtgcccagcccggaccttggcagcccaggccggggtggagcatgggcctggccacctctctcctttgctgaggcctccagcttcaggcaggccaaggccttctcctccccacccgccctccccacggggcctcgggagctcaggtggccccagttcaatctcccgctgctgctgctgctgcgcccttaccttccccagcgtcccagtctctggcagttctggaatggaagggttctggctgccccaacctgctgaagggcagaggtggagggtggggggcgctgagtagggactcagggccatgcctgcccccctcatctcattcaaaccccaccctagtttccctgaaggaacattccttagtctcaagggctagcatccctgaggagccaggccgggccgaatcccctccctgtcaaagctgtcacttcgcgtgccctcgctgcttctgtgtgtggtgagcagaagtggagctggggggcgtggagagcccggcgcccctgccacctccctgacccgtctaatatataaatatagagatgtgtctatggctgaaaaaaaaaaaaaaaa

SEQ ID NO: 115863 - DNA, 1000 bp, Homo Sapiens
ccccacacccggcccccccaccctaaccacagcgcctctccagacctacctcggaccaaatgttctctacatgaactgctcatttggaggacagcagtgaggtcctgccatagagcaaatgtgttaggagagaaggtttcacatgggacccaacatccttcatcaatactttcctgagtttgatcatccatttagccttgacaaacagcagaccctacagagatgtgttggagagcacgtcgtgaccttgggggcaaggaatccagaaaggtaggaagatatgaaaagagaggtgtcaacagcaagggctcttaggggtcaggcaccagcatggagacctcatgacaaaggagggactcaaagcagcaatgcccctcatagtgtaggctaaggtgagtttggtgcatgcaaactgtgtgtcacccacagagcatggggtaatggtgtgtagacacaggcctctgcagaagcgtggggtggggacactgacagccctatctggtcccaggacattctaccatttctgccactggtgttcagctccttctcttcccccaacactcccaaagatacccacagaagtccagccagtttccaggtagagatccaccattggtcttgggctgcgttcaccctcacaccacacgccttaaatctaatcagcaaactataatttgtcgttaaacctgcaacacattagaaacttatatttaaaaacagaattaactcacatgaccaacttttaaatggaaaatatgtaaataggaagtgtttgggttttgttttttctttaagaaaaagaaatgtacaccactcctcatgtgccattttgtcctcagagggcgcttactttttggtaaagaacaagctgctgccttgaccaggagttcatatataactgttattacagaggaattgttataactactaatgtttttaaaaaatttattaaacattattaaacttgatcaggtcaggccaaataaagttttattggaac

SEQ ID NO: 115864 - DNA, 1000 bp, Homo Sapiens
agacccccaggaaggatttcactcagctgttcccacgggccagcccccaggctgcggacctgctggagaagatgctggagctagacgtggacaagcgcctgacggccgcgcaggccctcacccatcccttctttgaacccttccgggaccctgaggaagagacggaggcccagcagccgtttgatgattccttagaacacgagaaactcacagtggatgaatggaagcagcacatctacaaggagattgtgaacttcagccccattgcccggaaggactcacggcgccggagtggcatgaagctgtagggactcatcttgcatggcaccaccggccagacactgcccaaggaccagtatttgtcactaccaaactcagcccttcttggaatacagcctttcaagcagaggacagaagggtccttctccttatgtgggaaatgggcctagtagatgcagaattcaaagatgtcggttgggagaaactagctctgatcctaacaggccacgttaaactgcccatctggagaatcgcctgcaggtggggccctttccttcccgccagagtggggctgagtgggcgctgagccaggccgggggcctatggcagtgatgctgtgttggtttcctagggatgctctaacgaattaccacaaacctggtggattgaaacagcagaacttgattcccttacagttctggaggctggaaatctgggatggaggtgttggcagggctgtggtccctttgaaggctctggggaagaatccttccttggctctttttagcttgtggcggcagtgggcagtccgtggcattccccagcttattgctgcatcactccagtctctgtctcttctgttctctcctcttttaacaacagtcattggatttagggcccaccctaatcctgtgtgatcttatcttgatccttattaattaaacctgcaaatactctagttccaaataaagtcacattctcaggttccaggtggacatga

SEQ ID NO: 115865 - DNA, 1000 bp, Homo Sapiens
acagatttcttcgcaagactatggaaaggaagtggacctctacgctttggggctaattcttgctgaacttcttcatgtatgtgacactgcttttgaaacatcaaagtttttcacagacctacgggatggcatcatctcagatatatttgataaaaaagaaaaaactcttctacagaaattactctcaaagaaacctgaggatcgacctaacacatctgaaatactaaggaccttgactgtgtggaagaaaagcccagagaaaaatgaacgacacacatgttagagcccttctgaaaaagtatcctgcttctgatatgcagttttccttaaattatctaaaatctgctagggaatatcaatagatatttaccttttattttaatgtttcctttaattttttactatttttactaatctttctgcagaaacagaaaggttttcttctttttgcttcaaaaacattcttacattttactttttcctggctcatctctttattcttttttttttttttaaagacagagtctcgctctgttgcccaggctggagtgcaatgacacagtcttggctcactgcaacttctgcctcttgggttcaagtgattctcctgcctcagcctcctgagtagctggattacaggcatgtgccacccacccaactaatttttgtgtttttaataaagacagggtttcaccatgttggccaggctggtctcaaactcctgacctcaagtaatccacctgcctcggcctcccaaagtgctgggattacagggatgagccaccgcgcccagcctcatctctttgttctaaagatggaaaaaccacccccaaattttctttttatactattaatgaatcaatcaattcatatctatttattaaatttctaccgcttttaggccaaaaaaatgtaagatcgttctctgcctcacatagcttacaagccagctggagaaatatggtactcattaaaaaaaaaaaaaaagtgatgtacaacc

SEQ ID NO: 115866 - DNA, 1000 bp, Homo Sapiens
ccccacccatggtcagaagtgtggctgccatccaccccagcctggagatccccatgctgattcctaaagaaaagcccccaatcacggttgtgggtgatgttggaggaaggattgccatcatcgtggatgacatcattgatgatgttgacagctttcttgctgcagcagagaccctgaaggaaagaggtgcatataagatctttgtgatggcaactcatggcttgttgtcttctgacgccccccggcggattgaagagtctgccattgatgaggtggtggtcaccaatacaattccacatgaagtccagaagctccagtgccccaagattaaaactgtggatatcagcatgatcctttcagaggcgatccgtcggatccacaatggggagtccatgtcctaccttttcagaaacataggcttagatgactgagttttcctttaggaaaactcccgagggccaaactggaaacataagagtgactgctcggtgggatggatttcacaggaaccgtcatgcttgttcctccctctcccctgtaacctcacttcttattgattcctaagaagatagaccaactttttatgtcggtttgggtgtttgtgagtttggggagcaatttttataaaagaaaaactttattctcctcttttgaaaaggtaagacctcgttttagttgtaactgtttaaaaaataacacttggaataagatttgtaagctcacaaagccttcttccaaagttgcttgagccaagtgcttaaaaagttaataaaataaaatgatctgtatgatacctgcaattgaaaagccgaaaagattatactgtcaagtccagtaaatgacatttttagagatgcttttgtagacaagcatatggaatatgtgattgtatttattttctgcaactaaaaaaggaataaaaacttgtgtttgtgtgtttttctaaaactttgtgttttggcaatcgttttataactaaaataaaatgaaagctaaatct

SEQ ID NO: 115867 - DNA, 807 bp, Homo Sapiens
acactctaccaccatgaatccattcctgatccttgcctttgtgggagctgctgttgctgtcccctttgacgatgatgacaagattgttgggggctacacctgtgaggagaattctctcccctaccaggtgtccctgaattctggctcccacttctgcggtggctccctcatcagcgaacagtgggtggtatcagcagctcactgctacaagacccgcatccaggtgagactgggagagcacaacatcaaagtcctggaggggaatgagcagttcatcaatgcggccaagatcatccgccaccctaaatacaacagggacactctggacaatgacatcatgctgatcaaactctcctcacctgccgtcatcaatgcccgcgtgtccaccatctctctgcccaccgcccctccagctgctggcactgagtgcctcatctccggctggggcaacactctgagctttggtgctgactacccagacgagctgaagtgcctggatgctccggtgctgacccaggctgagtgtaaagcctcctaccctggaaagattaccaacagcatgttctgtgtgggcttccttgagggaggcaaggattcctgccagcgtgactctggtggccctgtggtctgcaacggacagctccaaggagttgtctcctggggccatggctgtgcctggaagaacaggcctggagtctacaccaaggtctacaactatgtggactggattaaggacaccatcgctgccaacagctaaagcccccggtccctctgcagtctctataccaataaagtggccctgctctc

SEQ ID NO: 115868 - DNA, 1000 bp, Homo Sapiens
tgcctgtacaacatcgacgccaagcctgaggagccgcactttgtccaagaggacatggtgtgtgctggctatgtggaggggggcaaggacgcctgccagggtgactctgggggcccactctcctgccctgtggagggtctctggtacctgacgggcattgtgagctggggagatgcctgtggggcccgcaacaggcctggtgtgtacactctggcctccagctatgcctcctggatccaaagcaaggtgacagaactccagcctcgtgtggtgccccaaacccaggagtcccagcccgacagcaacctctgtggcagccacctggccttcagctctgccccagcccagggcttgctgaggcccatccttttcctgcctctgggcctggctctgggcctcctctccccatggctcagcgagcactgagctggccctacttccaggatggatgcatcacactcaaggacaggagcctggtccttccctgatggcctttggacccagggcctgacttgagccactccttccttcaggactctgcgggaggctggggccccatcttgatctttgagcccattcttctgggtgtgctttttgggaccatcactgagagtcaggagttttactgcctgtagcaatggccagagcctctggcccctcacccaccatggaccagcccattggccgagctcctggggagctcctgggacccttggctatgaaaatgagccctggctcccacctgtttctggaagactgctcccggcccgcctgcccagactgatgagcacatctctctgccctctccctgtgttctgggctggggccacctttgtgcagcttcgaggacaggaaaggccccaatcttgcccactggccgctgagcgcccccgagccctgactcctggactccggaggactgagcccccaccggaactgggctggcgcttggatctggggtgggagtaacagggcagaaatgattaaaatgtttgagcac

SEQ ID NO: 115869 - DNA, 1000 bp, Homo Sapiens
accctgactatgatgccgccagccatgaccaggacatcatgctgttgcgcctggcacgcccagccaaactctctgaactcatccagccccttcccctggagagggactgctcagccaacaccaccagctgccacatcctgggctggggcaagacagcagatggtgatttccctgacaccatccagtgtgcatacatccacctggtgtcccgtgaggagtgtgagcatgcctaccctggccagatcacccagaacatgttgtgtgctggggatgagaagtacgggaaggattcctgccagggtgattctgggggtccgctggtatgtggagaccacctccgaggccttgtgtcatggggtaacatcccctgtggatcaaaggagaagccaggagtctacaccaacgtctgcagatacacgaactggatccaaaaaaccattcaggccaagtgaccctgacatgtgacatctacctcccgacctaccaccccactggctggttccagaacgtctctcacctagaccttgcctcccctcctctcctgcccagctctgaccctgatgcttaataaacgcagcgacgtgagggtcctgattctccctggttttaccccagctccatccttgcatcactggggaggacgtgatgagtgaggacttgggtcctcggtcttacccccaccactaagagaatacaggaaaatcccttctaggcatctcctctccccaacccttccacacgtttgatttcttcctgcagaggcccagccacgtgtctggaatcccagctccgctgcttactgtcggtgtccccttgggatgtacctttcttcactgcagatttctcacctgtaagatgaagataaggatgatacagtctccataaggcagtggctgttggaaagatttaaggtttcacacctatgacatacatggaatagcacctgggccaccatgcactcaataaagaatgaattttattatgaaaaaaaaaaaaaaaa

SEQ ID NO: 115870 - DNA, 1000 bp, Homo Sapiens
gaattaacactttgaaagtgacagctggaatctcctttgcaatcccatctgataagattaaaaagttcctcacggagtcccatgaccgacaggccaaaggaaaagccatcaccaagaagaagtatattggtatccgaatgatgtcactcacgtccagcaaagccaaagagctgaaggaccggcaccgggacttcccagacgtgatctcaggagcgtatataattgaagtaattcctgataccccagcagaagctggtggtctcaaggaaaacgacgtcataatcagcatcaatggacagtccgtggtctccgccaatgatgtcagcgacgtcattaaaagggaaagcaccctgaacatggtggtccgcaggggtaatgaagatatcatgatcacagtgattcccgaagaaattgacccataggcagaggcatgagctggacttcatgtttccctcaaagactctcccgtggatgacggatgaggactctgggctgctggaataggacactcaagacttttgactgccattttgtttgttcagtggagactccctggccaacagaatccttcttgatagtttgcaggcaaaacaaatgtaatgttgcagatccgcaggcagaagctctgcccttctgtatcctatgtatgcagtgtgctttttcttgccagcttgggccattcttgcttagacagtcagcatttgtctcctcctttaactgagtcatcatcttagtccaactaatgcagtcgatacaatgcgtagatagaagaagccccacgggagccaggatgggactggtcgtgtttgtgcttttctccaagtcagcacccaaaggtcaatgcacagagaccccgggtgggtgagcgctggcttctcaaacggccgaagttgcctcttttaggaatctctttggaattgggagcacgatgactctgagtttgagctattaaagtacttcttacacattgaaaaaaaaaaaaaaaaaaaaaaaaaaaaaa

SEQ ID NO: 115871 - DNA, 1000 bp, Homo Sapiens
accaccagggctcaggccccatcctgccaaggcgaacggatgagcacgatctcatgttgctgaagctggccaggcccgtagtgctggggccccgcgtccgggccctgcagcttccctaccgctgtgctcagcccggagaccagtgccaggttgctggctggggcaccacggccgcccggagagtgaagtacaacaagggcctgacctgctccagcatcactatcctgagccctaaagagtgtgaggtcttctaccctggcgtggtcaccaacaacatgatatgtgctggactggaccggggccaggacccttgccagagtgactctggaggccccctggtctgtgacgagaccctccaaggcatcctctcgtggggtgtttacccctgtggctctgcccagcatccagctgtctacacccagatctgcaaatacatgtcctggatcaataaagtcatacgctccaactgatccagatgctacgctccagctgatccagatgttatgctcctgctgatccagatgcccagaggctccatcgtccatcctcttcctccccagtcggctgaactctccccttgtctgcactgttcaaacctctgccgccctccacacctctaaacatctcccctctcacctcattcccccacctatccccattctctgcctgtactgaagctgaaatgcaggaagtggtggcaaaggtttattccagagaagccaggaagccggtcatcacccagcctctgagagcagttactggggtcacccaacctgacttcctctgccactccctgctgtgtgactttgggcaagccaagtgccctctctgaacctcagtttcctcatctgcaaaatgggaacaatgacgtgcctacctcttagacatgttgtgaggagactatgatataacatgtgtatgtaaatcttcatggtgattgtcatgtaaggcttaacacagtgggtggtgagttctgactaaaggttacctgttgtcgtga

SEQ ID NO: 115872 - DNA, 1000 bp, Homo Sapiens
caggaccctatgaatgtgaaatacggaacccagtgagtgccagtcgcagtgacccagtcaccctgaatctcctcccgaagctgcccatcccctacatcaccatcaacaacttaaaccccagggagaataaggatgtcttagccttcacctgtgaacctaagagtgagaactacacctacatttggtggctaaacggtcagagcctccccgtcagtcccggggtaaagcgacccattgaaaacaggatactcattctacccagtgtcacgagaaatgaaacaggaccctatcaatgtgaaatacaggaccgatatggtggcctccgcagtaacccagtcatcctaaatgtcctctatggtccagacctccccagaatttacccttcattcacctattaccgttcaggagaaaacctcgacttgtcctgcttcacggaatctaacccaccggcagagtatttttggacaattaatgggaagtttcagcaatcaggacaaaagctctttatcccccaaattactagaaatcatagcgggctctatgcttgctctgttcataactcagccactggcaaggaaatctccaaatccatgacagtcaaagtctctggtccctgccatggagacctgacagagtctcagtcatgactgcaacaactgagacactgagaaaaagaacaggctgataccttcatgaaattcaagacaaagaagaaaaaaactcaatgttattggactaaataatcaaaaggataatgttttcataattttttattggaaaatgtgctgattctttgaatgttttattctccagatttatgaactttttttcttcagcaattggtaaagtatacttttataaacaaaaattgaaatatttgcttttgctgtctatctgaatgccccagaattgtgaaactattcatgagtattcataggtttatggtaataaagttatttgcacatgttccaaaaaaaaaaaaaaaaaaaaaaaaaaaaaa

SEQ ID NO: 115873 - DNA, 1000 bp, Homo Sapiens
ccggtggagtcgtgttggtcctcagaatccccgcgtagccgctgcctcctcctaccctcgccatgtttcttacccggtctgagtacgacaggggcgtgaatactttttctcccgaaggaagattatttcaagtggaatatgccattgaggctatcaagcttggttctacagccattgggatccagacatcagagggtgtgtgcctagctgtggagaagagaattacttccccactgatggagcccagcagcattgagaaaattgtagagattgatgctcacataggttgtgccatgagtgggctaattgctgatgctaagactttaattgataaagccagagtggagacacagaaccactggttcacctacaatgagacaatgacagtggagagtgtgacccaagctgtgtccaatctggctttgcagtttggagaagaagatgcagatccaggtgccatgtctcgtccctttggagtagcattattatttggaggagttgatgagaaaggaccccagctgtttcatatggacccatctgggacctttgtacagtgtgatgctcgagcaattggctctgcttcagagggtgcccagagctccttgcaagaagtttaccacaagtctatgactttgaaagaagccatcaagtcttcactcatcatcctcaaacaagtaatggaggagaagctgaatgcaacaaacattgagctagccacagtgcagcctggccagaatttccacatgttcacaaaggaagaacttgaagaggttatcaaggacatttaaggaatcctgatcctcagaacttctctgggacaatttcagttctaataatgtccttaaattttatttccagctcctgttccttggaaaatctccattgtatgtgcattttttaaatgatgtctgtacataaaggcagttctgaaataaagaaaattttaaaataaaaaaaaaaaaaaaaaaaaaaaaaaaaaaaaaaaaaaaaaaaaaaaaaa

SEQ ID NO: 115874 - DNA, 925 bp, Homo Sapiens
ttttttctgctaccgtgactaagatggaagcgtttttggggtcgcggtccggactttgggcggggggtccggccccaggacagttttaccgcattccgtccactcccgattccttcatggatccggcgtctgcactttacagaggtccaatcacgcggacccagaaccccatggtgaccgggacctcagtcctcggcgttaagttcgagggcggagtggtgattgccgcagacatgctgggatcctacggctccttggctcgtttccgcaacatctctcgcattatgcgagtcaacaacagtaccatgctgggtgcctctggcgactacgctgatttccagtatttgaagcaagttctcggccagatggtgattgatgaggagcttctgggagatggacacagctatagtcctagagctattcattcatggctgaccagggccatgtacagccggcgctcgaagatgaaccctttgtggaacaccatggtcatcggaggctatgctgatggagagagcttcctcggttatgtggacatgcttggtgtagcctatgaagccccttcgctggccactggttatggtgcatacttggctcagcctctgctgcgagaagttctggagaagcagccagtgctaagccagaccgaggcccgcgacttagtagaacgctgcatgcgagtgctgtactaccgagatgcccgttcttacaaccggtttcaaatcgccactgtcaccgaaaaaggtgttgaaatagagggaccattgtctacagagaccaactgggatattgcccacatgatcagtggctttgaatgaaatacagatgcattatccagaactgaagttgccctacttttaactttgaacttggctagttcaaagatagactcttcttttgtaaagtaaataaattcttcaaaatg

SEQ ID NO: 115875 - DNA, 849 bp, Homo Sapiens
acagttgctttgaggcagtaccggaggagaaagatggcggctaccttactagctgctcggggagccgggccagcaccggcttgggggccggaggcgttcactccagactgggaaagccgagaagtttccactgggaccactatcatggccgtgcagtttgacgggggcgtggttctgggggcggactccagaacaaccactgggtcctacatcgccaatcgagtgactgacaagctgacacctattcacgaccgcattttctgctgtcgctcaggctcagctgctgatacccaggcagtagctgatgctgtcacctaccagctcggtttccacagcattgaactgaatgagcctccactggtccacacagcagccagcctctttaaggagatgtgttaccgataccgggaagacctgatggcgggaatcatcatcgcaggctgggaccctcaagaaggagggcaggtgtactcagtgcctatggggggtatgatggtaaggcagtcctttgccattggaggctccgggagctcctacatctatggctatgttgatgctacctaccgggaaggcatgaccaaggaagagtgtctgcaattcactgccaatgctctcgctttggccatggagcgggatggctccagtggaggagtgatccgcctggcagccattgcagagtcaggggtagagcggcaagtacttttgggagaccagatacccaaattcgccgttgccactttaccacccgcctgaatcctgggattctagtatgcaataagagatgccctgtactgatgcaaaatttaataaagtttgtcacagagaaaaaaaaaaaaaaaaaaaaaaaaa

SEQ ID NO: 115876 - DNA, 1000 bp, Homo Sapiens
gcctagcagaggactttttagctgctcactggccccgcttgtctggccgactcatccgcccgcgacccctaatcccctctgcctgccccaagatgctgaagccagccctggagccccgagggggcttctccttcgagaactgccaaagaaatgcatcattggaacgcgtcctcccggggctcaaggtccctcacgcacgcaagaccgggaccaccatcgcgggcctggtgttccaagacggggtcattctgggcgccgatacgcgagccactaacgattcggtcgtggcggacaagagctgcgagaagatccacttcatcgcccccaaaatctactgctgtggggctggagtagccgcggacgccgagatgaccacacggatggtggcgtccaagatggagctacacgcgttatctacgggccgcgagccccgcgtggccacggtcactcgcatcctgcgccagacgctcttcaggtaccagggccacgtgggtgcatcgctgatcgtgggcggcgtagacctgactggaccgcagctctacggcgtgcatccccatggctcctacagccgtctgcccttcacagccctgggctctggtcaggacgcggccctggcggtgctagaagaccggttccagccgaacatgacgctggaggctgctcaggggctgctggtggaagccgtcaccgccgggatcttgggtgacctgggctccgggggcaatgtggacgcatgtgtgatcacaaagactggcgccaagctgctgcggacactgagctcacccacagagcccgtgaagaggtctggccgctaccactttgtgcctggaaccacagctgtcctgacccagacagtgaagccactaaccctggagctagtggaggaaactgtgcaggctatggaggtggagtaagctgaggcttagagcttggaacaagggggaataaacccagaaaatacagttaaacaaaaaaaaaaaaaaaaaaaaaaaaaaaaaaa

SEQ ID NO: 115877 - DNA, 1000 bp, Homo Sapiens
cccaggagacctatgcagatattggggggttggacaaccaaattcaggaaattaaggaatctgtggagcttcctctcacccatcctgaatattatgaagagatgggtataaagcctcctaagggggtcattctctatggtccacctggcacaggtaaaaccttgttagccaaagcagtagcaaaccaaacctcagccactttcttgagagtggttggctctgaacttattcagaagtacctaggtgatgggcccaaactcgtacgggaattgttccgagttgctgaagaacatgcaccgtccatcgtgtttattgatgaaattgacgccattgggacaaaaagatatgactccaattctggtggtgagagagaaattcagcgaacaatgttggaactgctgaaccagttggatggatttgattctaggggagatgtgaaagttatcatggccacaaaccgaatagaaactttggatccagcacttatcagaccaggccgcattgacaggaagattgagttccccctgcctgatgaaaagacgaagaagcgcatctttcagattcacacaagcaggatgacgctggctgatgatgtaaccctggacgacctgatcatggctaaagatgacctctctggtgctgacatcaaggcaatctgtacagaagctggtctgatggccttaagagaacgtagaatgaaagtaacaaatgaagacttcaaaaaatctaaagaaaatgttctttataagaaacaggaaggcacccctgaggggctgtatctctaatgaaccatggctgtcatcaggaaaatggttgggagatttctcaatccctgaaagggatgaggttgggggagttgcccagaggaatccctgttcccactgatttttattagcaaaacatcctgtgtcttttggagtacgatgtgtaagtgcccattgggtggcctgttggtcactgtgcagcagtctgcttcccaataaagcgtgctctttcacaa

SEQ ID NO: 115878 - DNA, 1000 bp, Homo Sapiens
caacagttaccatgatgcaggtggaagagaaacctgatgtcacatacagtgatgttggtggctgtaaggaacagattgagaaactgcgagaagtagttgaaaccccattacttcatccagagaggtttgtgaaccttggcattgagcctcccaagggcgtgctgctctttggtccacccggtacaggcaagacactctgtgcgcgggcagttgctaatcggactgatgcgtgcttcattcgagttattggatctgagcttgtacagaaatacgtcggtgagggggctcgaatggttcgtgaactctttgaaatggccagaacaaaaaaagcctgccttatcttctttgatgaaattgatgctattggaggggctcgttttgatgatggtgctggaggtgacaatgaagtgcagagaacaatgttggaactgatcaatcagcttgatggttttgatcctcgaggcaatattaaagtgctgatggccactaacagacctgatactttggatccagcactgatgaggccagggagattggatagaaaaattgaatttagcttgcccgatctagagggtcggacccacatatttaagattcacgctcgttcaatgagtgttgaaagagatatcagatttgaactgttagcacgactgtgtccaaatagcactggtgctgagattagaagcgtctgcacagaggctggtatgtttgccatcagagcacggcgaaaaattgctaccgagaaggatttcttggaagctgtaaataaggtcattaagtcttatgccaaattcagtgctactcctcgttacatgacatacaactgaaccctgaaggctttcaagtgaaaactttaaattggaatcctaaccttatatagacttgttaataaccaattcataaacaaataaatggcttcaaaattgtatgcttttttccatatctcttcttgtaatataataaaaggtgatttctaatgttaaaaaaaaaaaaaaaaaaa

SEQ ID NO: 115879 - DNA, 1000 bp, Homo Sapiens
agcctggaggcttcccaggtggcccagcgtggtgtcctgtcagcttcctctttaggaacccaccagagggcagcaagctcctttcacttcgctagtaagaacccctccgtttttgtgtgtttttgtttttgttttctggagacaaggtcttgctttgtcacccaggctggagtgcagtgtcgtgatcaaggttcactgaagccttgacgctgtgggcactgcctcagccgcccaagtatctgggaccacaggcgtgcaccaccatgcatagctaatttattttttgtagagacagggtctccctgtgttgaccaggttggtctcgaactcctgggctcaagcagtcctcctgccttggcctcctaaagtgctgggatcacaggcgtgagccactgcgcccagcccactgctagtttgactttttataattgaacctcctggctatgccctgagatcagcgctattttgtaaaccgctgaggtatggataggaacgagtagatcagacctcttgaaaatgcttattcttcctcccttttattttttgtctcttttaagatggtaaaatggttctcagggattcctgccaatactttgaattattttttcctctccatggtatcagtgttcatttccccagttcttgcacaccgctttctgttttggcagttctgccaggcaagccctgtgttccttgggactggttttgctgtggttggatacagataccagcttgccttgatgggattggtattgctgtgtgcttccagccacaggttctcacactcaattccaaagccttcctattgggcgaattccctcaaactctatttgacctgacagccatacgtattcccctctggtagccacagacatgctgtgtttaccaatgtttgctgtttaaattgcatgttctaattccacgtattttccagtctcttttataaagtctcagactataataaacacagcttgcccagtttaaaaaaaaaaaaaaaaaa

SEQ ID NO: 115880 - DNA, 829 bp, Homo Sapiens
tggggagtgaaagcgaaagcccgggcgactagccgggagaccagagatctagcgactgaagcagcatggccaagccgtgtggggtgcgcctgagcggggaagcccgcaaacaggtggaggtcttcagacagaatcttttccaggaggctgaggaattcctctacagattcttgccacagaaaatcatatacctgaatcagctcttgcaagaggactccctcaatgtggctgacttgacttccctccgggccccactggacatccccatcccagaccctccacccaaggatgatgagatggaaacagataagcaggagaagaaagaagtccataagtgtggatttctccctgggaatgagaaagtcctgtccctgcttgccctggttaagccagaagtctggactctcaaagagaaatgcattctggtgattacatggatccaacacctgatccccaagattgaagatggaaatgattttggggtagcaatccaggagaaggtgctggagagggtgaatgccgtcaagaccaaagtggaagctttccagacaaccatttccaagtacttctcagaacgtggggatgctgtggccaaggcctccaaggagactcatgtaatggattaccgggccttggtgcatgagcgagatgaggcagcctatggggagctcagggccatggtgctggacctgagggccttctatgctgagctttatcatatcatcagcagcaacctggagaaaattgtcaacccaaagggtgaagaaaagccatctatgtactgaacccgggactagaaggaaaataaatgatctatatgttgtgtgga

SEQ ID NO: 115881 - DNA, 1000 bp, Homo Sapiens
gggctccccgctgctccagctgcggagctggtcgacataatctctgtattatatactttgcagttgcagacgtctgtgcctagcaatatttccagttgaccaaatattctaatcttttttcatttatatgcaaaagaaatagttttaagtaactttttatagcaagatgatacaatggtatgagtgtaatctaaacttccttgtggtattaccttgtatgctgttacttttattttattccttgtaattaagtcacaggcaggacccagtttccagagagcaggcggggccgcccagtgggtcaggcacagggagccccggtcctatcttagagcccctgagcttcagggaaggggcgggcgtgtcgccgcctctggcatcgcctccggttgccttacaccacgccttcacctgcagtcgcctagaaaacttgctctcaaacttcagggttttttcttccttcaaattttggaccaaagtctcatttctgtgttttgcctgcctctgatgctgggacccggaaggcgggcgctcctcctgtcttctctgtgctctttctaccgcccccgcgtcctgtcccgggggctctcctaggatcccctttccgtaaaagcgtgtaacaagggtgtaaatatttataattttttatacctgttgtgagacccgaggggcggcggcgcggttttttatggtgacacaaatgtatattttgctaacagcaattccaggctcagtattgtgaccgcggagccacaggggaccccacgcacattccgttgccttacccgatggcttgtgacgcggagagaaccgattaaaaccgtttgagaaactcctcccttgtctagccctgtgttcgctgtggacgctgtagaggcaggttggccagtctgtacctggacttcgaataaatcttctgtatcctcgctccgttccgccttaaaaaaaaaaaaaaaaaaaaaaaaaaaaaaaaaaaaaaaaaaaaaaaaaaaaaaaaaaa

SEQ ID NO: 115882 - DNA, 1000 bp, Homo Sapiens
acacgggagggcactcggactggagctgagtgcaagcaaaccatgaagacccagagatgtaagatcccctgcaactggaagaagcaatttggcgcggagtgcaaataccagttccaggcctggggagaatgtgacctgaacacagccctgaagaccagaactggaagtctgaagcgagccctgcacaatgccgaatgccagaagactgtcaccatctccaagccctgtggcaaactgaccaagcccaaacctcaagcagaatctaagaagaagaaaaaggaaggcaagaaacaggagaagatgctggattaaaagatgtcacctgtggaacataaaaaggacatcagcaaacaggatcagttaactattgcatttatatgtaccgtaggctttgtattcaaaaattatctatagctaagtacacaataagcaaaaacaaaaagaaaagaaaatttttgtagtagcgttttttaaatgtatactatagtaccagtaggggcttataataaaggactgtaatcttatttaggaagttgacttatagtacatgataaatgatagacaattgaggtaagttttttgaaattatgtgacattttacattaaattttttttacattttttgggcagcaatttaaatgttatgactatgtaaactacttctcttgttaggtaatttttttcacctagatttttttcccaattgagaaaaatatatactaaacaaaatagcaataaaacataatcactctatttgaagaaaatatcttgttttctgccaatagattttttaaaatgtagtcagcaaaatgggggtggggaagcagagcatgtcctagttcaatgttgactttttttttttttaaagaaaagcattaagacataaaattctttcactttggcagaagcatttgttttcttgatgaaattatttttccatctgaggaaaaaaatactaggaaaataaatcaaggtgatgctgaaaaaaaaaaaaaaaaaa

SEQ ID NO: 115883 - DNA, 1000 bp, Homo Sapiens
aactgacagtgctacattaatcataggggtttgtctgcagcaaacgcctcatatcccaaaaacggtgcagtagaatagacatcaaccagataagtgatatttacagtcacaagcccaacatctcaggactcttgactgcaggttcctctgaaccccaaactgtaaatggctgtctaaaataaagacattcatgtttgttaaaaactggtaaattttgcaactgtattcatacatgtcaaacacagtatttcacctgaccaacattgagatatcctttatcacaggatttgtttttggaggctatctggattttaacctgcacttgatataagcaataaatattgtggttttatctacgttattggaaagaaaatgacatttaaataatgtgtgtaatgtataatgtactattgacatgggcatcaacacttttattcttaagcatttcagggtaaatatattttataagtatctatttaatcttttgtagttaactgtactttttaagagctcaatttgaaaaatctgttactaaaaaaaaaaattgtatgtcgattgaattgtactggatacattttccatttttctaaaaagaagtttgatatgagcagttagaagttggaataagcaatttctactatatattgcatttcttttatgttttacagttttccccattttaaaaagaaaagcaaacaaagaaacaaaagtttttcctaaaaatatctttgaaggaaaattctccttactgggatagtcaggtaaacagttggtcaagactttgtaaagaaattggtttctgtaaatcccattattgatatgtttatttttcatgaaaatttcaatgtagttggggtagattatgatttaggaagcaaaagtaagaagcagcattttatgattcataatttcagtttactagactgaagttttgaagtaaacacttttcagtttctttctacttcaataaatagtatgattatatgcaaaccttaaaaaa

SEQ ID NO: 115884 - DNA, 1000 bp, Homo Sapiens
acacacttgtacagatttttggcagatgacttgggaacaaggctcctctatggttgtaatgttgaccacacaagttgaacgtggcagagttaaatgtcaccaatattggccagaacccacaggcagttcatcttatggatgctaccaagttacctgccactctgaagaaggaaacactgcctatatcttcaggaagatgaccctatttaaccaagagaaaaatgaaagtcgtccactcactcagatccagtacatagcctggcctgaccatggagtccctgatgattcgagtgactttctagattttgtttgtcatgtacgaaacaagagggctggcaaggaagaacccgttgttgtccattgcagtgctggaatcggaagaactggggttcttattactatggaaacagccatgtgtctcattgaatgcaatcagccagtttatccactagatattgtaagaacaatgagagatcagcgagccatgatgatccaaacacctagtcaatacagatttgtatgtgaagctattttgaaagtttatgaagaaggctttgttaaacccttaacaacatcaacaaataaataagaaagcaaaaagatctgggatatgtgttggaaaactgctttcccttatgttcactgtgccataatgctgctcgcaggaaatggcattttacaaaaaaaaaatgaagaactcaaaaaaactttgaaaacttcagcactgttgcactttatgttttaaaaaatgtcactctttcaaaatctataactcatgtatttgaagactgtttcatgctttgctccgaacaaatagtaaataactgagtatgttcagggtaatttatgaaattttgtggtggtgccatgcaatccccttttggtagaattgccacaaacaaggctcaaaattctcatcatctctgttatacacctgtatcatgaaagcaaaaagaagtaaacatcaggagtcagctctgaaaaaaaaaaaaaaaaaaaa

SEQ ID NO: 115885 - DNA, 1000 bp, Homo Sapiens
atgcgtcccatactggcccgaggtgggcatgcagcgtgcttatgggccctactctgtgaccaactgcggggagcatgacacaaccgaatacaaactccgtaccttacaggtctccccgctggacaatggagacctgattcgggagatctggcattaccagtacctgagctggcccgaccatggggtccccagtgagcctgggggtgtcctcagcttcctggaccagatcaaccagcggcaggaaagtctgcctcacgcagggcccatcatcgtgcactgcagcgccggcatcggccgcacaggcaccatcattgtcatcgacatgctcatggagaacatctccaccaagggcctggactgtgacattgacatccagaagaccatccagatggtgcgggcgcagcgctcgggcatggtgcagacggaggcgcagtacaagttcatctacgtggccatcgcccagttcattgaaaccactaagaagaagctggaggtcctgcagtcgcagaagggccaggagtcggagtacgggaacatcacctatcccccagccatgaagaatgcccatgccaaggcctcccgcacctcgtccaaacacaaggaggatgtgtatgagaacctgcacactaagaacaagagggaggagaaagtgaagaagcagcggtcagcagacaaggagaagagcaagggttccctcaagaggaagtgagcggtgctgtcctcaggtggccatgcctcagccctgaccctgtggaagcatttcgcgatggacagactcacaacctgaacctaggagtgccccattcttttgtaatttaaatggctgcatcccccccacctctccctgaccctgtatatagcccagccaggccccaggcagggccaacccttctcctcttgtaaataaagccctgggatcactgtgaaaaaaaaaaaaaaaaaaaaaaaaaaaaaaaaaaaaaaaaaaaaaaaaaaaaaaaaaaaaaaaaaaaaaaaaaaa

SEQ ID NO: 115886 - DNA, 1000 bp, Homo Sapiens
cttgcttcttggaccctactatttatcctggactagcttgggttggtgatcatgtctcctcttgtcaggctacagagtggtggaagaggacacacacacatctcctccatgttcctgccacagggccccttccttaagtaatgacttatctccttccagttgccacctgttggagccaagaatgtattagtttgtggtgacactgggttagctcagcatggatttcccttatccgatgatttttctacatttacttggccaatttggggaacagacctccactgtgattccatactctctctttgctttcactatcccagggatgggaggcggagggtagagatgaactcactgagcagccagagccaaatgcaatcggtacgaatcttagaaggaaggagggggagcccaggtatgagaaagaaaaaaccactaagaaaatacctccctgggaggatgagctggggccctttttcttttgctggatggttcctttatgcagcttggccctgtctaccgagatgcccatctcttcctgcctgctagcctgctagaccctcaaactgggtgggttctgtgtcaataaaaagcttcaccccctggctgagtgaggtggtcccctgcaatcactgtttgtcccctacccacccaacctgtccctgcctgctcccagcccactcatccttatgtgctagggataaatcaagagtcctcagcactccacattcccaaaaaatcccaggaactcctaaaccttcccctgtgacagaagatgaggttggcagctgatcagacctcaataattttatactgtaataagctctttgaatgtgtatattattattttttacaatcatttcattttgtatttaatatcaatggactgagtctgattcagaaaataattgtaatgttcatattcaatatcttacagtgatacagttttgtatttacatataaatataccgacatgatcaaaaccaaaaaaaaaaaaaaaaaa

SEQ ID NO: 115887 - DNA, 1000 bp, Homo Sapiens
ttttattggggattttaagaactaataacatcttgagttatttttaattcagggggatgtggaaaggtttgcaattgtcaagtgttttgttgtagcttagtatccataagggaaacttagactatagacataactacaaagccagtgcagcttttgttttctgtatgttgttgggggatcaactttcacacatagcaagcacatggcctccctgatgtcaggatgcctttgttaggatctgtatttgcccttaattttgttgaaatcttttttccttcttcctcttgaaaagttccaaaatatagtttattgtatctttcatcactaaaaatttgttcctttttcactatgggcagttcacacaaggcaaaaactattgaacagttggttttagtgtgttgtataactttgctgtatatcaaactaattttgacaagttttcatcctaagcctcaaatcatgtaattaataatttgcctgtttatttatgacctaattgtgattcttttattaataaaagctaatgggaaaaggatccctgattaagctgatgactagacctacaattaattttcctgcagtatatgaagtattgtaccagagtattaaaagatatgtaatattttattgataaatctatcctttaaaaggaatacgttttaggatgtcatcattttgatgtgaatcatgtaaatgttgataatatgctgtttattatacatttagtgtttcaagagattcacttaattgcctttttgcccacgtatattatgtagtctatttgcaactgttcttaaaaaaatgacattaaaagaatagtttatgtagagaaacattagtggatgttaattgtctccccacctatatttatgggtgttagcgcaactgctttgctagttgcaaagctgtattatcagagtaaaagtgtatttgtaaactgtatgggaactaaaaattaggaataaaaccattttcttatatgaaaaaaaaaaaaaaaaaa

SEQ ID NO: 115888 - DNA, 1000 bp, Homo Sapiens
tttttttaggccacattgacagtggtgggcggggagaagatagggaacactcatccctggtcgtctatcccagtgtgtgtttaacattcacagcccagaaccacagatgtgtctgggagagcctggcaaggcattcctcatcaccatcgtgtttgcaaaggttaaaacaaaaacaaaaaaccacaaaaataaaaaacaaaaaaaacaaaaaacccaaaaaaaaaaaaaaaaagagtcagcccttggcttctgcttcaaaccctcaagaggggaagcaactccgtgtgcctggggttcccgagggagctgctggctgacctgggcccacagagcctggctttggtccccagcattgcagtatggtgtggtgtttgtaggctgtggggtctggctgtgtggccaaggtgaatagcacaggttagggtgtgtgccacaccccatgcacctcagggccaagcgggggcgtggctggcctttcaggtccaggccagtgggcctggtagcacatgtctgtcctcagagcaggggccagatgattttcctccctggtttgcagctgttttcaaagcccccgataatcgctcttttccactccaagatgccctcataaaccaatgtggcaagactactggacttctatcaatggtactctaatcagtccttattatcccagcttgctgaggggcagggagagcgcctcttcctctgggcagcgctatctagataggtaagtgggggcggggaagggtgcatagctgttttagctgagggacgtggtgccgacgtccccaaacctagctaggctaagtcaagatcaacattccagggttggtaatgttggatgatgaaacattcatttttaccttgtggatgctagtgctgtagagttcactgttgtacacagtctgttttctatttgttaagaaaaactacagcatcattgcataattcttgatggtaataaatttgaataatcagatttcttacaaaaaaaaaaaaa

SEQ ID NO: 115889 - DNA, 1000 bp, Homo Sapiens
gacacaccagtgtctaagcgctccttcttgaagctcattcgccaggtggacaagtggcaagaggaatacaatggcggggaaggcccgaccgttgtgcactgcttgaacgggggaggccgcagtgggacgttctgcgccatcagcatcgtatgtgagatgctccggcaccagagaaccgtggatgtctttcacgctgtgaagacactgaggaacaacaagcccaacatggtcgacctcctggatcagtacaagttctgctacgaggtggccctggaatacttgaattctggctgatggtgtaaacagctctgcaaacaatccctttcataccacaaagccaagacgttccatggtatttgtgcaaaagagatgaagacttctcaatatgcttattttgctttgcataattggctctttttaagagcccaagaaagtgtttctaaaattgcttgcactgcccaatcccagtaatgctgctgcctgacagaaacacacacacagccacagttgccaaatcccgtactccttgccaccggctttctagagcagcgtagacagctggtaaactgaagagcacaactatattcttatgaaggaatttgtacctttggggtattattttgtggcccgtgaccctcgttattgttacagctgagtgtatgtttttgttctgtggagaatgctatctggcattatggtaatatattattttaggtaatatttgtactttaacatgttgcataatatatgcttatgtagctttccaggactaacagataaatgtgtaatgaacaaagatatgttgtatgagtcgtcgtttctgtcagatttgtattgtttccaagggaaaagcttgggggaggactcagttcacaaaatgcaaaactcaacgatcagattcacggacccagagcttttccatgtgtttatattgtaaatatttttgatttcatcaaattatttattcattaaaagaaatttttgtgaaaaaaaaaaaaaa

SEQ ID NO: 115890 - DNA, 1000 bp, Homo Sapiens
tctacctgaagaacgtgcagacccaggagacgcgcacgctcacgcagttccacttcctcagctggccggcagagggcacaccggcctccacgcggcccctgctggacttccgcaggaaggtgaacaagtgctaccggggccgctcctgccccatcatcgtgcactgcagtgatggtgcggggaggaccggcacctacatcctcatcgacatggtcctgaaccgcatggcaaaaggagtgaaggagattgacatcgctgccaccctggagcatgtccgtgaccagcggcctggccttgtccgctctaaggaccagtttgaatttgccctgacagccgtggcggaggaagtgaatgccatcctcaaggccctgccccagtgagaccctggggccccttggcgggcagcccagcctctgtccctctttgcctgtgtgagcatctctgtgtacccactcctcactgccccaccagccacctcttgggcatgctcagcccttcctagaagagtcaggaagggaaagccagaaggggcacgcctgcccagcctcgcatgccagagcctggggcatcccagagcccagggcatcccatgggggtgctgcagccaggaggagaggaaaggacatgggtagcaattctacccagagccttctcctgcctacattccctggcctggctctcctgtagctctcctggggttctgggagttccctgaacatctgtgtgtgtccccctatgctccagtatggaagaatggggtggagggtcgccacacccggctccccctgcttctcagccccgggcctgcctctgactcacacttgggcgctctgccctccctggcctcacgcccagcctcctcccaccaccctcccaccatgcgctgctcaacctctctccttctggcgcaagagaacatttctagaaaaaactacttttgtaccagtgtgaataaagttagtgtgttgtctgtgcagctgcaaaaaaaaaaaaaaaaaaa

SEQ ID NO: 115891 - DNA, 1000 bp, Homo Sapiens
actattttctccttaaagctccagccaaaaactggacaaggatagagaggaggagggaagaacaaaagagcccttctctatgaaccttgtgccttctgtcctaccagttttcttttacagattctcacttctgctagcctagccagggcttactccaggaatctaaatagatgccctagtccactttatctttgttcccaaggcactcatttttattttgattttgattgaatgtgagcaggttgacctcaggtcacactttgttccaaaaacttttggaattattccaggacttgtggtggagttatggtactctagggcagtctttctcaaactatgtatggtaaaggaccaggttttttgttttccagtccttcacttatcaatatgcattcctattgccgatgacaggtatggagttcacactgtgtgctgccgacccggcaagtttgacagcacccaaactggccagactgttctgtaggttaagtccattgatcatgtacttggatatcacagcaacattgaaatgctaaaaagtttttaaacactctcaatttctaattcaccatgtcacagactggtgaaaaaaaaaaaaaggtgttcactgaccagcacaagtctgcagatcatctttgagtagcactgttttggggccctcggtctctctgaagaccctagcagaactgatacctacctgtatctcttgttctctcctatttgagtttcacttccagagaacttgttcttcagcaagaatgtgtcactagtaaggacatctctagcatttctctagccttccttttctgctgctcaaaaataatcgttacaaagcttaggtttaagctgtatatgaaatatttatgcgactctcaaactttaaaggagttgctcctttgttccaaaattaaatgtgttagataaatttgtgattgtatgggtggcttcatgaattaagaattgaattaatacagactttttgataataaaaaaaaaaaaa

SEQ ID NO: 115892 - DNA, 1000 bp, Homo Sapiens; identical to SEQ ID NO: 115414

SEQ ID NO: 115893 - DNA, 1000 bp, Homo Sapiens
ccatcatgaatctgcatgaacggactctgagcgtgctggcctgccggtacgtgtcagaagtggtgattggagccccgtacgcggtcacagcagagctcctaagtcacttcaaggtggacctggtgtgtcacggcaagacagaaattatccctgacagggatggctccgacccataccaggagcccaagagaaggggcatcttccgtcagattgacagtggcagcaacctcaccacagacctcatcgtccagcggatcatcaccaacaggttggagtatgaggcgcgaaaccagaagaaggaagccaaggagctggccttcctggaggctgccaggcagcaggcggcacagcccctgggggagcgcgatggtgacttctaacctggcagaggccctggccggccctccccctgctctgcttctgcgccttctgcgtttggacataggactctgcagggccgccctctctaactggcctggctctggaagggctggtgaggactctgcctccttgcctgcctacaaggtgcctggtttgcagcaggctctccgctctttccagcaaagctgctcagagagggtgtccagcacagtggagaggccggaagtgagacgggcagacggcacctgcagcctgaaacgcaccgctcctgcgtgcgcccccacctggtccccggatgcccccaccacctggacagaggccacactgactgcccacccagctgtggcgggaggtgcagagcagggggctttagggagcagtgactgcggtcacccctttagttctctgggtgtagaccacaccacctcccactgggcaccccccaacacggtgtcctgccacccagcgcctggctccaggaaaacacgcttgccttccttcccggcagcttcgccactctccttatggactctgttctgtttgtacatggctgacggaaatctctttggtacaaccgaataaagcctggtggcagtgctgcgcggggctcccagccaat

SEQ ID NO: 115894 - DNA, 1000 bp, Homo Sapiens
agtacaagcgacagctcttgaactgtctgcatgtgatcacgatgtacaaccgcattaagaaagaccctaagaagttattcgtgccaaggacagttatcattggtggtaaagctgccccaggatatcacatggccaaaatgatcataaagctgatcacttcagtggcagatgtggtgaacaatgaccctatggttggaagcaagttgaaagtcatcttcttggagaactacagagtatctcttgctgaaaaagtcattccagccacagatctgtcagagcagatttccactgcaggcaccgaagcctcggggacaggcaatatgaagttcatgctaaatggggccctaactatcgggaccatggatggggccaatgtggaaatggcagaagaagctggggaagagaacctgttcatctttggcatgaggatagatgatgtggctgctttggacaagaaagggtacgaggcaaaagaatactatgaggcacttccagagctgaagctggtcattgatcaaattgacaatggctttttttctcccaagcagcctgacctcttcaaagatatcatcaacatgctattttatcatgacaggtttaaagtctttgcagactacgaagcctatgtcaagtgtcaagataaagtgagtcagctgtacatgaatccaaaggcctggaacacaatggtactcaaaaacatagctgcctcggggaaattctccagtgaccgaacaattaaagaatatgcccaaaacatctggaacgtggaaccttcagatctaaagatttctctatccaatgaatctaacaaagtcaatggaaattgaactctagaattgtctctagaaaacatagcttcttactgaacttgaacatttttacaacattcactggtttttgttttgttagctaataatctataatagttgagtatctctgggaatggggagggaaattatatgtaatagagcttaaaaataaagtgtcaatttccaagggc

SEQ ID NO: 115895 - DNA, 1000 bp, Homo Sapiens
tgagaagggccagctccttgcagagcagcttgggtttgatttctttgaagccagtgcaaaggagaacatcagtgtaaggcaggcctttgagcgcctggtggatgccatttgtgacaagatgtctgattcgctggacacagacccgtcgatgctgggctcctccaagaacacgcgtctctcggacaccccaccgctgctgcagcagaactgctcatgctaggcaaggcccaccttcctgacctcccctcattgtggccccacacccagtctgcttctccctgttacacactgtccgctctcagcccactctccctgttacacactgcccacactcagagcaagatgagttgctgctattctttgcctgcccctggggttctctgcagatggtcccagtaatagatactcagcactagactaacataacaggtcactacacgggtgcagaatcactttacaaaagaagactctgttttacgaaggggattcactacagggacttagagaacagtctcttttctgcctttaaaatgagagttcctccatttaccaaaatttgacacgcacacattcttcaggggcatgccaattgcgtaaagtgaggctcgcctgcatagctaatcctgttaaagacaacttctcaaagcacaacgtgcttgtttcctatcgggctccctgcggggctttctctcactacaagtcaagcttgggctctcaaagccctgcgcctgttaccacggatgcccacagggcctgggcagttgctgtggcgacaggaagagctaatcttcagagagctcagactctctaatgatgctgaaggagcaaaggctgagtcagaaacacacttaagagaaaaggattggccgggcgcggtggctcacgcctgtaatcccagcactttgggaggccgaggcgggtggatcatgaggtcaggagatcgagaccatcctggctaacaaggtgaaaccccgtctctactaaaaaaaaaaaaaaaaaa

SEQ ID NO: 115896 - DNA, 1000 bp, Homo Sapiens
ctcataacctattatgaaaataaatgaaactggctgggtatggtggctcatgcctataatcccagcactttgggaggccgaggtgggcagatcacttgaggccaggagattgagaccagcctgaccgtcatggcgaaaccccgtctatactaaaaatacaaaaaatagccaggcatggtggcgcacgcctgtggtcccagctacttgggaggctgaggcatgagaattgcttgaacccgggaagtgaaggttgccgtgagctgagatcacaccactgccataaacatgacaggcttttggactttgtattacctgtatgttttataatggatcatgcataatttctcaggagaataaaatgagaattcatatatacgttcatctttcaagtcagagcaatgagttgggaaaagaggtggcatttctgatcggataatggaatactctcatttattttatgacattctctgtctactcagatcatagtgaaaactggaaacaaaaaaaaaaaacagcctcttcttggaaagtgacagcagaaggtggcatggagcttgtgtccttggacaacaaatctggatatactaggattaattatcagaagacagctcaggccaagttttgatcgttccatacagtaccttgtttatctgcttcttaaagaatcagccgagacaccataaaagaaataggctttttgtgccttttgctgttaatgtttaatttacaaactgttttggtaaatctcttaatgtaagtagctatttgactttggaattttgcattcgaggtatactgtcatttcttgaaatctttttctcgtttagttgctctgtgggaaatgtgaggaagcctaagtttgtatttgtaaatttcttatgccatcctctagtcaaattttttttcattgtttaaaaatacggaagtgttccaatataattttttcctgtactggatggctaggattctagagaattgattataaaatattttcaataca

SEQ ID NO: 115897 - DNA, 1000 bp, Homo Sapiens
aggcagacgagacctctgccctgaagaccaacaccagcccgtgggctgccccctgcctccccaccctccccatggcccacccatctgggctgtctctgcagggcagagccgtccagacctgggatcagggaagctgctggcatcgtccccacccccagcctgggggtctgcgctggggcagggattgctcagtggaagcaggactgggggtctggcttgccccctccctgggcctccatcacccctgagcatccctctggactcagagggaacaaggtgggagagagagtttgagacagctccgtgtggagagcttagcccctggaggcagcacaaggaggatgtgatatgtgggggagtgagcactgggttgggagccgggtcctggtttccaatttgggttctgctgtgtgactctgggcaagtcactctccctctctgggcatgtctgctacaaatggacaagattatttcagaggtcactgaagactgtgattacatgcacctgccttagaaggtaggattttcttcccagggacctcctatcaccctaccctgcttcttgaggtccctggagccccaggtgggctgaggggcagggagccggctgtgcccagtatgcctcctggaccctccagttctgccacaggtctgccgatgccctgtccactgcctacacatgacagacaagtaaccccctcatgggggatggggacctacctggctcctcagccagcacccagcttaacccctgccatcccatgctgggccctccaggccaagagtctcagctggccgagagtccaggccttgcctcccccgaccgccatggagggggcagcccggcacagctgctgggagcccttgtgtgtctggtcacactttttaggcgtcacgccaaaggccagcctcctggccccaatacccattttggaagcccctgtggccgtgtggatgtcggtaacagttgtataaaataaattctatttatcgctattgt

SEQ ID NO: 115898 - DNA, 1000 bp, Homo Sapiens
ccattaaccatagtaaaatcagatggaggttatacctatgatacatctgacctggctgctattaaacaaagactatttgaggaaaaagcagatatgattatctatgttgtggacaatggacaatctgtgcacttccagacaatatttgctgctgctcaaatgattggttggtatgaccctaaagtaactcgagtcttccatgctggatttggtgtggtgctaggggaagacaagaaaaagtttaaaacacgttcgggtgaaacagtgcgcctcatggatcttctgggagaaggactaaaacgatccatggacaagttgaaggaaaaagaaagagacaaggtcttaactgcagaggaattgaatgctgctcagacatccgttgcgtatggctgcatcaaatatgctgacctttcccataaccggttgaatgactacatcttctcctttgacaaaatgctagatgacagaggaaatacagctgcttacttgttgtatgccttcactagaatcaggtctattgcacgtctggccaatattgatgaagaaatgctccaaaaagctgctcgagaaaccaagattcttttggatcatgagaaggaatggaaactaggccggtgcattttacggttccctgagattctgcaaaagattttagatgacttatttctccacactctctgtgattatatatatgagctggcaactgctttcacagagttctatgatagctgctactgtgtggagaaagatagacagactggaaaaatattgaaggtgaacatgtggcgtatgctgctatgtgaagcagtagctgctgtcatggccaaggggtttgatatcctgggaataaaacctgtccaaaggatgtaatccttcataggtttgaacactgtgtgtttttaccaaagtggccattggcactgtttgcttttttacaatcatgtggacacaagcataagtaaagaaaatttgtcaaccaggcaaaaaaaaaaaaaaaaaa

SEQ ID NO: 115899 - DNA, 734 bp, Homo Sapiens
gcgggacggtcaggggagacctccaggcgcagggaaggacggccagggtgacacggaagcatgcgacggctgctgatccctctggccctgtggctgggtgcggtgggcgtgggcgtcgccgagctcacggaagcccagcgccggggcctgcaggtggccctggaggaatttcacaagcacccgcccgtgcagtgggccttccaggagaccagtgtggagagcgccgtggacacgcccttcccagctggaatatttgtgaggctggaatttaagctgcagcagacaagctgccggaagagggactggaagaaacccgagtgcaaagtcaggcccaatgggaggaaacggaaatgcctggcctgcatcaaactgggctctgaggacaaagttctgggccggttggtccactgccccatagagacccaagttctgcgggaggctgaggagcaccaggagacccagtgcctcagggtgcagcgggctggtgaggacccccacagcttctacttccctggacagttcgccttctccaaggccctgccccgcagctaagccagcactgagctgcgtggtgcctccaggaccgctgcgggtggtaaccagtggaagaccccagcccccagggagaggaacccgttctatccccagccatgataataaagctgctctcccaaaaaaaaaaaaaaaaaaaaaaaaaaaaaaaaaaaaaaaaaaaaaaaaaaaaaaaaaaaaaa

SEQ ID NO: 115900 - DNA, 1000 bp, Homo Sapiens
ggtaattcacttcagtttaatgtctcctttgctcttgccaaaaaatagcacacttttccacattccagtgatgtgtgagctatgcaaacaaaatccaagattctgctggtgaataactatgccagcaaccttgtaagctatctgtgcaggatatttgcactatttccacatggaatcaatctttaacaacctctgagccttggtgtacagaccacctttcacaaaacgaaatgctatgactgtatcttgatatctcgaactttcaaaatatattttcagtacacccagttgccaaagttttgctgtctcttagagaaagaactatgaaatcaactgacaagaaacacattcttattgacaattgtgtataactggattgcagactgttcttactgtaactacttcctgattaggaatatgaccatttgactgttcaatgattatttgtatttacagtttccagagtttgtcattataataggaacaatctttgctgtatacttttaaaaaatactctgctatttctcttgctggaactgttgaaagaaaatatatagaatgatctattgctcatcagctttattttttaaacatacgacttattttgttgaaattgtcaaagactgtatttagatctcataatgctttgttaaatgtttacaagtaaatagtttgaattcagtaaatattattggttgttgtattgatcaatgcatgttacccattcaaccattttatagactaccaatttcttttatgttaactagaatgcttttgttaaaagttatttgttcattatttgtgctacccctttgattatgcagacaacctcatcagctgcctaacttatccatctttgaacttctgactacttgttgtatctgctggatatttagttcaactgtatagttttatttacttctgtatgtgtatttttgtgaagtattcacaaaggttaagttaaaataaaaccaagggatatcttgcaaaaaaaaaaaaa

SEQ ID NO: 115901 - DNA, 1000 bp, Homo Sapiens
ttgaaaatatccagtggagtatagatccgggagcagacctttctcagtataaaatggatgttactgtaatagatacaaaggatggcagtcagtcaaaattaggaggagagacagtggacatggactgtacattggttagtgaaaccgttctcttaaaaatgaagaagcaagagcagaagggagaaaaaagttcaaatgaagaaagaaaaatgaatgatagcttggaagatatgtttgatcggacaacacatgaagagtatgaatcctgtttggcagacagtttctcccaagcagcagatgaagaggaggaattgtctactgccacaaagaaactacacactcatggtgataaacaagacaaagtcaagcagaaagcgtttgtggagccgtattttaaaggtgatgaaagagagactagcttgcaaaattttcctcatattgaggtggttcggaaaaaagaggagagaagaaaactgcttgggcacacgtgtaaggaatgtgaaatttattatgcagatatgccagcagaagaaagagaaaagaaattggcttcctgctcaagacaccgattccgctacattccacccaacacaccagagaatttttgggaagttggttttccttccactcagacttgtatggaaagaggttatattaaggaagatcttgatccttgtcctcgtccaaaaagacgtcagccttacaacgcaatattttctccaaaaggcaaggagcagaagacatagacgttgaaacagaaacagaaggatgaaggacagttttttccttcttagttatttatagttaaagttggtactaaacattgatttttttgatcttctgtaaatggatttataaatcagttttctattgaaaatgtttgtgatattttgcttttgcacctttaaaacaataaggcgctttcattttgcactctaacttaagagtttttactttatgtagtgatacctaatacaattttgaaaatacaaaaaaaaaa

SEQ ID NO: 115902 - DNA, 1000 bp, Homo Sapiens
aatataatgagcaatacggagcagtgcgtacgccttacaccatgagctatggggattcattgtattacaacaacgcgtacggagcgctcgatgcctactacaagcgctgccgtgctgcccggtcctatgaggcagtgcagctgcagctgcctccgtgtataattacgcagagcagaccctgtcccagctgccacaagtccagaatacagccatggccagtcacctcacctccacctctctcgatccctacgatagacacctgttgccgacctcaggagctgctgccacagctgctgctgcagcagcagccgctgctgctgttactgcagcttccacttcatattacgggcgggatcggagccccctgcgtcgcgctacagccccagtccccactgttggagagggctacggttacgggcatgagagtgagttgtcccaagcttcagcagccgcgcggaattctctgtacgacatggcccggtatgagcgggagcagtatgccgatcgggcgcggtactcagccttttaaagcttgaggtgggatgtgtgtgggctgaaattccgagctgcggttgtgcatgagaatacacccttcgtggtaccccatctccgggacgttctcggctctgtgcgttcagtccctcaggaaccgtggaccttaatttaccttgctaagttcagaccttctcttcctttcctttcctttcctctcctgcccattttcctgttcttctgtccttcaatacttctgtagcttcccattcatgttctcttctcccagcaggcctcattgtgtgcagaaactgtggtgggggctgtgctgtctcctccctgcctcctgcctcctgcggctgttggatttgggaatgaccttggtgagagtctcactgctccagggtctctttttggtccaaaggctagacctatagagttggatcactttttttctttccggtgaaataaatggtttttcaacttaaaaaaaaaaaaaaaaaaaaaa

SEQ ID NO: 115903 - DNA, 1000 bp, Homo Sapiens
ttggtgattacaggtgggatccaactgcaaatgaagatccagaatggatacttgttgagaaagacagattcgtgaatgattatgacaaagataacgatggcaggcttgatccccaagagctgttaccttgggtagtacctaataatcagggcattgcacaagaggaggcgcttcatctaattgatgaaatggatttgaatggtgacaaaaagctctctgaagaagagattctggaaaacccggacttgtttctcaccagtgaagccacagattatggcagacagctccatgatgactatttctatcatgatgagctttaatctccgagcctgtctcagtagagtactggctccttttataatttgttaccagctttacttttgtgataaaatattgatgttgtattttacactcttaagtcttaaccacagtcagaattatcttaatgtagaattataattttggctcttttaggaaaaaacaaaatctgatatttttccaaacgtattgagcaacaaaatattaatattgtgccatatgacaacaaagtctttcctaaatactccatctgtttagtactgtattgtggaatatttgagttctatttccagacttgaaaacatggaggattttagagatgcctgaacaatattatttaagtagtatgtgaccgagctataaattttttgtttttgttctaagtagatttaatttgggaactgacaggacaatgtttttaggtttagcattttgtttaaaaacctttaaagaaacctttagaaggacttagacctcacatattaatgttgagaagttctgcttaattttaaaatggtttctataaagggttttattgtatgaaatagaactttatatttttgcatatgtatagaggataattatatttaatgtataactatagcattatggtgagtggaatttgacattgtccaaacctttttcatttttgagtgattaaaaatgaaatgtcctttgtaaa

SEQ ID NO: 115904 - DNA, 1000 bp, Homo Sapiens
agtcatccagacgtccccagaggaaatctctgtatgagagctttgtgtcttctagtgatcgacttcgagaactaggaccagatggagaagaggcagagggcccaggggctggtgatggtccccctcgaagctttgactggggctatgaagaacgcagtggtgcccactcctcagcctcccctccccgaagccgcagccgggaccgcagccatgagaggaaccgggacagagaccgagatcgggagcgggatcgagaccgggatcgagacagagacagagagcgggacagggatcgggatcgggatcgagatcgagaccgggaacgggacagggatcgggagcgggatcgagaccgagaccgagagggtcctttccgcaggtcggattcattccctgaacggcgagcccctaggaaagggaatactctctatgtatatggagaagacatgacacccacccttctccgtggggccttctctccttttggaaacatcattgacctctccatggacccacccagaaactgtgccttcgtcacctatgaaaagatggagtcagcagatcaggccgttgctgagctcaacgggacccaggtggagtctgtacagctcaaagtcaacatagcccgaaaacagcccatgctggatgccgctactggcaagtctgtctggggctccctcgctgtccagaacagccctaagggttgccaccgggacaagaggacccagattgtctacagtgatgacgtctacaaggaaaaccttgtggatggcttctagggaacagagctggattccttgtgcctcatatgccccaatgctggtctcagtaaaacactgaggtggaagcttacacatctccctcagcctctggtttttcagcacttgggattggggttaaacctttaaaaacggctgtcaggtttgatctcagtgtaacaacatggccagtgcctgttccccactcccttgccccaaaaggatctggaacacaaaaaaaa

SEQ ID NO: 115905 - DNA, 1000 bp, Homo Sapiens
atttggtttgttaattcttattttagaaattataattttagtttatattaatttcggttatagcttactgaagaaatctttccagttagaaggaggttctaatattcacatgttctaatactttgtttattgtaaaacagctaaatttggagatacgtaaagccttgttttctctgtgtggttcagctactttccatttggtattacacagtcaaatttacatttatctattaaaattgccattttattaaacattttcatgcacagtagattcaagttgtgtctgaaaatatctcttgtgcttttttgattttgctgactttaaaaggattaatctgggcagacattatgtaaaagaaaggttgcgtttaatatattttttgaactttgtaggacaaaacatagctggttaaccttgaagtgactgttgtaccatggttgtgcacatgcttcagaatcctatggaagagaatattcctacttgcagtacatcaaaggaatggatggtggaccctactattcatgttttgagacataaatgttcactttaaagcaattgcataatagataaaaacctgaactttcattggatttttgttaattttcctcattttgaattatgtgcactaccatagctacatcagtttgatacagtattgaaaaattatcagttatattttgctgtttatgatctatttgtagattaggattaaaatggatttaatccatttttaaggctgtgtgaatttttctaaacaagaaccatttgcaatatggatttcttagagattaaaccaattataacttattagcagtcgcgagcacatgttcatatagtcaatgtaaaaatacactaatgagtatttggtaaatcccagtaggcttttaccattagcataattttgtgttgtacaattaagttacaattacatctctaattttggataatattcattggttaacaataaagtgacaaaagctcatgccttcaaaaaaaaaa

SEQ ID NO: 115906 - DNA, 1000 bp, Homo Sapiens
cccgagtaaatagagaattgtccaaggcaccatatctccggcagttattagaccagttttaaattgtcaatatcacagtattacaggtgctatttttttcagtgcttaccactaaactgttgtgcatggtgctttttaactttcatcgagtcaaggatgttcactgtctgttatctgaagactatgaagacttctatgctaaccgaattaaaatgtacttgttgatctctgaatagctcacttcttacaatgtacaaattcctcattctgtcaccttttaaacattgttttataatgcaggtgttggatttgctccagtatgtgtaccatcttgtaaattcatttgagtagatcatgtttacttcccagtggaaggagcactgaaaacctcttaaagaaaaagcatttgtgtgttttccttgaactgtctgtatcaagacgtgttacttcgagatatccattcactttataattttgactgcaaaatattttgtaaatacacttttttacttttcaaacgagtaaaataatgtgcaatgatttttatacaaatgattttcaagttgtttggtatatttcctctaggttttgcttgactcaaagtagatcgttattttgatcaaactgtgcaaacagtagtaccacgtgtagcattttgaaacattattttttaaaaaatgctgtcttgctttagctattaatggggcattgtgaggaactgtgcaaagacatttttgttacaaacctgtgggcctgttgcaatactttaaaaataaaaaattttattccatttgcttgttttgtatagacatttctattgcttctaaatatacttaaaatattttctttccttatgtactgtacagttaatcttatttgccatcatcttgaacacaaaatgtgtatttagaatatttgtataactgtgtaaaataaaaaaggaattatgtggtcagtgcattgttttttaaactggaaatcattttgttttaaaagttaa

SEQ ID NO: 115907 - DNA, 1000 bp, Homo Sapiens
caggcgctgaacaacctgcagtccaccttctcaggatttggcttcattaacagtgagaacgtgttcaaggtctgtgacgagccccacccactgctggtaaaggagatgatccagcactgtgtgaatgccaacattgacgaagcctacaagattcttgctcacttgtggcatctgggctactcaccagaagatatcattggcaacatctttcgagtgtgtaaaactttccaaatggcagaatacctgaaactggagtttatcaaggaaattggatacactcacatgaaaatagcggaaggagtgaactctcttttgcagatggcaggcctcctggcaaggctgtgtcagaagacaatggccccggtggccagttagagcagagacttcactgactgacttacaggtgccctattctgaggtacaggagccgcggctttctgatgggggaaaatgccgccttaggctggagccaacatgactgtcctttaaactccagtggctggccaggcacggtagctcacgcctgtaatcccaacactttgggaggccgaggcaggtggatcacctgaggtcagaagttcaagaccagcctggccaacatggggaaaccctgtctttactaaaaatataaaaattagctgggtgtggtggcgggcacctgtaatcccagctactcgggaggctgtggcaggagaatcgcttgaacccaggaggtggaggttgcagtgagccaagatcacaccattgcactccagcctgggcgacagagtctccatctggggaaaaaaattaaataaataaactcccgtgacttgcatgtttgcttctgggacgtctgtgccccgcaagtgtttgagtttggcctccaccccattgatgcggtgacggggcggaaaggcgcagagaagctgagggcggtctctgatctgtgtgtgggttgacattttagctaataaagccttgcagtgtttgttggcaaaaaaaaaaaaaaaaaaaaaaa

SEQ ID NO: 115908 - DNA, 1000 bp, Homo Sapiens
tccagcaggttaccttgagccatgggggtcctgagaacccacataacgtggtgaacgtggctggaggcttcagcctgcatcaagaccccacacggtttaagtctatccattgtcttctgtacccagacacggactggtgtcccaggcagaaacagggcgccccgacctctcggtgacaccaaccaccccgacccagggctgcctggctctgtcccaggcgcggggaaccagagccccctatgggctcagtgggctccctcaggtgccacggccacaccagtgagatgcaggcacctggcagaccctctggctagcctgcagccccccctctcccagcccctggtgggctgcggtgatgggtgttttgggagaacgaagacagccaggctgatggccagggccgcagtgcccctccccccgacccagccccaaggttgatcccacgggaacaggcttccaccccagcacttgcgcacctgggagggagctgccatccgggctccattacctgttgctgaaggcgggtgctaggctggctgggtgtcaaggagcaggctccaggccaaggtcctggcccagccacggccattgcaagggctcagcctggcaggctttgtgggggacgccgccctctctgccgcaggctgggtgcacggccgggcaccacagtgggactcaggcccgggaaggtcatgttctcgaccagagctttgctcccagtccaggcgcctcattcggaggcctcttgactgggaccacagagatgttttctccgctctgacttgtggctcaggactactttctgggtcgtgctcctgccccactgtgcctgggcccataaacaacaggagccttttgttccgctgacctgcccatcccagcagacccacctccccgcctggtgccttccatggagggaaatgggacaggggccgtcatctcccctctgcctcctgctttgctgttgccgagcacgagtaaagcttttgttcttacttca

SEQ ID NO: 115909 - DNA, 1000 bp, Homo Sapiens
gtggacctgaacagcatcaccaagcaaaccctttacaccatggaagactctcgcgatgagcaccggaaactcatcacccaattatatcaggagtttgaccatctcttggaggagcagtctcccatcgagtcctacattgagtggctggataccatggttgaccgctgtgttgtgaaggtggctgccaagagacaagggtccttgaagaaagtggcccagcagttcctcttgatgtggtcctgtttcggcacaagggtgatccgggacatgaccttgcacagcgcccccagcttcgggtcttttcacctaattcacttaatgtttgatgactacgtgctctacctgttagaatctctgcactgtcaggagcgggccaatgagctcatgcgagccatgaagggagaaggaagcactgcagaagtccgagaagagatcatcttgacagaggctgccgcaccaaccccttcaccagtgccatcgttttctccagcaaaatctgccacatctgtggaagtgccacctccctcttcccctgttagcaatccttcccctgagtacactggcctcagcactacaggtaatggaaagtccttcaaaaactttgggtagttaatgtttgaagaaagggctttctgccagcctgggcaacatagtgagacttcatttccacacacacaaaaagccagacatcttggctcacacctgtagtcccagctacttgggaggctgaggtgggagaattgcttgagcccaggagctacgatcgcaccactgcattctagccttagtgatacagtgagaccttgtctcaaaaaaagaaaaacagggctttctggaaaaacattcttctcccacaatctccaaaagataatgccaaaacctgggtatcttcctggatttgtgaatgacgtacaggtattcatttattcattggtacacattctgtatgctgctgttttcaagttggcaaattaagcatatgataaaatcccaaaactaa

SEQ ID NO: 115910 - DNA, 1000 bp, Homo Sapiens
gaaaggaggctcacttgaatccagctcagtgctctgggtggccccctgcaggtggcccctgaccctgcgttgcagcagggtccacctgtgagcaggcccgccctggggcctcttcctggatgtgccctctctgagttctgtgctgtctcttggaggcagggcccaggagaacaaagtgtggaggcctcggggagtggcttttccagctctcatgccccgcagtgtggaacaaggcagaaaaggatcctaggaaataagtctcttggcggtccctgagagtcctgctgaaatccagccagtgttttttgtggtatgagaacaggcaaaaagagatgccccgagatagaaggggagccttgtgtttctttcctgcagacgtgagatgaacactggagtgggcagaggtggcccaggaccatggcacccttagagtgcagaagctggggggagaggctgcttcgaagggcaggactggggataatcagaacctgcctgtcacctcagggcatcactgaacaaacatttcctgatgggaactcctgcggcagagcccaggctggggaagtgaactacccagggcagcccctttgtggcccaggataatcaacactgttctctctgtaccatgagctcctccaggagattatttaagtgtattgtatcattggttttctgtgattgtcataacattgtttttgttattgttggtgctgttgttatttattattgtaatttcagtttgcctctactggagaatctcagcaggggtttcagcctgactgtctccctttctctaccagactctacctctgaatgtgctgggaacctcttggagcctgtcaggaactcctcactgtttaaatatttatttattgtgacaaatggagctggtttcctagatatgaatgatgtttgcaatccccattttcctgtttcagcatgttatattcttataaaataaaagcaaaagtcaaatatgaaaaaaaaaaaaaaaaaaaaa

SEQ ID NO: 115911 - DNA, 1000 bp, Homo Sapiens
aagatgtgagctcagactccgcccctgactctgccccaggccctgctcccaagcgaccccgtggagggggcgcaggggggagcagtgtagggacagggggaggcggcactggtggggtgggtgggggtgccggttcggaagactctggtgaccggggagggactctgggagggggaacgctgggccccccaagccctcctggggcccccagccccccagagccaggtggagaaattgagctcgtgttccggccccaccccctgctcgtggagaagggagaatactgccagacgaggtatgtgaagacaactgggaatgccacagtggaccacctctccaagtacttggccctgcgcattgccctcgagcggaggcaacagcaggaagcaggggagccaggagggcctggagggggcgcctctgacaccggaggacctgatgggtgtggcggggagggtgggggtgccggaggaggtgacggtcctgaggagcctgctttgcccagcctggagggcgtcagtgaaaagcagtacaccatctacatcgcacctggaggcggggcgttcacgacgttgaatggctcgctgaccctggagctggtgaatgagaaattctggaaggtgtcccggccactggagctgtgctatgctcccaccaaggatccaaagtgaccccaccaggggacagccagaggaaggggaccatggggtatccctgtgtcctggtctatcaccccagcttctttgtcccccagtacccccagcccagccagccaataagaggacacaaatgaggacacgtggcttttatacaaagtatctatatgagattcttctatattgtacagagtggggcaaaacacgcccccatctgctgccttttctattgccctgcaacgtcccatctatacgaggtgttggagaaggtgaagaaccctcccattcacgcccgcctaccaacaacaaacgtgcttttttcctctttgaaacctgcaaaaaaa

SEQ ID NO: 115912 - DNA, 1000 bp, Homo Sapiens
cccctaactttactctgaactttttttgtttttgcattccatgaggttctgtattcagtcattctctaggtaatgtcatttttgtacacatatatttatataatcactgattgagatttaggaaaaagcatttctaaagaatatttgcttcccttagaactacagactcgaaatctttaaagatggtgcctaagcatctatgtattttttttaagttccacagatttttctgttgggcaggccaaggattataaaccacttccctaaaggcaacattaatgcaaaagtccccagatggcaatacaaagtatcccctggtaccacatatattcatttgtgagtttggatatagagcacattatctaaaccattttgtagttccaaaaacccatctaaatttcttgagttcctgaattttgaacaggattacctggagcctggagccactttaagttgtacttctgactaaactggaattatgagtgaggaagagtgtttactaaataaatgactggggcaagcaaaattgaggaggaaattagaaactgtttgacaaactttaagagctacttgaaataacagaagtcttgattaatatgcaaataatggctagaaagtatggtttaactggaccctattatgccttttaaaaataatttcagtaacccataaatacatgttgtaaaaaattcaaatatacagaatggaataaaaaaatgatctccctttattaccctcccaaaggttaccagcgtttgaatttaataatgtatattctttcatgcttttttctgtgcacttacctaagtgtgaatatgtaaagggtttgttttgtatacaaatgggattatactaaaataagtaatgcctatttttaaggataggttaaatttgtgaatgatcatttcaaatatattgaataaaataagcaaaagctattgttatttactgatcctgaaaaaaaaaaaaaaaaaaaaaaaaaaaaaaaaaaaaaaaaaaa

SEQ ID NO: 115913 - DNA, 1000 bp, Homo Sapiens
gaagcccgtggactacagagagtatggccgaaggctggtcatgagcatcaggagaagtgcattgatgtgagaggagcagtgccaatcgggcagaagtttgcaaataggcagaatggaatcgatttcctcccacctccgtgtgacgatcccatgttagctacacagtgcagaggctcttgatggtggactaagcaatttcctcccttgtgcgcatctcagaacccatcggtaggcaaaggaaaatacgctcaggtggttgtggtgtagactgtgtcaggcctacggagtcagccagtggctagcgcaagaccagtcactccctctgccttcaggcttctgtcaatttcattatcatcaagcaggaattatgtcgtaagtcactgaccctaactgcagaccatgaagtaaattatgtaactaggtttttgcttctccagtggtgaccaccccccccccatccccgctcacaacttgggttcttctcagcggggcgagctgagaagcggtcatgagcacctggggattttagtaagtgtgtcttcctagaattcgaaggctctctctttctagaggtgctacatagttggtaatgcttggaatggcaatagggtagaatgattaatcaaaggcatatcttctatatctgaagagtatccttccttcagggtttaatagactgagtcagatgggtctgatattaatcaaaattgtctcttctgaggaccgctgataagcattgacttgctgtcccctaaggaaatccgagcggctacaaagcgtttctttacttttcacttcaattaatgctgcgcttcgcttggtgagtgcgtactttttctacctgtacacattcctgcattcatgtattttgttttttttgactaaagctatgttacatggaaaggattttgaagccttttgtttcccttgctttgttttaataaacagtatattctttggttgtgaatcctaaaaaaaaaaaaaaaaaaaaaaaaaaaaa

SEQ ID NO: 115914 - DNA, 1000 bp, Homo Sapiens
caagagggaaggcgagacagcagtgaacagctggtacgcagcacccacagcaccgcggcagcagctagtgccgactcccgcctagctcttttgactctgttcgcgggaagaatggggaaacagtaaggttgcggcgcctcccgcgagacgaggtacctgaggctggccccgcagtcccccgccgcaccagcaccggagcttcacaccccacttccggggtcaagtcaccgccgggaatcctgtgatcgcagaaaggtagtctcaggttccgcccctatccaagtcccgcctccactgcctctcgccctgtatctgtcaacttccgggacgccgcgcgtcactaagcagccaatctccacttccggactcatccagccccttctccacccctttcagagacagcgcgattgcgatttaggtttccgcgcatttaattggcgaagctggagcgctagtcttcgctgattggtgccgagaaatctgccccatagacacccgcggggcgcacagtttcagtcgtccgtgggtttcccgccagccgcagtcttggaccataatcatggtggacatgatggacttgcccaggtcgcgcatcaacgccggcatgctagctcaattcatcgacaagcctgtctgcttcgtagggaggctggaaaagattcatcccaccggaaaaatgtttattctttcagatggagaaggaaaaaatggaaccatcgagttgatggaaccccttgatgaagaaatctctggaattgtggaagtggttggaagagtaaccgccaaggccaccatcttgtgtacatcttatgtccagtttaaagaagatagccatccttttgatcttggactttacaatgaagctgtgaaaattatccatgacttccctcagttttatcctttagggattgtgcaacatgattgatcttgatggattttcatacgattgtaaatgagctatattaaagtctattaaaggaaaaaaaaaaaaaaaaaaaaa

SEQ ID NO: 115915 - DNA, 1000 bp, Homo Sapiens
gcccggcggccgaggcggctagagcgtcgcctcctcccggggaaccgcgtgtgaccttccagcccgcggaccgatgctgccggcggccgctcgccccctgtgggggccttgccttgggcttcgggccgctgcgttccgccttgccaggcgacaggtgccatgtgtctgtgccgtgcgacatatgaggagcagcggccatcagaggtgtgaggccctcgctggtgcacccctggataacgcccccaaggagtacccccccaagatacagcagctggtccaggacatcgccagcctcactctcttggaaatctcagacctcaacgagctcctgaagaaaacgttgaagatccaggatgtcgggcttgtgccgatgggtggtgtgatgtctggggctgtccctgctgcagcagcccaggaggcggtggaagaagatatccccatagcgaaagaacggacacatttcaccgtccgcctgaccgaggcgaagcccgtggacaaagtgaagctgatcaaggaaatcaagaactacatccaaggcatcaacctcgtccaggcaaagaagctggtggagtccctgccccaggaaatcaaagccaatgtcgccaaagctgaggcggagaagatcaaggcggccctggaggcggtgggcggcaccgtggttctggagtagcctccagctcggaggacttgtgttcaggggtcctgggccccgggcgaggtcccgccctcccgtggtcactggctccgcccccagcaccaggcgcccagtggagccgtttgggagaattgcctgcgccacgcagcggggccggacaggccgcacagacctactgtggcgggagggaggggcggctgctgcctggtgacggcacccggaggcccaccaggacgcgccaccggtgaatgtgcctctggtggctgctgagaaaaatacactgtgcagctcagaaaaaaaaaaaaaaaaaaaaaaaaaaaaaaaaaaaaaaaaaaaaaaaaaaaa

SEQ ID NO: 115916 - DNA, 1000 bp, Homo Sapiens
gtgctcatgctgcaggagcccctgctggtggtggcggccttctacatcctgttcttcaccgttatcatctatgttcggctggacttctccatcaccaaggatccagccgcagaagccaggatgaaggtagcctgcatcacagagcaggtcttgaccctggtcaacaagagaataggcctttaccgtcactttgacgagaccgtcaataggtacaagcaatcccgggacatctccaccctcaacagtggcaagaagagcctggagactgaacacaaggccttgaccagtgagattgcactgctgcagtccaggctgaagacagagggctctgatctgtgcgacagagtgagcgaaatgcagaagctggatgcacaggtcaaggagctggtgctgaagtcggcggtggaggctgagcgcctggtggctggcaagctcaagaaagacacgtacattgagaatgagaagctcatctcaggaaagcgccaggagctggtcaccaagatcgaccacatcctggatgccctgtagcccctgcccgcatcctccagggggcccagggtgcctgcactttgctgtggcaggcagattgggtggtagtgggaggttgtgcatggaggccagtgaaagctgacatctgtaaaaggccttcaaggaagagaaaccaggccctgcgtcaggcagtgtgagtttgccgtttgtccttaactttctttttttttttttttaaaaaaagaaaactttaaaaaaactcccattaaaaacaaaacatctttgtgttttgaacaaaggaattttcaatatttgattggtattctgttctgaagtctaagatatttttcagcctataaagccccctgttttatgcccttctaattctgatgtttgggtattgtgtgagtgcatgtgtttttttttttttttttaaagcgtgtgtgaacaaatggaaataaagcagggactgtgaacattaaaaaaaaaaaaaaaaaaaaaaaaaaaaaaa

SEQ ID NO: 115917 - DNA, 1000 bp, Homo Sapiens
gcagacagccaccagaacttcgccttgttcttccagctggtagatgtgaacactggtgctgaactcactcctcaccagacatttgtccgactccataaccagaagactggccaggaagtggtgtttgttgccgagccagacaacaagaacgtgtacaagtttgaactggatacctctgaaagaaagattgaatttgactctgcctctggcacctacactctctacttaatcattggagatgccactttgaagaacccaatcctctggaatgtggctgatgtggtcatcaagttccctgaggaagaagctccctcgactgtcttgtcccagaaccttttcactccaaaacaggaaattcagcacctgttccgcgagcctgagaagaggccccccaccgtggtgtccaatacattcactgccctgatcctctcgccgttgcttctgctcttcgctctgtggatccggattggtgccaatgtctccaacttcacttttgctcctagcacgattatatttcacctgggacatgctgctatgctgggactcatgtatgtctactggactcagctcaacatgttccagaccttgaagtacctggccatcctgggcagtgtgacgtttctggctggcaatcggatgctggcccagcaggcagtcaagagaacagcacattagttccagaagaaagatggaaattctgaaaactgaatgtcaagaaaaggagtcaagaacaattcacagtatgagaagaaaaatggaaaaaaaaaactttatttaaaaaagaaaaaagtccagattgtagttatacttttgcttgtttttcagtttccccaacacacagcagatacctggtgagctcagatagtctctttctctgacactgtgtaagaagctgtgaatattcctaacttacccagatgttgcttttgaaaagttgaaatgtgtaattgttttggaataaagagggtaacaataggaacaaaaaaaaaaaaaaaaaaaa

SEQ ID NO: 115918 - DNA, 962 bp, Homo Sapiens
cttcttttccgacaaaacaccaaatggcggatgacgccggtgcagcgggggggcccgggggccctggtggccctgggatggggaaccgcggtggcttccgcggaggtttcggcagtggcatccggggccggggtcgcggccgtggacggggccggggccgaggccgcggagctcgcggaggcaaggccgaggataaggagtggatgcccgtcaccaagttgggccgcttggtcaaggacatgaagatcaagtccctggaggagatctatctcttctccctgcctattaaggaatcagagatcattgatttcttcctgggggcctctctcaaggatgaggttttgaagattatgccagtgcagaagcagacccgtgccggccagcgcaccaggttcaaggcatttgttgctatcggggactacaatggccacgtcggtctgggtgttaagtgctccaaggaggtggccaccgccatccgtggggccatcatcctggccaagctctccatcgtccccgtgcgcagaggctactgggggaacaagatcggcaagccccacactgtcccttgcaaggtgacaggccgctgcggctctgtgctggtacgcctcatccctgcacccaggggcactggcatcgtctccgcacctgtgcctaagaagctgctcatgatggctggtatcgatgactgctacacctcagcccggggctgcactgccaccctgggcaacttcgccaaggccacctttgatgccatttctaagacctacagctacctgacccccgacctctggaaggagactgtattcaccaagtctccctatcaggagttcactgaccacctcgtcaagacccacaccagagtctccgtgcagcggactcaggctccagctgtggctacaacatagggtttttatacaagaaaaataaagtgaattaagcgtgaaaaaaaaaaaaaaaaaaaa

SEQ ID NO: 115919 - DNA, 1000 bp, Homo Sapiens
gtggggcacccaggagggccctgccggaatgtgcagcctgtgggtagtcggctggtgtccctgtcgtggagctggggtgcgtgatctggtgctcgtccacgcaggtgtgtggtgtaaacatgtatgtgctgtacagagagacgcgtgtggagagagccgcacaccagcgccacccaggaaaggcggagcggttaccagtgttttgtgtttatttttaatcaagacgtttcccctgttttcctataaatttgcttcgtgtaagcaagtacataaggaccctcctttggtgaaatccgggttcgaatgaatatctcaaggcaggagatgcatctattttaagatgctttggagcagacagctttagccgttcccaatccttagcaatgccttagctgggacgcatagctaatactttagagaggatgacagatccataaagagagtaaagataagagaaaatgtctaaagcatctggaaaggtaaaaaaaaaaaatctatttttgtacaaatgtaattttatccctcatgtatacttggatatggcggggggagggctgggactgtttcgtttctgcttctagagattgaggtgaaagcttcgtccgagaaacgccaggacagacgatggcagaggagagggctcctgtgacggcggcgaggcttgggaggaaaccgccgcaatgggggtgtcttccctcggggcaggagggtgggcctgaggctttcaagggttttcttccctttcgagtaatttttaaagccttgctctgttgtgtcctgttgccggctctggccttcctgtgactgactgtgaagtggcttctccgtacgattgtctctgaaacatcgtggcctcaggtgccagggtttgatggacagtagcattagaattgtggaaaaggaacacgcaaagggagaagtgtgagaggagaaacaaaatatgagcgtttaaaatacatcgccattcagttcgttaaaaaaaaaaaaaaaaaaaaaaaaa

SEQ ID NO: 115920 - DNA, 1000 bp, Homo Sapiens
tttgctaccatcttccctgaagcaggaaaatgaacatggacttaaatgttctttgaaaaaaccaaagttttaagatttgctgtgtgatgaagtgacagggagggccggagtcagcaggtgccagactttctgttctgtctgccatgggtttgtccagctcaggtagctctaggagcaccatcctgccctagcagagcccaggccttgccctcatgaagcatcattgaaatagcaggagcatgttgatttcttggttaggttgcattataataacaagagtcagaacattaattcgaaacaacttgcagtatgcatttcttcacaccagtacattcttaagtgtacttgtttataaggaataacataaactaatctgtacctttatatatatgtgtgtgtacatatatacatatataaactgtatagtgtacatggtaatgatttattgctatgccccagatccttaatgtagttctcatcctccgcatgccctcagccacaagcgggtgactgactgttccctgatgatttggcccacctcctgtgtttggacctctagggaggagggttttggtcatactctccttatcctcgtgcacagaaatgctcagggtccccatgtgcctgttgttcagccctctctcttgttccctttctgagcatgtggtccttccccaggctgtgggacagctgccttcccacgaaagtgtaaagcagtattaagatcattactgcatgtgccctaaaaacccaagttttctattcccttaggacagaaaattgcatgtgaggtgggataatcgagtttcagtgacccacgtcagttacacattaaagccagaccccatgataaaattccacaaaatggaaataaaactcaaatttctttagcattgtgtaaataaatctgaatgtgtttaactttgtactggtaattttctgtatatttggaatatttgggttaaaaataaaacagactggactttgttacctgacctac

SEQ ID NO: 115921 - DNA, 576 bp, Homo Sapiens
aaacactctgtgtggctcctcggctttgggacagagtgcaagacgatgacttgcaaaatgtcgcagctggaacgcaacatagagaccatcatcaacaccttccaccaatactctgtgaagctggggcacccagacaccctgaaccagggggaattcaaagagctggtgcgaaaagatctgcaaaattttctcaagaaggagaataagaatgaaaaggtcatagaacacatcatggaggacctggacacaaatgcagacaagcagctgagcttcgaggagttcatcatgctgatggcgaggctaacctgggcctcccacgagaagatgcacgagggtgacgagggccctggccaccaccataagccaggcctcggggagggcaccccctaagaccacagtggccaagatcacagtggccacggccatggccacagtcatggtggccacggccacaggccactaatcaggaggccaggccaccctgcctctacccaaccagggccccggggcctgttatgtcaaactgtcttggctgtggggctaggggctggggccaaataaagtctcttcctccaa

SEQ ID NO: 115922 - DNA, 1000 bp, Homo Sapiens
cgccagcggctggagcgggagcgcatggagcgggaacggctggagcgcgaacgcatgcacgtggagcacgagcgcaggcgcgagcaggagcgcatccaccgtgagcgcgaggagctgaggcgccagcaggaactgcgctatgagcaggagcggcggcccgcggtgcggcggccctacgacctggaccggcgagatgatgcctattggccggaagccaagcgggccgccctggatgagcgctaccattctgactttaaccgccaggaccgcttccacgactttgaccacagggaccgcggccgctaccccgaccactcggtggacaggagagaaggttcaaggtcaatgatgggagaacgagaaggacagcattacccagaacgccatggaggaccagagcgccacggccgggactcccgcgatggctgggggggctatggctctgacaagaggatgagcgagggccgggggctgcctcctccccccagacgtgactggggggaccatggccgaagagaggatgaccggtcatggcagggcacggccgacgggggcatgatggacagggatcacaagaggtggcaaggtggcgagagaagcatgtccggtcactccgggcctggccacatgatgaaccgaggaggaatgtcagggcgcggcagctttgccccaggcggggcctcccggggccaccccatcccacacggtggcatgcagggcgggtttggaggccagagccgggggagcaggcccagcgatgcccgcttcactcgccgctactgagtacttggaatcctgtgtcctgtctcgtggcaacaaggctatgttctgttaggagttaccttaaactgtgtaaaaatatttttttttaatctgctgccatattgtagctcaatacaatgtgaatttgtttttcgttttggggttttttttttttgtaataaatgtgtttccgttcacataccctttaaaaaaaaaaaaaaaaaaaaaaaaaaaaaaa

SEQ ID NO: 115923 - DNA, 1000 bp, Homo Sapiens
tcacgggatgcaccaaagtgtgtaccccgtaagcatgaaaccagtgttttttgttttttttttagttcttattccggagcctcaaacaagcattataccttctgtgattatgatttcctctcctataattatttctgtagcactccacactgatctttggaaacttgccccttatttaaaaaaaaaaaagaaaaaaaagagtttgttactctattgtatgttacaaaagaactatagactgtggaatgcagtttaaagatgacatatgccaacaaatgccttgtattatatggcactgccgtaattcaaatttgtttttattttggaaataaaagttcactgtacttttttttcattctcattgttacatgattttttaaaaaaaggaaaagaaaatgtgaaacacaatttagtcctcattatttatttgtagatcctgcagcatcatgttgtaattaattttttggaagtttccgttaaatgtaatattgcttctcttgttaccatactgattcttttctatttataaatgtattttgatgggcagtaaaacaaagtgtcttaaaagttttaaatagagaaaatgtgctttacacagttgcctataaaaagtgctctatgttatccaagcaattcatactataagcttcactcttattgttgtatgcaatttttactatcatgcaaataagcttaggtaaataaaactaatagatcaccttagaaaattatgcaattaatgtgaaaataattgatgtttgcaatgtgtcttcctttggtttacaatcaattttaaagctacatctgtataaaatttctgtataaaggtgtatttcttttttatgagtttatggctatgaaaacagctattttgttacagctggctgtttttataagtgtatcacaattttctttatgcagaaatgttctgactaggagtggttattgactgtaactacacaattaaaattgtttgtatcgtaaaaaaaaaaaaaaaaaa

SEQ ID NO: 115924 - DNA, 1000 bp, Homo Sapiens
ctcacgcctgctggaggagctgcagaggctggagacagagttgggccaacccgctgagcgctggaaggacacctgggaccgggtgaaggctgcacagcgcctcgagggccggccagacggccgtggcacccctagctccctccttgtgtccaccgcaccccaccaccgtcgctcgctgggtgtgtacctgcaggaggggcccgtgggctccaccctgagcctcagcctggacagcgaccagagtagtggctcaaccacatccggctcccgtcaggctgcccgccgcagcaccagcaccctgtacagccagttccagacagcagagagtgagaacaggtcctacgagggcactctgtacaagaagggggccttcatgaagccttggaaggcccgctggttcgtgctggacaagaccaagcaccagctgcgctactacgaccaccgtgtggacacagagtgcaagggtgtcatcgacttggcggaggtggaggctgtggcacctggcacgcccactatgggtgcccctaagactgtggacgagaaggccttctttgacgtgaagacaacgcgtcgcgtttacaacttctgtgcccaggacgtgccctcggcccagcagtgggtggaccggatccagagctgcctgtcggacgcctgagcctcccagccctgcccggctgctctgcttccggtcgttaccgaccactaggggtgggcagggccgccccggccatgtttacagccccggccctcgacagtattgaggccccgagcccccagcacttgtgtgtacagcccccgtccccgccccgccccgcccggccggccctaacttattttggcgtcacagctgagcaccgtgccgggaggtggccaaggtacagcccgcaatgggcctgtaaatagtccggccccgtcagcgtgtgctggtccagccagcggctgcaggcgagtttctagaaccagagtctatataaagagagaactaacgccaaaaaaaaaa

SEQ ID NO: 115925 - DNA, 1000 bp, Homo Sapiens
gggggaggaagaggaggaggaagcaacgccaaccccatcctccggccccagcccctctcccacccctgaggacatcgtcacttacatcctgggccgcctggccggcctggacgcaggcctgcaccagctgcacgtccgtctgcacgcgttggacacccgcgtggtcgagctgacccaggggctgcggcagctgcggaacgcggcaggcgacacccgcgatgccgtgcaagccctgcaggaggcgcagggtcgcgccgagcgcgagcacggccgcttggagggctgcctgaaggggctgcgcctgggccacaagtgcttcctgctctcgcgcgacttcgaagctcaggcggcggcgcaggcgcggtgcacggcgcggggcgggagcctggcgcagccggcagaccgccagcagatggaggcgctcactcggtacctgcgcgcggcgctcgctccctacaactggcccgtgtggctgggcgtgcacgatcggcgcgccgagggcctctacctcttcgaaaacggccagcgcgtgtccttcttcgcctggcatcgctcaccccgccccgagctcggcgcccagcccagcgcctcgccgcatccgctcagcccggaccagcccaacggtggcacgctcgagaactgcgtggcgcaggcctctgacgacggctcctggtgggaccacgactgccagcggcgtctctactacgtctgcgagttccccttctagcggggccggtaccccgcctccctgcccatcccaccacccggcctttccctgcgccgtgcccaccctcctccggaatctcccttcccttcctggccacgaatggcagcgtcctccccgacccccagtctgggcgcttctgggagggctcttgcggtgccggcactcctccttgttagtgtctttccttgaaggggcgggcaccaggctaggtccggtgccaataaatccttgtggaatctgacttgaggggcagtgaaaaaaaaaaaaaaaaaa

SEQ ID NO: 115926 - DNA, 1000 bp, Homo Sapiens
tcttctcctcagatgatgtcacctactgcgatccgcacagggcgggctgcaagctggtcatggtgctgttccagtactgcatcatggccaactactcctggctgctggtggaaggcctctaccttcacacactcctcgccatctccttcttctctgaaagaaagtacctccagggatttgtggcattcggatggggttctccagccatttttgttgctttgtgggctattgccagacactttctggaagatgttgggtgctgggacatcaatgccaacgcatccatctggtggatcattcgtggtcctgtgatcctctccatcctgattaatttcatccttttcataaacattctaagaatcctgatgagaaaacttagaacccaagaaacaagaggaaatgaagtcagccattataagcgcctggccaggtccactctcctgctgatccccctctttggcatccactacatcgtcttcgccttctccccagaggacgctatggagatccagctgttttttgaactagcccttggctcattccagggactggtggtggccgtcctctactgcttcctcaatggggaggtgcagctggaggttcagaagaagtggcagcaatggcacctccgtgagttcccactgcaccccgtggcctccttcagcaacagcaccaaggccagccacttggagcagagccagggcacctgcaggaccagcatcatctgagaggctggagcagggtcacccacggacagagaccaagagaggtcctgcgaaggctgggcactgctgtgggacagccagtcttcccagcagacaccctgtgtcctccttcagctgaagatgcccctccccaggccttggactcttccgaagggatgtgaggcactgtggggcaggacaagggcctgggatttggttcgtttgctcttctgggaagagaagttcaggggtcccagaaagggacagggaaataaatggtgcctgggatgagattc

SEQ ID NO: 115927 - DNA, 760 bp, Homo Sapiens
gaggaaccgagaggctgagactaacccagaaacatccaattctcaaactgaagctcgcactctcgcctccagcatgaaagtctctgccgcccttctgtgcctgctgctcatagcagccaccttcattccccaagggctcgctcagccagatgcaatcaatgccccagtcacctgctgttataacttcaccaataggaagatctcagtgcagaggctcgcgagctatagaagaatcaccagcagcaagtgtcccaaagaagctgtgatcttcaagaccattgtggccaaggagatctgtgctgaccccaagcagaagtgggttcaggattccatggaccacctggacaagcaaacccaaactccgaagacttgaacactcactccacaacccaagaatctgcagctaacttattttcccctagctttccccagacaccctgttttattttattataatgaattttgtttgttgatgtgaaacattatgccttaagtaatgttaattcttatttaagttattgatgttttaagtttatctttcatggtactagtgttttttagatacagagacttggggaaattgcttttcctcttgaaccacagttctacccctgggatgttttgagggtctttgcaagaatcattaatacaaagaattttttttaacattccaatgcattgctaaaatattattgtggaaatgaatattttgtaactattacaccaaataaatatatttttgtacaaaaaaaaaaaaaaa

SEQ ID NO: 115928 - DNA, 878 bp, Homo Sapiens
atcccagcccacgcacagacccccaacttgcagctgcccacctcaccctcagctctggcctcttactcaccctctaccacagacatggctcagtcactggctctgagcctccttatcctggttctggcctttggcatccccaggacccaaggcagtgatggaggggctcaggactgttgcctcaagtacagccaaaggaagattcccgccaaggttgtccgcagctaccggaagcaggaaccaagcttaggctgctccatcccagctatcctgttcttgccccgcaagcgctctcaggcagagctatgtgcagacccaaaggagctctgggtgcagcagctgatgcagcatctggacaagacaccatccccacagaaaccagcccagggctgcaggaaggacaggggggcctccaagactggcaagaaaggaaagggctccaaaggctgcaagaggactgagcggtcacagacccctaaagggccatagcccagtgagcagcctggagccctggagaccccaccagcctcaccagcgcttgaagcctgaacccaagatgcaagaaggaggctatgctcaggggccctggagcagccaccccatgctggccttgccacactctttctcctgctttaaccaccccatctgcattcccagctctaccctgcatggctgagctgcccacagcaggccaggtccagagagaccgaggagggagagtctcccagggagcatgagaggaggcagcaggactgtccccttgaaggagaatcatcaggaccctggacctgatacggctccccagtacaccccacctcttccttgtaaatatgatttatacctaactgaataaaaagctgttctgtcttcccacccaa

SEQ ID NO: 115929 - DNA, 1000 bp, Homo Sapiens
gtgggggaaagcctacgcttctccctgaagtttacagctcagctaatgaagtactaatatagtatttccactatttactgttattttacctgataagttattgaaccctttggcaattgaccatattgtgagcaaagaatcactggttattagtctttcaatgaatattgaattgaagataactattgtatttctatcatacattccttaaagtcttaccgaaaaggctgtggatttcgtatggaaataatgttttattagtgtgctgttgagggaggtatcctgttgttcttactcactcttctcataaaataggaaatattttagttctgttttcttggggaatatgttactctttaccctaggatgctatttaagttgtactgtattagaacactgggtgtgtcataccgttatctgtgcagaatatatttccttattcagaatttctaaaaatttaagttctgtaagggctaatatattctcttcctatggttttagatgtttgatgtcttcttagtatggcataatgtcatgatttactcattaaactttgattttgtatgctattttttcactataggatgactataattctggtcactaaatatacactttagatagatgaagaagcccaaaaacagataaattcctgattgctaatttacatagaaatgtattctcttggttttttaaataaaagcaaaattaacaatgatctgtgctctgcaaagttttgaaaatatatttgaacaatttgaatataaattcatcatttagtcctcaaaatatatacagcattgctaagattttcagatatctattgtggatcttttaaaggttttgaccattttgttatgaggaattatacatgtatcacattcactatattaaaattgcacttttattttttcctgtgtgtcatgttggtttttggtacttgtattgtcatttggagaaacaataaaagatttctaaaccaaaaaaaaaaaaaaaaaaa

SEQ ID NO: 115930 - DNA, 1000 bp, Homo Sapiens
gagagcttggaatgttaaaaacaaaacaaaacaaaaaaaaacaaggagaagttgtccaagggatgtcaattttttatccctctgtatgggttagattttccaaaatcataatttgaagaaggccagcatttatggtagaatatataattatatataaggtggccacgctggggcaagttccctccccactcacagctttggcccctttcacagagtagaacctgggttagaggattgcagaagacgagcggcagcggggagggcagggaagatgcctgtcgggtttttagcacagttcatttcactgggattttgaagcatttctgtctgaatgtaaagcctgttctagtcctggtgggacacactggggttgggggtgggggaagatgcggtaatgaaaccggttagtcagtgttgtcttaatatccttgataatgctgtaaagtttatttttacaaatatttctgtttaagctatttcacctttgtttggaaatccttcccttttaaagagaaaatgtgacacttgtgaaaaggcttgtaggaaagctcctccctttttttctttaaacctttaaatgacaaacctaggtaattaatggttgtgaatttctatttttgctttgtttttaatgaacatttgtctttcagaataggattctgtgataatatttaaatggcaaaaacaaaacataattttgtgcaattaacaaagctactgcaagaaaaataaaacatttcttggtaaaaacgtatgtatttatatattatatatttatatataatatatattatatatttagcattgctgagctttttagatgcctattgtgtatcttttaaaggttttgaccattttgttatgagtaattacatatatattacattcactatattaaaattgtacttttttactatgtgtctcattggttcatagtctttattttgtcctttgaataaacattaaaagatttctaaacttcaaaaaaaaaaaaaaaaaa

SEQ ID NO: 115931 - DNA, 1000 bp, Homo Sapiens
atgtccaagaagcccaggaaaggctccaggagcagccacattcctgatgcttcttcagagactcctgcaggcagccaggccacaagacccttgtggtcccaccccacacacgccagattctttcctgaggctgggctcccttcccacctctctcactccttgaaaacactgttctctgccctccaagaccttctccttcacctttgtccccaccgcagacaggaccagggatttccatgatgttttccatgagtcccctgtttgtttctgaaagggacgctacccgggaagggggctgggacatgggaaaggggaagttgtaggcataaagtcaggggttcccttttttggctgctgaaggctcgagcatgcctggatggggctgcaccggctggcctggcccctcagggtccctggtggcagctcacctctcccttggattgtccccgacccttgccgtctacctgaggggcctcttatgggctgggttctacccaggtgctaggaacactccttcacagatgggtgcttggaggaaggaaacccagctctggtccatagagagcaagacgctgtgctgccctgcccacctggcctctgcactcccctgctgggtgtggcgcagcatattcaggaagctcagggcctggctcaggtggggtcactctggcagctcagagagggtgggagtgggtccaatgcactttgttctggctcttccaggctgggagagcctttcaggggtgggacaccctgtgatggggccctgcctcctttgtgaggaagccgctggggccagttggtcccccttccatggactttgttagtttctccaagcaggacatggacaaggatgatctaggaagactttggaaagagtaggaagactttggaaagacttttccaaccctcatcaccaacgtctgtgccattttgtattttactaataaaatttaaaagtcttgtgaaaaaaaaaaaaaaaaaaaaaaaaaaaaaaaaa

SEQ ID NO: 115932 - DNA, 1000 bp, Homo Sapiens
gatcctcctgcagaccacgcccgtcctgcctgtggcgccgtctccaggggctgcttcctcctggaaattgacgaggggtgtcttgggcagagctggctctgagcgcctccatccaaggccaggttctccgttagctcctgtggccccaccctgggccctgggctggaatcaggaatattttccaaagagtgatagtcttttgcttttggcaaaactctacttaatccaatgggtttttccctgtacagtagattttccaaatgtaataaactttaatataaagtagtcctgtgaatgccactgccttcgcttcttgcctctgtgctgtgtgtgacgtgaccggacttttctgcaaacaccaacatgttgggaaacttggctcgaatctctgtgccttcgtctttcccatggggagggattctggttccagggtccctctgtgtatttgcttttttgttttggctgaaattctcctggaggtcggtaggttcagccaaggttttataaggctgatgtcaatttctgtgttgccaagctccaagccccatcttctaaatggcaaaggaaggtggatggccccagcacagcttgacctgaggctgtggtcacagcggaggtgtggagccgaggcctaccccgcagacaccttggacatcctcctcccacccggctgcagaggccagaggcccccagcccagggctcctgcacttacttgcttatttgacaacgtttcagcgactccgttggccactccgagaggtgggccagtctgtggatcagagatgcaccaccaagccaagggaacctgtgtccggtattcgatactgcgactttctgcctggagtgtatgactgcacatgactcgggggtggggaaaggggtcggctgaccatgctcatctgctggtccgtgggacggtgcccaagccagaggctgggttcatttgtgtaacgacaataaacggtacttgtcatttcgggcaaaaaaaaaaaaaaaaaa

SEQ ID NO: 115933 - DNA, 1000 bp, Homo Sapiens
tgaagctgcttcctcttataaaatagcttttgccgaaacatagtttttttttagcagatcccaaaatataatgaaggggatggtgggatatttgtgtctgtgttcttataatatattattattcttccttggttctagaaaaatagataaatatatttttttcaggaaatagtgtggtgtttccagtttgatgttgctgggtggttgagtgagtgaattttcatgtggctgggtgggtttttgcctttttctcttgccctgttcctggtgccttctgatggggctggaatagttgaggtggatggttctaccctttctgccttctgtttgggacccagctggtgttctttggtttgctttcttcaggctctagggctgtgctatccaatacagtaaccacatgcggctgtttaaagttaagccaattaaaatcacataagattaaaaattccttcctcagttgcactaaccacgtttctagaggcgtcactgtatgtagttcatggctactgtactgacagcgagagcatgtccatctgttggacagcactattctagagaactaaactggcttaacgagtcacagcctcagctgtgctgggacgacccttgtctccctgggtaggggggggggaatgggggagggctgatgaggccccagctggggcctgttgtctgggaccctccctctcctgagaggggaggcctggtggcttagcctgggcaggtcgtgtctcctcctgaccccagtggctgcggtgaggggaaccaccctcccttgctgcaccagtggccattagctcccgtcaccactgcaacccagggtcccagctggctgggtcctcttctgcccccagtgcccttccccttgggctgtgttggagtgagcacctcctctgtaggcacctctcacactgttgtctgttactgattttttttgataaaaagataataaaacctggtactttctaaaaaaaaaaaaaaaaaaaaaaaaaaaaaa

SEQ ID NO: 115934 - DNA, 1000 bp, Homo Sapiens
agtcttatttggaacttgtgaagtccctgtgtctggggccagcactgatccacacagctaagtttgcacttgtcttccctctcatgtatcatacctggaatgggatccgacacttgatgtgggacctaggaaaaggcctgaagattccccagctataccagtctggagtggttgtcctggttcttactgtgttgtcctctatggggctggcagccatgtgaagaaaggaggctcccagcatcatcttcctacacattattacattcacccatctttctgtttgtcattcttatctccagcctgggaaaagttctccttatttgtttagatccttttgtattttcagatctccttggagcagtagagtacctggtagaccataatagtggaaaagggtctagttttccccttgtttctaaagatgaggtggctgcaaaaactccccttttttgcccacagcttgcctactctcggcctagaagcagttattctctctccatattgggctttgatttgtgctgagggtcagcttttggctccttcttcctgagacagtggaaacaatgccagctctgtggcttctgccctggggatgggccgggttggggggtgggttgggtgaagctttgggttgccactgcctgtgggtttgctggcttaaaggacaattctctttcattggtgagagcccaggccattaacaactaacacagtgttattgaaagaagagaggtgggggtggaggggaattagtctgtcccagctagagggagataaagagggctagttagttcttggagcagctgcttttgaggagaaaatatatagctttggacacgaggaagatctagaaaattatcattgaacatattaatggttatttctttttcttggatttccagaaaagcctcttaattttatgctttctcatcgaagtaatgtaccctttttttctgaaactgaattaaatactcattttaaaaaaaaaaaaaaaaaaaaa

SEQ ID NO: 115935 - DNA, 1000 bp, Homo Sapiens
gtaggtagggctagtaggtagggctagtaggtagggttagtaggtagggttcgtaggtagggctggtaggtagggttagtaggtagggctagtaggtagggctagtaggtagggctagtaggtagggttagtaggtagggctagtaggtagggctagtaggtagggttagtaggtagggttcgtaggtagggctggtaggtagggttagtaggtagggctagtaggtagggctagtaggtagggctagtaggtagggctagtaggtagggctagtaggtagggctagtaggtagggctagtaggtagggttcgtaggtagggttcgtaggtagggttcgtaggtagggttagtagcgcgtctgtgctgcttccacctggtgcttcctgttcccaaatcacaagggcctgaaggtggtccctgctttctctttctctttctctgtgtctcagatggcgattttgctgacagctgccaagaaaatgcttcactcaacagtcctcatgtgcccagagatgtttatagaactgtttgaattgcagccatcccctgccccctcccaggctgaagatctgttctttttaagttgattcgggagtggcattcttttatacccaaagactgtagtgcatcttgaagagctcaaagcacatgaccgcacaaatgcttacagggtttcctcccgagtaatccaatctcactccccttgtaagggaattctggggcagctatggtttgagtatgcagtttgcatcgtgtttctacctttagtaccttgccactcttttaaaacgctgctgtcatttcccatttcttagtactaatgattctttgattctccctctattatgtcttaattcactttccttcctaaatttgttatttgcatatcaaattctgtaaatgttttgtaaacatattacctcacttggtaatacaatactgatagtctttaaaagatttttttattgttatcaataataaatgtgaactatttaaag

SEQ ID NO: 115936 - DNA, 893 bp, Homo Sapiens
gcgggttccttatcctccgccttggcgcctctccgcccaccgcccaccgcccctccctggcattggttggcgccaggggaagccgaggctccatcctttctgcgcaggttcccgccgcactcgcgcagacctagcgcgtccaggtgggaggttagtgtggcccgggcgtccgctcctcagcggatgtggcagccccgagccatggctctcgccgtccgagtcgtttattgtggcgcttgaggctacaagtccaagtatcttcagctcaagaagaagttagaagatgagttccccggccgcctggacatctgcggcgagggaactccccaggccaccgggttctttgaagtgatggtagccgggaagttgattcactctaagaagaaaggcgatggctacgtggacacagaaagcaagtttctgaagttggtggccgccatcaaagccgccttggctcagggctaatgcgccctgaaggcagagtccagggaccttgacccagcccctctcagcagacgcttcatgataggaaggactgaaaagtcttgtggacacctggtctttccctgatgttctcgtggctgctgttgggggcagagattgacgcccccggtctttgcctctgagcgggagagtctgtgtgtatgtgtcttccccggaatccacaccaccccaccctcctcctgtcccgtggtttcatcatatctctttgcataccccatgtcttccccagttgtcccctggagtttggggggacatcccgcctcaggcatccttctcaaggggaagccaagagaggcatcaggatgggtgggtttctgattgtggcaacgtttgcaaccgttcacgattcaataaatattggatgaatttaaccgaaaaaaaaaaaaaaa

SEQ ID NO: 115937 - DNA, 1000 bp, Homo Sapiens
ttgtaattttgttcctgtttatttttgggtttctttttgtttcactggaaaggaaagatgatgctcagttttaaacgttaaaagtgtacaagttgctttgttacaataaaactaaatgtgtacacaaaggatttgatgcttttctctcagcataggtatgcttactatgaccttccaagtttgacttgtataacatcactgtcaaactttgtcaccctaacttcgtattttttgatacgcacttttgcaggatgacctcagggctatgtggattgagtaatgggatttgaatcaatgtattaatatctccatagctgggaaacgtgggttcaatttgccattggtttctgaaaagtattcacatcatttgggataccagatagctcaatactctctgagtacattgtgcccttgatttttatctccaagtggcagtttttaaaattggccttttacctggatataaattaattgtgcctgccaccaccatccaacagacctggtgctctaatgccaagttatacacgggacagttgctggcatgtcttcattggctctctaaaatgtggccaagaagataggctctcagtaagaagtctgatggtgagcagtaactgtccctgctttctggtataaagctctcaaatgtgaccatgtgaatctgggtgggataatggactcagctctgtctgctcaatgccattgtgcagagaagcaccctaatgcataagctttttaatgctgtaaaatatagtcgctgaaattaaatgccactttttcagaggtgaattaatggacagtctggtgaacttcaaaagctttttgatgtataaaacttgataaatggaactattccatcaataggcaaaagtgtaacaacctatctagatggatagtatgtaatttctgcacaggtctctgtttagtaaatacatcactgtataccgatcaggaatcttgctccaataaaggaacataaagatttaaaaaaaaaaaaaaa

SEQ ID NO: 115938 - DNA, 1000 bp, Homo Sapiens
gccctatctggtcatgggacagaaacagggtggggagctggtgatcacctcggtgaagcggtggcagaaggggcagagagagttcaagcgcatctcccgcagcatccgcaagctgcagtgctagtcccggcatcctgatggctccgacaggcctgctccagagcacggctgaccatttctgctccgggatctcagctcccgttccccaagcacactcctagctgctccagtctcagcctgggcagcttccccctgccttttgcacgtttgcatccccagcatttcctgagttataaggccacaggagtggatagctgttttcacctaaaggaaaagcccacccgaatcttgtagaaatattcaaactaataaaatcatgaatatttttatgaagtttaaaaatagctcactttaaagctagttttgaataggtgcaactgtgacttgggtctggttggttgttgtttgttgttttgagtcagctgattttcacttcccactgaggttgtcataacatgcaaattgcttcaattttctctgtggcccaaacttgtgggtcacaaaccctgttgagataaagctggctgttatctcaacatcttcatcagctccagactgagactcagtgtctaagtcttacaacaattcatcattttataccttcaatgggaacttaaactgttacatgtatcacattccagctacaatacttccatttattagaagcacattaaccatttctatagcatgatttcttcaagtaaaaggcaaaagatataaattttataattgacttgagtactttaagccttgtttaaaacatttcttacttaacttttgcaaattaaacccattgtagcttacctgtaatatacatagtagtttacctttaaaagttgtaaaaatattgctttaaccaacactgtaaatatttcagataaacattatattcttgtatataaactttacatcctgttttacctataaaaaaaaaaaaaaa

SEQ ID NO: 115939 - DNA, 1000 bp, Homo Sapiens
tggctattgaaaaggttattttgtaacatttgtctaactttttacttgtttaagctttgcctcagttggcaaacttcattttatgtgccattttgttgctgttattcaaatttcttgtaatttagtgaggtgaacgacttcagatttcattattggatttggatatttgaggtaaaatttcattttgttatatagtgctgactttttttgtttgaaattaaacagattggtaacctaatttgtggcctcctgacttttaaggaaaacgtgtgcagccattacacacagcctaaagctgtcaagagattgactcggcattgccttcattccttaaaattaaaaacctacaaaagttggtgtaaatttgtatatgttatttacattcagatctaaatggtaatctgaacccaaatttgtataaagacttttcaggtgaaaagacttgattttttgaaaggattgtttatcaaacacaattctaatctcttctcttatgtatttttgtgcactaggcgcagttgtgtagcagttgagtaatgctggttagctgttaaggtggcgtgttgcagtgcagagtgcttggctgtttcctgttttctcccgattgctcctgtgtaaagatgccttgtcgtgcagaaacaaatggctgtccagtttattaaaatgcctgacaactgcacttccagtcacccgggccttgcatataaataacggagcatacagtgagcacatctagctgatgataaatacacctttttttccctcttccccctaaaaatggtaaatctgatcatatctacatgtatgaacttaacatggaaaatgttaaggaagcaaatggttgtaactttgtaagtacttataacatggtgtatctttttgcttatgaatattctgtattataaccattgtttctgtagtttaattaaaacattttcttggtgttagcttttctcagaaaaaaaaaaaaaaaaaaaaaaaaaaaaaaaaaaaaaaaaaa

SEQ ID NO: 115940 - DNA, 1000 bp, Homo Sapiens
actattaaattagaggtttttgaaaaatccaactctcatcctgggcagaggttgcctagttggtatagaatgttaagtttcaagaaagtttacctttgctttaggtcataagttccttatttgattgctgtatatggatacatggctgttcgtgacattctttatgtgcaaatttgtgatttcaaaaatgtcctgccagtttaagggtacattgtagagccgaactttgagttactgtgcaagatttttttttcatgctgtcatttgtaatatgttttgtgagaatccttgggattaaagttttggttacaaattgttctttaacttgaaagcctgtttttccttgcaaactcaaatctgtgagcttggtaccaagtccaggtataacattcctattggaagccatacttatattttcttgtaaagtgcttttgaattaataaaatattagcataattgtgtatagtcagttgaacccactgttaccattgttcttatcccatgggaagcagttggttacacgattcttattttataagaaacagctgagaggcactatggattagtcttctgaagtgaaggaaatatagatgtcacctaagtgatagttaacccattttttttttttttaggcatagaagccagttcagggtccataatatttagtgaccaacattttaaagtatagcagcaacctggttcttaaacacaaagtaagttgcccattaacaaatggcttttatctttagcatgaaaactttccacaggtctaaaaattgcttccattttataatttgaggtgttgcatgggaattctaagctgatccatcatgatgtaaaagttcacaatatggttcaaatgtaacagtgcagaattgaatatggaggcatgcataaccttcctcttagaaaatggcaggtgttgtaatttcaaatttttgtgcaattagattaaatcataatgcaacagtcaaaaaaaaaaaaaaaaaaaaaaaaaaaa

SEQ ID NO: 115941 - DNA, 1000 bp, Homo Sapiens
ccaaaggggacaatggctctgttggagaacctggaccaaagggagacactgggccaagtggacctccaggacctcccggtgtgcctggtccagctggaagagaaggtcccctggggaagcaggggaacataggacctcagggcaagccaggcccaaaaggagaagctgggcccaaaggagaagtaggtgccccaggcatgcagggctcggcaggggcaagaggcctcgcaggccctaagggagagcgaggtgtccctggtgagcgtggagtccctggaaacacaggggcagcagggtctgctggagccatgggtccccagggaagtccaggtgccaggggacccccgggattgaagggggacaaaggcattcctggagacaaaggagcaaagggagaaagtgggcttccagatgttgcttctctgaggcagcaggttgaggccttacagggacaagtacagcacctccaggctgctttctctcagtataagaaagttgagctcttcccaaatggccaaagtgtcggggagaagattttcaagacagcaggctttgtaaaaccatttacggaggcacagctgctgtgcacacaggctggtggacagttggcctctccacgctctgccgctgagaatgccgccttgcaacagctggtcgtagctaagaacgaggctgctttcctgagcatgactgattccaagacagagggcaagttcacctaccccacaggagagtccctggtctattccaactgggccccaggggagcccaacgatgatggcgggtcagaggactgtgtggagatcttcaccaatggcaagtggaatgacagggcttgtggagaaaagcgtcttgtggtctgcgagttctgagccaactggggtgggtggggcagtgcttggcccaggagtttggccagaagtcaaggcttagaccctcatgctgccaatatcctaataaaaaggtgaccatctgtgccgggaaaaaaaaaaaaaaaaaa

SEQ ID NO: 115942 - DNA, 1000 bp, Homo Sapiens
tcggtcacttgagtgttttctagaatcctggggtgctcccgggccgctctcagagaagtggcaggtttcacgttcagccgtgtggcggatcgtgtggcttccaaagccttttacagcccccgccccccatcccgtggtctgtctgcaggaactctcccgtctgtgagaagcctctttccgagtcgacctcccggccaccccggccctgtgcctgctcggaagagctcactgccagctgcggcctgggcaccgcgggccatgtgtgtttgcatgaggaactctttagtggcagacacctaagagacggctgcggtcaccccacgcctccgcggctcaggagccgtcctgggtgcataggaccagtttctgtgacttttctccagttgggcatgttgacagacatgtttcccctcctcccaccctcattttctggtcctcgcgactgagagccaggggcgacatcatgaccttctgtcccggccgccttagccccgggcacagggaaggcagctgggccgtttctgtctgtgtcccatcctgctgtccttctgtcctggatgtttcatgggcccggggccccccagggaagcttacccctcctgtgctgggtggaggccacgggacacctcaggtgccacccaccttggccctaaaacagccaccaggaaagcagccggagagccggacagcaggcagcctgtctgggttcctgaggcctgggggtggcagacgagcccacggcgccgtggtcccagcagcagggttgtcagtcggagcatcctggggctccctggctcctggccgtctgtgaggtaggcgcagtaccgtgtatcgtaggtagcagtaggaacgggggccgccgcggccctgcagccgctcatggcggtgaggtgtgtgccaagcccacccggggtgcagggcgtgacgtgtggggaataaataggcgttgtgacctctaaaaaaaaaaaaaaaaaaaaaaaaaaaaaaaaaaaaaaaaaaa

SEQ ID NO: 115943 - DNA, 1000 bp, Homo Sapiens
ggaagtaaacgatctgcaaccaccatcaggaaatagttttgccagcacccaagtgccctcccctcacagtgtcacttccggcctctctgccctggcttatgtgagtcttgtgttcttgtttttctaaaaagtcttcagcacccaattatgcaagcattgcagtattttcctgtttctgtgctttatccccttgaatcatacagatgcaaattctggcagctggcttctttggctcgttattatgtctgtgagatttattcatgttgctgtgcgtagtatagtttgtgcatgttcattgctaaaaacttccattgtttggctgtatcgtagttcacagattcatttcactgtcagtcaagcttgtccaatgcatgcagcccaggatgcctttgaatgtggcccaacacaaatttgtaaactttcttaaaacattataaagatttttgtttgcgatttttttttttagctcatcagctatagttagtggtagtgtattttatgcgtgacccgagacagttcttccggtatggtccatggaagccaaaagattggacatgcctgctgtagatggacagttggtttgtttctagtttggggtaactacacacaatgctgctagcaacagttttgtccatgtctctgatgcacgtgtgttttttgcaaatggtgcacaaatttttctagggtttgtactcaggagtctgactcctgggttctagggtatgaagatctttctaaatattgttctagtttacgtgcccaccagcagtaaaacagaattcccttgccttcccatccttggcagacatttcacttttgccagtctggtggggtgtatagttatggccttaatttgcatttagctaattaccaaggagattgagcatatttttatgtttttattaaccattttgattttgtctcctgtgaagtgtctatcatcttttgcccattttttaacttgttgtctttttctttttcttttctttttttttttttt

SEQ ID NO: 115944 - DNA, 1000 bp, Homo Sapiens
gtctcacactcctcctgccagctctgtcaccctggccaccacccaacctatccttactcagagctgcgggctgagggcatctctgagtgtctctgcctggagcaggggtggtttctacggtgacagtgacgtgactcagagcttttcgaactgtgctcccacggggaccactgggcccctcaggggaagctgctaggggaaggactggccgtggctccagaatgtgctgcctttttaagttttgtttgttcacactcctatatatgattgtttgcacagagggcgctcctgtttttaaaacattttgaaaacccctggctgaacagtgctctgcctctaactccctcctcacactccagaattacccttcctcatctgtgcctgtctgtccaacccctcccccacgtctctctgcctgctgggctcttaactgttgctcgaagactgtgacatcagaagtaactcccactcctaatcaagagtctctccagcctcacagatgctggcctcttggcacctgcctagctcttgggcctgacctccagtcctgctggcctgctcttacttcccccaccctgggtttggcccctggaacctttcccttgtgtgtaccacaccctgcctgctgtggagcccattgtggaggcggtgggggggagaaggcctcccctgaggatcccctgtcccctggggctggtggattgggcagaatcctgggcccccagagacctttgcccacacacactccttccccttgtccctggggcactcccccaggattgtgcaatagtcagagtgtccctttttgcaggggactgggccatgggtcctcggcccatctgtccatcctcctctccatgcaagtgctgtttgggcaggagtcaccatgcaagggtgacatcgacaaccacgtaccaagccaccgcagctgctgccactctgctgcctgtacagaagaaactgaatctttttcatattctaataaatcaatgtgagtttt

SEQ ID NO: 115945 - DNA, 1000 bp, Homo Sapiens
aattagctatttctgctcccctgttcaaagatgcattttgagtgtttatagatcactgccctttttgaaatcacctggtattatttttcttactggaaaagttagtattaaaatctacagaactacatatttgtgcctccttggtaaatacaacacatctaattaaatgtagacagatatttcaaacatcagctgaattcacttaagtttttccaaaacctcagttaaactgtgaagctattggaatttttttttcctggaatttttcccctttgattcacagtggtcccatttatatctgcttctagcttagtgctatgtgtgagatatgtgtgtgtttggtgtttttgtttttttgtttttttttttttaaggtttgcaaattaaaaagggccagaaaaatttggcaccaggcaaacgaataaagataggattgggaaagaagttgctaagtgtgcttagttttaataagtaattccttctcttttttcagagaaggccttacagaaaattgttgtgcttagaattgctggatgcatttttaccctccacacaaacctaaaaattttgtgacccctttcacttacctgaaaagtagagaaatggattcagtataaggataaggagggaaggtggaccagaatgaaaactgtaaatatttttttaacctaatatcacttaaatcgaggcagaaagatatagacattcaatgaattatattcaatgcatttaaaataccactgtaattgacagagtaaaagtatagatacaaaaccttgtgtaagaggctgacttttccaaataaacattttttaagaaaacatttcttctcccaaatgtctattttcttgaggaaaatattgctgtgtcttcattttcattaccaggtttcattttgggccttgctaaattgattgaattaaatcctccagcttttgaaccttgaaaaaaaaaaaaaaaaaaaaaaaaaaaaaaaaaaaagaaaaaaaaaaaaaaaaag

SEQ ID NO: 115946 - DNA, 1000 bp, Homo Sapiens
cccctaataaggctagaggtctaagtcccccacccctttccccactcccctctagtggtgaactttagaggaaaaggaagtaattgcacaaggagtttgattcttaccttttctcagttacagaggacattaactggatcattgcttccccagggcaggagagcgcagagctagggaaagtgaaaggtaatgaagatggagcagaatgagcagatgcagatcaccagcaaagtgcactgatgtgtgagctcttaagaccactcagcatgacgactgagtagacttgtttacatctgatcaaagcactgggcttgtccaggctcataataaatgctccattgaatctactattcttgttttccactgctgtggaaacctccttgctactatagcgtcttatgtatggtttaaaggaaatttatcaggtgagagagatgagcaacgttgtcttttctctcaaagctgtaatgtgggttttgttttattgtttatttgtttgttgttgtatccttttctccttgttatttgcccttcagaatgcacttgggaaaggctggttccttagcctcctggtttgtgtctttttttttttttttttaaacacagaatcactctggcaattgtctgcagctgccactggtgcaaggccttaccagccctagcctctagcacttctctaagtgccaaaaacagtgtcattgtgtgtgttcctttcttgatacttagtcatgggaggatattacaaaaaagaaatttaaattgtgttcatagtctttcagagtagctcactttagtcctgtaactttattgggtgatattttgtgttcagtgtaattgtcttctctttgctgattatgttaccatggtactcctaaagcatatgcctcacctggttaaaaaagaacaaacatgtttttgtgaaagctactgaagtgccttgggaaatgagaaagttttaataagtaaaatgattttttaaatatcaaaaaaaaaaaaaaaa

SEQ ID NO: 115947 - DNA, 1000 bp, Homo Sapiens
cctagtagtggacaaaggaactccaaagagcctggggaagctccagaagcagccagcagtgggcatcaacagccccctctaccttggaggcatccccacctccaccggcctctccgccttgcgccagggcacggaccggcctctaggcggcttccacggatgcatccatgaggtgcgcatcaacaacgagctgcaggacttcaaggccctcccaccacagtccctgggggtgtcaccaggctgcaagtcctgcaccgtgtgcaagcacggcctgtgccgctccgtggagaaggacagcgtggtgtgcgagtgccgcccaggctggaccggcccactctgcgatcaggaggcccgggacccctgcctcggccacagatgccaccatggaaaatgtgtggcaactgggacctcatacatgtgcaagtgtgccgagggctatggaggggacttgtgtgacaacaagaatgactctgccaatgcctgctcagccttcaagtgtcaccatgggcagtgccacatctcagaccaaggggagccctactgcctgtgccagcccggctttagcggcgagcactgccaacaagagaatccgtgcctgggacaagtagtccgagaggtgatccgccgccagaaaggttatgcatcatgtgccacagcctccaaggtgcccatcatggaatgtcgtgggggctgtgggccccagtgctgccagcccacccgcagcaagcggcggaaatacgtcttccagtgcacggacggctcctcgtttgtagaagaggtggagagacacttagagtgcggctgcctcgcgtgttcctaagcccctgcccgcctgcctgccacctctcggactccagcttgatggagttgggacagccatgtgggaccccctggtgattcagcatgaaggaaatgaagctggagaggaaggtaaagaagaagagaatattaagtatattgtaaaataaacaaaaaatagaacttatttttattatggaaa

SEQ ID NO: 115948 - DNA, 1000 bp, Homo Sapiens
ggcaagaaaaggccaaatcgaggaaaagccaaacctgtagtgagcgattttgacagcgatgaggagcaggatgaacgtgaacagtcagaaggaagtgggacggatgatgagtgatcagtatggacctttttccttggtagaactgaattccttcctcccctgtctcatttctacccagtgagttcatttgtcatataggcactgggttgtttctatatcatcatcgtctataaactagctttaggatagtgccagacaaacatatgatatcatggtgtaaaaaacacacacatacacaaatatttgtaacatattgtgaccaaatgggcctcaaagattcagattgaaacaaacaaaaagcttttgatggaaaatatgtgggtggatagtatatttctatgggtgggtctaatttggtaacggtttgattgtgcctggttttatcacctgttcagatgagaagatttttgtcttttgtagcactgataaccaggagaagccattaaaagccactggttattttatttttcatcaggcaattttcgaggtttttatttgttcggtattgtttttttacactgtggtacatataagcaactttaataggtgataaatgtacagtagttagatttcacctgcatatacatttttccattttatgctctatgatctgaacaaaagctttttgaattgtataagatttatgtctactgtaaacattgcttaatttttttgctcttgatttaaaaaaaagttttgttgaaagcgctattgaatattgcaatctatatagtgtattggatggcttcttttgtcaccctgatctcctatgttaccaatgtgtatcgtctccttctccctaaagtgtacttaatctttgctttctttgcacaatgtctttggttgcaagtcataagcctgaggcaaataaaattccagtaatttcgaagaatgtggtgttggtgctttcctaataaagaaataatttagcttgacaaaa

SEQ ID NO: 115949 - DNA, 1000 bp, Homo Sapiens
cagaatttgggttgactcctgagcatatttaaaacaaagaagctagaaatttagcagtcagattaggtaggtggttttatttcaaagggaaactttaatccaaagaaagattaattactctaacaaacaagagaagcttcatgtttgatgatacagatttaagaatacctgagacttaagagtgttggaagtcatttgatagaaagatgagatcggagacaatgttgtgttatagggcacacattgaaggtatatgccaaatctctcaccagataagtccttttctccctgtgccgttttcttgctcaaagggaacagtgaattagccagctagaatcttcctggtccctttttgaggcagtagcaggtaaggaaagggctgattttcatcaaaaccaagacctttctgcagggatgatagtggaataataatgtgggattagcccgctagcattaggagcagttgggaagttacctggtagatcaagcattacacacaaaaaatcaagttgatcagagtatgggttctccatatagcaatacttcagtgagattaagtataaacagtttttggcaaaaaacaacacagtctactctttctgcttacaaagacaaagccttacaaactcactatgaaggtaaagggaggacagcttgcttctttgcccagacatttacaaagttgtttttaaaacacactcataagtaagtttggcaagttgtttaaaaaatgtctctttgttttgtacagttctgttagatgttgttatattttaaaagtttaatttaaaaaatttaatttgtccttcctaagaaggataaatatataaaaaagccactggaatgaaaacttcctatatgctatgctgttgtcttattattatatagaaaaataactttagaaaaatattgaagacattgtattaccacttgtgattcaaacaattttgtggttaaaactggattttaaatttaaaaatcaataaaaatttcaaatgtt

SEQ ID NO: 115950 - DNA, 1000 bp, Homo Sapiens
tgatcaagtacaaggacagcagcagtggacgtcagctcagcgaggtcttcatccagctgccctcgcgaaaggagctgcccgagtactacgagctcatccgcaagcccgtggacttcaagaagataaaggagcgcattcgcaaccacaagtaccgcagcctcaacgacctagagaaggacgtcatgctcctgtgccagaacgcacagaccttcaacctggagggctccctgatctatgaagactccatcgtcttgcagtcggtcttcaccagcgtgcggcagaaaatcgagaaggaggatgacagtgaaggcgaggagagtgaggaggaggaagagggcgaggaggaaggctccgaatccgaatctcggtccgtcaaagtgaagatcaagcttggccggaaggagaaggcacaggaccggctgaagggcggccggcggcggccgagccgagggtcccgagccaagccggtcgtgagtgacgatgacagtgaggaggaacaagaggaggaccgctcaggaagtggcagcgaagaagactgagccccgacattccagtctcgaccccgagcccctcgttccagagctgagatggcataggccttagcagtaacgggtagcagcagatgtagtttcagacttggagtaaaactgtataaacaaaagaatcttccatatttatacagcagagaagctgtaggactgtttgtgactggccctgtcctggcatcagtagcatctgtaacagcattaactgtcttaaagagagagagagagaattccgaattggggaacacacgatacctgtttttcttttccgttgctggcagtactgttgcgccgcagtttggagtcactgtagttaagtgtggatgcatgtgcgtcaccgtccactcctcctactgtattttattggacaggtcagactcgccgggggcccggcgagggtatgtcagtgtcactggatgtcaaacagtaataaattaaaccaacaacaaaacgca

SEQ ID NO: 115951 - DNA, 1000 bp, Homo Sapiens
catgacccagctgtgatccatgagaacgcatctcagcccgaggtgctggtccccatccggctggacatggagatcgatgggcagaagctgcgagacgccttcacctggaacatgaatgagaagttgatgacgcctgagatgttttcagaaatcctctgtgacgatctggatttgaacccgctgacgtttgtgccagccatcgcctctgccatcagacagcagatcgagtcctaccccacggacagcatcctggaggaccagtcagaccagcgcgtcatcatcaagctgaacatccatgtgggaaacatttccctggtggaccagtttgagtgggacatgtcagagaaggagaactcaccagagaagtttgccctgaagctgtgctcggagctggggttgggcggggagtttgtcaccaccatcgcatacagcatccggggacagctgagctggcatcagaagacctacgccttcagcgagaaccctctgcccacagtggagattgccatccggaacacgggcgatgcggaccagtggtgcccactgctggagactctgacagacgctgagatggagaagaagatccgcgaccaggacaggaacacgaggcggatgaggcgtcttgccaacacggccccggcctggtaaccagcccatcagcacacggctcccacggagcatctcagaagattgggccgcctctcctccatcttctggcaaggacagaggcgaggggacagcccagcgccatcctgaggatcgggtgggggtggagtgggggcttccaggtggcccttcccggcacacattccatttgttgagccccagtcctgccccccaccccaccctccctacccctccccagtctctggggtcaggaagaaaccttattttaggttgtgttttgtttttgtataggagccccaggcagggctagtaacagtttttaaataaaaggcaacaggtcatgttcaatttcttcaacaaaaaaaaaaaaaaa

SEQ ID NO: 115952 - DNA, 1000 bp, Homo Sapiens
ctccaggaagtttgggcccttctgaacagattgggcaggcagggtcaactgcagggccacagcagcagcaaccagctggagccccccagcctggggcagtcccaccaggggttcccccccctggaccccatggcccctcaccgttccccaaccaacaaactcctccctcaatgatgccaggggcagtgccaggcagcgggcacccaggcgtggcgggtaatgctcctttgggtttgccttttggcatgccgcctcctcctcctcctcctgctccatccatcatcccatttggtagtctagctgactccatcagtattaacctccccgctcctcctaacctgcatgggcatcaccaccatctcccgttcgccccgggcactctccccccacctaacctgcctgtgtccatggcgaaccctctacatcctaacctgccggcgaccaccaccatgccatcttccttgcctctcgggccggggctcggatccgccgcagcccaaagccctgccattgtggcagctgttcagggcaacctcctgcccagtgccagcccactgccagacccaggcacccccctgcctccagaccccacagccccgagcccaggcacggtcacccctgtgccacctccacagtgaggagccagccagacatctctccccctcaccccctgtggacatcacggttccaggaacagcccttcccccaccactgggaccctccccagcctggagagttcatcactacgtaaggaaagctccttccgcccctccaaagccctcaccatgcctaacagaggcatgcatttttatatcagattattcaaggacttctgtttaaaagatgtttataatgtctgggagagaggataggatgggaatgctgccctaaaggaagggctggtgaaaggtgtttatacaaggttctattaaccacttctaagggtacacctccctccaaactactgcattttctatggattaaaaaaaaaaaaaaaaaa

SEQ ID NO: 115953 - DNA, 1000 bp, Homo Sapiens
ggctacccctacatgatccatcatggtgactggttcagtgggaaggctgtggggctgctggtgctccatctaagtggcatggtgctcaacgcctatgtgacccatctccatgccgaatacaatcgacagaaggacatctacctagcacatcgtgtggcccaagcttgggaattggcccagttcatccaccacacatccaagaaggcagacgtggttctgttgtgtggagacctcaacatgcacccagaagacctgggctgctgcctgctgaaggagtggacagggcttcatgatgcctatcttgaaactcgggacttcaagggctctgaggaaggcaacacaatggtacccaagaactgctacgtcagccagcaggagctgaagccatttccctttggtgtccgcattgactacgtgctttacaaggcagtttctgggttttacatctcctgtaagagttttgaaaccactacaggctttgaccctcacagtggcacccccctctctgatcatgaagccctgatggctactctgtttgtgaggcacagccccccacagcagaaccccagctctacccacggaccagcagagaggtcgccgttgatgtgtgtgctaaaggaggcctggacggagctgggtctgggcatggctcaggctcgctggtgggccaccttcgctagctatgtgattggcctggggctgcttctcctggcactgctgtgtgtcctggcggctggaggaggggccggggaagctgccatactgctctggacccccagtgtagggctggtgctgtgggcaggtgcattctacctcttccacgtacaggaggtcaatggcttatatagggcccaggctgagctccagcatgtgctaggaagggcaagggaggcccaggatctgggcccagagcctcagccagccctactcctggggcagcaggagggggacagaactaaagaacaataaagcttggccctttaaaaaaaaaaaaaaaaaa

SEQ ID NO: 115954 - DNA, 1000 bp, Homo Sapiens
cccctgaaatacctagctctgcccctgctgcacctagctccgcacccaggactcctgaccctgcccctgagaaaccttctgagtcgtcggctggtccctccactgaagaagactttgctgtggactttgagaagatctacaagtacttgtcctctgtctcccgaagtggccgcagccccgagctctcagcagctgagtccgctgtggtcctcgacctgctcatgtcacttccagaggagctgccactcctgccctgcacagccctggttgagcatatgacggagacgtacctacgcctgacagccccccagcccattcccgctggagggagcctggggcctgcagcagaaggggatggggctggctccaaggcaccagaggagacccccccagccaccgagaaggccgagcacagcgaactgaaatcgccttggcaagcagctgggatctgtcccctgaacccgttcctggtgcccctggagcttctgggtcgggcagccacccctgccaggtgaggggcatggcgggcaggaggccacaccaggccccccgccctgcccctcggttctgctcggctggccctggctctttctgaggatcccgtcatgggggaaggtccttgagatgatgctcagctgtggggcgggcctctaagatgccccatactttgggggtctcagaaatggaacccccgttgtacaggggttgggtgggggttgcaggactccactcacaagcctcctgatgtcaaggacaggcggacagggctggcctcccccagtccccaagccccactgtgccttgttgtctgctggggggccatagctggcactgcccaccgtaaaggccctcgcacattttcccccttcctgtacacctcggggccagcatcctcaccttcttcaactgaccagtcgtggttactccctgctgccaggtccttccccttcccgggggtattctgtgaccatgaataaagttaccattctctttctctttc

SEQ ID NO: 115955 - DNA, 720 bp, Homo Sapiens
cctgcgagctccgtcctgcctgcagcagcacaaccctgcacacccaccatggatgtcttcaagaagggcttctccatcgccaaggagggcgtggtgggtgcggtggaaaagaccaagcagggggtgacggaagcagctgagaagaccaaggagggggtcatgtatgtgggagccaagaccaaggagaatgttgtacagagcgtgacctcagtggccgagaagaccaaggagcaggccaacgcggtgagcgaggctgtggtgagcagcgtcaacactgtggccaccaagaccgtggaggaggcggagaacatcgcggtcacctccggggtggtgcgcaaggaggacttgaggccatctgccccccaacaggagggtgtggcatccaaagagaaagaggaagtggcagaggaggcccagagtgggggagactagagggctacaggccagcgtggatgacctgaagagcgctcctctgccttggacaccatcccctcctagcacaaggagtgcccgccttgagtgacatgcggctgcccacgctcctgccctcgtcttcctggccacccttggcctgtccacctgtgctgctgcaccaacctcactgccctccctcggccccacccaccctctggtccttctgaccccacttatgctgctgtgaattttttttttaaatgattccaaataaaacttgagcccactcctaaaaaaaaaaaaaaa

SEQ ID NO: 115956 - DNA, 1000 bp, Homo Sapiens
gagcttggacctgtagattttgaggcagattaggaattctgcctgatgggtaagcttccagtattgggaggtggagaaggggagggttcagaaaaataaataagagttattgcactaacaaaagtcttcatcacttgtagttctggatgctggaataccagagtttctaacctaaatacgttgggtacattatttaatggggtcagtattgctcaacactctcattgagtcactgtgaggtctttgtgaattttatcgctaagatcagaatgtgagaagtatttggatatagggaaagaatgaagtgcctttcaagtacattaaaaatcagttaagagtttacaggaaagagactgagattggtaatctgaaaaggaccacaagcatagctggtaggcaaattgttaggcagaataatggtatgttggagaaatacacctgtctcttattcttatctcttaagaattttggttcttcccccagtgattgctggttgaattcttatatggacaggtttcccttcccccagtatcgcacatggttctagttagaatcctgttagatagtgagcatctgctgttagctagacactgttgaatcaatacagtgaaacagacaggtaagcaggtggttttaatgcctcattctaagtgctatttaaattggatcttgaaagatgaataaggcctgccttaagttctgctaaaggcaatgttgttattaaggacgggtgaggaaggaccaagaagtctggctcctgcttttctacatgcctgtgaaggagacttttcatgaaactgaataaaagaaatcctttccgagatagaggagatttgtaggtgaatgcagaagtgtatccagctttgaaccatgcattccatctatattcctcctgtctgaactcatgctcttttgattatgttttgaaataaagggctgcattagttcttttaaaaaaaaaaaaaaaaaaaaaaaaaaaaaaaaaaaaaaaaaaaaaaaa

SEQ ID NO: 115957 - DNA, 1000 bp, Homo Sapiens
gccctacgatgcagagctctcttttgccctgcgcacgggcacgcgtcacggtgtggacactcacctgttcagcgtggagtcaccgcaggagctggctgcctggacccgccagcttgtggatggctgtcaccgggccgccgagggtgtgcaggaggtgtctacagcctgcacgtggaatgggcgtccctgcagcctgtctgtgcacatcgacaagggcttcacactgtgggcggctgagccaggtgcagcccgagctgtgctcctgcgacagcccttcgagaagctgcagatgtcttcagatgacggtgccagtctccttttcctggattttggaggtgctgaaggcgagatccagctggacctgcactcgtgtcccaaaaccatagtcttcatcatccactccttcctgtcggccaaagtcacccgcctcgggctgttggcctagaagtcgccggatgcactagccctgaagaggggtgtccatgacatggcctgagctgggcctccaccgactgcctgctcacccctgggctgagggaagggagaggagaggaacaagggcctccgaaaccccaaccctgagggagactggattggtcttggggcccaggacccagacgcaggacagagtggactctgcctgtgatggggtggccttcctgctgcccccctccaccagtgccttttgcagagagatattttgtgtacacagaagccattccgagtctgggacctgcccctgtgcggatcctgaccccagccaacagctgagctgccgggcctcctcgaggcccctaagccacccccagaggtcccatctgaagctggagtaccctggggtcagcagcaagagaaagaagaggagattttctgtttgtttttcccctcagccctgccaccgtggggagtctggtttttctcttcatcctgtctctctcctccttactcttggataaataaacagcctgtgagcacacaggcagcccggcccagtgaaaaa

SEQ ID NO: 115958 - DNA, 1000 bp, Homo Sapiens
atctgccactcagggtctgggatgaaggcttgtcagcacttccagtttagaacgcaatgtttctagagacatattggctgtttgttttgatgataaaaggagaataagaaaaggcatcactttcctggatccaggataatttttaaaccaatcaaatgaaaaaaacaaacaaacaaaaaaggaaatgtcatgtgaggttaaaccagtttgcattcccctaatgtggaaaaagtaagaggactactcagcactgtttgaagattgcctcttctacagcttctgagaattgtgttatttcacttgccaagtgaaggaccccctccccaacatgccccagcccacccctaagcatggtcccttgtcaccaggcaaccaggaaactgctacttgtggacctcaccagagaccaggagggtttggttagctcacaggacttcccccaccccagaagattagcatcccatactagactcatactcaactcaactaggctcatactcaattgatggttattagacaattccatttctttctggttattataaacagaaaatctttcctcttctcattaccagtaaaggctcttggtatctttctgttggaatgatttctatgaacttgtcttattttaatggtgggttttttttctggtaagatttagacctaaatcgcatcatgccaacttgtgactttgagactattcatcaagaatgaggatatagtagccatgacatagcttgagctatagcctttaattccttactttggctatgggtggagggtgagtttgaagaggttctgattttcttgtaacctgggaaagccatgaccttgtgcccgattctttcagattgctttgggtaataaatattggtggtggtatctgaaaaaaaaaaaaaaaaaaaaaaaaaaaaaaaaaaaaaaaaaaaaaaaaaaaaaaaaaaaaaaaaaaaaaaaaaaaaaaaaaaaaaaaaaaaaaaaaaaaaaaaaaaaaaaaaaa

SEQ ID NO: 115959 - DNA, 1000 bp, Homo Sapiens
ccggacagcaggcttccaccccgtcacctgcatgtggttcatacgggcaaaacctccgtggtcatcaagtgggaatcaccgtatgactctcctgaccaggacttgttgtatgcaattgcagtcaaagatctcataagaaagactgacaggagctacaaagtaaaatcccgtaacagcactgtggaatacacccttaacaagttggagcctggcgggaaataccacatcattgtccaactggggaacatgagcaaagattccagcataaaaattaccacagtttcattatcagcacctgatgccttaaaaatcataacagaaaatgatcatgttcttctgttttggaaaagcctggctttaaaggaaaagcattttaatgaaagcaggggctatgagatacacatgtttgatagtgccatgaatatcacagcttaccttgggaatactactgacaatttctttaaaatttccaacctgaagatgggtcataattacacgttcaccgtccaagcaagatgcctttttggcaaccagatctgtggggagcctgccatcctgctgtacgatgagctggggtctggtgcagatgcatctgcaacgcaggctgccagatctacggatgttgctgctgtggtggtgcccatcttattcctgatactgctgagcctgggggtggggtttgccatcctgtacacgaagcaccggaggctgcagagcagcttcaccgccttcgccaacagccactacagctccaggctggggtccgcaatcttctcctctggggatgacctgggggaagatgatgaagatgcccctatgataactggattttcagatgacgtccccatggtgatagcctgaaagagctttcctcactagaaaccaaatggtgtaaatattttatttgataaagatagttgatggtttattttaaaagatgcactttgagttgcaatatgttatttttatatgggccaaaaacaaaaaacaaaaaaaaaaa

SEQ ID NO: 115960 - DNA, 1000 bp, Homo Sapiens
ccatcacccacagcaaatgacagctgcaaaagagaacaccaatcccatccacactcacgcaaaaaccgcgatgccgacaagaaaacttttatgagagagatcctggacttctttttgggggactatttttgtacagagaaaacctggggagggtggggagggcgggggaatggaccttgtatagatctggaggaaagaaagctacgaaaaactttttaaaagttctagtggtacggtaggagctttgcaggaagtttgcaaaagtctttaccaataatatttagagctagtctccaagcgacgaaaaaaatgttttaatatttgcaagcaacttttgtacagtatttatcgagataaacatggcaatcaaaatgtccattgtttataagctgagaatttgccaatatttttcaaggagaggcttcttgctgaattttgattctgcagctgaaatttaggacagttgcaaacgtgaaaagaagaaaattattcaaatttggacattttaattgtttaaaaattgtacaaaaggaaaaaattagaataagtactggcgaaccatctctgtggtcttgtttaaaaagggcaaaagttttagactgtactaaattttataacttactgttaaaagcaaaaatggccatgcaggttgacaccgttggtaatttataatagcttttgttcgatcccaactttccattttgttcagataaaaaaaaccatgaaattactgtgtttgaaatattttcttatggtttgtaatatttctgtaaatttattgtgatattttaaggttttcccccctttattttccgtagttgtattttaaaagattcggctctgtattatttgaatcagtctgccgagaatccatgtatatatttgaactaatatcatccttataacaggtacattttcaacttaagtttttactccattatgcacagtttgagataaataaatttttgaaatatggacactgaaaaaaaaaaaaaaaaaa

SEQ ID NO: 115961 - DNA, 1000 bp, Homo Sapiens
cttggctctgccttggcccttcccctcaccacgagctcccggcctgcccagactgtggacactggccgtgcccaatgagacgttctaaaccaggacgcgtgggaacccttatttccaaaggaaaaacatgcatttcactccgtcgaggagcaaagtgagcccctaccccccaccccgatccccgctcccaacactgccggagtcgcgtcatgccatgccccctctcctgcacctccctggccctgccggccactgtggacgccctggggcttggcacccacctctggagaaactcggggccacctccactccatgtgcccagccccgccacaacctctcctccagcacattccagctctatttaaaaagtaaagacacccaccgactcctgatccccctctttttctatggagaacgttgccttatactctctacttcagatgatgaacactgtgtactgtgtgtgctttaaagaagttttatttaattgctcccttcttcctttccttgttattcacctccctgatgcctgctttcagttgagggttgggggcaatgatgagcatatgaattttttctcactctagcaattcccttttctaaatgacacagcatttaaactcaaatctggattcagataacagcacctgcacatcctgcacctcctccctctcccttcacctcacccctgcccggcccaagctctacttgtgtacagtgtatattgtataatagacaattgtgtctactacatgtttaaaaacacattgcttgttatttttgaggcttttaaattaaacaaaaatccaactttatttttagttgtaactgcttgaggtatgttttatgaattaagtgacagatttgttatcctttattaacgtactttgttggtcagcactgggctgacaaaaattttttcttgctaataaatttagttgcctgaggcaaaatcttcaaaaaaaaaaaaaaaaaaaaaaaaaaaaaaaaaaaaaaaaaa

SEQ ID NO: 115962 - DNA, 1000 bp, Homo Sapiens
tcaaggctgaaaaaagcaagaaaaagaaggaagaggaagaagatgaagaggatgaacaagaggaggaaaatgaagaagatgatgataaataagttgcttctagtgcagtttttttcttgtctataaagcatttaagctgcctgtacacaactcactccttttaaagaaaaaaacttcaacgtaagactgtgtaagatttgtttttaaaccgtacactgtgtttttttgtatagttaaccactaccgaatgtgtcttcagatagccctgtcctggtggtatttagccactaacctttgcctggtacagtatgggggttgtaaattggcatggaaatttaaagcaggttcttgttagtgcacagcacaaattagttgtataggaggatggtagttttttcaccttcagttgtctctgatgtagcttatacaaaacatttgttgttctgttaactgaatgccactctgtaattgcaaaaaaaaaaaacagttgcagctgttttgttgacattctgaatgcttctaagtaaatacaatttttaaaaaaccgtatgagggaactgtgtagacaaggtaccaggtcagtcttcttccatgttctattagctccacaaagccaatctcaatccctcaaaacaatcttgtcatacttgaaaatatgacactctagtcaaagccttggtaaaataatcagtgtttccaatctgtcctgttacaaaagaaacagattattattgaacttatgcaaataaccattgtcataagaatgtttatgaatagtttccaaattatggcaaattcatgtagagagagaaaagtaactgttttggttttgctcacaaaagtctactttacctaagggctgtcagatataagtaacttaaaagaaagagaagttttcttgacttttgaaaacaaaatatgaaaagaatcggcaatgtttcaaacaaaaagtcataaaagtcactttattcctccatcaaaaaaaaaaaaaaaaaaaaaa

SEQ ID NO: 115963 - DNA, 1000 bp, Homo Sapiens
agtcttagtcaccttattatcctgacacaaaaacacatgagcatacatgtctacacatgactacacaaatgcaaacctttgcaaacacattatgcttttgcacacacacacctgtacacacacaccggcatgtttatacacagggagtgtatggttcctgtaagcactaagttagctgttttcatttaatgacctgtggtttaacccttttgatcactaccaccattatcagcaccagactgagcagctatatccttttattaatcatggtcattcattcattcattcattcacaaaatatttatgatgtatttactctgcaccaggtcccatgccaagcactggggacacagttatggcaaagtagacaaagcatttgttcatttggagcttagagtccaggaggaatacattagataatgacacaatcaaatataaattgcaagatgtcacaggtgtgatgaagggagagtaggagagaccatgagtatgtgtaacaggaggacacagcattattctagtgctgtactgttccgtacggcagccactacccacatgtaactttttaagatttaaatttaaattagttaacattcaaaacgcagctccccaatcacactagcaacatttcaagtgcttgagagccatgcatgattagtggttaccctattgaataggtcagaagtagaatcttttcatcatcacagaaagttctattggacagtgctcttctagatcatcataagactacagagcacttttcaaagctcatgcatgttcatcatgttagtgtcgtattttgagctggggttttgagactccccttagagatagagaaacagacccaagaaatgtgctcaattgcaatgggccacatacctagatctccagatgtcatttcccctctcttattttaagttatgttaagattactaaaacaataaaagctcctaaaaaatcaaaaaaaaaaaaaaaaaaaaaaaaaaaaaaaaaaaaaaaa

SEQ ID NO: 115964 - DNA, 1000 bp, Homo Sapiens
actggaagtgcgcagacagcaagaggaagaggagaggaagaggcggccgccttctcccgagccgagcacgaaggtttcagaggaagccgagtcccagcagcagtgggatacttcaaaaggagaacaagtttcccaaaacggtttgccagctgaacagggatctccacggatggcagaaacggtggacacaagcgaaatggtcaacggcgctacagaacaaaggacgagctctaaagagtccagccccatcccctccccgacctctgatcgtaaagccaagactgccctcccagcccagagtgccgccaccttaccagccagaacccaggagacaccttcggcccagatggaaggcttcctcaatcggaaacacgagtgggaggcccacaataagaaagcctcaagcaggtcctggcacaatgtttattgtgtcataaataaccaagaaatgggtttctacaaagatgcaaagactgctgcttctggaattccctaccacagcgaggtccctgtgagtttgaaagaagctgtctgcgaagtggcccttgattacaaaaagaagaaacacgtattcaagctaagactaaatgatggcaatgagtacctcttccaagccaaagacgatgaggaaatgaacacatggatccaggctatctcttccgccatctcctctgataaacacgaggtgtctgccagcacccagagcacgccagcatccagccgcgcgcagaccctccccaccagcgtcgtcaccatcaccagcgagtccagtcccggcaagcgggaaaaggacaaagagaaagacaaagagaagcggttcagcctttttggcaaaaagaaatgaactcctttccttcacctcctgcccttctcttaccttttcagtgaaattccagcatgcaagctcagaaccaacacattactctctgtgcctaatgttcctcaatgtggttgatttatttttttttttaatttatagagcatttcggggggggtgggg

SEQ ID NO: 115965 - DNA, 1000 bp, Homo Sapiens
atttaagagaatacatggttgaaaaaatttacccacaaatacctgatcacctgaaagaaccattcttagaagccactgacaattctcatctgaggtccatgccagcaagcttccttcctccttcatcagtgaagaaacgaggtgttcttcttttgggagacgcatataatatgaggcatccacttactggtggaggaatgactgttgcttttaaagatataaaactatggagaaaactgctaaagggtatccctgacctttatgatgatgcagctattttcgaggccaaaaaatcattttactgggcaagaaaaacatctcattcctttgtcgtgaatatccttgctcaggctctttatgaattattttctgccacagatgattccctgcatcaactaagaaaagcctgttttctttatttcaaacttggtggcgaatgtgttgcgggtcctgttgggctgctttctgtattgtctcctaaccctctagttttaattggacacttctttgctgttgcaatctatgccgtgtatttttgctttaagtcagaaccttggattacaaaacctcgagcccttctcagtagtggtgctgtattgtacaaagcgtgttctgtaatatttcctctaatttactcagaaatgaagtatatggttcattaagcttaaaggggaaccatttgtgaatgaatatttggaacttaccaagtcctaagagacttttggaagaggatatatatagcatagtaccataccacttataaagtggaaactcttggaccaagatttggattaatttgtttttgaagttttttgtatataaatatgtaaatacatgctttaatttgcaatttaaaatgaaggggttaaataagttagacatttaaaagaaatgattgttaccataaattagtgctaatgctgaggagaactacagtttttcttttgaatttagtatttgagatgagttgttgggacatgcaaataaaatgaagaatgaa

SEQ ID NO: 115966 - DNA, 1000 bp, Homo Sapiens
tgttcagaagcttagaggtcattttttgtaattttctttttaattactttagagagctagggatgcaaatgttttcagttagaaagcctttatttacttttggaaattgaacaagaaatgcatctgtcttagaaactggagattatttgatgttaggtaaaacatgtaattgtttctctggcaaatttgtatcagtaatttgaaaatgagatattaggaaaaaccaattcttcttaaatttagttcatctttctttaaaagaacattaaatgtaaccattttgtcagatccatgtattttggagcataaaatgtatgctgttgtgaccaataaatataaaatatggtaattggaattaactccacaccatagtatgcattgttatacatactgtgtacctaattatgtatagcagtgtagtctcaattatatctgaaagtaattgtgactaacaagtatgctttgccttatttccacatttaaactacctgttaatataagggatttgtagtatcagcttgttgagcaatgactttgaatctagttttcagtgatcagaagcagcagttatttgagtgtatgaatggaatgatgatcactgtgctataatgtactgaaaccaccatattacagaaatatttactacatattttccatctgtagtttctcagaagggctatggattagtttgaactgtcaaatccttgcatacttctgtgacacccctgcccattttctgtctttaattaaccaaggtgttaggtgtgactgtcacaactgttatgttttccagtaaactagaagcacgatatttgataattatatttgtatttcaccacctaaatgtaatgttgattcctcaagaatgaaatgaaggcactacattgaaatatgttttgtataaatttgtcatgttgaacagcattttagcatggtaagttcccttagctatatgaattttggcatgtttcagagagatcagtaaataaaatattagata

SEQ ID NO: 115967 - DNA, 1000 bp, Homo Sapiens
acaatgaagcacttatagagaagttgaaacatggtcagtttacgttgcgagacatgtatgagcaatttcaaaatatcatgaaaatgggccccttcagtcagatcttggggatgatccctggttttgggacagattttatgagcaaaggaaatgaacaggagtcaatggcaaggctaaagaaattaatgacaataatggatagtatgaatgatcaagaactagacagtacggatggtgccaaagtttttagtaaacaaccaggaagaatccaaagagtagcaagaggatcgggtgtatcaacaagagatgttcaagaacttttgacacaatataccaagtttgcacagatggtaaaaaagatgggaggtatcaaaggacttttcaaaggtggcgacatgtctaagaatgtgagccagtcacagatggcaaaattgaaccaacaaatggccaaaatgatggatcctagggttcttcatcacatgggtggtatggcaggacttcagtcaatgatgaggcagtttcaacagggtgctgctggcaacatgaaaggcatgatgggattcaataatatgtaaagaaaatgccttaatataaactgactcagttgaatacctaatttgctgagacctcagcgtttcccttctttttgcgaattggggggaaagtgtatttttcttgcttatcatgcactctttccttttcttctcgcccgcttttcccctccttttctttttccttccttctttcctccctttaatataagggagaaatacatggtttttgtggaaatcattatatgtttgctttagattttcttctgttttcaccatcataacacttaagttaaatcatgatgtaaaattttagtacttaaaggtttttaattatctcgaaggccaagcattgcatttgtaaacagtcctggtcagtagttaaataatgtttcaattaaagtgctgtaaaataaacttcaaagtggttataaaaaaaaaaaaaaaaa

SEQ ID NO: 115968 - DNA, 1000 bp, Homo Sapiens
gaaggcttaacgtggctcttgcccaataccaaatcgccgctttccccacaagcccttcttcctgtatcaagaatgtgctttagagtatgtgagcaacctgtcttcagtgtagtacaaaggcagagtgagggggcttgtggctccttccaaccccactccccgttcagcacagccgccatttgcaaggaaggcctaatcatgttacaatcactgcccactgaccctctcccagcgggcctcccccttcctactcaggcacccccttcactctgcctacagactcagtcttattacagctttgaccaatggttggaacccaacaccagagctttgctaataattagtgtggtcaagagccgtctgagcctaatgagtcccagctgcattaggttaagagactcttccagagccagcgccaggtcttgaatggcacctctccctaggatacacagcctgcaggtccccaggacctggatgacacccgcctcactgtggcagtgtattgcctgttaattgctgctaattctaattctgatgatgactcctactccattgtttaccccaaagcatcagctaggctggagtgatttgttacaaatgagcaaaagatgagtccttgcttccctcagaaataaaagtagctcagctgcagcgttgcattgggcttcttggcctcccaactcttcccactcccagaatccagaagtaagctctgcatgttccccttcctgggaggaaaccaattgtcagaaggatgtatgatgaccccctcccctcccatccttcacctcctaagcagtcctggcttttcctcatcactcccctctacagtgcctggtagacaagtgctacattgaagaacacaaacctcttgttaagacttgtcctgtagcttgatattacagatgtgctattagtgcaataaggtgaaggctgtctgcccagagaaataagtaatttatataagaaaataaatttcataaataaaaaaaaaaaaaaa

SEQ ID NO: 115969 - DNA, 1000 bp, Homo Sapiens
gccaaaaaaaatgaagaaagaaaacaaaataaagtggaagctaaattaagagctaaacaggagcaagaagcaaaacaaaagttagaagaagatgctgaaatgaaatctctagaagaaaagattggatgcttgctgaaattttcgggtgatttagatgatcagacctgtagagaagatttacacatacttttctcaaatcatggtgaaataaaatggatagacttcgtcagaggagcaaaagaggggataattctatttaaagaaaaagccaaggaagcattgggtaaagccaaagatgcaaataatggtaacctacaattaaggaacaaagaagtgacttgggaagtactagaaggagaggtggaaaaagaagcactgaagaaaataatagaagaccaacaagaatccctaaacaaatggaagtcaaaaggtcgtagatttaaaggaaaaggaaagggtaataaagctgcccagcctgggtctggtaaaggaaaagtacagtttcagggcaagaaaacgaaatttgctagtgatgatgaacatgatgaacatgatgaaaatggtgcaactggacctgtgaaaagagcaagagaagaaacagacaaagaagaacctgcatccaaacaacagaaaacagaaaatggtgctggagaccagtagtttagtaaaccaattttttattcattttaaataggttttaaacgacttttgtttgcggggcttttaaaaggaaaaccgaattaggtccacttcaatgtccacctgtgagaaaggaaaaatttttttgttgtttaacttgtctttttgttatgcaaatgagatttctttgaatgtattgttctgtttgtgttatttcagatgattcaaatatcaaaaggaagattcttccattaaattgcctttgtaatatgagaatgtattagtacaaactaactaataaaatatatactatatgaaaagagcaaaaaccaaaaaaaaaaaaaaaaaaaaaaaaaaaaaa

SEQ ID NO: 115970 - DNA, 1000 bp, Homo Sapiens
tccttttcagtataacctcccctatgctcatgcccacacagacaaaaaaacaaaacgaaatacacacagaaaaaagtctttccaaactgtttaagtatttaaacatctgagccaaagcagatagaagttattgtataattgttaatcactttgcaaataggggctatcaaattacctatattggcattgctggattataaactctatatctgtaatataaagtgtttgagtttttaattgggctgttatgatcagtaattgattttgagaaagctctatgagctctaagtaactgcatggttttttgtttaatgtaatataggagacccttcacattcccaaggaatatattccaaaacatttttgtgaatatctaagtttgtgaaactactagggcatgatacagtaaggtgtaattacagaatttacgaaatgtaaatggcctctacagagttttatggaatacctggtactaacgtaggcagctgcaaaaccacactgagttacagctgtcagccctcctcattcctaaataacttgccttacatatcagccctcccacttctgaagttcaaattagtgcctcggaaatgtagaatttattatttgtcattttttttttttagcatagattgagaacagttgaactcttaaatcctcagatgccaggggtctgctctagcatcagtaagtatttagcagaaactaactccgtaatgaatggaattcaattccacacatggtttgttcaagcacacttaataagtagcctattttttaaatgtctttttaaaatgtaaatatttggatgaagtttttctttgttttgatatattcatttgctacaccaactatgttttcagaattcatcttttgaacaacttggtttcagaatatgtaaaatgactttaaggatcttgtgtatcaaacctatccccggatgtgtgagaataatgtgttcataaagcatggatctcgtaaaaaaaaaaaaaaaaaaaaa

SEQ ID NO: 115971 - DNA, 1000 bp, Homo Sapiens
tgtctggttgagctcagggaatatggttcttagccagtttcttggtgatatccagtggcacttgtaatggcgtcttcattcagttcatgcagggcaaaggcttactgataaacttgagtctgccctcgtatgagggtgtatacctggcctccctctgaggctggtgactcctccctgctggggccccacaggtgaggcagaacagctagagggcctccccgcctgcccgccttggctggctagctcgcctctcctgtgcgtatgggaacacctagcacgtgctggatgggctgcctctgactcagaggcatggccggatttggcaactcaaaaccaccttgcctcagctgatcagagtttctgtggaattctgtttgttaaatcaaattagctggtctctgaattaagggggagacgaccttctctaagatgaacagggttcgccccagtcctcctgcctggagacagttgatgtgtcatgcagagctcttacttctccagcaacactcttcagtacataataagcttaactgataaacagaatatttagaaaggtgagacttgggcttaccattgggtttaaatcatagggacctagggcgagggttcagggcttctctggagcagatattgtcaagttcatggccttaggtagcatgtatctggtcttaactctgattgtagcaaaagttctgagaggagctgagccctgttgtggcccattaaagaacagggtcctcaggccctgcccgcttcctgtccactgccccctccccatccccagcccagccgagggaatcccgtgggttgcttacctacctataaggtggtttataagctgctgtcctggccactgcattcaaattccaatgtgtacttcatagtgtaaaaatttatattattgtgaggttttttgtcttttttttttttttttttttttggtatattgctgtatctactttaacttccagaaataaacgttatataggaaccgtaaaaa

SEQ ID NO: 115972 - DNA, 1000 bp, Homo Sapiens
aagagcaattgcagcagacccagcagcagcagcagcagcacaaacattgctgcctttgtccccacacagcctctaagcgtgctgacatcagattgttaagggcatttttatactcagaactgtcccatccccaggtccccaaacttatggacactgccttagcctcttggaaatcaggtagaccatattctaagttagactcttcccctccctcccacacttcccacccccaggcaaggctgacttctctgaatcagaaaagctattaaagtttgtgtgttgtgtccattttgcaaacccaactaagccaggaccccaatgcgacaagtagttcatgagtattcctagcaaatttctctctttcttcagttcagtagatttccttttttcttttctttttttttttttttttttttggctgtgacctcttcaaaccgtggtacccccccttttctccccacgatgatatctatatatgtatctacaatacatatatctacacatacagaaagaagcagttctcacaatgttgctagttttttgcttctctttcccccaccctactccctccaattcccccttaaacttccaaagcttcgtcttgtgtttgctgcagagtgattcgggggctgacctagaccagtttgcatgattcttctcttgtgatttggttgcactttagacatttttgtgccattatatttgcattatgtatttataatttaaatgatatttaggtttttggctgagtactggaataaacagtgagcatatctggtatatgtcattatttattgttaaattacatttttaagctccatgtgcatataaaggttatgaaacatatcatggtaatgacagatgcaagttattttatttgcttatttttataattaaagatgccatagcataatatgaagcctttggtgaattccttctaagataaaaataataataaagtgttacgttttattggtttcaaaaaaaaaaaaaaaaaaaa

SEQ ID NO: 115973 - DNA, 1000 bp, Homo Sapiens
cacttgattattttctttaaaatcagctattacaggatatttttttattttatacatgctgttttttaattaaaatataatcactgaagtttactaatttgattttataaggtttgtagcattacagaataactaaactgggatttataaaccagctgtgattaacaatgtaaagtattaattattgaactttgaaccagatttttaggaaaattatgttctttttccccctttatggtcttaactaatttgaatccttcaagaaggatttttccatactattttttaagatagaagataatttgtgggcaggggtggaggatgcatgtatgatactccataaattcaacattctttactataggtaatgaatgattataaacaagatgcatcttagatagtattaatatactgagccttggattatatatttaatataggacctattttgaatattcagttaatcatatggttcctagcttacaagggctagatctaagattattcccatgagaaatgttgaatttatgaagaatagattttaaggctttgaaaatggttaatttctcaaaaacatcaatgtccaaacatctaccttttttcataggagtagacactagcaagctggacaaactatcacaaaagtatttgtcacacataacctgtggtctgttgctgattaatacagtactttttcttgtgtgattcttaacattatagcacaagtattatctcagtggattatccggaataacatctgaaagatgggttcatctatgtttgtgtttgctctttaaactattgtttctcctatcccaagttcgctttgcatctatcagtaaataaaattcttcagctgccttattaggagtgctatgagggtaacacctgttctgcttttcatcttgtatttagttgactgtattatttgatttcggattgaatgaatgtaaatagaaattaaatgcaaatttgaatgaacataaaaaaaaaaaaaaaa

SEQ ID NO: 115974 - DNA, 1000 bp, Homo Sapiens
gtattcccaacgccagcccagcagccagtggccacaccactaatgacccctagctactcctacacgaccccaagccagcccatcaccacccctcagtaccaccagctccaggccagcaccaccccacagtcggcccaggcccagccccagccctcttccagctcccggcaacggcagcagcagccaaagtccaacagccatgcagccatcgactggggaaaaatggcggagcagtggctgcaggaaaaggaggcagaacggcggaaacagaagcagcggctgacacctcggccctcccccagccccatgatcgaaagcacccccatgtccattgctggcgatgccaccccactcctggacgagatggatcggtagggggcctgctcctcggactctggttacctctgaggctgggaaaggcctggctgcccactgcctccctccctgcccctccttttatgtccataaagtggcgtgaagtgagacgttctctttggtggtcaacccggatgggtgacaggctggatggccttgtgaacttgagctcagtgtatgctaggcaacaattctcccgctccagaccctcaccgaccacctgtcctgggaccaggctgggaggggagtgtggcagggaggaggaagaggaaggtgagaatgagtagaacagttttgtattctactccctacaagccattttgaacttctgccctcaccggactctgggctgtgactggggcaccaaactcagcacatgagtctcccctagctctcgtggggagagggatgctatttattcagtttggggcaggagggagaggagggaaagtatttctgaccctgatgccaacagccgggtggctgtccaagcaggattgcaggggacacagggaagcactgcccagcccctgcctggctgccctttcccccctgctgctgccaccgcttcctgcctgtcatttgaataaacagtgtttctattgaaaaaaaaaaaaaaaaaaaa

SEQ ID NO: 115975 - DNA, 1000 bp, Homo Sapiens
cagctccagtcagtaccccagcctgtggtctgtgagcaacggcgccgtcaccccgggctcccaggcagcagccgtgtccaacgggctgggggcccagttcttccggggctcccccgcgcactacacacccctcacccatccggtctcggcgccctcttcctcgggatccccactgtacgaaggggcggccgcggccacagacatcgtggacagccagtacgacgccgcagcccaaggccgcctcatagcctcatggacacctgtgtcgccaccttccatgtgaagcagcaaggcccaggtcccgaaagatgcagtgactttttgtcgtggcagccagtggtgactggattgacctactaggtacccagtggcagtctcaggttaagaaggaaatgcagcctcagtaacttccttttcaaagcagtggaggagcacacggcacctttccccagagccccagcatcccttgctcacacctgcagtagcggtgctgtcccaggtggcttacagatgaacccaactgtggagatgatgcagttggcccaacctcactgacggtgaaaaaatgtttgccagggtccagaaactttttttggtttatttctcatacagtgtattggcaactttggcacaccagaatttgtaaactccaccagtcctactttagtgagataaaaagcacactcttaatcttcttccttgttgctttcaagtagttagagttgagctgttaaggacagaataaaatcatagttgaggacagcaggttttagttgaattgaaaatttgactgctctgccccctagaatgtgtgtattttaagcatatgtagctaatctcttgtgttgttaaactataactgtttcatatttttcttttgacaaagtagccaaagacaatcagcagaaagcattttctgcaaaataaacgcaatatgcaaaatgtgattcgtccagttattagtgaagcccctccttttgtgagtatttactgtttattg

SEQ ID NO: 115976 - DNA, 1000 bp, Homo Sapiens
gaagaagtatgacgaggagctggaggagcggctggtggagtggatcatagtgcagtgtggccctgatgtgggccgcccagaccgtgggcgcttgggcttccaggtctggctgaagaatggcgtgattctgagcaagctggtgaacagcctgtaccctgatggctccaagccggtgaaggtgcccgagaacccaccctccatggtcttcaagcagatggagcaggtggctcagttcctgaaggcggctgaggactatggggtcatcaagactgacatgttccagactgttgacctctttgaaggcaaagacatggcagcagtgcagaggaccctgatggctttgggcagcttggcagtgaccaagaatgatgggcactaccgtggagatcccaactggtttatgaagaaagcgcaggagcataagagggaattcacagagagccagctgcaggagggaaagcatgtcattggccttcagatgggcagcaacagaggggcctcccaggccggcatgacaggctacggacgacctcggcagatcatcagttagagcggagagggctagccctgagcccggccctcccccagctccttggctgcagccatcccgcttagcctgcctcacccacacccgtgtggtaccttcagccctggccaagctttgaggctctgtcactgagcaatggtaactgcacctgggcagctcctccctgtgcccccagcctcagcccaacttcttacccgaaagcatcactgccttggcccctccctcccggctgcccccatcacctctactgtctcctccctgggctaagcaggggagaagcgggctgggggtagcctggatgtgggccaagtccactgtcctccttggcggcaaaagcccattgaagaagaaccagcccagcctgccccctatcttgtcctggaatatttttggggttggaactcaaaaaaaaaaaaaaaaaatcaatcttttctcaaaaaaaaaaaaaaaaaa

SEQ ID NO: 115977 - DNA, 1000 bp, Homo Sapiens
cgggagctgaaggccatgcctatcacgctgcacctgctccagtccacccgagtcgggatgtctgtcaacgcccttcggaagcagagctcggatgaggaggtcattgcactggccaagtctctcatcaagtcctggaagaagctcctggatgcttccgatgccaaagccagggagcgggggaggggcatgcctctgcccacgtcctcgagggatgcctcagaggccccggatcccagccgcaagaggccggagctgcccagggcaccgtcgactccgaggatcaccacatttcctccggtgcctgtcacctgtgatgccgtgcgcaacaagtgccgcgagatgctgaccgctgccctgcagacggaccatgaccacgtggccatcggtgcggactgcgagcgcctgtcggctcagatcgaggaatgcatcttccgggacgttggaaacacagacatgaagtataagaaccgtgtacggagtcgtatctccaacctgaaggatgccaagaaccctgacctgcggcggaatgtgctgtgtggggccataacaccccagcagatcgctgtgatgacctcagaggagatggccagtgatgagctgaaggagatccgtaaggccatgaccaaggaggccatccgagagcaccagatggcccgcactggcggcacgcagacagacctgttcacctgcggcaagtgcaggaaaaagaactgcacctacacacaggtgcagacccgcagctctgatgagcccatgaccacctttgttgtctgcaacgagtgtggaaaccgctggaagttctgctgacccctcgtgtagatgtgctgcagccttgggccctccccggcccacgtcctccgttgacacagcttctctggagaccctagaaggcggcatgtcctgccctcaacctgcctgcctggattgcacctttctgccctttccccctcattattaaatgtttctttttgccaaaaaaaacaaaaaaaaaaaaaaaaaa

SEQ ID NO: 115978 - DNA, 1000 bp, Homo Sapiens
atgaccttgcaccagcaatgcatccgagtacttaaaaacaacatcgattcaatctttgaagtgggaggagtcccatactctgttcttgaacccgttttggagaggtgtacacctgatcagctgtatcgcatagaggaatacaatcatgtattaattgaagaaacagatcaattatggaaagttcattgtcaccgagactttaaggaagaaagacccgaagagtatgagtcgtggcgagagatgtacctgcggcttcaggacgcccgagagcagcggctacgagtactaacaaagaatatccagttcgcacatgccaataagcccaaaggccgacaagcaaagatggcctttgtcaactctgtggccaagccacctcgtgacgtccggaggaggcaggaaaagtttggaacgggaggagcagctgtccctgagaaaatcaagatcaagccagccccgtaccccatgggaagcagccatgcttccgccagtagcatcagctttaaccccagccctgaggagccggcctatgatggcccaagcaccagcagtgcccacttggcaccagtggtcagcagcactgtttcctatgatcctaggaaacccactgtgaagaaaattgccccaatgatggccaagacaattaaagctttcaagaacagattctcccgacgataaactgaggacttgccttggaaatggaatctggggaggcaggaatacaaggacagtgggggttggggaatggaattctacaggagactggagtcttgctttgtggatccttttggtctccgagtctgcagtctgcaggtgctgcccctgggaacctgcgtgccacagccccgcctccctgcctggagcacactttagaattctgaagatgtgaagcctctgtctcactgaggattttaaaggtcaattatacttttgttgttcattagcatctttgtaaactataagacgtagttttaattaataaatattgcccccagatgttaaa

SEQ ID NO: 115979 - DNA, 1000 bp, Homo Sapiens
ctcagggtatggaaccggccttctttcagccaacagacattcactcatggtggggacccatcgtgaagatggcgtggccctgagaggcagccattctcttctgccaaaccaggttccggttccacagcttcctgtccagtctgcgacttcccctgacctgaacccaccccaggacccttacagaggcatgccaccaggactacaggggcagagtgtctcctctggcagctctgagatcaaatccgatgacgagggtgatgagaacctgcaagacacgaaatcttcggaggacaagaaattagatgacgacaagaaggatatcaaatcaattactagcaataatgacgatgaggacctgacaccagagcagaaggcagagcgtgagaaggagcggaggatggccaacaatgcccgagagcgtctgcgggtccgtgacatcaacgaggctttcaaagagctcggccgcatggtgcagctccacctcaagagtgacaagccccagaccaagctcctgatcctccaccaggcggtggccgtcatcctcagtctggagcagcaagtccgagaaaggaatctgaatccgaaagctgcgtgtctgaaaagaagggaggaagagaaggtgtcctcggagcctccccctctctccttggccggcccacaccctggaatgggagacgcatcgaatcacatgggacagatgtaaaagggtccaagttgccacattgcttcattaaaacaagagaccacttccttaacagctgtattatcttaaacccacataaacacttctccttaacccccatttttgtaatataagacaagtctgagtagttatgaatcgcagacgcaagaggtttcagcattcccaattatcaaaaaacagaaaaacaaaaaaaagaaagaaaaaagtgcaacttgagggacgactttctttaacatatcattcagaatgtgcaaagcagtatgtacaggctgagacacagcccagagactgaacggc

SEQ ID NO: 115980 - DNA, 1000 bp, Homo Sapiens
agcctgcatgtgtatgccgtcctcccctggtccggtgtttgtgttccccacccctcacagactgcctgagctcttctgtaagctggggtagggtgatggcagtgctccgggaactgggcctgcagccttcctcttctgggactgctgtgaggcagaggaatgatggagaatctagtgtagcagcctccaggcaggattcagcacaacactggggagtcacccttccctcgggcctctgcctaccaacaactgggcttatcactgggaaaacacaaaaaattacacaacccagcaacaacaaaagaactagtcctcttagaatttcttgcgctttgatttttttagggcttgtgccctgtttcacttatagggtctagaatgcttgtgttgagtaaaaaggagattcccaatattcaaagctgctaaatgttctctttgccataaagactccgtgtaactgtgtgaacacttgggatttttctcctctgtcccgaggtcgtcgtctgctttcttttttgggtttctttctagaagattgagaagtgcatatgacaggctgagagcacctccccaaacacacaagctctcagccacaggcagcttctccacagccccagcttcgcacaggctcctggagggctgcctgggggaggcagacatgggagtgccaaggtggccagatggttccaggactacaatgtctttatttttaactgtttgccactgctgccctcacccctgcccggctctggagtaccgtctgccccagacaagtgggagtgaaatgggggtggggggaagcactgattcccagttagggggtgcctaactgagcagtagggatagaaggtgtgaacctgggagtgcttttataaattattttccttgtagattttatttttaatttatctctgtgacctgccagggagaggggagagagagagagatgctgttgagcacatgacaaaataaaataaaatggatgattcaaaaaaaaaaa

SEQ ID NO: 115981 - DNA, 1000 bp, Homo Sapiens
tgcggctcctgtgcttggatctttgacatctgtcagtcactggaggctagagaagttgactttaccttggctttctgtgggttcccgatgggcttggaagtgccgtctacttcctaagcatcctgtctaaagctttgtggcaccctcagtgcaacctcagaacagacaaatcatgaatgagctggaactttgcaagaatattcatattataaatgtctcatctgatggaggaacgtgtgcatttagagagagggagagttttcaaggtttatggcaactttgtggaggacctgggtaactcttacccttggccaaaggaagaggttttcctgtctggcttctgaggttggagggggcacttagcagtgaaccttaagtctgggtacatgtaaccctgctgaggggctgtgcaggccgctcctacggtcctttggcctgaggcagggcgggaggcatgcaagccagtgggggaaaacccctctgaagctgggcagccctctacctgggccccgggagccgtgctccttggaacgcaaagggccgaggagcatctggttttcatggcaaagctctactccagagctcctttaacatctgctaattaagtgcaataaatttttctagaaaatggcaaagatgacttccaggtggatattgctctcttacggtgttggggatgccagaacaccacttggttttatttttctaagtgcatgtgatgtgatagagtgtgtggggctctgtgtccttccctgggagctggcattccagcgggcccctctctttacctttgttgggggaaggaggcaagagagaaattccttcttcccagccagagagggcagaagcagaccgtagcccattggccttatgtgcgtgtgtgcgtgcgagtgtgtcactgctggtgggccggagtgatgtggtgggagggaagccgggaatgtatccttttcagacaaaattaaatattttgaaatgagaaaaaaaaaaaaaaaaaaaa

SEQ ID NO: 115982 - DNA, 1000 bp, Homo Sapiens
ggacatcacgtaggcgcagccgcgctgccgtcgggacggctggtcccctggtgctggaggagtggcctcctgttggctcccatgctgctgatctggggggtgggtttgctttgctttggggttcttctatttactttgttttctcgaagacaaactttcctctatgtctggaaaagcgtaggcatccggaggctttggaggggagtctggcagcccggctggcccaggccctgcagcggcagcctttccacagggcgcagcggcggcctttcgaggccctttctggggggtctgagggagacctggttgggaattggggctccagtgctcaggctggcttgggctgcatgaggacagccctgtgggaccctcgggagaccccgtggctgtctccgccccatcgaggaggaggcccgtcagccatggctgccatctggcttctgccctgtgaccccgtgaccccgtgaccccggaagtggtctggggctgatcttgccttgaggaagacccaggccatgttcccaaaggccagcgggggccctggattgtgatgcagcctcgggacagggctgaggcctgcgggggaagacctataccccacgcctgggcctggcttcacctcaccctaatcccccgggagggagctgactgatgcaaaaagctgagggggcctgctgggagtggctgtttttatgccccagccccgcaagttggggagtgtttgtgggggtccagagccctcccccagccaggagagaacctcccggaggggttctctgtggggccctgtgtcccctgctcgggagtaaggctggtcctggggtcctccctgcacggaccccactgggcctgccgagtgctgtgttcttcctcagtctggctgtgggcaggagcggcctgcccagtgtcacccagggtgagtgcaaaataaagacggcgagtgtggctctgtccatcccttccctcctggagggtggaggctcctggctgttggacacgg

SEQ ID NO: 115983 - DNA, 1000 bp, Homo Sapiens
tgtttcccataattttcttcatgcaatgacatcttcaaagcttgaagatcgttagtatctaacatgtatcccaactcctataattccctatcttttagttttagttgcagaaacattttgtggtcattaagcattgggtgggtaaattcaaccactgtaaaatgaaattactacaaaatttgaaatttagcttgggtttttgttacctttatggtttctccaggtcctctacttaatgagatagcagcatacatttataatgtttgctattgacaagtcattttaatttatcacattatttgcatgttacctcctataaacttagtgcggacaagttttaatccagaattgaccttttgacttaaagcagagggactttgtatagaaggtttgggggctgtggggaaggagagtcccctgaaggtctgacacgtctgcctacccattcgtggtgatcaattaaatgtaggtatgaataagttcgaagctccgtgagtgaaccatcatataaacgtgtagtacagctgtttgtcatagggcagttggaaacggcctcctagggaaaagttcatagggtctcttcaggttcttagtgtcacttacctagatttacagcctcacttgaatgtgtcactactcacagtctctttaatcttcagttttatctttaatctcctcttttatcttggactgacatttagcgtagctaagtgaaaaggtcatagctgagattcctggttcgggtgttacgcacacgtacttaaatgaaagcatgtggcatgttcatcgtataacacaatatgaatacagggcatgcattttgcagcagtgagtctcttcagaaaacccttttctacagttagggttgagttacttcctatcaagccagtacgtgctaacaggctcaatattcctgaatgaaatatcagactagtgacaagctcctggtcttgagatgtcttctcgttaaggagtagggccttttggaggtaaaggtata

SEQ ID NO: 115984 - DNA, 1000 bp, Homo Sapiens
aatcccaaataaaatgcaccccaataaaaactggacccaagaaatttatcgtcaagttaagttccaaacaagtgaaagagattaatgctcagaagattgttctcatcaccaagtagccttgtctgatgctgtggagccttagttgagatttcagcatttcctaccttgtgcttagctttcagattatggatgattaaatttgatgacttatatgagggcagattcaagagccagcaggtcaaaaaggccaacacaaccataagcagccagacccacaaggccaggtcctgtgctatcacagggtcacctcttttacagttagaaacaccagccgaggccacagaatcccatccctttcctgagtcatggcctcaaaaatcagggccaccattgtctcaattcaaatccatagatttcgaagccacagagtctctccctggagcagcagactatgggcagcccagtgctgccacctgctgacgacccttgagaagctgccatatcttcaggccatgggttcaccagccctgaaggcacctgtcaactggagtgctctctcagcactgggatgggcctgatagaagtgcattctcctcctattgcctccattctcctctctctatccctgaaatccaggaagtccctctcctggtgctccaagcagtttgaagcccaatctgcaaggacatttctcaagggccatgtggttttgcagacaaccctgtcctcaggcctgaactcaccatagagacccatgtcagcaaacggtgaccagcaaatcctcttcccttattctaaagctgccccttgggagactccagggagaaggcattgcttcctccctggtgtgaactctttctttggtattccatccactatcctggcaactcaaggctgcttctgttaactgaagcctgctccttcttgttctgccctccagagatttgctcaaatgatcaataagctttaaattaaactctacttcaagaaaaaaaaaccg

SEQ ID NO: 115985 - DNA, 1000 bp, Homo Sapiens
attgtaaatacagattatttattaactctgttctgcctggaaatttaggcttcatacggaaagtgtttgagagcaagtagttgacatttatcagcaaatctcttgcaagaacagcacaaggaaaatcagtctaataagctgctctgccccttgtgctcagagtggatgttatgggattctttttttctctgttttatcttttcaagtggaattagttggttatccatttgcaaatgttttaaattgcaaagaaagccatgaggtcttcaatactgttttaccccatcccttgtgcatatttccagggagaaggaaagcatatacacttttttctttcatttttccaaaagagaaaaaaatgacaaaaggtgaaacttacatacaaatattacctcatttgttgtgtgactgagtaaagaatttttggatcaagcggaaagagtttaagtgtctaacaaacttaaagctactgtagtacctaaaaagtcagtgttgtacatagcataaaaactctgcagagaagtattcccaataaggaaatagcattgaaatgttaaatacaatttctgaaagttatgttttttttctatcatctggtataccattgctttatttttataaattattttctcattgccattggaatagatatctcagattgtgtagatatgctatttaaataatttatcaggaaatactgcctgtagagttagtatttctatttttatataatgtttgcacactgaattgaagaattgttggttttttcttttttttgttttgtttttttttttttttttttttgcttttgacctcccatttttactatttgccaatacctttttctaggaatgtgcttttttttgtacacatttttatccattttacattctaaagcagtgtaagttgtatattactgtttcttatgtacaaggaacaacaataaatcatatggaaatttatatttataaaaaaaaaaaaaaaaaaaaaaaaaaaaaaa

SEQ ID NO: 115986 - DNA, 1000 bp, Homo Sapiens
gcctgctgtgtgtggacaagatcgagaagagtcaggaggcgtacctgctggcgttcgagcactacgtcaaccaccgcaaacacaacattccgcacttctggcccaagctgctgatgaaggagagagaagtgcagagttcgattctgtacaagggggcagcggcagaaggccggccgggcgggtcactgggcgtccacccggaaggacagcagcttctcggaatgcatgttgttcagggtccgcaggtccggcagcttgagcagcagcttggtgaagcgggaagtctccaagggccggttcttcagcaccagagcccgaagagcccgcagcagcgtctcctggagctgctccaccgaagcggaattctccatgcccgagcggtctgtggggaagacgacagcagtgaggcggactccccgagctcctctgaggaggaaccggaggtctgcgaggacctggcaggcaatgcagcctctccctgaagccccccagaaggccgatggggaaggagaaggagtgccataccttctcccaggcctctgccccaagagcaggaggtgcctgaaagctgggagcgtgggctcagcagggctggtcacctcccatcccgtaagaccaccttcccttcctcagcaggccaaacatggccagactcccttgctttttgctgtgtagttccctctgcctgggatgcccttccccctttctctgcctggcaacatcttacttgtcctttgaggccccaactcaagtgtcacctccttccccagctcccccaggcagaaatagttgtctgtgcttccttggttcatgcttctactgtgacacttatctcactgttttataattagtcgggcatgagtctgtttcccaagctagactgtgtctgaatcatgtctgtatccccagtgcccggtgcagggcctggcatagagtaggtactccataaaaggtgtgttgaattgaaaaaaaaaaaaaaaaaaaaaaaaaaaaaaaaaaa

SEQ ID NO: 115987 - DNA, 1000 bp, Homo Sapiens
acatggcaactggaaaatccaaaggctatggttttgtatctttttataacaaactggatgcagaaaatgcgattgtgcatatgggcggtcagtggttgggtggtcgtcaaatccgaaccaattgggccactcgtaaaccacctgcacctaaaagtacacaagaaaacaacactaagcagttgagatttgaagatgtagtaaaccagtcaagtccaaaaaattgtactgtgtactgtggaggaattgcgtctgggttaacagatcagcttatgagacagacattctcaccatttggacaaattatggaaataagagttttcccagaaaagggctattcatttgtcagattttcaacccatgaaagtgcagcccatgccattgtttcggtgaacggtactacgattgaaggacatgtggttaaatgctattggggtaaagaatctcctgatatgactaaaaacttccaacaggttgactatagtcaatggggccaatggagccaagtgtatggaaacccacaacagtatggacagtatatggcaaatgggtggcaagtaccgccttatggagtatacgggcaaccatggaatcaacaaggatttggagtagatcaatcaccttctgctgcttggatgggtggatttggtgctcagcctccccaaggacaagctcctccccctgtaatacctcctcctaaccaagccggatatggtatggcaagttaccaaacacagtgagccgggactctaaaaaaaaattgtaattcatgataggcttcgatttcctgtgacactctgaagacatgaaagtagacatcggaaaatgaaaatatttattttaaaaattgaaatgtttggaacctttagcacagatttgctttggtgaaggacacgtgtcttctagttctgcctttttaagtttttgttcatgatggatatgaacatgatttttctttatgtacaaaaactaaaataaagtcaataaagacaattctgactac

SEQ ID NO: 115988 - DNA, 1000 bp, Homo Sapiens
tcatcacactttggtcttatttcattttcaatgatttcctagatcactttaacttttttgtgtcatggactcctcagaataatgggttttttttgtttgtttgtttgtttgagatggagtctcactctgtcacccaggctggagtgcagtggcgaaatctcagctcactgcaacctccgcctcctgaggttcaagtgatcctcctgcctcagcctcccaagtagctgggattacaggcacatgccaccacacccagctaatttttgtattttttagtagagacagggtttcaccgtgttggcgagactgatcttgaactcctgacatcaggtgatccacctgcctcggcctcccaaagtgctgggattacaggcatgagccaccatgcctggccagaataatgtttttaaatgcagaaaaggaaatgcatggggttacaagggaaacgaattacactgaagtgtaagctaccaaataatttatgatgtggtagttataggtgtgcatttaatagccagatctacgagtggatgtaataactgctatgatgttgaagtagcataaaacatatattagatatctgcaacaactgtgatgtaacatgaaaatacctgatttctgttgacaaagttactgctagtacaactgtggattgttgtctgcactcgtcattgaaggaaatactaaattttagttttaggctagtgaaattaaagttaatttttcccatccaagttcatgtatcttctgaattctatccgtgaatcccttagaggtctgtgaattgtaggttaagaacccctgccctagctaatcagatccaccaatgtttcaaataggactataacttattcaaaggccaatgatacttcgcataattcaattttaatattattcacatttcatgtcacaaatttagtaagttacatgtgttatgtgatgttttgttttgatagattatatcttactcctaaataaaaagtcaagatttttgtagcaa

SEQ ID NO: 115989 - DNA, 1000 bp, Homo Sapiens
aaatcctacaaaggaccttaccaaccctggaatggtccccagccatggattcagtcccagatcttatttctttgacaaccctcgaagatatgacagtgatgatgaccttgcctggaacattgcccctcagggacttcagggaggttttgctccagattactatgattggggacaacaaactaacagcttcctggcacaagcaggaactttgcaagactcaactttggatcctgacaaaccaagccttgggtagcatcagttaacagttttatggacgattcctcagatgaaaagcttcagaaaagcatagtgacagctgaatttttagggcacttttccttaagaaatagaacttgatttttatttgttacaggtttccaatggccccataggaataagcaataatgtagactgataaacccttattttagtactaaagagggagccttgctatttcagtgggtataatttaaactttttaaagaaaatctgtacttttataaagatgtattttgtataacttaaataataatgctaaagtatactagggtttttttttcttgagaatgttactgcaatcatgttgtagtttgcacagacttttatgcataattcactttaaaaatatagaatatatggtctaatagttttttaaagcttttggactaaagtattccacaaatcttacctctttaggtcactgatggtcactccgattctgagtgccacattggtagactcctaaaatacagttgacaacttagccaattgcaactccagtgttgataattaaaatgaaatggtaaagcagcagactgtaaggtctttagagatttttttttaaggttcaggccgtaggttcctcaaggaatctcttaagttttgcccaaagactggtacttcctttcagtagggcgctaatgtatacacattaatgataagttgataacattaaaaatgtagctgacttatcctattaaacctcctctgctatgttcac

SEQ ID NO: 115990 - DNA, 1000 bp, Homo Sapiens
cccaaaagatcttttgcaaactatgttacatgaatgcttctgcctctttaagacaaagaagaatgtcacccaaaattgtcatttttttcttaatgttcatcataaaagtcctaaaagagtaactgtaattggatgtttattgtttttatctaaagtaaggtgtatgtgtttgagacaagctggttttgttgataaagagatgttaaataattgtgaagccagatatgcaatgtgtatctgaaaagcaaggaatttgcagccgttttacaaatatctgtggaacatgtaaatactgtcaaatggaaaataaaataagttataatttttgtgaatttcatgggatgtcctatgattggaaaaattataactcttctgattctaatgtggaaattgttgtatttaatctgaaaatgactttacctacaacagttccattgtcagcacagcctaggagggtcagatcctgtattaattactcttagtggagatgccagatatcccatacagaattagcagagaaaatacacacaggcttctattcaaattttctttagtgcttaaaattaagttttaaaatgaaatcagacactgcaggtttgtatataaaatgaaaagctatactactttttataaaagggcaaactgggctgatgtaaatgttttactttcaactgtgttctttaaaataaatcctacctggtttttaaattttatttttcatgaaaatgctcctttctctacatttattcatcctatatacatcaggctgtaagaccccccccagtcatcattaatacaatgtgttgggattctgtgactggaaaaggtgacaagttggtgactttgacactgcaggtattccattttcatggtttactatgaaaagtcatttttcatattatgtaatatattgttagattaaaaccattgtattaagactttaaaatgtaagcattgtaattctgaaaatacacattttaagaagaaaaaaaaaaaaaaa

SEQ ID NO: 115991 - DNA, 1000 bp, Homo Sapiens
gcaactaaacttgtggaagaaaaaccaacaaaagaaaactggaaaaattgtattcaactgatgaagttacttggatggacccattgtgcatcttttactgaaaactggctccccatcatgtatcctcccgattattgcgtattctaaaataggaaacaagactttaaattttaaaaaaggaagttttatagtgaatgggtataaaaacaaatttgtggcatttttagtctaatgcatgttttcatccactatccagtactgattattaaaatgacatgtatttatcagagaattcactgacgtgtggcttaatacatgtaaatctagacctctgacatcatggtgttttcttaatgcctcacattgctggcacggggatgtgccctgcctgccagcacctaggacttcgagttgggttgcagcttatgacatgcatgataggttttggaaggtaacttttaactgcaaacctataaagtactattttttattttataaatgaacagggttttaacgtgctcaactttaatttttttcaattgtatgaaggccttaaaaaagctacattaagcgtagctaaaattatttattggactaaaaactaacagaacttcatttccagaattttttttttttttttttttttggcaaatgtttacattcaattaaggggaaaaagtagaaccagcacaaatgagtggcagttgctggagcataactgcttcaataaatcttcatcttggggtaattacaggcaagtcattttcacatcctcttgaggttcagagcatcagaatgaactctatgaatacatgtgtaagtgccagacagctgaatctttatcaggtattgtaaagatacacatatgatatgtttattaaaattgaaataatgtaaaacacatgaataaatttgcaaaaccaagatcacagtacaccatatgcactctggtaccttaatttttttttataaataataaaagtgaatattgaagcttctt

SEQ ID NO: 115992 - DNA, 1000 bp, Homo Sapiens
tgaaaaagggctatgaagttatttacctcacagaacctgtggatgaatactgtattcaggcccttcccgaatttgatgggaagaggttccagaatgttgccaaggaaggagtgaagttcgatgaaagtgagaaaactaaggagagtcgtgaagcagttgagaaagaatttgagcctctgctgaattggatgaaagataaagcccttaaggacaagattgaaaaggctgtggtgtctcagcgcctgacagaatctccgtgtgctttggtggccagccagtacggatggtctggcaacatggagagaatcatgaaagcacaagcgtaccaaacgggcaaggacatctctacaaattactatgcgagtcagaagaaaacatttgaaattaatcccagacacccgctgatcagagacatgcttcgacgaattaaggaagatgaagatgataaaacagttttggatcttgctgtggttttgtttgaaacagcaacgcttcggtcagggtatcttttaccagacactaaagcatatggagatagaatagaaagaatgcttcgcctcagtttgaacattgaccctgatgcaaaggtggaagaagagcccgaagaagaacctgaagagacagcagaagacacaacagaagacacagagcaagacgaagatgaagaaatggatgtgggaacagatgaagaagaagaaacagcaaaggaatctacagctgaaaaagatgaattgtaaattatactctcaccatttggatcctgtgtggagagggaatgtgaaatttacatcatttctttttgggagagacttgttttggatgccccctaatccccttctcccctgcactgtaaaatgtgggattatgggtcacaggaaaaagtgggttttttagttgaattttttttaacattcctcatgaatgtaaatttgtactatttaactgactattcttgatgtaaaatcttgtcatgtgtataaaaataaaaaagatcccaaat

SEQ ID NO: 115993 - DNA, 1000 bp, Homo Sapiens
agaaattgaggatgacagtgatgtagaatggaagtttgctcgttcaaaactttggttatcctattttgatgatggaaaaacattacctccacctttcagtctagttcctagtccaaaatcatttgtttatttcatcatgcgaattgttaactttcccaaatgcagaaggagaaggcttcagaaggatatagaaatgggaatgggtaactcaaagtccaggttaaacctcttcactcagtctaactcaagagtttttgaatcacacagttttaacagcattctcaatcagccaacacgttatcagcagataatgaaaagacttataaagcggtatgttttgaaagcacaagtagacaaagaaaatgatgaagttaatgaaggtgaattaaaagaaatcaagcaagatatctccagccttcgttatgaacttttggaagacaagagccaagcaactgaggaattagccattctaattcataaacttagtgagaaactgaatcccagcatgctgagatgtgaatgatgcagcaacctggatttggctttgactatagcacaaatgtgggcaataatatttctaagtatgaaatacttgaaaaactatgatgtaaatttttagtattaactacctttatcatgtgaacctttaaaagttagctcttaatggttttattgttttatcacatgaaaatgcattttatttgtctgctttgacattacagtggcataccattgtgttgaaaagcccaatattactatattattgaaacttttattcattttagagtaaactccacatctttgcactacctgtttgcctccaagagactatcagttccttggggacagggaccatgtcttattcatctttgtgtctccagcatctagtacagtgcctggtatatagtaggtgctcaataaatgttgaaaccaactgaactgccaacaaaataaaaataaaaagtcttcactatgtagcataaaaaaaaaaaaaaaaaaa

SEQ ID NO: 115994 - DNA, 1000 bp, Homo Sapiens
gaagttcacctcaggacggtggagcccacatcataactgcacccaggtggccacagcgaacgacaccaccctccgtggctgggacacccggagcatgagccagatctactgcatagagaatgcccacggacagctggtgcgggaccttgactttaatcccaataagcagtactacttggccagctgcggagacgactgtaaggtgaagttctgggacacccgaaatgtcaccgaacccgtgaagaccctggaggagcactcccactgggtgtggaacgtccgctacaaccactctcatgaccagctggtcctcacgggcagcagtgacagcagagtcatcctttccaacatggtgtccatctcgtcggagcccttcggccacttggtagacgacgatgacatcagtgaccaggaggaccaccgttctgaagagaagagcaaggagcccctgcaggacaacgtgatcgccacctacgaggagcacgaggacagcgtctatgccgtggactggtcctcggctgacccgtggctgtttgcctccctgagctatgacgggaggctcgtgatcaacagggtgcccagggccctgaagtaccacatcctgctatgactcccgggcctgggttatccaggtcccattgagtggttttcctcttggcagattctcaaacagtcgcagctctttggaggtgactcgtgttccaggtggatccctctctgggagagccgctgttcccttcctgtagcagcagcatttatgaatggggtgaatggggctattgtcgacggcacagctaatgcccgaacccagcccctgtcggcagagacagagccccacattattatgtgaataacaatgttttctgttttaagggtgtcaggagtttcgctttttaaaaaaatgtctgttcctgcagtagtaactcttctttctcttgagagtaaaaaatgaaataaaataaatccacgctgacaaaaaaaaaaaaaaaaaaaaaaaaaa

SEQ ID NO: 115995 - DNA, 1000 bp, Homo Sapiens
aaacgtgcacatgaacgacaacgtcctgcactcggcctttgaggtgggggcccgcaaggtggtgtcctgcctgtccacctgtatcttccctgacaagacgacctacccgatagatgagaccatgatccacaatgggcctccccacaacagcaattttgggtactcgtatgccaagaggatgatcgacgtgcagaacagggcctacttccagcagtacggctgcaccttcaccgctgtcatccccaccaacgttttcgggccccacgacaacttcaacatcgaggatggccacgtgctgcctggcctcatccacaaggtgcacctggccaagagcagcggctcggccctgacggtgtggggtacagggaatccgcggaggcagttcatatactcgctggacctggcccagctctttatctgggtcctgcgggagtacaatgaagtggagcccatcatcctctccgtgggcgaggaagatgaggtctccatcaaggaggcagccgaggcggtggtggaggccatggacttccatggggaagtcacctttgatacaaccaagtcggatgggcagtttaagaagacagccagtaacagcaagctgaggacctacctgcccgacttccggttcacacccttcaagcaggcggtgaaggagacctgtgcttggttcactgacaactacgagcaggcccggaagtgaagctggaagacaggatcaggtgccagcggaccatcggctggcagagcccagcggccaccacccgtcaaccctgccaggagctgagggcaccacccagcaacctgggcctgcattccatccgctctgcagccccaagcatctttccagtggggcccccattcacgttggtcctcagggaaaccagggtccggggcaggcccggcgctttgctccccacaccagccccctgcgcgtgtccactctgatcctgcatcccactccctgggagccaataaagtgcattttcacagaaaaaaaaaa

SEQ ID NO: 115996 - DNA, 1000 bp, Homo Sapiens
aagcactcaaagcaaagaaagaagatgggaataaagcatttaaggaaggaaattacaaactagcatatgaactgtacacagaagccctggggatagaccccaacaatataaaaacaaatgctaaactctactgtaatcggggtacggttaattccaagcttaggaaactagatgatgcaatagaagactgcacaaatgcagtgaagcttgatgacacttacataaaagcctacttgagaagagctcagtgttacatggacacagaacagtatgaagaagcagtacgagactatgaaaaagtataccagacagagaaaacaaaagaacacaaacagctcctaaaaaatgcgcagctggaactgaagaagagtaagaggaaagattactacaagattctaggagtggacaagaatgcctctgaggacgagatcaagaaagcttatcggaaacgggccttgatgcaccatccagatcggcatagtggagccagtgctgaggttcagaaggaggaggagaagaagttcaaggaagttggagaggcctttactatcctctctgatcccaagaaaaagactcgctatgacagtggacaggacctagatgaggagggcatgaatatgggtgattttgatccaaacaatatcttcaaggcattctttggcggtcctggcggcttcagctttgaagcatctggtccagggaatttcttttttcaatttggctaatgaagggcaaccacccagaacccagaaaatgcagattcactcagtttaatcttgaatgtggaaacagttcacctcctcccttcatcacgtctccgtgtgcttagagcagtttcgttttctcagttggatgccctgtgtctctgtgagtggggtggagcaaagggaaccaatgccgaagaccgagggcaggggagggaggcgggggtggacagggaggcagcttgtgaatttttgttttactgtttaactttattaaaaaagaaaaaaaaaaaaaa

SEQ ID NO: 115997 - DNA, 1000 bp, Homo Sapiens
gcggcgctgcagggccaggtatccagcctgtcccacctgaactcctcgggctcggactacggcaccatgtcctgctccaccttgctatacggtcggacctggtgagaggacgccgggccggccctagcccagcgctctgcctcaccgcttccctcctgcccgccacacagaccaccatccaccgctgctccacgcgcttcgacttttcttaacaacctggccgcgtttagaccaaggaacaaaaaaaccacaaaggccaaactgctggacgtctttctttttttccccccctaaaatttgtgggtttttttttttaaaaaaagaaaatgaaaaacaaccaagcgcatccaatctcaaggaatctttaagcagagaagggcataaaacagctttggggtgtctttttttggtgattcaaatgggttttccacgctagggcggggcacagattggagagggctctgtgctgacatggctctggactctaaagaccaaacttcactctgggcacactctgccagcaaagaggactcgcttgtaaataccaggatttttttttttttttgaagggaggacgggagctggggagaggaaagagtcttcaacataacccacttgtcactgacacaaaggaagtgccccctccccggcaccctctggccgcctaggctcagcggcgaccgccctccgcgaaaatagtttgtttaatgtgaacttgtagctgtaaaacgctgtcaaaagttggactaaatgcctagtttttagtaatctgtacattttgttgtaaaaagaaaaaccactcccagtccccagcccttcacattttttatgggcattgacaaatctgtgtatattatttggcagtttggtatttgcggcgtcagtctttttctgttgtaacttatgtagatatttggcttaaatatagttcctaagaagcttctaataaattatacaaattaaaaagattctttttctgattaaaaaaaaaaaaaaaaaa

SEQ ID NO: 115998 - DNA, 1000 bp, Homo Sapiens
gtcaggactgacagtaatgtgataattgccttcattttcaacccaggagtgcctctcacagctatatgactacggatccattagtgaggagcgacacacacacctgtaggcatcctgtgcaaacactttgtcattatcaagagagatggcagtattgaccatttagtttagttaaaaaaaaaaaaaaaaaggtggcaggagaggctttggggaggatcagccagcagacatgagcactgctggcccgtgtggcagagctgtggactttcttctcggctccctcaaccctggctcaggcacagaaggtgttttgctacgtttttttgattattacacccctccacgtattatgtgactcttacaccagttcacccttcccagaatgtatccaaaccttgagaatgcaggagctctgtgagctccaccgtcagcaccattcagctgcatcccttgtgcacagaactgtttgccagcgttgggtgggacacccgtggcggctgctccctcagacctcccttctgtggactgacctctcacctccgcctgttgttcctgcaccacatcagataagcatgtgaaggagggccaactggcagctgcgggacccttggcttgtcccccaccgacaagtcccacctgctgggtgaggacgagactgtttccatctcaggcatgtatcccaccaagtgcctccctcacagccatgcccagaagcctcacacctcgtcaccaccaccaccccccaccccatcctgaggcactgcctggcagataaccctggttggccacagaagctattaatacacgacagcatgtggggaaggacttatggtgggccaggtggacctcatcctgcttcttcctccctctggtttaaagagatatataaactaatttcacataatttgtgtgtgcaggtgattggtttttacataagtcctatttataccttttatatgttacagaaataaaagttaatttatataaaaaaaaaaaaaaa

SEQ ID NO: 115999 - DNA, 1000 bp, Homo Sapiens
tacaagggctgctgcgaggaccaaggcgagaagtcgctgcagctggtcatggagtacgtgcccctgggcagcctccgagactacctgccccggcacagcatcgggctggcccagctgctgctcttcgcccagcagatctgcgagggcatggcctatctgcactcgcagcactacatccaccgagacctagccgcgcgcaacgtgctgctggacaacgacaggctggtcaagatcggggactttggcctagccaaggccgtgcccgaaggccacgagtactaccgcgtgcgcgaggatggggacagccccgtgttctggtatgccccagagtgcctgaaggagtataagttctactatgcgtcagatgtctggtccttcggggtgaccctgtatgagctgctgacgcactgtgactccagccagagcccccccacgaaattccttgagctcataggcattgctcagggtcagatgacagttctgagactcactgagttgctggaacgaggggagaggctgccacggcccgacaaatgtccctgtgaggtctatcatctcatgaagaactgctgggagacagaggcgtcctttcgcccaaccttcgagaacctcatacccattctgaagacagtccatgagaagtaccaaggccaggccccttcagtgttcagcgtgtgctgaggcacaatggcagccctgcctgggaggactggaccaggcagtggctgcagagggagcctcctgctccctgctccaggatgaaaccaagagggggatgtcagcctcacccacaccgtgtgccttactcctgtctagagaccccacctctgtgaacttatttttctttcttggccgtgagcctaaccatgatcttgagggacccaacatttgtaggggcactaatccagcccttaaatcccccagcttccaaacttgaggcccaccatctccaccatctggtaataaactcatgttttctctgaaaaaaaaaaaaaaaaaa

SEQ ID NO: 116000 - DNA, 515 bp, Homo Sapiens
ttctttttcttcagcgaggcggccgagctgacgcaaacatgcagatctttgtgaagaccctcactggcaaaaccatcacccttgaggtcgagcccagtgacaccattgagaatgtcaaagccaaaattcaagacaaggagggtatcccacctgaccagcagcgtctgatatttgccggcaaacagctggaggatggccgcactctctcagactacaacatccagaaagagtccaccctgcacctggtgttgcgcctgcgaggtggcattattgagccttctctccgccagcttgcccagaaatacaactgcgacaagatgatctgccgcaagtgctatgctcgccttcaccctcgtgctgtcaactgccgcaagaagaagtgtggtcacaccaacaacctgcgtcccaagaagaaggtcaaataaggtggttctttccttgaagggcagcctcctgcccaggccccgtggccctggagcctcaataaagtgtccctttcattgactggagcagca

SEQ ID NO: 116001 - DNA, 1000 bp, Homo Sapiens
ccaagacacacacctcctctacgtactggcagctgccaacctgtatgcccagatgcatgggctgcctggctcacaggactggactgcactcagggagctgctgaagctgctgccacagcctgacccccaacagatggcccccatctttgctagtaatctagagctggcttcggcttctgctgagtttggccctgagcagcagaaggaactgaacaaagccctggaagtctggagtgtgggccctcccctgaagcctctgatgtttgagaaggatgatgacagcaacttccatgtggactttgtggtagcggcagctagcctgagatgtcagaactacgggattccaccggtcaaccgtgcccagagcaagcgaattgtgggccagattatcccagccattgccaccactacagcagctgtggcaggcctgttgggcctggagctgtataaggtggtgagtgggccacggcctcgtagtgcctttcgccacagctacctacatctggctgaaaactacctcatccgctatatgccttttgccccagccatccagacgttccatcacctgaagtggacctcttgggaccgtctgaaggtaccagctgggcagcctgagaggaccctggagtcgctgctggctcatcttcaggagcagcacgggttgagggtgaggatcctgctgcacggctcagccctgctctatgcggccggatggtcacctgaaaagcaggcccagcacctgcccctcagggtgacagaactggttcagcagctgacaggccaggcacctgctcctgggcagcgggtgttggtgctagagctgagctgtgagggtgacgacgaggacactgccttcccacctctgcactatgagctgtgacaaggcagccaccctgtcacctagctcaatggagccccggatcccaagccctgcattgtaagcccacagtaggcactcaataaatgcttgttaaaggaaggcaaaaaaaaaaaaaaaaaa

SEQ ID NO: 116002 - DNA, 1000 bp, Homo Sapiens
tacaccagaatatcccttcaagcctccaaaggttacatttcggacaagaatctatcattgtaatattaacagtcaaggtgttatttgcttggacatattgaaagataattggagtccagcactaaccatttctaaagtcctcctttctatctgctcacttcttacagactgtaatcctgccgaccccttggtgggaagtattgccactcagtatatgaccaacagagcagaacatgacagaatggccagacagtggaccaagagatacgctacataaattggggtttcacaattcttacattatttgtctgtcacagaagagagctgcttatgattttgaaggggtcagggagggtgggagttggtaaagagtagggtatttctataacagatattattcagtcttatttcctaagattttgttgtaacttaaggtatcttgctacagtagacagaattggtaatagcaacttttaaaattgtcattagttctgcaatattagctgaaatgtagtacagaaaagaatgtacatttagacatttgggttcagttgcttgtagtctgtaaatttaaaacagcttaatttggtacaggttacacatatggccatttatgtaaagtccctctaagactacatactttttgtttaaaacaaaattggaatttgttttcccttcttggaagggaacattgatatttaacagagtttttagagattgtcatctcatatatataaaatggacacgtggctataaaacaccatataagagatgagtagtgcgttttattttatatgccaatctactttgtttaaaaaaggtctgaatcaggacttgtgaaaacctgtagtgaaataccttaagctgttaactaactgtaaggcgtggaataggagttgctcagtggattggttctatgttgtggactacttaagtctgcatttgttactgtgctaataaacaatattaaaaaccacctaataaacaaaaaaaaaaaaaa

SEQ ID NO: 116003 - DNA, 1000 bp, Homo Sapiens
ctcagggacaactatttttgaactttaagtgccactttaatgcagttagtttgataaaaccatgtgggttttttttttagggctagctctacgggagtggaagtgagagccaggcatgagtgcgtctccacatgcttttccacctgccctgagtgtgttacatactgaaacaggcctacatagatgttacaacttcccttcctctgtcggagatgtcatctgtgcctttctcagtgttcatctgataatgtaaatttaaatgcctctacatttgatacgaaacccacattcaggtgacactgaacgaggtggcttttgtcccaccagtgcctcatcagtgtgaggcgattcctctctgctttaggaaaatgatttttccccctaaacttgtgccaaccatcaacaacatctccatagatcttatggattgtagaactgttggctgtttcctaaatttattccaagttctcgtagaggcatatagatttcagtctgtgcttgtatgggatagatgatctgagtggctttctggcctcttttttgagtttaaaatccatatgaggttgacgtgtcatactaaggtaacatgtttgtgaggttattccactagtactgtgatcacgtgggtgtcagtatctttaacggccttcattcttggttgtgagattttatttgatatgcccactcaccctcgacgaatctgcccgctttgggctgtggtgcctgtgtatctttgcccgtctggtctccagttggtggaattaccttttttgtactgccacttctcagcatctttgaaatttgacataatgttgcttcatttcagtttttttagttctgtaatttgttgattgtatttaactatgtgagttctgttgtgatgtttactgtattgtaaagcacctcattcatgtgatgagtgctctataaatcaataaatgatgacttagaggctgtatcacgagctattttggttttaggatgcaggtctcaaaagcaa

SEQ ID NO: 116004 - DNA, 1000 bp, Homo Sapiens
ggaagccgacgatccaaatgccgtgtgtcaccaaccccgcttctgccactggcggcttcccttcttggctcttgggggggactagatcctgtggagaagatgacttaaactttgctttttgttttaattttaattctataacttgagatctttccggggcctacaggcgtgtaagacagcttggtctggtctgtgcagaagtggggagtgatgggcaggttcggcagcctaacattgttcaggcgcatggcccctgcggtgtgtacacgaactcggcttcttttgtcctaggtacgccaagggcaggtttctggagactcccttgtgcccgggatggcaagggcaccgggctggcgtttccacatctgtcttcattagcagaaaagtgatgatggattttatttcactcacactccagtttgtaataaaatgccaaattctgtcagctatccaaacaagccaccatttgttcttgttgcttctctggatccagaaatgttgccattcttggaaactgtcccattgcttcgtatttctgccaacgtagctctgcctgcctgtcaacccctcactgcactctgctcatcacgggaggatacctgtgtgccggcagcccctcagggactctcagccctggcactggcaccccagggttggccccgtcagcagaggcttggctttcgagccagtgggtgtctctcctttgggcctgggcggcttgctcctgccagccatgccttcagggtaggctctgagcaagctggcgaacagccctggctgctccaaaaccaaaaagctgggtcctctggaggaggggcgagctgtggagcagccacccactgctgccccaagctcactcaggaattcacacccgcctggtttcttgaagtgtgctgggtccttccctctgctccctactccccaccacggcagagaataggctttctaagatgctgcgatcccgttctgctgcccgtaataaaaatgctctcagacactg

SEQ ID NO: 116005 - DNA, 1000 bp, Homo Sapiens
ttttaaaattgaaactgatggaacattctttcttggtcttcaccatctgacaaattgaatggcaagaggtggattttgccagtttcttttcactgatgcagatttgtgttaagatagtactgaatggagtatttataaactggccctgagcatgcataaagcatcagtatctgacctttttttaaccttctaggaatttgaaataaatgtgtttgtgttgtctgattagatgatcattggtgtcttgccacaatgtttaaaaattactgtacaggaaagtcacagcaaagatagcagttgtgactgacatgtaggactttcacagttgtgccacatttttgcctaaaatttgggttatgacatttttcttggttcttatctgaaaatttcatctgtaacctttcatgtgtgttaagaaacactgatctgatcatttgggatttgctgaggcatttgtgagtcttccttataaacctgatgagcagatctcaactatctagcttgtgtgtcatcagaaaggtttatccctttgagagtatcaagtcctcagttaatgattcttgctttcatccctccagtatttgctgtgggagctcgttttattctttaatttggaattcagtaatttttcttctttattgacgaattcctcccctcacaaaactgttctttcccacctctctccatatctaattcctgattcttgttatttttaagtcataaatgtagccagtcataaatacataaatgttaaccttcgggttgcaaccttgtctcttgcagtttaaggtaatggatattgtagcccatttgaattttcttcactcttattctcgtaattctggagtttcttcagattgtggtgtattttattgtgctcctatgtaagatgaagaattaactattaaaattacattttcaacatacaaaagcttttgatgactggtaactggtatccttccaaataaatgcattgcttggtaaaaaaaaaaaaaaaaaa

SEQ ID NO: 116006 - DNA, 1000 bp, Homo Sapiens
ttcaaaacggaattgaaaactggcaccccatctctttgaaacatctggtaatttgaattctagtgctcattattcattattgtttgttttcattgtgctgatttttggtgatcaagcctcagtccccttcatattaccctctcctttttaaaaattacgtgtgcacagagaggtcacctttttcaggacattgcattttcaggcttgtggtgataaataagatcgaccaatgcaagtgttcataatgactttccaattggccctgatgttctagcatgtgattacttcactcctggactgtgactttcagtgggagatggaagtttttcagagaactgaactgtggaaaaatgacctttccttaacttgaagctacttttaaaatttgagggtctggaccaaaagaagaggaatatcaggttgaagtcaagatgacagataaggtgagagtaatgactaactccaaagatggcttcactgaagaaaaggcattttaagattttttaaaaatcttgtcagaagatcccagaaaagttctaattttcattagcaattaataaagctatacatgcagaaatgaatacaacagaacactgctctttttgattttatttgtactttttggcctgggatatgggttttaaatggacattgtctgtaccagcttcattaaaataaacaatatttgtaaaaatcatactaatgcttattttattttaattgtatagaaagaaaaaaatgcctaaaataaggttttcttgcataaatactggaaattgcacatggtacaaattttttcttcattactgtacagtgatgatgttaatgactttgaagcactgaaagttactgaagtgccttctgaatcaaggatttaattaaggccacaatacctttttaatactcagtgttctgtttttttaaaaacttgatattcctgtatggtgcatatatgatacagttacctaatcatgttgaataaatgggcatgccaaaaatt

SEQ ID NO: 116007 - DNA, 1000 bp, Homo Sapiens
taaaaaagttggcattaatcctaaaattaataatttaatgccaggatatgaagttgcaaagtatgatcttatatggatttgtgatagtggaataagagtaattccagatacgcttactgacatggtgaatcaaatgacagaaaaagtaggcttggttcacgggctgccttacgtagcagacagacagggctttgctgccaccttagagcaggtatattttggaacttcacatccaagatactatatctctgccaatgtaactggtttcaaatgtgtgacaggaatgtcttgtttaatgagaaaagatgtgttggatcaagcaggaggacttatagcttttgctcagtacattgccgaagattactttatggccaaagcgatagctgaccgaggttggaggtttgcaatgtccactcaagttgcaatgcaaaactctggctcatattcaatttctcagtttcaatccagaatgatcaggtggaccaaactacgaattaacatgcttcctgctacaataatttgtgagccaatttcagaatgctttgttgccagtttaattattggatgggcagcccaccatgtgttcagatgggatattatggtatttttcatgtgtcattgcctggcatggtttatatttgactacattcaactcaggggtgtccagggtggcacactgtgtttttcaaaacttgattatgcagtcgcctggttcatccgcgaatccatgacaatatacatttttttgtctgcattatgggacccaactataagctggagaactggtcgctacagattacgctgtgggggtacagcagaggaaatcctagatgtataactacagctttgtgactgtatataaaggaaaaaagagaagtattataaattatgtttatataaatgcttttaaaaatctaccttctgtagttttatcacatgtatgttttggtatctgttctttaatttatttttgcatggcacttgcatctgtgaaaaaaaa

SEQ ID NO: 116008 - DNA, 1000 bp, Homo Sapiens
ctggggagattgcctcaaaaagtgatttggaggttttctggacccaaaccaaagaatctaggaaacaacactaaactcatagaatggttaccacaaaatgacctgcttgggcattcaaagattaaagccttcctgagccatggtggtttgaacagtatttttgaaactatgtatcatggtgtgcctgtagtgggaattccactctttggagaccattatgatactatgaccagagtacaggcaaaaggcatggggatattgctagaatggaagacagttactgaaaaagagctctatgaagcactagtgaaggttatcaataatcccagctaccgtcagagggctcagaagctttcggaaattcacaaggatcaacctggtcaccctgtcaatcgaactatctattggatagattatattattcgtcacaatggagcccatcacctacgtgccgctgtccatcagatctccttttgtcagtattttttactggatattgcctttgtgcttttgcttggtgctgccttgttatactttctcttgtcttgggtgacaaaatttatctacagaaaaatcaaaagtctgtggtctagaaataagcatagcacagttaatggacattaccacaatggaatcctcaatggcaagtacaaaagaaatggccatattaaacatgaaaagaaagtgaaatgagccaacagcccaggtgatagaaataaattggttcactcattgaatttttattgctattatttagtctaacagctactaaaagtaaaacatcagtaaacaattctaacatgcccttatgagactactaatgaaattctgtggaattaagatggctgtaaaaagcacaaacctaaaatgcagaaatgtattttattcaaatactgatgtagagagttttggcactgaaccttttagaagccttaattatttaaatcaattcagtgactgtgtcagaccttagttttaaatcttgatatgtgcgtgtccc

SEQ ID NO: 116009 - DNA, 1000 bp, Homo Sapiens
aggaacacagaggacgatcgccccccggacacacccttactctccaaaaattgatggaaccagaacaccccgagatgagaggagaagagcccagcacaacgaagtggagcggaggcggagggacaagatcaacaactggatcgtccagctttcgaaaatcattccagactgtaacgcagacaacagcaagacgggagcgagtaaaggagggatcctgtccaaggcctgcgattacatccgggagttgcgccagaccaaccagcgcatgcaggagaccttcaaagaggccgagcggctgcagatggacaacgagctcctgaggcagcagatcgaggagctgaagaatgagaacgccctgcttcgagcccagctgcagcagcacaacctggagatggtgggcgagggcacccggcagtgacgcccgccaccaccacgcagccgccgccgcccacgccggcctctgctgcccccttccccagcccttagcacagagagggacacatgcccctcccccagctgcgtttttttatagtagatttttaacaaaaaacggggagaaataatgcatttctgtggatacagtgcccaccgccctcctccacttggaaacggtatcctccctgcccatccgtctgtctgtcgcccttctcccggccctcactaagccccggcacttctagtggtctcacctggaggcaagagggaggggacagaggccctgccacgtcccgctgcctcctgctctctggaggtactgagacagggtgctgatgggaaggaggggagcctttggggggccacccggggcctggacctatgcagggaggccacgtcccaccccacctcttgtttctgggtccctgctcccctttgggggtgtgtgtgtgtgttttaattttctttatggaaaaattgacaaaaaaaaaatagagagagaggtatttaactgcaataaactggccccatgtggcccccgcaaaaaaaaaaaaaaaaaaaaaaa

SEQ ID NO: 116010 - DNA, 1000 bp, Homo Sapiens
agtggtaaaatcaagtcttcttacaagagggagtgtataaaccttggttgtgatgttgactttgattttgctggacctgcaatccatggttcagctgtctttggttatgagggctggcttgctggctaccagatgacctttgacagtgccaaatcaaagctgacaaggaataactttgcagtgggctacaggactggggacttccagctacacactaatgtcaacgatgggacagaatttggaggatcaatttatcagaaagtttgtgaagatcttgacacttcagtaaaccttgcttggacatcaggtaccaactgcactcgttttggcattgcagctaaatatcagttggatcccactgcttccatttctgcaaaagtcaacaactctagcttaattggagtaggctatactcagactctgaggcctggtgtgaagcttacactctctgctctggtagatgggaagagcattaatgctggaggccacaaggttgggctcgccctggagttggaggcttaatccagctgaaagaaacctttgggaatggatatcagaagatttggccttaatatatttccattgtgaccagcagcaggcttttttcccccaagaagatgatcaaaacaaaggatgatctcaacaagagctgtattttaagtatttagacagttctttgttagctggtttctagttggttatctagttaccaatgctgcagtcctgcagtcacctatacattatttaaatgtatttaactgttaaatgcgctacccaccaataatgaaatagacctttatgaaaactgtgcaattgtgtgcatgtttgtttttatgttcctttagaaaacattgactgttaccattgaatgagatggatcagtggatattaagatgaggttacaaattttgttaagttcagccattattacttttggtatcccagaacatgacaaattatgaataaaacaagtatacataaaaaaaaaaaaaaaaaaaaa

SEQ ID NO: 116011 - DNA, 1000 bp, Homo Sapiens
gctacctgccagccccgggaggtggtggtgcccttgactgtggagctcatgggcaccgtggccaaacagctggtgcccagctgcgtgactgtgcagcgctgtggtggctgctgccctgacgatggcctggagtgtgtgcccactgggcagcaccaagtccggatgcagatcctcatgatccggtacccgagcagtcagctgggggagatgtccctggaagaacacagccagtgtgaatgcagacctaaaaaaaaggacagtgctgtgaagccagacagggctgccactccccaccaccgtccccagccccgttctgttccgggctgggactctgcccccggagcaccctccccagctgacatcacccatcccactccagccccaggcccctctgcccacgctgcacccagcaccaccagcgccctgacccccggacctgccgctgccgctgccgacgccgcagcttcctccgttgccaagggcggggcttagagctcaacccagacacctgcaggtgccggaagctgcgaaggtgacacatggcttttcagactcagcagggtgacttgcctcagaggctatatcccagtgggggaacaaagaggagcctggtaaaaaacagccaagcccccaagacctcagcccaggcagaagctgctctaggacctgggcctctcagagggctcttctgccatcccttgtctccctgaggccatcatcaaacaggacagagttggaagaggagactgggaggcagcaagaggggtcacataccagctcaggggagaatggagtactgtctcagtttctaaccactctgtgcaagtaagcatcttacaactggctcttcctcccctcactaagaagacccaaacctctgcataatgggatttgggctttggtacaagaactgtgacccccaaccctgataaaagagatggaaggaaaaaaaaaaaaaaaaaaaaaaaaaaaaaaaaaaaaaaaaaaaaaaaaaaaaaaa

SEQ ID NO: 116012 - DNA, 1000 bp, Homo Sapiens
cccagaaggagttcataaagaatacaaagaagaccccaaaagatgtcacgatggcactattgaattcacgagcatcgatgcacacaatggcgtggccccatcaagacgtggtgatttggaaatacttggttattgcatgatccaatggcttactggccatcttccttgggaggataatttgaaagatcctaaatatgttagagattccaaaattagatacagagaaaatattgcaagtttgatggacaaatgttttcctgagaaaaacaaaccaggtgaaattgccaaatacatggaaacagtgaaattactagactacactgaaaaacctctttatgaaaatttacgtgacattcttttgcaaggactaaaagctataggaagtaaggatgatggcaaattggacctcagtgttgtggagaatggaggtttgaaagcaaaaacaataacaaagaagcgaaagaaagaaattgaagaaagcaaggaacctggtgttgaagatacggaatggtcaaacacacagacagaggaggccatacagacccgttcaagaaccagaaagagagtccagaagtaattcagatgctgtgaaccagatttccttttctttgttttcttttgacttttttctccttttctatttgaactgttttattttcctgtgagtcttgcgaggtggaagtaatgattaaatactcatgtgttcagaaaacataaactttttttataaaaatattttgtacaattcattaaaggctaatttatgaaatttgaaaatcttcaggttatactccttaagttatcccaaagccgtgtgtttgtgatgttttggagtacatatatatgaaaattattatgacacgcacttttctaatcattgtacatttctcagagtggataaaaatgtttgacaaagtcctcacttttaaggaaatgcaaagcttaaaataaaactctcttttgtttgatgcaaacacacagtaaaaaaaaaaaaaaaaaa

SEQ ID NO: 116013 - DNA, 1000 bp, Homo Sapiens
tcaggactgcctggaagctctggatgtgcacacatgcaaggcccccaagaacgctgactggacaaccgctacatgaccccagcaggcgtcaccatccaccttcccttctacaaggactccattggatctgcaagaacactggacctttgggttctttctggggggatatttcctaaggcatgtggcctttatctcaacggaagccccctcttcctccctgggggccccaggatggggggccacacgctgcacctaaagcctaccctattctatccatctcctggtgttctgcagtcatctcccctcctggcgagttctctttggaaatagcatgacaggctgttcagccgggagggtggtgggcccagaccactgtctccacccaccttgacgtttcttctttctagagcagttggccaagcagaaaaaaaagtgtctcaaaggagctttctcaatgtcttcccacaaatggtcccaattaagaaattccatacttctctcagatggaacagtaaagaaagcagaatcaactgcccctgacttaactttaacttttgaaaagaccaagacttttgtctgtacaagtggttttacagctaccacccttagggtaattggtaattacctggagaagaatggctttcaatacccttttaagtttaaaatgtgtatttttcaaggcatttattgccatattaaaatctgatgtaacaaggtggggacgtgtgtcctttggtactatggtgtgttgtatctttgtaagagcaaaagcctcagaaagggattgctttgcattactgtccccttgatataaaaaatctttagggaatgagagttccttctcacttagaatctgaagggaattaaaaagaagatgaatggtctggcaatattctgtaactattgggtgaatatggtggaaaataatttagtggatggaatatcagaagtatatctgtacagatcaagaaaaaaaggaagaataaaattcctatatcat

SEQ ID NO: 116014 - DNA, 1000 bp, Homo Sapiens
agcggtttattctggtgttgaatgagaagaaaacaaaaatcagaagtttgcataataaattattaaatgcagctcaagaacgagaaaaggacatcaaacaagaaggggaaactgcaatctgttctgaaatgactgctgaccgagatccagtctatgatgagagtactgatgaggaaagtgaaaaccaaactgatctctctgggttggcttcagctgctgtaagtaaagatgattccattatttcaagtcttgatgtcactgatattgcaccaagtagaaaaaggagacagcgaatgcaaagaaatcttgggacagaacctaaaatggctcctcaggagaatcagcttcaagaaaaggaaaagcctgattcttcactacctgagacgtcgaaaaaggagcacatctcagctgaaaacatgtctttagaaactctgagaaacagcagcccagaagacctctttgatgagatttaacagtctcaaaaaatactttgatgttcactagactatgttttctattcatttctttaaaatgaaaaaggagaatttcaagtcagcagccgctattaccgtatcttacaatttaattacatacacagtgaattgaaaccattgtgcaaaatggattacacatgtatacaaagatacgatttgatgatgacactggcacattgagttctaaactattcattcagcatgcctataattacataaattgtatgagactttttgttgcaaaggacacatttatcatattcattcacacatattatatgtgatagctgtccaacatcctgtctgggaagattttgaaaacaggacaaagaaaacatcattttaaaatgtcttcagctttttttgaatagacgtattcaaacatattctgaacattgatgtttgaacattttaatttgtgtgatgatgtagaaaatataattttagtttgtacataaacattgtgaaaatctgataataaaatttttgatacattgaaaaaaaaa

SEQ ID NO: 116015 - DNA, 1000 bp, Homo Sapiens
cacacatgtgcgaatccataccggagacaggccctatgtgtgccccttcgatggttgtaataagaagtttgctcagtcaactaacctgaaatctcacatcttaacacatgctaaggccaaaaacaaccagtgaaaagaagagagaagacccttctcgaccacgggaagcatcttccagaagtgtgattgggaataaatatgcctctcctttgtatattatttctaggaagaattttaaaaatgaatcctacacacctaagggacatgttttgataaagtagtaaaaattaaaaaaaaaaaactttactaagatgacattgctaagatgctctatcttgctctgtaatctcgtttcaaaaacacagtgtttttgtaaagtgtggtcccaacaggaggacaattcatgaacttcgcatcaaaagacaattctttatacaacagtgctaaaaatgggacttcttttcacattcttataaatatgaagctcacctgttgcttacaatttttttaattttgtattttccaagtgtgcatattgtacacttttttggggatatgcttagtaatgctacgtgtgatttttctggaggttgataactttgcttgcagtagattttctttaaaagaatgggcagttacatgcatacttcaaaagtattttcctgtaaaaaaaaaaaagttatataggttttgtttgctatcttaattttggttgtattctttgatgttaacacattttgtataattgtatcgtatagctgtattgaatcatgtagtatcaaatattagatgtgatttaatagtgttaatcaatttaaacccattttagtcactttttttttccaaaaaaatactgccagatgctgatgttcagtgtaatttctttgcctgttcagttacagaaagtggtgctcagttgtagaatgtattgtaccttttaacacctgatgtgtacatcccatgtaacagaaagggcaacaataaaatagcaatcctaaag

SEQ ID NO: 116016 - DNA, 1000 bp, Homo Sapiens
caaagtgaagtgctataggtgtggtgaaactggtcatgtagccatcaactgcagcaagacaagtgaagtcaactgttaccgctgtggcgagtcagggcaccttgcacgggaatgcacaattgaggctacagcctaattattttcctttgtcgcccctcctttttctgattgatggttgtattattttctctgaatcctcttcactggccaaaggttggcagatagaggcaactcccaggccagtgagctttacttgccgtgtaaaaggaggaaaggggtggaaaaaaaccgactttctgcatttaactacaaaaaaagtttatgtttagtttggtagaggtgttatgtataatgctttgttaaagaaccccctttccgtgccactggtgaatagggattgatgaatgggaagagttgagtcagaccagtaagcccgtcctgggttccttgaacatgttcccatgtaggaggtaaaaccaattctggaagtgtctatgaacttccataaataactttaattttagtataatgatggtcttggattgtctgacctcagtagctattaaataacatcaagtaacatctgtatcaggccctacatagaacatacagttgagtgggagtaaacaaaaagataaacatgcgtgttaatggctgttcgagagaaatcggaataaaagcctaaacaggaacaacttcatcacagtgttgatgttggacacatagatggtgatggcaaaggtttagaacacattattttcaaagactaaatctaaaacccagagtaaacatcaatgctcagagttagcataatttggagctattcaggaattgcagagaaatgcattttcacagaaatcaagatgttatttttgtatactatatcacttagacaactgtgtttcatttgctgtaatcagtttttaaaagtcagatggaaagagcaactgaagtcctagaaaatagaaatgtaattttaaactattccaataaagctgga

SEQ ID NO: 116017 - DNA, 1000 bp, Homo Sapiens
agaatgtggtaaagcttttaaacactcttcaacccttactaaacataagataattcatactggagagaagccttacaaatctaaagaatgtgaaaaagcttttaaccaatcctcaaaacttactgaacataagaaaattcatactggagagaaaccctatgaatgtgaaaaatgtggcaaagcttttaaccagtcctcaaatcttactagacataagaaaagtcatacagaagagaaaccttacaaatgtgaagaatgtggcaaaggttttaaatggccctcaacccttactatccataagataattcatactggagagaaaccatacaaatgtgaagaatgtggcaaagcttttaaccaatcctcaaaacttaccaaacataagaaaattcatactggagagaaaccctacacatgtgaagaatgtggcaaagcctttaaccagtcctcaaaccttactaaacataagagaattcatactggagaaaaaccttacaaatgtgaagaatgtgacaaagcttttaaatggtcctcagtccttactaaacataagataattcataccggagaaaaattacaaatatgaaaattatggcaaagctttaatcaatttacaagtcttactaaacataagaaaatttatactggagagaaactactaacctgaaagatgtgacaataattttgacaacacctcagacttataaaagtaatcatactggtgagaaattctaaaaatgtgaagactatggcaaagtctttggttgtcacactttaggtaagataattcatattggaacaaactacaagtgcaaacaatgtggcaaaacttaatttatgctcacaccttactgcacagaaaagaatttttagttgagaaaaagtatacaaatataaagaatgtggaaaagccgttaatatctgctcacatcttactcagcatcagaaagtacttaataaaagcattataaatggaaaaaaaaaaaaaaaaaaaaaaaaa

SEQ ID NO: 116018 - DNA, 1000 bp, Homo Sapiens
tgaatgtatggaattttttaaaaagaagtataatgccttacttcagagaactcttggaaagaagccttatgtgaaagtgatgactgtgaagtaatatggcccacactttattcaccaccctggagaaaaaaaaacccaggaatatgtggaaaagccattaataaccactcttttatttttttgcaataacaaggtgaaatcaatattgttgagaagattcttccatctggtaatgttgagaagacttcatttggtaggagtcccttactttacgtgtgtaaattcctaccaggaaagaatacatatccaatagattggagaaagccagagattagccctcattccgcatctgtcaaccaggacagaaagcatggacaagggatgagctttacaaagatgatgcactttggagatcagaaaattcatatttaagcaaagtgatacaaacacagtgatttgggaatgccttcatttacaatgcaatacttacattttaatactcttgtaggagaaaaagcaactgtataaatgaatgtagagtgactttctgcaatatttcaaacctatatcagagaattacactgtgggaaaactaccattgtaataagtgtagcaaaatctccttagatatctgaaaagtcatactggatggaatctgtaggaaacggttctattttgagggaagggggattcctttttgttttttaagtgaattcagaaaatgttataaataaatcttttggtttattataaaccttctgcttgctgattttttcccacagcatgtgattctgaaaatgtaactacaatattgacataaaaaataaacagtagtttttcttgttgaaacatacaaacataacaaagtgtttttaggtgttttatgattttaactttcagacagagtttggatttaaggtaatgctgacagttatccttgaatctgactatagacatttgttattcagtgtgaaacaaatataagatacatcacagaaaa

SEQ ID NO: 116019 - DNA, 1000 bp, Homo Sapiens
ctgccagcgacagtttgcagaccccggcgctctgcagcggcacgtccgcattcacacaggtgagaagccatgccagtgtgtgatgtgcggtaaggccttcacccaggccagctccctcatcgcccacgtgcgccagcacaccggggagaagccctacgtctgcgagcgctgcggcaagagattcgtccagtccagccagttggccaatcatattcgccaccacgacaacatccgcccacacaagtgcagcgtgtgcagcaaggccttcgtgaacgtgggggacctgtccaagcacatcatcattcacactggagagaagccttacctgtgtgataagtgtgggcgtggcttcaaccgggtagacaacctgcgctcccacgtgaagaccgtgcaccagggcaaggcaggcatcaagatcctggagcccgaggagggcagtgaggtcagcgtggtcactgtggatgacatggtcacgctggctaccgaggcactggcagcgacagccgtcactcagctcacagtggtgccggtgggagctgcagtgacagccgatgagacggaagtcctgaaggccgagatcagcaaagctgtgaagcaagtgcaggaagaagaccccaacactcacatcctctacgcctgtgactcctgtggggacaagtttctggatgccaacagcctggctcagcatgtgcgaatccacacagcccaggcactggtcatgttccagacagacgcggacttctatcagcagtatgggccaggtggcacgtggcctgccgggcaggtgctgcaggctggggagctggtcttccgccctcgcgacggggctgagggccagcccgcactggcagagacctcccctacagctcctgaatgtcccccgcctgccgagtgagctggcggcccttctgactgtttatttaaggatggatggcaccctggaaccgggaagggtggcctgttccctagagagaataaattggattattttctaaaaaaa

SEQ ID NO: 116020 - DNA, 1000 bp, Homo Sapiens
tgctgcccaccttccctggcattttaaacagacctaccccaccccaactcagagttaagcatacatggcaatgctgaaaataaacaaaatccactgaggcttcccaggccatttaaagcctggagtaccagcgcatatcatctcatggggtccagagtggagtccaggcttctctgaaaccagggctgagcatatttccatagccaaggaggtgggactccctggagctatctgtggtcttagggaaggatccagacatacacggctttggggtacaagctgtgatcactgatcaataaattatctctagattggtccttgtgaggggagttttaagaatccagaacatcttgctcttgatcagcacatccaaaaacaccaagacaaacatccagtggagcagaacctctcctgcctcgggagttctgaccgggttccccagcagggtgttaagcctctgtctctggccctaccagcatccaggttccactttcctaggagagagtggagatgggaagacagggaaaggaaggcagcaggaggccacaagcccaccaggtcttcatgtcaagagagggagtaacatgtcttctcattgcccacggacccaacctctgtccaggtgcccctcatcatcacagtttaacacaagctcccctgctccagccaaattgatctcccagtcttgtccttacccattccaagtgctctgccagcccctgttcatccaagttttaagtcctccaccctgttctaagagactgttccaacggctctgggcctcagtggtcacttgaccaccattgtctcagagctgcccactttgtgtgtgtcacatgctgcctgagtcacatgtacatcttatttctgcctctagttttgtaagctcctggagggcggataacatcttatactactcttgtattctcatggcacctagtgcagtgctgggcacagagtaggtgctcaataaagacttgttgaatgaaaaaaaaaaaaa

SEQ ID NO: 116021 - DNA, 1000 bp, Homo Sapiens
ttccatacgagttttggttttgtttttaatatttttttctattaaaatactcatgcatttaaccttcccgttattcaaccagtctcttggttgcatccctagcacttctactacaagtgagatggtagtgtttgagtgcttattgagtaaagcataattcggtcataatgaaatcgttcacattccctcatatgcacaagcccaccaaccccttcacaccccccttcacaggggtcgtatgagtaaggggatttggaaactgtcaacttacaaaggcactataacaattacagaatcatgattgccatgggccactttatttacatgaagacaactggagaacgactaagaccaaattatggaaaataagaaaaagctgttgctggcaagaccatcaagactgttctgacaccctgtccccatcatccctgactgagtactctgacatcacggaaagtgttgaacctgggaccctgaggaattcaccaggagtaaatggctttcatgtatttgtgttgtttgctttttcttacgtgattttatgttcatagagctagaaagtagcatctcatgatggcccaacaatctctgttgccagttaaaggttccttggagatgaggctgaataattatgaacctcaccttctctgattgtgggagtggcaagaactggggagacgtcctccataagtggagcacagggtatggggttaaagcatgacagggagagtcttctgtgcctggtttcttctcctctatctcataatgcattatgggcccgaggaataggggagggttaataagactccaaccctaatggcccaacagggaaattctcattttggtcgatgatattctgatggactggtttggtcttaataccagtcaaccgttgtccttctggaaatatacatatatgaaataaataaaggtaacacttgcagccaagttccctggtttctgggacttcccatcttacccattccttttccagggcttc

SEQ ID NO: 116022 - DNA, 1000 bp, Homo Sapiens
ctagaaattgtaagctacaaaatcattggtgttcatcaagaagatgaactattagaatgtttatctcctgcaacgagccggacgtttcgaatagaggaaatccctttggaccaggtggacatagacaaagagaatgagatgcttgtcacagtggcgcatttccacaaagaggtcttcggaacgttcggaatcccgtttttgctgaggatacaccagggcgagcattttcgagaagtgatgaagcgaatccagagcctgctggacatccaggagaaggagtttgagaagtttaaatttgcaattgtaatgacgggccgacaccagtacataaatgaagacgagtatgaagtaaatttgaaagactttgagccacagcccggtaatatgtctcatcctcggccttggctagggctcgaccacttcaacaaagccccaaagaggagtcgctacacttaccttgaaaaggccattaaaatccataactgatttccaagctggtgtgttcaaggcgaggacggtgtgtgggtggccccttaacagcctagaactttggtgcacgtgccctctagccgaagtcttcagcaagaggattcgctgctggtgttaattttattttattgaggctgttcagtttggcttctctgtatctattgactgccctttttgagcaaaatgaagatgtttttataaagcttggatgccaatgagagttattttatggtaaccacagtgcaaggcaactgtcagcgcaatgggggagaagaggttagtggatcgggggtccctggctcaaggtctctgggctgtccctagtgggcacgagtggctcggctgccttcctggggtcccgtgcaccagccctgcagctagcaagtcttgtgtttaggctcgtctgacctatttccttcagttatactttcaatgaccttttgtgcatctgttaaggcaaaacagagaaactcacaacctaataaatagcgctcttcccttcaaaaaaaaa

SEQ ID NO: 116023 - DNA, 1000 bp, Homo Sapiens
acagatgttatttttgtatttttaaaaaacaattggttgtatataaagtttttttatttcttttgtgcagatcactttttaaactcacataggtaggtatctttatagttgtagactatggaatgtcagtgttcagccaaacagtatgatggaacagtgaaagtcaattcagtgatggcaacactgaaggaacagttaccctgctttgcctcgaaagtgtcatcaatttgtaattttagtattaactctgtaaaagtgtctgtaggtacgttttatattatataaggacagaccaaaaatcaacctatcaaagcttcaaaaactttgggaaagggtgggattaagtacaagcacatttggcttacagtaaatgaactgatttttattaactgcttttgcccatataaaatgctgatatttactggaaacctagccagcttcacgattatgactaaagtaccagattataatgccagaatataatgtgcaggcaatcgtggatgtctctgacaaagtgtgtctcaaaaataatatacttttacattaaagaaatttaatgtttctctggagttggggctcttggctttcagagtttggttaatcagtgttgattctagatgatcaacataatggaccactcctgaatgagacttaattttgtctttcaaatttactgtcttaaatcagtttattaaatctgaattttaaaacatgctgtttatgacacaatgacacatttgttgcaccaattaagtgttgaaaaatatctttgcatcatagaacagaaatatataaaaatatatgttgaatgttaacaggtattttcacaggtttgtttcttgatagttactcagacactagggaaaggtaaatacaagtgaacaaaataagcaactaaatgagacctaataattggccttcgattttaaatatttgttcttataaaccttgtcaataaaaataaatctaaatcaaaaaaaaaaaaaaaaaaaaaaaaaaa

SEQ ID NO: 116024 - DNA, 1000 bp, Homo Sapiens
cagtggctcatgcctgtaatctgagcactttgggaagctgaggcgggtggatcacttgaggtcagaaatttgagacgagcctggccaacatggtgaaaccccatctctactaaaaatacaaaaattagctgggcgtggtggcacgtgcctgtaatcccagctactcgggaggctgaggcaggagaatcaattgaacctgggaggcagaggttgcagtgagccgagatggcgccattgcactccagcctgggtgacaaaagcaaaagtccatcttaagaaatatatatatatattatatatattcttagttctaagatttcctttaattctatgattctctggatttaaatgcattattcatatttcttgaagcttagatacagtctaattcatagcaaccatatctgctttatcctaggtgagggtagcagtccacaatggaatagaagaaaatcccattataacaaatgacaaattatatatcatgaatccttctgtctgactaactcaataactttctataaaagccaatggaattcaaataggagctaggagacaacaagttatatatgacagtggaggttgtattccttttatattgctgagaaaactagttaaatgatcagattcttgctgttaagaaacaatttcgtttaatgggatctgtacaactgattttaaaaaaatgctacaaaaagccccaaagcatataatctctactccttacagtctctagaattaaatgtactcatttagacaacatattaaatgcatattttagccactttagagaaacctcataggcacagagtttccaagattaattttaagaatatcttcacgaacttgaccctcctactccacattgcaacatttccatcagacagcatttcaattccagtattatgtatattgcaaattaaacattttaaaatatttttttccaatttatttctcaaaataaaatgtcttttgttctggtaaaaaaaaaaaaaaaaaa

SEQ ID NO: 116025 - DNA, 1000 bp, Homo Sapiens
agtggtgttgataaaccggtccctggtggagcgaggccttgcccagtgggtagacagctactacacaagcctttgacccccatgctgcttcctgagagtctttttttgcactgttgaaattgggcttggcactcaagtcaaagatgaacatcggaataacaaacattgtcctctccagaaagtcctttctttatccatactgtagtcctattgagaagacatttcgtctctgagaaaaaaggatggaactatgggttctcttcgcaaagccaaaggatagtgtttaacaagccagctggcttatcctggttctcagctgtttaaaaaaaaaaaaaaaaaggaatagaaacagtttcaaccagattgtcctattccccctgttccattcccctcttcttccttctatctccttccccggcaaaaaccaaacaaactggcagacaggccagggatgtatgttgcttgcttgagagggtttcttttacttcaaaatctttcttcagggagcaagacatgaactgactaattggtatccactacttgtacagcttacataaatgagttgatgatatttaaccagtttttataaacttcatttaggtctctaaacacagactttttaaattgcaactgtaaatatgaaatggtcatcacatctgaccttggtcagtggggaggggaactggtatcctgccaagcctggttgtaatttgtaaccattttctatttgtgcaaactctgtaaatatgtgtttaaacaaatgtaatattttgtacaagatacactggagaacaaagggaactcaagattcttccagccacatgtcacctgtaggtagaagtaaactctgcagtgcagcttctgctcttggcccctctggccagggcccctgtggcttcctgcacactggacaggtgactgtatggtagagactgtgatctgggaactttttgctgtacaaatctgtttaaaaaaaaaaaaaagtaactcattgaattaa

SEQ ID NO: 116026 - DNA, 1000 bp, Homo Sapiens
cgtcaccgccatcatgacccgcctgcacaacctcgcccagttcgaaggcggggaaagcaaggtgaacaccctggtggccgcggcaaacagcctggacaatctgtgccgcatggaccccgcctggcacccctggctgtgactgtggccgccacggcacgcgggaatgtgaagggcgctccgggctctgagcccgcagcttttacgacttctccctgcgtcgttccttatattcacagaagccccatagtttcactgggttgcggttattttcctggtagtttgcgtgtaagaaagggagaatatagttttagaggaagctgaactatgacgatgctgggcgaacggtttgggaaatggcagagctgaaacttattccaagctttcaaaataatcttttaagaagccaggattctccggtctggaatttctgagtgagtcctttttttatggtgtcctccctctgtgaatgtacaggcggaactgtacgaacagctcccttccatccatttttaactctttcggaaataacacctcacagcagcttcgtgcttttgtacagacctttgtaacaagtgtacagaaaactcattttgtttgagaaacaggagttgatgaacccatcatgctggtttttctctgagcacaaagttttaggctgtacacagccagccttgggaatctcgttgagcgttcggcgtggatccacggggccaggccaccctgcgggaggccacacgcatccacttcggattcagtgggtgaagacagaactctgagagtctgcaggcggctcctgtgctttttatttctggctcttcggatgtcttctagacatttactatcactgcacctgaagaaaaaatcacttttaccttcctaatttaaaaagacaaaacagaaatgtacgttccttcgctagctttagtctttctgttcccatttttataaatctgagcattgataatgttctatctaaatttgtacagtgtgattttttttt

SEQ ID NO: 116027 - DNA, 1000 bp, Homo Sapiens
gatgtggttactgagatttgggaagaagcatgaagctttgtgtgggttggaagagactgaagatatgggttataaaatgttaattctaattgcatacggatgcctggcaaccttgcctttgagaatgagacagcctgcgcttagattttaccggtctgtaaaatggaaatgttgaggtcacctggaaagctttgttaaggagttgatgtttgctttccttaacaagacagcaaaacgtaaacagaaattgaaaacttgaaggatatttcagtgtcatggacttcctcaaaatgaagtgctattttcttatttttaatcaaataactagacatatatcagaaactttaaaatgtaaaagttgtacactttcaacattttattacgattattattcagcagcacattctgaggggggaacaattcacaccaccaataataacctggtaagatttcaggaggtaaagaaggtggaataattgacggggagatagcgcctgaaataaacaaaatatgggcatgcatgctaaagggaaaatgtgtgcaggtctactgcattaaatcctgtgtgctcctcttttggatttacagaaatgtgtcaaatgtaaatctttcaaagccatttaaaaatattcactttagttctctgtgaagaagaggagaaaagcaatcctcctgattgtattgttttaaactttaagaatttatcaaaatgccggtacttaggacctaaatttatctatgtctgtcatacgctaaaatgatattggtctttgaatttggtatacatttattctgttcactatcacaaaatcatctatatttatagaggaatagaagtttatatatatataataccatatttttaatttcacaaataaaaaattcaaagttttgtacaaaattatatggattttgtgcctgaaaataatagagcttgagctgtctgaactattttacattttatggtgtctcatagccaatcccacagtgtaaaaattca

SEQ ID NO: 116028 - DNA, 438 bp, Homo Sapiens
atgcctgagccagccaagtctgctcccgccccgaagaagggctccaagaaggcagtgaccaaagcgcagaagaaagatggcaagaagcgcaagcgcagccgcaaggagagttactctgtgtacgtgtacaaggtgctgaaacaggtccatcccgacactggcatctcttccaaggccatgggcatcatgaattctttcgttaacgacatatttgagcgcatcgcgggcgaggcttcccgcctggcgcattacaacaagcgctcgaccatcacctccagggagatccagacggccgtgcgcctgctgcttcccggagagctggccaagcacgccgtgtcggagggcaccaaggccgtcaccaagtacaccagctccaagtaaacattccaagtaagcgtcttaacacctaaccccaaaggctcttttaagagccaccca

SEQ ID NO: 116029 - DNA, 1000 bp, Homo Sapiens
tcagagacctacgtcatccactcaggaattcgcgcctctcatacttgcctgtctcattttatcttccttctagcagctgtctgaaattggttcgtctgttttcttgtttatggtattctcaagcccttgacagaccggctagtgtggttttcccgtgcatcttcagcctggcacattatggacacttaaatactacgtattgatctaatattgttgggttaatttttccatcccacccttttcttaatcgcttccgtggatggatgaagggtgctgttcatttccattagatgtatgtgaaggcacagtgaaaatggaaatgttcttggagctacttcctcaaaatgtatccttagtcacctcagtgcaacagctgggagggggccgtgttaagattttttttgctacaaagaggaggtggcaatggtagatccacccttatgcttctcagtttagcataacctcttatggattttcatcaaattcagcgtgttggtcactggaaagagccttttccttctccttttcttactctcccctcatggtgttcccctcttaaaggagaggagcttttaatttacacttaccacctcatttgcttttctggaggccatgcaatataggcgggactacagagttaatctcctttttacaaatgaggccaagagaagcctcattggttcacagtcatgcagctcatactgtccacccttgtattctcagatgcaggacaattgcattttagttttattttgtggaggtgcagaatatttactctttctgtccaacccttgattctgccgaggaagacactgatggtttgatgagtgattcagctgtttttggctaagggcttttggagctgatggcaggggtttgatgaatccaaatgagctctagacattatcacagactgaatagatcttaactgtctcctacatgtgtgttttcaaatgtgtatagatgctattgttattaataaagttaccaattaatttaa

SEQ ID NO: 116030 - DNA, 396 bp, Homo Sapiens
agaagctgtctatcgggctccagcggtcatgtccggcagaggaaagggcggaaaaggcttaggcaaagggggcgctaagcgccaccgcaaggtcttgagagacaacattcagggcatcaccaagcctgccattcggcgtctagctcggcgtggcggcgttaagcggatctctggcctcatttacgaggagacccgcggtgtgctgaaggtgttcctggagaatgtgattcgggacgcagtcacctacaccgagcacgccaagcgcaagaccgtcacagccatggatgtggtgtacgcgctcaagcgccaggggcgcaccctgtacggcttcggaggctaggccgccgctccagctttgcacgtttcgatcccaaaggccctttttagggccgacca

SEQ ID NO: 116031 - DNA, 1000 bp, Homo Sapiens
atggccggcttccagctgaccagcgccgtggctacaaaaatgtgtttaacgccctgattcgaatcacccgggaagagggtgtcctcacactgtggcggggctgcatccctaccatggctcgggccgtcgtcgtcaatgctgcccagctcgcctcctactcccaatccaagcagttcttactggactcaggctacttctctgacaacatcttgtgccacttctgtgccagcatgatcagcggtcttgtcaccactgctgcctccatgcctgtggacattgccaagacccgaatccagaacatgcggatgattgatgggaagccggaatacaagaacgggctggacgtgctgttcaaagttgtccgctacgagggcttcttcagcctgtggaagggcttcacgccgtactatgcccgcctgggcccccacaccgtcctcaccttcatcttcttggagcagatgaacaaggcctacaagcgtctcttcctcagtggctgaagcggccgggggctcccactcgcctgctgcgcctatagccactgcgccctgggggcctgggctctgctgccctggacccctctatttatttcccttccacagtgtggtttcttcctctgcggtaaaggacttggtctgttctaccccctgctccagcttgccctgctcgtcctgatcctgtgatttctctgtccttggctattcttgcagggagctggaaaacttcctgaggatttctggcctccccctgggttttagtttcagggcacacaggacagcagaagatcccctttgtcagtggggaaaccaaggcagagctgaggggacagggaggagcagaagccatcaagatggtcaaagggcctgcagagggagatgtggcccttcctccccctcattgaggacttaataaattggattgatgacaccagcaaaaaaaaaaaaaaaaaaaaaaaaaaaaaaaaaaaaaaaaaaaaaaaaaaaaaaaaaaaaaaaaaaaaaaa

SEQ ID NO: 116032 - DNA, 1000 bp, Homo Sapiens
acttggatatttgtgaaaactccttaccaccatacaagcatcagaagagctctcttgttgttagcacttattgtttgcaagaacagaatacatccttttatccttttatgaaaaatgacaagtgaaggcaaaaggggaaggttatttgatctggaagatgagtgttctgatgtggtggcttttgcaaaaatctttattggtgttgaaaactggaaaaaataactcatccagaattcatattgtcttgacaagaactatggttctctgtttttagatattgtggaaaatgtttttgggcatttttctctgattttatttcttctcccccacccctttttctaaaaaacaaacaaaaaaaaaaacacacaaaacaaaaacagaacaaaagaagagagaaggaaattttatcaattaaaaatgctgtgtgataaaatcccagcccagattgctcagctgtttgtacctgacttgccgcctgcataggagccagttctgttccttctgactagcccctcttcctccaggggagaacttccaaatgttaatttttttttttttgaaaatataaataattactattttgtactgtgtggtatctctggtcttttgtttcactcacctgccttgtctcttgggtctgagtcccttgcttaagggattttgaagtcctagttttcagcttgcagagattatgtctgaaatgcctaatgagtcgcagggatttgttgagactccgtaatctcaagttctctttgtgagctatcagcatctgccagtctcttgtcctccctgagtatctcacagtccatatcctgatgagggatcaggcccctacctctgccaaggcaagtaatggtagtgggcttttaaactgccccccgtatgttttaagacctaatccccacctcccttcttctaactaaatataaaaagatccaggggacataaatgtggagattaaataaagggaaattattgtctctaaaaaaaaaaaaaaaaa

SEQ ID NO: 116033 - DNA, 1000 bp, Homo Sapiens
caggaattgaggacagctctgaaggcctcagattctgctgtggacgtggccattgaaattcttgccactcgaaccccaccccagctgcaggagtgcctggcagtctacaaacacaatttccaggtggaggctgtggatggcatcacatctgagaccagtggcatcttgcaggacctgctgttggccctggccaaggggggccgtgacagctactctggaatcattgactataatctggcagaacaagatgtccaggcactgcagcgggcagaaggacctagcagagaggaaacatgggtcccagtcttcacccagcgaaatcctgaacacctcatccgagtgtttgatcagtaccagcggagcactgggcaagagctggaggaggctgtccagaaccgtttccatggagatgctcaggtggctctgctcggcctagcttcggtgatcaagaacacaccgctgtactttgctgacaaacttcatcaagccctccaggaaactgagcccaattaccaagtcctgattcgcatccttatctctcgatgtgagactgaccttctgagtatcagagctgagttcaggaagaaatttgggaagtccctctactcttctctccaggatgcagtgaaaggggattgccagtcagccctcctggccttgtgcagggctgaagacatgtgagacttccctgccccaccccacatgacatccgaggatctgagatttccgtgtttggctgaacctgggagaccagctgggcctccaagtaggataacccctcactgagcaccacattctctagcttcttgttgaggctggaactgtttctttaaaatcccttaattttcccatctcaaaattatatctgtacctgggtcatccagctccttcttgggtgtggggaaatgagttttctttgatagtttctgcctcactcatccctcctgtaccctggccagaacatctcactgatactcgaattcttttggcaaaaaaaaaa

SEQ ID NO: 116034 - DNA, 1000 bp, Homo Sapiens
tctgccctgcgcaggactcagatgacttcgaggccctgtgcaatgtgctacgcccccccgcatatagccccccgcgaccaggtggctttggactcccctacgagtacggcccagacttaggtccaccttaccagggcctcccatatgggcctgagttgtacccaccacctgcgctaccctacgacccctacccaccgccacctgggcccttcgcccgccgggaggctccttatggggcaccccgcttcgacatgccagactttgaggacgatggtggcccctatggcgaatctgaggctcctgcgccacctggcccgggcacccgctggccctatcggtcccgggacacccgccgctccttcccagagcccgaggagcctcctgaaggtggaagctatgctggttccctggctgagccctacgaggagctggaggcggaggagtgcgggatcctggacggctgcaccaacgaccgctgcgtgcgcgtccccgaaggcttcacctgccgttgcttcgacggctaccgcctggacatgacccgcatggcctgcgttgacatcaacgagtgtgatgaggccgaggctgcctccccgctgtgcgtcaacgcgcgttgcctcaacacggatggctccttccgctgcatctgccgcccgggattcgcacccacgcaccagccgcaccactgtgcgcccgcacggccccgggcctgagccctggcacccgctggccacccacccgcgcccgccactcggggcccctgccgcgcatcctgcagcccgcttatgcgtatgtgcacggggccgcccgcctggacctggagaagggacctacggacgcctggaagctgcgacgccctgcactgctcccgcctccaccagcgcctcccactgatgtcgtggtcccgggcctggcccaggggcccctttacatgccctctcccttttataaaattttccattaaaaaccacctattttctaaaaaaaaaaaaaaaaaaaaaaa

SEQ ID NO: 116035 - DNA, 1000 bp, Homo Sapiens
ttccttttttccttcttcatcctcctccttttttaaaagtcaacgagagccttcgctgactccaccgaagaggtgcgccactgggagccaccccagcgccaggcgcccgtccagggacacacacagtcttcactgtgctgcagccagatgaagtctctcagatgggtggggagggtcagctccttccagcgatcattttattttattttattacttttgtttttaattttaaccatagtgcacatattccaggaaagtgtctttaaaaacaaaaacaaaccctgaaatgtatatttgggattatgataaggcaactaaagacatgaaacctcaggtatcctgctttaagttgataactccctctggagcttggagaatcgctctggtggatgggtgtacagatttgtatataatgtcatttttacggaaaccctttcggcgtgcataaggaatcactgtgtacaaactggccaagtgcttctgtagataacgtcagtggagtaaatattcgacaggccataaacttgagtctattgccttgcctttattacatgtacattttgaattctgtgaccagtgatttgggttttattttgtatttgcagggtttgtcattaataattaatgcccctctcttacagaacactcctatttgtacctcaacaaatgcaaattttccccgtttgccctacgccccttttggtacacctagaggttgatttcctttttcatcgatggtactatttcttagtgttttaaattggaacatatcttgcctcatgaagctttaaattataattttcagtttctccccatgaagcgctctcgtctgacatttgtttggaatcgtgccactgctggtctgcgccagatgtaccgtcctttccaatacgattttctgttgcaccttgtagtggattctgcatatcatctttcccacctaaaaatgtctgaatgcttacacaaataaattttataacacgcttaaaaaaaaaaaaaa

SEQ ID NO: 116036 - DNA, 1000 bp, Homo Sapiens
cctggttacagctctaaggccctggagccccagctgtcaggtaagatgctggtcctggattatattctggcggtgacccgaagccgtagcagtgacaaagtagtgctggtgtcgaattacacccagactttggatctctttgagaagctgtgccgtgcccgaaggtacttatacgtccgcctggatggcacgatgtccattaagaagcgagccaaggttgtagaacgcttcaatagtccatcgagccctgactttgtcttcatgctgagcagcaaagctgggggctgtggcctcaatctcattggggctaaccggctggtcatgtttgaccctgactggaacccagccaatgatgaacaagccatggcccgggtctggcgagatggtcaaaagaagacttgctatatctaccgcctgctgtctgcagggaccattgaggagaagatcttccagcgtcagagccacaagaaggcactgagcagctgtgtggtggatgaggagcaggatgtagagcgccacttctctctgggcgagttgaaggagctgtttatcctggatgaagctagcctcagtgacacacatgacaggttgcactgccgacgttgtgtcaacagccgtcagatccggccaccccctgatggttctgactgcacttcagacctggcagggtggaaccactgcactgataagtgggggctccgggatgaggtactccaggctgcctgggatgctgcctccactgctatcaccttcgtcttccaccagcattctcatgaggaacagcggggcctccgctgataaccagctggtctgggtgtagctcttagaggaaggagatagggaaaaggggctccttgctccacagggccctgttgaattttgttctctgggagaaaatcatcaagaagggctgcatgatgtttgcccaaaatttattttataagaaaaacttttttggttaaaaaaaagaataaaggtatgaaagggttaaaaaaaaaaa

SEQ ID NO: 116037 - DNA, 1000 bp, Homo Sapiens
gggacctcacaacggccaccttaatgcaccagattccatgccattcagggattgtatgtgacactgcttttagcccagatagtcgccatgtcctcagcacaggaacagatggctgtcttaatgtcattgatgtgcagacaggaatgctcatctcctccatgacatcagatgagccccagaggtgctttgtctgggatggaaattccgttttatctggcagtcagtctggtgaactgctcgtttgggacctccttggagcaaaaatcagtgagagaatacagggccacacaggtgctgtgacatgtatatggatgaatgaacagtgtagcagtatcatcacaggaggggaagacagacaaattatattctggaaattgcagtattaagtgccttttcctctcctgaatattaaattgaactctatttaatgcatttttaaaccaaacttttaaacggactggtgaatgtgcaatgttagtaattagaagttttaccacatggaaaatttgtggttttaaactttctaaatcatggtgacttcattgaaagccattagttgctattctcttagggcagataaaatgcggctgtgttaggaaaaacatgttacactgtaaggcagatgatcgtccccgtatgatgattgtcagaagacaggactaagtagcagagaatagctaagagataaattgggctggggaaacttgtcagaaagcactgaacaattaagaaattttccaagaaaatgtgcagtattctctgctacttctgaatctgttttgtcttcctaatctatcacaattgccacccatcgggttttgggtgtgtgttttcatagcgtggttactttctataatgctgtacccagattctaagaacctggagaaggattagcagttcttagtaagtttactgtgtataggaacggtttgtatttcattacagctattcatcttttctacattaaaaatatttttctctaaagaaaaaaaaaaaaaaa

SEQ ID NO: 116038 - DNA, 1000 bp, Homo Sapiens; identical to SEQ ID NO: 115276

SEQ ID NO: 116039 - DNA, 1000 bp, Homo Sapiens
cttgaggaaaccacagtgcctgagatccagaggaccagcttgggcaatgtcgtgttgctgctcaagagcttagggatccatgacctaatgcactttgatttcctggaccctccaccatatgagacactgctgctgactttggagcagctgtatgctctgggagccctcaaccaccttggggagctcaccacgtctggtcgaaagatggcagagctgccggtggaccccatgctgtccaaaatgatcttagcctctgagaagtacagctgttcagaggagatcctgacagtggctgccatgctctctgtcaacaactccatcttctaccgaccaaaggacaaggtcgtccatgctgacaatgcccgtgtcaacttctttctccctggcggtgaccacctggttctgctaaatgtttacacacagtgggctgagagtggttactcttcccagtggtgctgtgagaactttgtacagttcagatcgatgcgccgagcccgggatgtgcgggaacagctggaagggctcttggaacgtgtggaagttggtctcagttcctgccagggggactatatccgtgtacgcaaggccatcactgctggttacttttaccacacggcacggttgactcggagtggctaccgcacagtgaaacagcagcagacagtcttcattcatcccaactcctccctctttgagcaacagccacgctggctgctctaccacgaacttgtcttgaccaccaaagagttcatgagacaggtactggagattgagagcagttggcttctggaggtggctccccattattataaggccaaggagctagaagatccccatgctaagaaaatgcccaaaaaaataggcaaaacacgagaagagctagggtaagagaaggacgcaaacagaacctgacaccagctccttttccttctatacattatttaatacctattaaataatattatttttggaataaagcttgtgggaacatttgggatct

SEQ ID NO: 116040 - DNA, 1000 bp, Homo Sapiens
aggcaaacacataccaagagacctacaaaagaatatcacgggttgaattcacattccctgactttgtaacagagggagccagggacctcatttcaagactgttgaagcataatcccagccagaggccaatgctcagagaagtacttgaacacccctggatcacagcaaattcatcaaaaccatcaaattgccaaaacaaagaatcagctagcaaacagtcttaggaatcgtgcagggggagaaatccttgagccagggctgccatataacctgacaggaacatgctactgaagtttattttaccattgactgctgccctcaatctagaacgctacacaagaaatatttgttttactcagcaggtgtgccttaacctccctattcagaaagctccacatcaataaacatgacactctgaagtgaaagtagccacgagaattgtgctacttatactggttcataatctggaggcaaggttcgactgcagccgccccgtcagcctgtgctaggcatggtgtcttcacaggaggcaaatccagagcctggctgtggggaaagtgaccactctgccctgaccccgatcagttaaggagctgtgcaataaccttcctagtacctgagtgagtgtgtaacttattgggttggcgaagcctggtaaagctgttggaatgagtatgtgattctttttaagtatgaaaataaagatatatgtacagacttgtattttttctctggtggcattcctttaggaatgctgtgtgtctgtccggcaccccggtaggcctgattgggtttctagtcctccttaaccacttatctcccatatgagagtgtgaaaaataggaacacgtgctctacctccatttagggatttgcttgggatacagaagaggccatgtgtctcagagctgttaagggcttatttttttaaaacattggagtcatagcatgtgtgtaaactttaaatatgcaaataaataagtatctatgtctaaaaaaa

SEQ ID NO: 116041 - DNA, 1000 bp, Homo Sapiens
gaaatcctgagctgcctaacgcagcacaggcacaaaaagaagaacagcttaaaattgatgaagctgaatcccttaatgatgaagagttagaggaaaaagagaagcttctaacacagggatttaccaattggaataagagagattttaaccagtttatcaaagctaatgagaagtggggtcgtgatgatattgaaaatatagcaagagaagtagaaggcaaaactccagaagaagtcattgaatattcagctgtgttttgggaaaggtgcaacgagctccaggacatagagaagattatggctcagattgaaaggggagaggcgagaattcaaagaagaataagcatcaagaaagcacttgacacaaagattggacggtacaaagcaccttttcatcagctgagaatatcatatggtactaacaaaggaaaaaactatactgaagaagaagatcgttttctgatttgtatgcttcacaaacttggatttgacaaagaaaatgtttatgatgaattgcgacagtgtattcgcaactctcctcagttcagatttgactggtttcttaagtccagaactgcaatggagctccagaggagatgtaataccttaattactttgattgaaagagaaaacatggaactagaagaaaaggagaaggcagagaaaaagaaacgaggaccaaagccttcaacacagaaacgtaaaatggatggcgcacctgatggtcgaggaagaaaaaagaagctgaaactatgaatatgtttttgtttcataatcactaactttaaaccagtagttctttaatttacgggtcttcataagatgtactgtacaatgctcaattgttatgtcatttaaagacatcaggttcatctgtttactgagctagaaacatagtatgtagtttcacttttttaaatgcaacagctgtgctgaaatttttttatcattaacacttgaagtaataaaataggcttcatttattaaaaaaaaaaaaaaaa

SEQ ID NO: 116042 - DNA, 1000 bp, Homo Sapiens
ttccacttcagaaggtcctgaaagtggcagctacggaacgggagtttggcaactaccttttccgccagaatcgtttctatgatgccaaagtgagatataaaagggccctgttgcttctgcgccggcgatcagcaccccctgaagagcagcacctggtggaggccgccaagcttcctgttctcctgaacctgtcctttacatacctgaagctagaccgacccaccatagccctgtgctatggagagcaggctttgatcattgaccaaaagaatgccaaggccctcttcaggtgtggacaggcttgtcttctcctgactgagtatcaaaaggcccgggattttctagttcgagcccagaaggagcaacccttcaatcatgacatcaataatgagctgaagaaactggctagctgttacagggactatgtggataaagagaaagaaatgtggcaccgcatgttcgcgccctgtggcgatggttctacagcaggagaaagttgaaggttcttcacctaccaacgaggggagagagctgtggttctccatcattgggggagtggaagggagctcccagcgcagccgtggcagccaccttccaggagcaggggctggaatgtcctgtggccgcatctctcatggacgcggctgaaacgtgttttcacaggtgctgttttctgttttccgtgttcgtaacagaagggaggggaaagcgcagctactgacaagtagaacactgctactttttttaaggcagtttcttgtttttttagacggaattagtccttggcttccctcccagtcccagccctgcttccggctgcgaatgtccctgagtcaacaccaatagagattgctttgtgtattttgtagggttctctgttttgaagacagaattatgttacaaatgtttttgttgtaaataaataaaacacttccttgtccttgcaaaaaaaaaaaaaaaaaaaaaaaaaaaaaaaaaaaaaaaaaaaaaaaaaaaaaaa

SEQ ID NO: 116043 - DNA, 1000 bp, Homo Sapiens
tctctgaaggatcatctatgtattcaagtaattattttttagataataactgtcttctggacttggtcttgaagtctgtacagattcagcctcagtagtagcgaactgcactgctgtttggtttggagtacaaattagacttatagtcctcctggaacttgagttattaaaatcataggaataaaattatgggatctcaacaaagggtcgagggtttgaggcttaaacaagccaacatatgaatatatgttttgtctcgctatactgcacttacgctatccagttgcaggtaattttttgtctgctagtagtgttctagattatgtctttccaaagcgctgaggctgtgcacctattctgtagttgcagctgatgcctgaatgtatcctagctgacaaattattgattaataagaacttgaatttctggaagattcttactgttaaccaaattttgagcaaggagtctcaaaggtaattctgaaccagaattacatgttaatgaacagtgtaccttttaacagtgtaaatcacggaatatccgtgaagggatttcttaatttattttttaccggttgattgaaatatcagttaaaggttgccagcatggttgcagataaactgatgtttgaaattcgctgaaatacttaatgtggaataggataatatacttccaatgccctcaaggctgtgaccttacagccattttacatagcacatcattcctcctatagggatgaactttttcctggcacgaaaagtagccgctctggttgaagctttgcttattgtaacaggcttttatttccaggtaatatgtcttggaagacttaattctgattagagatatagatattactggaaactaattgttttttttctattgtactctgctttatcaaagaagtaaaacatttaaatcgtactacagaaattaagatgttgtcttgcgatccttaataaatgaatgatttcccttttaaaaaaaaaaaaaaaaaaaa

SEQ ID NO: 116044 - DNA, 1000 bp, Homo Sapiens
cgatcgtcaaatcctatgatggttttgcaactccctgaaaggtgttactgtgctgacgtgatataccccatggctgtggtggcaactgcagagaggggcctgattgtctatcagctagagaatcaaccttctgaattcaggaggatagaatctccactgaaacatcagcatcggtgtgtggctatttttaaagacaaacagaacaagcctactggttttgccctgggaagtatcgaggggagagttgctattcactatatcaaccccccgaaccccgccaaagataacttcacctttaaatgtcatcgatctaatggaaccaacacttcagctcctcaggacatttatgcggtaaatggaatcgcgttccatcctgttcatggcacccttgcaactgtgggatctgatggtagattcagcttctgggacaaagatgccagaacaaaactaaaaacttcggaacagttagatcagcccatctcagcttgctgtttcaatcacaatggaaacatatttgcatacgcttccagctacgactggtcaaagggacatgaattttataatccccagaaaaaaaattacattttcctgcgtaatgcagccgaagagctaaagcccaggaataagaagtagtggctggagactctggctcagccagagttgtttctctccactctgcctcatctctgtacgaatttgggtcccagccttgttgggttgtcagccatggacatggatttcaacccctggagaaaacgatgtcattgttcagcagctgagagcccaggcgtccgcggcgacttgccgtctctccattccactgcctgttgcagagtttttctgtaactaagggggttgaggttattgtagacgttagattgcgggcaccgccagggattttgcagcgcttcagtgtacgtgttagagaatattggaaaagcgtctgtgagccccgtgctgtattttgtaataaagtcttttgcagattgcttcccgaaaa

SEQ ID NO: 116045 - DNA, 1000 bp, Homo Sapiens
agaatgcccctaccatcacccactgagtctaggcacagcctctccatccctcctgtctccagccctccggagcagaaagtgggtctttatcgaagacaaactgaacttcaagacaaaagtgaattttcagatgtggacaagctagcttttaaggataatgaggagtttgaatcatcttttgaatctgcagggaacatgccaaggcagttggaaatgggcgggctttctcctgccggggatatgtctcatgtggacgctgctgcagctgctgtgcccctctcatatcagcacccaagtgtagatcagaaacaaattgaagaacaaaaggaagaagaaaaaatacgggaacagcaagtgaaagaacgaaggcagagagaagaaagaaggcagagtaacctacaagaagttttagaaagggaacgaagagaactagaaaaactgtatcaggaaaggaagatgattgaagaatcactgaagattaaaataaaaaaggaattagaaatggaaaatgaattagaaatgagtaatcaagaaataaaagacaaatctgctcacagtgaaaatcctttagagaaatacatgaaaatcatccagcaggagcaagaccaggagtcggcagataagagctcaaaaaagatggtccaagaaggctccctagtggacacgctgcaatctagtgacaaagtcgaaagtttaacaggcttttctcatgaagaactagacgactcttggtaaccatgtttgctgcccagcttctaacttacataccgtgagaagttacgtaacatttactcctttgtaaatgtttccctatcatcagacaaaactcaataaaaatgtgtgtaatccaatgtgggtttttttttccataattaattttgataccatagtgtgtgaaccaagaataatctagtcacgtgaaacctcttctccagtcatagtatttctcattcattataataaaagtaactggcttttaaaaaaaaaaaaaaaaaaaaaa

SEQ ID NO: 116046 - DNA, 1000 bp, Homo Sapiens
gctcaactgctattaaacctctctggcttatagtctcttcattctattagacaagcacgtatcgaacacttgcttcgcacaaggctctttagttaacaatttagcagctactgtttgtgttaaacacacttttcaccaaataggttctgaggcaaacgagagcaatgactatttaaagaaaggctttcccagcatcacttacacatcccaaaactaaaaagatcaactcttccaactgagaaaagactcctggctttgaatggaaacttacagcagagagtcacaggccacggcaacaacaacgacaacaacaaacatttggaatattattctcaactcacgttttaataatacatcttattatttttctagtagagaaactacaaatcagcctcttcaacatttatatacagtttaataagcctcttgcaagttacttgttctctcacctgaggtatttttttcctccccaccttgcccctgttcctcccttcctcttctccctttgcaagaggaaatatttaacatatttgggtccaacttcaataatgtaataattaatacattaaaagcatttaacttcctttctagaaaaatgcacaggctaaggcatagacaaaacaaagagaaatgctgagaaatttgccactggagacaagcaatctgaataaatatttgccaaaagttctttttatgtcatatagtgtcaggatttgaaggagctatttttttttaatgttgcaactagcaactcatcttcggaagacacagccaggagaatgaagtagaagtgaaaggtttataaatccatttgtaagcatttatcccatatattttaaattcaagaaaaattgtgtttatctttagaattttgtattcaatactttatgtactatgtgactcatgcttctggataaataaagcaccaaatatgtatctgtaaccacaatcacacatattatattaaatatatatctataaaaaaaaaaaaaaaaaaaca

SEQ ID NO: 116047 - DNA, 1000 bp, Homo Sapiens
aaacagaggctgcaaaattcattttataatggctattttgtgacgataagatgtagttcatgtttttctgtagcactgggcccaaatattctttgtaaagaaaatcgctgcagcaaaaactgttactgtgtttattatatttgtagaagtattagaaaaatattctattttttattcagtgctgcgtaattacccatggtagccaaccctacaaaagacaggttttcacaaattgaggtggaggtgggcggttcagtatctgccactggacttgattataaactgtatttgaatatcagtggtattatcttttaagttgtcagcaagttaccaaggtattcattaaagaacttgtaatatcaaattactatttattcataacaattgatttgatgctaataataattttctttaaactctaccattcattatgtggtaactgtattgaacttactttatttggattttattttaatgtgactagatgtcaccacttcaaaaaatcaatttgttcttagaacctggttgaaaataccaggaaactgttacagacgccattttttttttttttgagacggagtcttgctctgttgcccaggctggagtgcagtggcacaatctcagctcactgcaagctccgcctcctgggttcacgccattctcccacctcagcttcccaagcagctgggactacaggtacctgccaccacgcctggctaattttgtttttgtatttttagtagagacggggtttcaccgtgttagccaggaaggtctcaatctcctgacctcgtgaatcgcccccctcggtctcccaaagtgctgggattacaggcgtgagccaccatgcccggcccaaatattttttattcaggatggtataacctaactgataataggtaataaggttaaatttttttatgacgtattttatttacaaatatcatacactgctggtgttaccatatgaaaggaaataaagtcaattgataattgcctc

SEQ ID NO: 116048 - DNA, 1000 bp, Homo Sapiens
gtacgagtgtagacactgggcccattggacgtgctgttaactactatcttcatttcccacttcccctctctgattgggggtgtatattttacatctttttttctttttattttcgaaggctttgttttggtttcttaggttaagatgctctcgagcgttgagcaggcacagctctgtcgaggtccctgtcccccacctgtggttctggcctctgaggttgggggactacttgtttcccaccccaggttcctccaggccaagtcatggggtgatgaggagttggggccctgtctgtcctaggcctggagagtgcctgtctgggaaaaggtcactggacctggaagggtccccagggtcccctgactcccgtctccatctgtcacgtggttcaccatcatcaggcaccaggcgcaaactgcttcccgctgttggccatcccttccccagccacaggtgtccctgcccccaggacagtccagggccaggggcttctgtgagaggcagagggggaccctcaccaaatcttggtggaagagcccaggggctggtcccagaacaggcagtctcacaagcacgcagcacactggagtggacgcctgtgcccacccgagcctggagcatggccaagagccagcttgcaccacccacctgggaggccgaggaggaggtcccctgggcacagggcctctttgggacttcagaggaaatctcccagtcccactctcggagggttaagagaaggcctcctgcagctgtgccgtccacacctctaggtcgccagagccctgcccccagcccccagcaagcctgagcccgggaagaaccagaggccctcccgagagacccagtcacacgtctctgctttaagccttagccagctagtgacgagtacaacgagataacgcccatgtgttttggaacatttatgtaagattgtcatatgaaatgtatttgggaactacattaaacttttaactaaaaaaaaaaaaaaaaaaaaaaa

SEQ ID NO: 116049 - DNA, 1000 bp, Homo Sapiens
ctgtcccatgatctggaccctgggactgtcttggcatcttaactgcagtttcaatgaggcagagggcaaagagagaccaagatcagaggggttcattatacccctggctagagaacccagctactgacatgcaagcagcttggggctggctggacacaggtactaggcccattgtttccaggtgaagctttcatcacagaacagtgttgtctccacctggccttagatggcacgccatgattcgggcctggatagactgcctgcgtccttaccactgatctggccaagaatgaggccctcccaacactttcactccctctccaagccttgatgggacctccacttatttaggcctcatgtgctttgaagaagctttgagagccaatgtgtcttccacgggtctcttttttgctacaagtaatcagccccatgtgttctcttaaactgagaattgcacctgggcaattcctgttttctaaggtggtctctgctgctatttaacaacccagagtaggcctctgtgaggcttcagtggcctcagaaaccagagggtccagatagggggcctgcttgggccctctgctgccaactgctcaaacctgctttagctccagccacttgtggcaaacaacctcgtttccttacaaattccagcatgtgactttggtgccgttacttgtgaaaaatctattctgttgtctttgatgtgtccaagaaaattcgtgtagtttacgtaaaaatatctgactcacaagaaagccaactgtatgtcttgtgatgggacagttcataatgtagttgctagaccactttacaaattgttcttgtcaccagatgtgttcagacattgctgtgcaattgttggggagggtagggggaaaggcgagaggagatacttattggtctttttgtttaataccttccccaagaggggacagtctggccaacttgctccagtaatgcaataaagacattgcaataaagtaaaaaaaaaaaaaaa

SEQ ID NO: 116050 - DNA, 1000 bp, Homo Sapiens
ctgtattttagaaaataggggttaagactgataacaaccttttacattgtgactgtgtttgcattgtctaatgacagataaatccttaacatttctctccaccttagtactttagactaattgtgtttgtccgtccatgccatgaatgagtgggctgtagttgggcctaaataaatgagctgttggaagaaaagaatcacagtactttccagcagtcagtccctggttcctagatgtgttctaagcaatgcaaatgtctaattgtcccccagtgggcatagtcagtgtcgtttatattgtagcagttacagctctgtagtttatgatgcaaatctgccaagagagatgtatgtgtcactgcatggcttctgaaagcaggatgaattttctgcagctgtttcaaagttggggtctgttcttgaatcctctattaattactgtgtgtgagccagagggagctgtggtaagggttgggcccccagcctgtagggaactttctggactcccactctttgaatcgatataggcatttggtctcactacttgaccattctcaccctgtgaaacgtcccacactttgaagcaaatacaattcacagcacagtacacacaaaaaccttggcataagacagagaaggttcttcttattttgtgggctggttgctgtagaaacatataacaaagggcagccctccacttctggtataattgtgtagccccttttctttgggcttgacacctgtcttgaataagagtgattagagctgcataatgtccctctcttggctattgaccatgtggttcacgtacaaaactctgtataagttgaaggaaaatgttcatgttcatatgtacttgtttgctatgactacattttgaggttttgtaaaactgttatttttttttttttcacaatgtgaaactgaaggtcaataaattattagagattttctcttcaaaaaaaaaaaaaaaaaaaaaaaaaaaaaaaaaaaaaaaaaaa

SEQ ID NO: 116051 - DNA, 1000 bp, Homo Sapiens
ttcagacaagggggaactgaaggctgacaagttctgaggattacagctctgcccaggccctttctactttccctgcctgcctccctccccctgctagaagtagtttctgatttccctgaatgaaagatagtgatcttttaggccttcatatatcttctaaaattcctcatctcaaggccaccagtccccagttatcacccttggaaatcctctgtttagcttagttgcacaaaaggtagtatgtccagtggctagaggtggggtgggaagagaggaggccaggccaggccctcaggaattccctggtttccactgggccacccacttgctggacagtctgagccaagtccctcctgctggagaaaagcctggaactgccaaaacaaaaaaacaaatacaaacaaacctcgtcaccacggtcaggaggaggttcagacattctgcccagaggggctggggaaagggatgggagccaggaaagatttaggggcaggagacagacacgtaacaggaactcggaaggtagaacttagaattcagaacttgggtttcaattgtagaatttggaatctggaatacagaattgggaagaagaacagagatgacaaaagaccacttgaagagaggttcctaatactagacagatggagagtggcttggctgtttccccctgcatattggggttgaaaacttaaatgtgtagttccagtccttctatgcagagtctctcctgccctccctccttcctgcaggcaaatatacaagctagaccctgttccctcaccctgtatcctgtctcccctaattgacattctatcagcccaaccctcattctgcagggccacctggtgtgtggaggtggcgggaggggtcagtgactctgggggtctcctcagtgacccccatacctcatcatgaacccttgggtagcttgattctgcctaccatccaggaaaacttgtgctggaattgctgatggaaacaattaaatatttactat

SEQ ID NO: 116052 - DNA, 1000 bp, Homo Sapiens
gcagcaggttagagcgagaatcagacagagggcaaaaaccaattcgcttctccccacgttctaaatgctggggcatggctgtcaggagggcttcctgggaggtgtctctgggggtggggtgaggttggggcgatggcctttggagattgcgtgtggtgttcaggactgttccttggtgtttgagggaaactttagtgggattgcagtggaatgtaaggtcagggcacgtgggtgctctctcggggtggggtgactgggagacctagagggaaagcctgctatgcagggggagagcacaggactggccctgctctgcggcctcctttgtcccataacctgaagttaagtcacatcccctgtcgggacctccgtgcactcatctgtcaagtgggggcgcttcccttccagcatcacctgcagcagacgggctctcgggagtcgtgggttccaggcagctgtgtggacccagggacagacattcaaagggacgccagccatccttagtgacaggggccccaacttagcatcccttcccttccgttaggaaggagatgaccggaagcaaccccttcacagacacgagcacatcggcaaaccctatgaaagtggaattttctaacaaaataaacttgcttgtttgatctgttttctgtaacttttgctaaatactttatacatttttcatgttaaagagccgtgtctcccgccagcactcctcaccccggtatgaatgtgtttcctccacattgtatatccttccaccctctggctgcctagatcagtaaataaaattgatgtaatataatttataagtaacactgttgaaaccctgatcccagtggaggctgtaacccacctgcccccgcaccacccccctgacccctgttaccgcatttgtgtgtattaatgctgaagaattaaatgtttaaagagtttaaattttgaaggcgtttgctatatacagttgtcctgcattattataaagagttttcaggaagtt

SEQ ID NO: 116053 - DNA, 1000 bp, Homo Sapiens
ggagggatgatctatactgggctgaagaactttgaaagagctctctacttttatgaacaggctataactactcctgccatggcggtcagtcatatcatgttggaatcatataaaaagtatattttagtgtctttgatattacttggcaaagtacaacagctaccaaaatatacatctcaaattgtgggtagattcattaagcctcttagcaatgcataccacgagttagcacaagtgtattcaaccaacaacccctcagaactccgaaacctggtgaataagcacagtgaaaccttcactcgcgataacaacatggggctggtgaagcaatgcttgtcatctctttataagaagaatattcagaggctaacaaagacctttttaactctatcattacaagatatggcaagtcgtgtgcagttgtctggacctcaggaggcagagaaatacgttctgcacatgatagaagatggtgagatttttgcaagtattaaccagaaggacggtatggtcagtttccatgataaccctgaaaaatataataacccagccatgcttcataacattgatcaggagatgctgaagtgcattgagctggatgagcggctgaaagccatggaccaggagatcacagtgaaccctcagtttgtacaaaagagtatgggctcacaagaagatgattcaggaaacaaaccatccagttattcttgaaactaacatccatcctgagctaaacaagagaaactaccatcttggccagtgacaagtgttcggagggcagcagagaggaccaagcctgtgtcacctggagactaagaaattaagttttgttttgacatcttcagtcctgtgtgctttcagaaaaccattttctctgcaaagaaaggaaacagatttgcaaactttaaagtctgtcgtggatttatttatcctcagattattgttactgcattaaatctacctttttgttttaagttgcttgaaaaaaaaaaaaaaaaaa

SEQ ID NO: 116054 - DNA, 1000 bp, Homo Sapiens
ccacggccgagaagtggcgcttccgcctctcctacgacatcgtggcctttgcccagaacgcctgccagcaggtgctggcccagctgggctacaagatcgccgcctcggaggaggagctgaagaacccctcggtcagcctggtggaggagcgggacttccgccccttctcgtgacccgggcggtgcgggtgggggcgggaggcgcaaggtgtcggttttgataaaatggaccgtttttaactgttgccttattaacccctccctctcccacctcatcttcgtgtccttcctgcccccagctcaccccactcccttctgccccttttttgtctctgaaatttgcactacgtcttggacgggaatcactggggcagagggcgcctgaagtagggtcccgccccccccaccccattcagacacatggatgttgggtctctgtgcggacggtgacaatgtttacaagcaccacatttacacatccacacacgcacacgggcactcgcgaggcgacttctcaagcttttgaatgggtgagtggtcgggtatctagtttttgcactgtcttactattcaaggtaagaggatacaaacaagaggaccacttgtctctaatttatgaatggtgtccatcctttccccatccctgcctcctgcccctgacgcccatttccccccttagagcagcgaaactgccccctcctgcccgcccttgcctgtcggtgaggcaggtttttactgtgaggtgaacgtggacctgtttctgtttccagtctgtggtgatgctgtctgtctgtctgagtctcgtggccgcccctggaccagtgatgactgatgaatcttatgagcttctgattgatctcggggtccatctgtgatatttctttgtgccaaaaagaaaaaaaaagagtggatcagtttgctaaatgaacattgaaattgaaatgctttatctgtgttttctgtaaataaaagagtgcaataatcgaaaaaaaaaaaaaaaa

SEQ ID NO: 116055 - DNA, 1000 bp, Homo Sapiens
tccagttgtgtaccaaggatgattgcttcaatgttaatattcagccacctgttggagaactgcttttacctgtggccatgtcagagaaagattttaagaaagagcaaggagtgctaacaggaatgaatgaaacttctgctgtaatcattgctgcaccacagaatttcactccctctgtgatctttcagaaggttgtaaatgtagccaatgtaggtgcagtcccttctggccaggataatatacacaggtttgcagctaaaactgtgcacagtgggtcattgatgctagtcacagtggaactgaaggaaggctctacagcccagcttatcataaacactgagaaaactgtgattggctctgttctgctgcgggaactgaagcctgtcctgtctcaggggtaacctgcttacatctggactttagaatctggcacacaacaaaagtgcctggcatccactactgctgcctttcatttataataatagcccttccatctggcagtgggggtagaatacactcttgacattcttgtctcctgctttagaatgctagtgtgtatctatcatgtatgcaatactttccccctttttgctttgctaaccaaagagcatatattttactgtcagttgtctcaactcttgaatccatgtggcgttttctctgtcctgctgcttcttttggcctcctcgttttccttctctttttcgacaatggtagacatgaatgagatatttaaagttcattggaaatcttcttccctacagcagtaagcaaaaattagcaaagagatagtctaaatggcctctcagcttggtatgtgaaaatgagatcacatactttttaaatccaaatacaaaagcatagtctctgcaagattttgttctttgaatttcttgatattgtaattgattattgataactgtcatcatgaaattatctctcaataataagataaataaactagcatatgaatcataaaaaaaaaaaaaaaaaaaaaaaa

SEQ ID NO: 116056 - DNA, 1000 bp, Homo Sapiens
tgcctgcctgaagacccaggaacaccccagctgcccaggacccagggaactggaagccagcaaagttgtcctcctgcccagttgtcccggagctccaggaagtcctggggagaagggagccccaggtcctcaagggccacctggaccaccaggcaagatgggccccaagggtgagccaggagatccagtgaacctgctccggtgccaggaaggccccagaaactgccgggagctgttgagccagggcgccaccttgagcggctggtaccatctgtgcctacctgagggcagggccctcccagtcttttgtgacatggacaccgaggggggcggctggctggtgtttcagaggcgccaggatggttctgtggatttcttccgctcttggtcctcctacagagcaggttttgggaaccaagagtctgaattctggctgggaaatgagaatttgcaccagcttactctccagggtaactgggagctgcgggtagagctggaagactttaatggtaaccgtactttcgcccactatgcgaccttccgcctcctcggtgaggtagaccactaccagctggcactgggcaagttctcagagggcactgcaggggattccctgagcctccacagtgggaggccctttaccacctatgacgctgaccacgattcaagcaacagcaactgtgcagtgattgtccacggtgcctggtggtatgcatcctgttaccgatcaaatctcaatggtcgctatgcagtgtctgaggctgccgcccacaaatatggcattgactgggcctcaggccgtggtgtgggccacccctaccgcagggttcggatgatgcttcgatagggcactctggcagccagtgcccttatctctcctgtacagcttccggatcgtcagccaccttgcctttgccaaccacctctgcttgcctgtccacatttaaaaataaaatcattttagccctttcaaaaaaaaaaaaaaaaaaaaaaaaaaaaa

SEQ ID NO: 116057 - DNA, 1000 bp, Homo Sapiens
ttattgtcgacgtgactcaccagacgtcggggagagagagcagtcagaccgagctttctgctaacatggggaggtagcaggcactggcatagcacggtagtggtttggggaggtttccgcaggtctgctccccacccctgcctcggaagaataaagagaatgtagttccctactcaggctttcgtagtgattagcttactaaggaactgaaaatgggccccttgtacaagctgagctgccccggagggagggaggagttccctgggcttctggcacctgtttctaggcctaaccattagtacttactgtgcagggaaccaaaccaaggtctgagaaatgcggacaccccgagcgagcaccccaaagtgcacaaagctgagtaaaaagctgcccccttcaaacagaactagactcagttttcaattccatcctaaaactccttttaaccaagcttagcttctcaaaggcctaaccaagccttggcaccgccagatcctttctgtaggctaattcctcttgcccaacggcatatggagtgtccttattgctaaaaaggattccgtctccttcaaagaagttttatttttggtccagagtacttgttttcccgatgtgtccagccagctccgcagcagcttttcaagatgcactatgcctgattgctgatcgtgttttaactttttcttttcctgtttttattttggtattaagtcgttgcctttatttgtaaagctgttataaatatatattatataaatatattaaaaaggaaaatgtttcagatgtttatttgtataattacttgattcacacagtgagaaaaaatgaatgtattcctgtttttgaagagaagaataatttttttttctctagggagaggtacagtgtttatattttggagccttcctgaaggtgtaaaattgtaaatatttttatctatgagtaaatgttaagtagttgttttaaaatacttaataaaataattcttttcctgtggaag

SEQ ID NO: 116058 - DNA, 1000 bp, Homo Sapiens
aaatcgtcggcggtcaggagcctggagaggaagacacacagaatgatctgaaagttcatgaggaaaacaccacaattgaagagttagaggcgcttggagagtccttagggaaaggcgatgatcataaagacatggacatcatcaccaaattcctgaagtttcttcttggcgtttgggctaaagaattgaatgccagagaagattatgtgaaacgcagtgtgcagggtaaactgaacagtgcgacccagaaacagaccgagtcctacctaagaccactttttagaaagctacggaaaaggaatcttcctgctgatattaaagaatcaataacggatattattaaattcatgttgcagagagaatacgtgaaggcaaatgatgcttatcttcagatggccattggaaatgcgccttggcccatcggtgtcactatggttggtatccatgccagaactggcagagaaaagattttttccaagcatgttgcacatgttttaaatgacgaaactcagcggaaatatattcagggattgaagaggttaatgaccatttgccagaaacactttcctacagacccatccaaatgtgtggagtacaatgcactgtgagatctgtgtatggtgtgttaataacaataagaaacttagggaagcaggctgtggacttctggaattaccaacaggaatgaggaaagaagaaaactggagtttccagtctctgagttctacctgatgtaactcttgattggttttaagaactttgttggccttcatttcatatctgactgcaagctgatttttctttcttgctttcattttaattagtccaaaattaagttttaaagatttttcctcacaatttaaatccatagacaacagaagggggtttaaaatgacctttttttcagttgacccgaaagttgtggttagatgattaaaaagaaacatttgaggatggacttaattatttcagtaaaatattataatttgcaaaaaaaaaa

SEQ ID NO: 116059 - DNA, 1000 bp, Homo Sapiens
ttttagacatttatcgtcatcatctgctctgagtggaaggccgttcagagaggctagaggttcttattctggctataaattatgtgagtaaaattgtgctaaccagttaaaagtactgtacacccatgctcaatatatagtcctggaaatagcaattgaaacatgtcttctcacaagagaaaatgacagttttaatgatgtatttgatgaatttaaactttaagtcaggtgctgcaaattggaaagaagacttgtggtgttttaagttgctgtggacacttttaagaaacttagaacccatggaacccttgtttatcgccatgcaaattacaatcttgaatgagtgttttttaaaaataaagtattagaaaaatgtgtagtaaagatgtaaaattaaaaaatggaattctccattaactgtggattttactaaatagaattactggtgaagcagatttatccatcgagactatctggtatgcgttatgtatgtagtctgttgctgctgaaagatgtctgtgtgcctgtatcaacatgtgacttcatgtaaagtttctttgtgttcacagttcttagcaaatgcagttacaatccatagatagccagcagtggatgttactccaggaaaatgcaggattaaaattgtccttgtgtataacgtgtgaatcatttttttaaactgaaatttaaaatgcaacatagtttaatctctgattaaaatgtactaatagggccaagctgctttgatgcatggctataatcccagccgaggtgggaggatcacttgagtccaggttcaagactagcctgggcaacatggcaagaccctgtccctataaaaaatacaaaaattagccaggcatggtggcgtgcgcctgcagtcccagctacttgggaggctgagttgggaggatcacttgagcctgggaggttgaggctgcagtgaactgagatcacgacactgcactccagcctgggcaacagtaaaacctggtctcca

SEQ ID NO: 116060 - DNA, 1000 bp, Homo Sapiens
tccaacaggaaacccatttctggtgggatatgccttccagtgccacagggccactcaccccatgcatctctgtcctgcccgtcagtgctgggacggacagcaagggcaagcccagtgtctggcggataggtgggtgggaacagagaggggagaatgccgtcctaagcttctgcttggggatcccccacacgacctgggtactgcctgggaaacctgtcctaagtaaaactatggacctcgcctcgcccaccggcctgcgaagccagcatctccgtgaaggtggatggaagcgcctttgtcctcattttgagctgcaagctgggtcagcggctctgaagccctcgagtgactttctaacccaagacccagcccctggcaggaggagggtgggtgcagggctggtgggacaaaaagaggcctcagcaggcctggaagacccttccagtacatcccacagcgtgtcgagcagctgggagaacctgtgtcaagctcgagccgtcataggtccccatgaggtgtctgaagccccttcttggtgatgggaggcagaggtgctgacgttctggagcatggacgtgagtcctcagctggctccgcgtgggcccttggagggtgccaggtgtgtggtgaccttctggatgcctttaacttcatggctgcgtcattcctgatttagaactttaaccggagcttcatctagtgattgcaaaactggaccaatgggaggacggcggcgcagcccgctccctccgtggaatggagctcagctcttcggaggcatcaaagcacctgtcgcctccgtggtccccctgctgagggagtgcggcctctgcaaggttcgggggtggcttcgtttgcctggagtggccggccctgcttgtgccatgtggatgtttgtgagcctcggtcctacagcactgtgtaggctgcatctgtttcgtgctggtcctgttgacttgtatgatatccacaaataaatattttcatggcggtaaaaaaa

SEQ ID NO: 116061 - DNA, 1000 bp, Homo Sapiens
acaagacaccaatggcccacgaaatctgctactccgtattatgtctcttctcgtacgtggctgcagttcatagcagtgaggaagatctcagaaccccgccccggcctgtctctagctgatggagaggggctacgcagctgccccagcccagggcacgcccctggccccttgctgttcccaagtgcacgatgctgctgtgactgaggagtggatgatgctcgtgtgtcctctgcaagccccctgctgtggcttggttggttaccggttatgtgtccctctgagtgtgtcttgagcgtgtccaccttctccctctccactcccagaagaccaaactgccttcccctcagggctcaagaatgtgtacagtctgtggggccggtgtgaacccactattttgtgtccttgagacatttgtgttgtggttccttgtccttgtccctggcgttataactgtccactgcaagagtctggctctcccttctctgtgacccggcatgactgggcgcctggagcagtttcactctgtgaggagtgagggaaccctggggctcaccctctcagaggaagggcacagagaggaagggaagaattggggggcagccggagtgagtggcagcctccctgcttccttctgcattcccaagccggcagctactgcccagggcccgcagtgttggctgctgcctgccacagcctctgtgactgcagtggagcggcgaattccctgtggcctgccacgccttcggcatcagaggatggagtggtcgaggctagtggagtcccagggaccgctggctgctctgcctgagcatcagggagggggcaggaaagaccaagctgggtttgcacatctgtctgcaggctgtctctccaggcacggggtgtcaggagggagagacagcctgggtatgggcaagaaatgactgtaaatatttcagccccacattatttatagaaaatgtacagttgtgtgaatgtgaaataaatgtcctcaactccc

SEQ ID NO: 116062 - DNA, 1000 bp, Homo Sapiens
agttgtgcagggaattcagctccagtaaggcctggattgcccggggtgagcgtgtgtgtggtgggaagacctggcttccgcgagagccttgttcctggaggcaggagcgccccgccatcctgggtacccgcgggtccgcaggctgcgcacctctttccctcagccaggtcaccctcagcgtcctccctgcccctctccccttcacacctgctggagcctgtgagggaggtggcgggtccccactgtggcgacggagagctgacagtagcccagggctttccacctgcatggaacaagggcctgtctgccgccagcgctgtggccacagcctgcataggtgacaaggggccgctgcgttgggttttgcccgcatcttctgttccatgggtgcccagccagccaggccgtgtgggatccagcgagaggccagggcttggagtgggcctgggaccaggaaggacctctaggctgtggctggccttgtgcagaccctggactgcatccggttccccaaagccctgctgcattcgagtgtcccccaaccccgggcaggtggcacctggtgacacctccttcagtcccactcagctgggcggccggggcaggcttagggcacagttaggggccaaggagagggaaggccagggcccctgttctaggggttagggttctttccccaaaggaacttaaaaagacaagcgtggccaggcacagtggctcacacctgtaatcccagcactttgggaggccgaggtggccagatcacctgaggtcaggagtttgagaccagactgaccaacatggagaaaccccatctctactaaaatacaaaattagccaggcgtggtggcacatgcctgtaatcccagctactcgggaggctgaggcaggagaattgcttgaacctgggaggcagaggttgtggtgagctaagatcacgccattgcactccagcctgggcaacgagagggaaactctgtttcaaaaaaaaaaaaaaaaa

SEQ ID NO: 116063 - DNA, 1000 bp, Homo Sapiens
caactccaaacaaagcaagccaaggttccactctggtgcaccctttcagagcgcttgggaagaactcggaactgctcgtggtgtctgctagagaggatgtggccacgtggcagcagagcagcctctccctccgctgggcgagtagactgagggccccaacttcgacagaggccaatcacatccgactgtcctgcctggctgtgggcctggccctgctgaagcgctgcgtgctcatgtacgggtccctgccatccttccacgccatcatggggcctctccaagccctcctcacggatcacctggcggactgcagccacccgcaggagctccaggagctgtgtcagagcacactgaccgaaatggaaagccagaagcagctctgccggccgctgacctgtgagaagagcaagcctgtcccactgaagcttttcacaccccggctggtcaaagtcctcgagtttggaagaaaacaaggcagtagtaaggaggaacaggaaaggaagaggctgatccacaaacacaagcgtgaatttaaaggggccgttcgagaaatccgcaaggacaatcagttcctggcgaggatgcaactctcagaaatcatggaacgggatgcggaaagaaagcggaaagtaaagcagctttttaacagcctggctacacaggaaggcgaatggaaggctctgaagaggaaaaagttcaaaaaataaattacattttataaataagctccccccacccgctgcctgcggttttgtttctgttaaaacgtcacctgatgaaatagaatgaatcctgaaatgcacctctgggatcgggaatggtctgtgtgttatcagctgcgactggttcactgcgtctggacaagcctcatggggactggggattctggccagtgtaatttctgtcaaccacggacgtttgccttcatgtgtagaatttactgttgttatgcaaattatattttcaattataaatgaaaaaaaaaaaaaaaaaaaaaaaa

SEQ ID NO: 116064 - DNA, 1000 bp, Homo Sapiens
gtgagcatcagcagaacagcaagctggtgctggcagagtcccctcagccaaagggcaagaacaagaaaaataagaagaagaaaggagacagagtcaacaattcaattgatgatgtctttctacctaaagatattgacctagacagtgtggatatggatgagacagagagggaagtggaatatttcaaaaggttctgcttggattctgctagacagacccgacaaagactgtctatcaactggtccaattttagcttgaaaaaagccacctttgctgcccactgaatgaggactccctggagagggacacgcgagaggcaggccaggctgcaccaccccaagagccacgcccctcgctggcgccccagagccgtggtgcttgccaagggctgtgcggagctggtgctgcctgaaaccccagaccgagaagttgatgctcggcccacgccgttagctcgtgtgcgtgtagtctgtgcgtgagactccttcgattgtagctctgtgctgtcggattggaacagtagttcccgccaagtcctcccaccaccgcggcctcggaggcctgggccgtggccagataggagtttgcatcatccacgtggctccgttgcctctgcattgcgccctgtcctgtcatgtgtcctcaccggggtatcggccgtcactcagctctcctgtgcccctgcgtctcaccctaggcgggctgggcggggcaggcctcctttgttctccacaatctactgtctccgagtgtacacgttgcgctgtttgtgtttgatccccctgacttgtagccagcttgtgtaagatcccttgcagaacgagaaagttaaaaacaagcccacccagtactcacaccatcaagtctgttatagagtgtacgactgtattaacacggaggcctgcctggctacttttttaacatattgttaagtaatattaaaatcatgtctttctttttgaaagatggaatacattagtacagcaggagaaaaaaaaaa

SEQ ID NO: 116065 - DNA, 1000 bp, Homo Sapiens
caagaacaactttgaggaagagcagcagtgcctcgagtcttgtcgcggcatctccaagaaggatgtgtttggcctgaggcgggaaatccccattcccagcacaggctctgtggagatggctgtcgcagtgttcctggtcatctgcattgtggtggtggtagccatcttgggttactgcttcttcaagaaccagagaaaggacttccacggacaccaccaccacccaccacccacccctgccagctccactgtctccactaccgaggacacggagcacctggtctataaccacaccacgcggcccctctgagcctgggtctcaccggctctcacctggccctgcttcctgcttgccaaggcagaggcctgggctgggaaaaactttggaaccagactcttgcctgtttcccaggcccactgtgcctcagagaccagggctccagcccctcttggagaagtctcagctaagctcacgtcctgagaaagctcaaaggtttggaaggagcagaaaacccttgggccagaagtaccagactagatggacctgcctgcataggagtttggaggaagttggagttttgtttcctctgttcaaagctgcctgtccctaccccatggtgctaggaagaggagtggggtggtgtcagaccctggaggccccaaccctgtcctcccgagctcctcttccatgctgtgcgcccagggctgggaggaaggacttccctgtgtagtttgtgctgtaaagagttgctttttgtttatttaatgctgtggcatgggtgaagaggaggggaagaggcctgtttggcctctctatcctctcttcctcttcccccaagattgagctctctgcccttgatcagccccaccctggcctagaccagcagacagagccaggagaagctcagctgcattccgcagcccccacccccaaggttctccaacatcacagcccagcccgcccactgggtaataaaagtggtttgtggaaaaaaaaaaa

SEQ ID NO: 116066 - DNA, 1000 bp, Homo Sapiens
ggcgcgggggctcggagacagcgtttctcccggaagtcttcctcgggcagcaggtgggaagtgggagccggagcggcagctggcagcgttctctccgcaggtcggcaccatgcgccctgcagccctgcgcggggccctgctgggctgcctctgcctggcgttgctttgcctgggcggtgcggacaagcgcctgcgtgacaaccatgagtggaaaaaactaattatggttcagcactggcctgagacagtatgcgagaaaattcaaaacgactgtagagaccctccggattactggacaatacatggactatggcccgataaaagtgaaggatgtaatagatcgtggcccttcaatttagaagagattaaggatcttttgccagaaatgagggcatactggcctgacgtaattcactcgtttcccaatcgcagccgcttctggaagcatgagtgggaaaagcatgggacctgcgccgcccaggtggatgcgctcaactcccagaagaagtactttggcagaagcctggaactctacagggagctggacctcaacagtgtgcttctaaaattggggataaaaccatccatcaattactaccaagttgcagattttaaagatgcccttgccagagtatatggagtgatacccaaaatccagtgccttccaccaagccaggatgaggaagtacagacaattggtcagatagaactgtgcctcactaagcaagaccagcagctgcaaaactgcaccgagccgggggagcagccgtcccccaagcaggaagtctggctggcaaatggggccgccgagagccggggtctgagagtctgtgaagatggcccagtcttctatcccccacctaaaaagaccaagcattgatgcccaagttttggaaatattctgttttaaaaagcaagagaaattcacaaactgcagctttctaaaaaacaaaaaaaaaaaaaaaaaaaaaaaaaaaaaaaaaaaaaaaaaaaaaaaaaa

SEQ ID NO: 116067 - DNA, 865 bp, Homo Sapiens
tgcttccgcggcggttggggtggtggggccccgggcggcgttgaccatgacccagcagggcgcggcgctgcagaactacaacaacgagctggtcaagtgcatagaggagctgtgccagaagcgggaggagctgtgccggcagatccaggaggaggaggacgagaagcagcggctgcagaatgaggtgaggcagctgacagagaagctggcccgcgtcaacgagaacctggcacgcaagattgcctctcgcaacgagttcgaccggaccatcgcggagacggaggccgcctacctcaagatcctggagagcttccagactttgctcagcgttctcaagagggaagctgggaacctgaccaaggctacagccccagaccagaaaagtagcggcggcagggacagctgaccagaccacgggcagggcctgcctccgtgtgcccctcagctcagccccagcaagtgtgtgctcagagcatctttgttcttcacggcagcagctaccttccctcactgtctcaggtgccgagaggggcaggtgccagcctccactggcatcagtgacaagcccaggcacagcccacccgggggtcctcgcttcatgctcacacaggctatggggatggtgggctccaggtcagctctgcaaggggcttgtctctgtggcacccacactcctgccctgccagggaggctctggttgtctgagcaccatgggggccccctcaccttgtccctcctcagccagcagaggcccagggcaagggacaggaggacaggggttctccttcaccacagaacccaaacctcaggtctcacccctgtggcctgtgattatgaataaagattatctttgtaaaaaaaaaaa

SEQ ID NO: 116068 - DNA, 1000 bp, Homo Sapiens
gtatctactggaccaagtactacacactccacaatgcaatcattgaggattgtgtcagaaaacagctcaaaaaagagaggcccatcatcctggatccggccgaccccaccctcaacgtggcagaagggtacagatgggacatcgttgctcagagggcctcccagtgcctgaaacaggactgttgctatgacaacagggagaaccccatctccagctggaacgtgaagagggcacgagacatccacttgacagtggagcagaggggttacccagatttcaacctcatcgtgaacccttatgagcccataaggaaggttaaagagaaaatccggaggaccaggggctactctggcctgcagcgtctgtccttccaggttcctggcagtgagaggcagcttctcagcagcaggtgctccttagccaaatatgggatcttctcccacactcacatctatctgctggagaccatcccctccgagatccaggtcttcgtgaagaatcctgatggtgggagctacgcctatgccatcaaccccaacagcttcatcctgggtctgaagcagcagattgaagaccagcaggggcttcctaaaaagcagcagcagctggaattccaaggccaagtcctgcaggactggttgggtctggggatctatggcatccaagacagtgacactctcatcctctcgaagaagaaaggagaggctctgtttccagccagttagttttctctgggagacttctctgtacatttctgccatgtactccagaactcatcctgtcaatcactctgtcccattgtctactgggaaggtcccaggtcttcaccagttttacaatgagttatcccaggccagacgtggtagctcacacctgtaatcccagaactttgggaggccgaggtgggaggagcgcttgagccgaggagttcaagaccagcctgggtatcacagggagaccccgtctctacaaaataaaaaaataattcactgggaaaaaa

SEQ ID NO: 116069 - DNA, 1000 bp, Homo Sapiens
ttttcagtcaagttccgtctcctctccagccctatggaagtctcaaggtcacgggacccctaatcagagtggccaatccctgtgtgtcgttcccttgtgtctgttgcttattgggagtaggagttgctcctacccctgtcctggggctgggtgtgtttcaggacagctgcttctgtgcatttgtgtctgcctgcctcatgctctctatagaggaggatggtcatcgtgacagcagcagctcaagttagcatttcaagtgatttgggggtgcaatgataatgaagaatggccattttgtaccagggctctgtattctgcaacagcctgtttgggaggctggagtggaaacaaagggtgggcatcaaagatgagaagccaaagcccctacaactccagccacccagccaggaggggctgtccaatcacattcaggcatgcgaatgagctgggccctgggtgaggtgggggtctggcctagtggggaggggcctggcctgggtggggcagggcctggcctggtccaggcttgggctccattcccatcactgctgtccctcctgaggtctggattggggatggggacaaagaaatagcaagagatgagaaacaacagaaacttttttctctaaaggactggttaaatcaattctgatacagccttacaatacaatagtatgcagctaaaaaataattgtatgtctttatatactaatatgtaataatcttcaggtgaaaaaggcaagccacagaaatgtgtatagcgcacttcccatttgtgtttcagaaaggagtagaatataaacacataattgcttatgtatgcctattcagaataaatgggtaacactgattacttttgggaggggaaccagtaggttgaggacaggagagggaagggtcttaacacttacacccttttgtacattttgaattttgaaccatgtgactgtattacctattcaaaataaacaataaatgggcccaaaaaaaaaaaaaaaaa

SEQ ID NO: 116070 - DNA, 1000 bp, Homo Sapiens
cagccttcctggggggctgtggcctgagccctgcacccactggggactatggcttcccagcagatggcaagccatgtgtggcaggtgcgctgacagccattgtggccggcgaggaggagctccgtggcagctataactgggactacctgctgagctggtgccctcagttccaaccactggccagtgtcttcacagagatcgctcggctcaaggatgaagctcggccatgtcccccagctccccgtatcgacccaccacccctcatcactgccgtggcccacccaggagccaagtctgtgccccccaagccagcaaacacagctgcagcccgggccatcttcccaccagcttctcaccgctcccccatcagccatgaaggctccctgtcctcagctgccatgtcccccagcttctcaccctctctgtctcctctggctgctcgctcacccgttgtctcaccatttggggtggcccagggtccctcagcctcagcactcagcgcagagtctggcctggagccacctgatgacacggagctgcacatctagctgtggcccaggctgggccccgacctgggatgcgcacagtgtccccaacgcaggccccactctgagcctgccctgggcagcctcggactatgactggctacggggaggccaccaccaggccccagctctccaccctgaactccccagccccctcagagtactaggaccacagaagccctgttgctcactgacctgtgaccaggtccaatgtggggagaaatatgaaggaggtagcagccctgggttctcctcagtgagggatccctgccctgcaccagcaccctgagatggagctgagactttatttattgggggtagggggatggaggaggtccctccaacatgtttggacccagctcctttgggttccactgacacccctgcccctgcccctgcccagaaccaagtgccatttctcactctggagccttaataaactgcaatttgtatcc

SEQ ID NO: 116071 - DNA, 1000 bp, Homo Sapiens
cgggatatctttgaaacagaacagattacactagatgtgttggctgatatgggtcatgaagagttgaaagaaataggcatcaatgcatatgggcaccgccacaaattaatcaaaggagtagaaagactcttaggtggacaacaaggcaccaatccttatttgacttttcactgtgttaatcagggaacgattttgctggatcttgctccagaagataaagaatatcagtcagtggaagaagagatgcaaagtactattcgagaacacagagatggtggtaatgctggcggcatcttcaacagatacaatgtcattcgaattcaaaaagttgtcaacaagaagttgagggagcggttctgccaccgacagaaggaagtgtctgaggagaatcacaaccatcacaatgagcgcatgttgtttcatggttctcctttcattaatgccattattcataaagggtttgatgagcgacatgcatacataggaggaatgtttggggccgggatttattttgctgaaaactcctcaaaaagcaaccaatatgtttatggaattggaggaggaacaggctgccctacacacaaggacaggtcatgctatatatgtcacagacaaatgctcttctgtagagtgacccttgggaaatcctttctgcagtttagcaccatgaaaatggcccacgcgcctccagggcaccactcagtcattggtagaccgagcgtcaatgggctggcatatgctgaatatgtcatctacagaggagaacaggcatacccagagtatcttatcacttaccagatcatgaagccagaagccccttcccagaccgcaacagccgcagagcagaagacctagtgaatgcctgctggtgaaggccagatcagatttcaacctgggactggattacagaggattgtttctaataacaacatcaatattctagaagtccctgacagcctagaaataagctgtttgtcttctataaagcattgctatagtg

SEQ ID NO: 116072 - DNA, 1000 bp, Homo Sapiens
caggtgtccagggtaaagtgtaactcagactgacctgtggggcacagggggcaccagctggccttgccctctctggtctgggctgtctaccttcctcactgtatctttgcccagacccacctgggccagtaggcccctgtccccagccacacaccttagatgctggcatgccttactccaggtgcctgtgtttggccgaggcctgtgtgattcccggtctgcaccacatggcggggttggggggccgctggaggccacctgccaaggcgtgggatgggatggtcctgccggtttaggccgtgattctggaaaaccttggatgggccttcgtcctatgtcagccttccctttgatcctcaggccctacctgtagagacctccactcctagagccagtctcagggtctgggatttccctgcaggagctcagccaccactgtgccatggtgacacaggccaaggcagacattggccctcccttctcccagcccccagaggcctggccttgggttcgtcagcatgggccgaggacgttgcctgtagaatcctcctctgcctgggagtggctctgtgtggaccagtccctcactggcccattctttttttgacgcagccaatctgtgaccacgattcctcccacagatgcctcctgcttggattctgagtggtcagagatctgtaaagcatgactttcaaggatggttcttaggggactgtgaaagtgttgggtcttcctccaggatgcctgcatgggaccccacccggagctggtgtggccattccccaagtgccactggcccatggatgggggtgggtgctggtgccagctgggctgggtgtgggttctgtgtccttccaggatatgtgtcatttcccatgaggggccggggcaggtggctgggtgggggcacaggctggagtattcttagttctactggttctacactgtgaggtggcaatgggatttgctcagatgccacccaataaaatgcctgttactt

SEQ ID NO: 116073 - DNA, 1000 bp, Homo Sapiens
tagatatctatcgctatagaataatgcattaataaaatgaggcttttttagaggaagaccaaaaaattcaatgtcttaaaaatatatttaatggcaatgcaaaagtcttcctgcttccgtgctgaactttagaacagaggattgtattgcaagacaaagttgaatgtaaagtgatctccctgaacatttttaaggttttacttttctgaaattatacatcacagcagtgcataggccatataatgttagctggaaggtcaatttcagtgtatgatatactttattaagatgtataaaaatcctgaagtttttatttagttttgggaataggcatcaatgggtggtatttgctttgtaactccccccaggtacgatagggactgaatatggaccctgctgaaagcagtgtattgacgcatatttaactcgccctctatccgtagagtagtcatgacactatacagatggttcgtgttcatactgcagcttaaaacaagcaaaatacacagatgataatatgctaaattttcctctatcctgtacatttcacaaaaaggcatatgcaatatttacatttttaatttagtttacagaatggaaccaaaatgtataaatgttatgtttgctaaaacttcacaatgtatattgggtctttgtacattttgcctgacttaccttaaatttaaaatattttttgctatataaactttaacagttattaaacagtgttttctttttgggtacgtattgtttctggatatcaagatgttaaatatatttcttgctattgtgatatgacaagagacttaacttatcttgctctgtcttccactgtacacgctgtatataggggtcaatgtgatgctgctggagacgagaataaactggactagaatagtgcattgtatttagtctgtattgatcatggatgccctccttaatagccatatgcaataaaataaagtacattatttatgaaatgaaaaaaaaaaaaaaaaaa

SEQ ID NO: 116074 - DNA, 1000 bp, Homo Sapiens
attgtcgtccagagagttgggtccaaactcttctttgacaagagagacaactctgactttgacctcctgacagtgagtgagactgccaatgagccccctcaagatgaaggtaattccttcaattcaccccgcaacctggccatggaggcaacctacatcaaccacaatttctcccagcagtgcttgagaatggggaaggaaagatacaacttccccaacccaaacccgtttgtggaggacgacatggataagaatgaaatcgcctctgttgcgtaccgttaccgcaggtggaagcttggagatgatattgaccttattgtccgttgtgagcacgatggcgtcatgactggagccaacggggaagtgtccttcatcaacatcaagacactcaatgagtgggattccaggcactgtaatggcgttgactggcgtcagaagctggactctcagcgaggggctgtcattgccacggagctgaagaacaacagctacaagttggcccggtggacctgctgtgctttgctggctggatctgagtacctcaagcttggttatgtgtctcggtaccacgtgaaagactcctcacgccacgtcatcctaggcacccagcagttcaagcctaatgagtttgccagccagatcaacctgagcgtggagaatgcctggggcattttacgctgcgtcattgacatctgcatgaagctggaggagggcaaatacctcatcctcaaggaccccaacaagcaggtcatccgtgtctacagcctccctgatggcaccttcagctctgatgaagatgaggaggaagaggaggaggaagaagaggaagaagaagaggaagaaacttaaaccagtgatgtggagctggagtttgtccttccaccgagactacgagggcctttgatgcttagtggaatgtgtgtctaacttgctctctgacatttagcagatgaaataaaatatatatctgtttagtctttccctcaaaaaaaaaaaaaaa

SEQ ID NO: 116075 - DNA, 1000 bp, Homo Sapiens
ccgaggatgccttctacaaatgggagagcagcaaggaccctgcagagcagaatgggaagggcgtggctctgaaatctgtcacggcattcttcacgtggctgcgggaagcagaagaggagtctgaggataactaaaacttcaaatacacaaaatgaaacaaaagaaacaatttaagtatttttttaaaaagtttcacgtcttcgccaatcacagtgcagcaaggccaattctcgcagaaaccccacgtgtgcacgagtgggagaggggaaagagaaaaaaaggtgtacatggaggaaaaaggtactggataaaagtaaacttcaaaccttagggcgggagcactaaaaccaaaatacatgtattatttatagaaaatattttctgttttaatcttttctttttaaacaaggactcatacttaaaaaaatgtttagcaaaaaaaaaaaaaagttgagaacttttaatttattttaaggactgcaaatgccagtgtaattttttaatttgcagtttctgtaaacaactgtataatagaaaagcagagaaataaatttccctccccttcaagatgcacctcatgtttgttttaaggtatagcatttagtccagatttgagaaagtttggggtgaacaaggtaagaaagatttttttttttttggcatcaaatctttctgcctgcctctcagcttgcttcagaaaatttaaaaaatcacaatagtaatcaaaacatacataacattgaaacagaaggaaatgctgtggaccacagaactccaagaattgtttaaaaaaaaaaaagtgctaccctgagaaaagtactcttaatatctcttgaaatctttagagcaactttaaggcttgtaaatacatagaacaaatatttaaaaaaacaaaaagaaattgactcagtactatttcttttcactttgaaaatataaagaacaaaataaagacaaacattgcaagtttaaaaaaaaaaaaaaaaaaaaaaaaaaaaaa

SEQ ID NO: 116076 - DNA, 750 bp, Homo Sapiens
atgtctctcgaagaccccttttttgtagtccgaggcgaggtgcagaaggcggtgaacacggcccgcgggctgtaccagcgctggtgcgagctcctgcaggaaagcgcggcggtcggacgcgaggagctggactggacgaccaatgagctgcggaatggcctgcgcagcatcgagtgggacctcgaggacctggaagagaccatcggtatagtggaagccaacccaggcaagttcaagctcccagccggggacctgcaggagagaaaggtgttcgtggagcggatgcgagaggcagtccaggaaatgaaggaccatatggtcagcccaacagccgtagcatttttggagaggaataacagagagatactcgcaggcaagccagctgcccagaagtcacccagcgacctgctggatgccagcgcagtctcggccacatctcgctacatcgaggagcagcaggccacacagcagctgatcatggatgaacaggatcaacagctggagatggtgtctgggagcatccaggttctgaagcacatgtccggccgcgttggagaagagctggacgagcagggcatcatgctggatgccttcgcccaagagatggaccacacccagtcccgcatggacggggtcctcaggaagttggccaaagtatcccacatgacgagtgaccgccgacagtggtgtgccatcgccgtgctagtgggggtgcttctcctcgttctcatcttactattctctctctga

SEQ ID NO: 116077 - DNA, 1000 bp, Homo Sapiens
tatctggagtctctgacagacaaatctaaggagctgccgttatactgttctggggggttgcggtttttctgggacaacaagtttgaccatgcaatggtggctttcctggactgtgtgcagcagttcaaagaagaggttgagaaaggcgagacacgtttttgtcttccctacaggatggatgtggagaaaggcaagattgaagacacaggaggcagtggcggctcctattccatcaaaacccagtttaactctgaggagcagtggacaaaagctctcaagttcatgctgacgaatcttaagtggggtcttgcttgggtgtcctcacaattttataacaaatgacttttttccttagggggaggtttgccttaaaggcttttaattttgttttgtttgcaaacatgttttaaattaaattcgggtaatattaaacagtacatgtttacaataccaaaaaagaaaaaatccacaaaagccactttattttaaaatatcatgtgacagatactttccagagctacaacatgccatctatagttgccagccctggtcagttttgattcttaaccccatggactcctttccctttcttctctgaaaaaaactaatttaaatttgcttttcttttttttaactgagttgaattgagattgatgtgttttcactggatttttatctctctcaacttcctgcacttaacaatatgaaatagaaacttttgtctttactgagatgaggatatgtttgagatgcacagttggataatgtgggaaaatgacatctaagctttacctggtcaccatgtgatgtgatcagatgcttgaaatttaacacttttcacttggttcttatactgaatgccgactctgctctgtgttagagatatgaaatggtgtttgatactgtttgagacattatggagagatttaattatttgtaataaaagatttgctgcagtctgaaaactgaaaaaaaaaaaaaaaaaaaaaaaaaaaaaaaa

SEQ ID NO: 116078 - DNA, 1000 bp, Homo Sapiens
gaagttaactacagtgttttcctttgcaccgatccccaccccaattcaatcccggaagggacttacttaggaaacccttctttactagatatcctggccccctgggcttgtgaacacctcctagccacatcactacagtacagtgagtgaccccagcctcctgcctaccccaagatgcccctccccaccctgaccgtgctaactgtgtgtacatatatattctacatatatgtatattaaaactgcactgccatgtctgcccttttttgtggtgtctagcattaacttattgtctaggccagagcgggggtgggaggggaatgccacagtgaagggagtggcagaatcaaattgctacatagtccaaacaaaaaagaaggctttttcaaaaaacattaaattcacatgcagtctcagagactatttagacaaagttcaagttaggagcttttaggatgtgggagtaaaactttaatgggaggggagggctggctgctggaagaaggaagaagccagactggttagacagtactcttaactcctagcccagcctagcgtgccctgcccctctggccactgctgcagacacctgccttaacacacacacctctaggactccacagttttgccttaaaggaccttcccaagtctccctttccctgtctggcttctcccttaagaagagagagatacttgtagaattgggtggggggaatgagcatgaactgtccttccatttgggatatgttacgttagagtgagagagagaataaggagcctttcttatggaagaaatgggagaagagagacagggttcttttcagcagagtctagtagtttctctgtaaggcaaaataatctaaaaagactaacctgcccacccactccttatattgctgtgagattgcccctatcttgtgctcttctgtctgcagtgtgcacggccttgttctaacccggaataaaggtgattgattgtattgcaaaaaaaaaaaaaaaa

SEQ ID NO: 116079 - DNA, 787 bp, Homo Sapiens
ggactgtggaggggcgcacgcccggaagcggcgagggtagccatgacggcctccgtgctgcgaagtatctcgctagccctgcgcccgactagcgggcttctgggaacttggcagacgcagcttagagagactcaccagcgagcgtcattgttgtctttctgggaactcattcccatgagatcagaacctcttcgaaaaaagaagaaggtagatcctaaaaaagaccaagaagcaaaggagcgcttgaaaaggaagatccgaaaactggaaaaggctactcaagagctaattcctattgaagattttattacccctctaaagttcttggataaagcaagagagcggcctcaggtggagctcacctttgaggagactgagaggagagctctgcttctgaagaagtggtccttgtacaagcagcaagagcgtaagatggagagggacaccatcagggctatgctagaagcccagcaggaagctctggaggaactgcaactggaatccccgaagctccatgctgaggccatcaagcgggatcctaacctgttcccctttgagaaggaagggccacattacacaccaccgatccctaactaccaaccccctgaaggcaggtacaatgacatcaccaaggtgtacacacaagtggagtttaagagatagacttgcaggctgctatccttaacatgctgcccctgagagtaggaatgaccagggttcaagtctgctttccacagaatcaggcatgctgttaataaatactggtttaatcaaaaaaaaaaaaaaa

SEQ ID NO: 116080 - DNA, 1000 bp, Homo Sapiens
caaccggatctccctgactgggatgaagatctcacgcccagacatccgaatcggccgctaccgcatgatcaagcacgaccgcgacaagcataacgaacctaaccctcagaggtttaccaagattcaaaacacgaagctgaccatgaagcgggacggcattgggtcagtgcggtaccaggtcttggaggtgtctcggcaaccactcttcaccaatatcacagtggacattgggcggcctccgtcgtggccccctcggggctgacactaatggacagaggctctcggtgccgaagattgcctgccagaggactgaccacagcctggctggcagctgctctgtggaggacctccaggactgagactgggctctgttttccaagggtcttcactaggccccctagctacacctggaagtttcagaacccactttggggggcctcctgcctgggcaggctcttcaagtgtggccctctttggagtcaaccctccttcccgaccccctccccctagcccagccccagtcactgtcagggtcgggccagcccctgcactgcctcgcagagtggcctgggctaggtcactccacctctctgtgcctcagtttcccccccttgagtcccctagggcctggaagggtgggaggtatgtctagggggcagtgtctcttccagggggaattctcagctcttgggaacccccttgctcccaggggaggggaaacctttttcattcaacattgtagggggcaagctttggtgcgccccctgctgaggagcagccccaggaggggaccagaggggatgctgtgtcgctgcctgggatcttggggttggcctttgcatgggaggcaggtggggcttggatcagtaagtctggttcccgcctccctgtctgagagaggaggcaggagccccagggccggcttgtgtttgtacattgcacagaaacttgtgtgggtgctttagtaaaaaacgtgaatggaaaaaaaaaaaaaaaaaaa

SEQ ID NO: 116081 - DNA, 1000 bp, Homo Sapiens
tatcattgactcatgcaggcgacaattccctgagtatcaagagcgtgccagaaaacgtatacgtacttacctcaagtcctgcaggcggatgaaaagaagtggttttgagatgtctcgacctattccttcccaccttacttcagcagttgcagagagtatcttggcttcagcttgtgagagtgagagtagaaatgccgccaagaggatgcgtctggagagacagcaggatgagtctgctccagctgacaaacagtgtaaaccagaggcgacccaggccacttactcaacatcagctgttccaggctcacaggacgtgctgtacatcaatggaaatgggacctatagttaccatagttacagagggctaggagggggtctgctaaatctgaatgatgcttccagcagtggacccactgatctcagcatgaagagacaattggcgactagctcaggatcctccagcagctcaaactccagaccccagctgagtccaactgaaatcaatgccgtgagacagcttgttgcaggatatcgagaatcagctgcatttttattgcgatctgcagatgaactggaaaatctcattttacaacagaactgagacagacgaccaccatattcactgaggtctaaatttgcagttccactaatgacattttgatttcccaacagagatacttctggtcttactgcacagtcttttaagagaaatacttccattatgccacattgtccttgatccgtaagtgatgtgttaaggtgcttcaaaggaactctgacctctgaagtacttgagctactttagtatgtccagcctattgctttttgttttagtgtgtcaccataaatatcaggggcataaaaggctatctattcttaattcaaggataaaacagaagaagcttgtggtataaaacaatagttcaagatccagctgaaatattagtggaatttgctactgactcattggactgaaagctgaagtacctggcaaaaaaaa

SEQ ID NO: 116082 - DNA, 1000 bp, Homo Sapiens
gttgcatcctagcccagcagcccgaccggctccgggatgaagaactggctgagctggaggatgcgctgcgaaatctgaagtgcggctcgggggcccggggtggcgacggggaggtcgcttcggcccccttgcagcccccggtgccctctctgtcggaggtgaagccgccgccgccgccgccacctgcccagacttttctgttccagggtcagcctgtagtgaatcggccgctgagcctgaaggaccaacagacgttcgcgcgctctgtgggtctcaaatggcgcaaggtggggcgctcactgcagcgaggctgccgggcgctgcgggacccggcgctggactcgctggcctacgagtacgagcgcgagggactgtacgagcaggccttccagctgctgcggcgcttcgtgcaggccgagggccgccgcgccacgctgcagcgcctggtggaggcactcgaggagaacgagctcaccagcctggcagaggacttgctgggcctgaccgatcccaatggcggcctggcctagaccaggggtgcagccagcttttggagaacctggatggccttagggttccttctgcggctattgctgaacccctgtccatccacgggaccctgaaactccacttggcctatctgctggacctgctggggcagagttgattgccttccccaggagccagaccactgggggtgcatcattggggattctgcctcaggtactttgatagagtgtggggtgggggggacctgctttggagatcagcctcaccttctcccatcccagaagcggggcttacagccagcccttacagtttcactcatgaagcaccttgatctttggtgtcctggacttcatcctgggtgctgcagatactgcagtgaagtaaaacaggaatcaatcttgcctgcccccagctcacactcagcgtgggaccccgaatgttaagcaatgataataaagtataacacggaaaaaaaaaaaaaaaaaaaaaa

SEQ ID NO: 116083 - DNA, 1000 bp, Homo Sapiens
ccctgcgtggcatcaatagcttccgccagtacaagtatgacctggtggcagtgggcaaggctttggagggcatgttccgcaagctcaaccacctcctggagcgcctgcaccagtccttcttcctctacttgctccccggcctctcccgcttcgtctccatcggcctctacatgcccgctgtcggcttcttgctcctggtccttggtctcaaggctctggaactgtggatgcagctgcatgaggctggaatgggccttgaggagcccgggggtgcccctggccccagtgtaccccttcccccatcacagggtgtggggctggcctcgctcgtggcacctctgctgatctcacaggccatgggactggccctctatgtcctgccagtgctgggccaacacgttgccacccagcacttcccagtggcagaggctgaggctgtggtgctgacactgctggcgatttatgcagctggcctggccctgccccacaatacccaccgggtggtaagcacacaggccccagacaggggctggatggcactgaagctggtagccctgatctacctagcactgcagctgggctgcatcgccctcaccaacttctcactgggcttcctgctggccaccaccatggtgcccactgctgcgcttgccaagcctcatgggccccggaccctttatgctgccctgctggtgctgaccagcccggcagccacgctccttggcagcctgttcctgtggcgggagctgcaggaggcgccactgtcactggccgagggctggcagctcttcctggcagcgctagcccagggtgtgctggagcaccacacctacggcgccctgctcttcccactgctgtccctgggcctctacccctgctggctgcttttctggaatgtgctcttctggaagtgagatctgcctgtccgggctgggacagagactccccaaggaccccattctgcctccttctggggaaataaatgagtgtctgtttcagc

SEQ ID NO: 116084 - DNA, 1000 bp, Homo Sapiens
aatagttgttggtctaaagatgcagaatatggactctattccatctatcaagggggaatatttgagcttaaggaaaatgacagaatttttgtttctgtaacaaatgagcacttgatagacatggaccatgaagccagttttttcggggcctttttagttggctaactgacctggaaagaaaaagcaataacctcaaagtgactattcagttttcaggatgatacactatgaagatgtttcaaaaaatctgaccaaaacaaacaaacagaaaacagaaaacaaaaaaacctctatgcaatctgagtagagcagccacaaccaaaaaattctacaacacacactgttctgaaagtgactcacttatcccaagagaatgaaattgctgaaagatctttcaggactctacctcatatcagtttgctagcagaaatctagaagactgtcagcttccaaacattaatgcaatggttaacatcttctgtctttataatctactccttgtaaagactgtagaagaaagagcaacaatccatctctcaagtagtgtatcacagtagtagcctccaggtttccttaagggacaacatccttaagtcaaaagagagaagaggcaccactaaaagatcgcagtttgcctggtgcagtggctcacacctgtaatcccaacattttgggaacccaaggtgggtagatcacgagatcaagagatcaagaccatagtgaccaacatagtgaaaccccatctctactgaaagtacaaaaattagctgggtgtgttggcacatgcctgtagtcccagctacttgagaggctgaggcaagagaattgtttgaacccgggaggcagaggttgcagtgtggtgagatcatgccactacactccagcctggcgacagagcgagacttggtttcaaaaaaaaaaaaaaaaaaaacttcagtaagtacgtgttatttttttcaataaaattctattacagtatgtcaaaaaaaaaaaaaaaaaa

SEQ ID NO: 116085 - DNA, 1000 bp, Homo Sapiens
gatgccatttgtgggcagctccagtgccagacaggtaggacccagcctctgctgggctccatccgggatctactctgggagacaatagatgtgaatgggactgagctgaactgcagctgggtgcacctggacctgggcagtgatgtggcccagcccctcctgactctgcctggcacagcctgtggccctggcctggtgtgtatagaccatcgatgccagcgtgtggatctcctgggggcacaggaatgtcgaagcaaatgccatggacatggggtctgtgacagcaacaggcactgctactgtgaggagggctgggcaccccctgactgcaccactcagctcaaagcaaccagctccctgaccacagggctgctcctcagcctcctggtcttattggtcctggtgatgcttggtgccagctactggtaccgtgcccgcctgcaccagcgactctgccagctcaagggacccacctgccagtacagggcagcccaatctggtccctctgaacggccaggacctccgcagagggccctgctggcacgaggcactaagtctcaggggccagccaagcccccacccccaaggaagccactgcctgccgacccccagggccggtgcccatcgggtgacctgcccggcccaggggctggaatcccgcccctagtggtaccctccagaccagcgccaccgcctccgacagtgtcctcgctctacctctgacctctccggaggttccgctgcctccaagccggacttagggcttcaagaggcgggcgtgccctctggagtcccctaccatgactgaaggcgccagagactggcggtgtcttaagactccgggcaccgccacgcgctgtcaagcaacactctgcggacctgccggcgtagttgcagcgggggcttggggaggggctgggggttggacgggattgaggaaggtccgcacagcctgtctctgctcagttgcaataaacgtgacatcttgggagcgttcaaa

SEQ ID NO: 116086 - DNA, 1000 bp, Homo Sapiens
acctaaccagttagcacagatgaggcctaatccacgctggcagcaaggtgggagacctcaaggcttccaaggaatgccaagtgctatacgccagtctgggcctcgtccaactcttcgccatctggctccaactgggtctgagtgcccggaccgcttggctatggactttggtggggctggtgccgcccagcaagggctgactgacagctgccagtctggaggcgttcccacagctgtgcagaacttagcgccacgcgctgctgttgctgctgctgctccccgggctgttgccccctacaaatacgcctccagtgtccgcagccctcatcctgccatacagcctctgcaggcaccccagcctgcggtccatgtgcaggggcaggagccactgactgcctccatgctggctgcagcacccccccaggaacagaagcagatgctgggagaacgcttgttcccactcatccaaacaatgcattcaaatctggctgggaagatcacgggaatgctgctggagatagacaactctgagctgctgcacatgttagagtcccccgagtctctccgctccaaggtggatgaagctgtagcagttctacaggctcatcatgccaagaaagaagctgcccagaaggtgggcgctgttgctgctgctacctcttagacaaggaaaaaccgattcaaaagccaaataaccccttatggaattcaactcaaggtttgaagacttcctagcttgtcctatggacctcaacaccaaggattacaaattgcaaatttaataggtcattttgtatcaaaaggtcaattatgaagcacctagaatttttcaattatacgaatatgttctttgggttctgctgtggcccagacagtgttaactttttttttattgtgggttttgattttttcccccagaaattggttttatttgatgtacccaagtcttacgtttcccaataaagaaaaaaaatctccataaaaaaagtcgagcggccgc

SEQ ID NO: 116087 - DNA, 1000 bp, Homo Sapiens
ctgcaggaaactcagaacgtctgcagcctggtatagcccagcagtggatccagagcaaaagggaagacattgtgaaccaaatgacagaagcctgccttaaccagtcgctagatgcccttctgtccagggacttgatcatgaaagaggactatgaacttgttagtaccaagcctacaaggacctcaaaagtcagacaattactagacactactgacatccaaggagaagaatttgccaaagttatagtacaaaaattgaaagataacaaacaaatgggtcttcagccttacccggaaatacttgtggtttctagatcaccatctttaaatttacttcaaaataaaagcatgtaagtgactgtttttcaagaagaaatgtgtttcataaaaggatatttatatctctgttgctttgactttttttatataaaatccgtgagtattaaagctttattgaaggttctttgggtaaatattagtctccctccatgacactgcagtattttttttaattaatacaagtaaaaagtttgaattttgctacatagttcaatttttatgtctcttttgttaacagaaaccacttttaaaggatagtaattattcttgtttataacagtgccttaaggtatgatgtatttctgatggaagccattttcacattcatgttcttcatggattatttgttacttgtctaagatgcaatttgattttatgaagtatataccctttacccaccagagacagtacagaatccctgccctaaaatcccaggcttaattgccctacaaagggttattaatttaaaactccattattaggattacattttaaagttttatttatgaattccctttaaaaatgatatttcaaaggtaaaacaatacaatataaagaaaaaaataaatatattaataccggcttcctgtccccatttttaacctcagccttccctactgtcaccaacaaccaagctaaataaagtcaacagcctgatgtgt

SEQ ID NO: 116088 - DNA, 1000 bp, Homo Sapiens
atgtccccgatgtcatggaactcagacgcatctacctccgaagcgtcctgatgggccgctgctttgcgctggtggaccacaggcatctacacagcctggactttggttctctccaggaaggtagcccagcactgtgaagacccagcaggaagccaggctgagtgagccacagaccacctgcttctgaactcaagctgcgtttattaatgcctctcccgcaccaggccgggcttgggccctgcacagatatttccatttcttcctcactatgacactgagcaagatcttgtctccactaaatgagctcctgcgggagtagttggaaagttggaaccgtgtccagcacagaaggaatctgtgcagatgagcagtcacactgttactccacagcggaggagaccagctcagaggcccaggaatcggagcgaagcagagaggtggagaactgggatttgaacccccgccatccttcaccagagcccatgctcaaccactgtggcgttctgctgcccctgcagttggcagaaaggatgttttgtcccatttccttggaggccaccgggacagacctggacactagggtcaggcggggtgcgtggtggggagaggcatggctggggtgggggtggggagacctggttggccgtggtccagctcttggcccctgtgtgagttgagtctcctctctgagactgctaagtaggggcagtgatggttgccaggacgaattgagataatatctgtgaggtgctgatgagtgattgacacacagcactctctaaatcttccttgtgaggattatgggtcctgcaattctacagtttcttactgttttgtatcaaaatcactatctttctgataacagaattgccaaggcagcgggatctcgtatctttaaaaagcagtcctcttattcctaaggtaatcctattaaaacacagctttacaacttccatatcacaaaaaaaaaaaaaaaaaaaaaaaaaaaaaaaaaaaaaaa

SEQ ID NO: 116089 - DNA, 1000 bp, Homo Sapiens
gacatctacgaacaggtggggaccaatgccatggacagccccctcctcaagtacagcgccaaagactacttcttcaaggcggccctctgccacttctgcatcgacatgctcaacgccaagctggctgtccaaaagtatgaggagctgttcccagctttctctgattcccgggaatgcaagttgatgaaaaaattgctagaggcccacgaggagcagaatgtggacagctacaccgagtcggtgaaggaatacgactccatctcccggctggaccagtggctcaccaccatgctgctgcgcatcaagaagaccatccagggcgatgaggaggacctgcgctaagccccacccagccccccagtgcccgtcttcctgtcccatctgctcagagagaggtggggccgagacttgctggagagcttccctcctttcccatctggggagtgccgcgggccacagtgggcaggtggcaccgggggtcagcatgcaggggcgccagaggcccaggctgctggccggacagtcaccctctgttctcgctacatcccttgccccctgtccatttatttaagcccccataggtgcccttcacccccaaaaccagctgtacagaatctttgatacagacctatttgctaggggtgctgccggggatttggggtcagcatctggccccctatctcctgaccagctgagtcatgaggccggtttctctctctctcccacttttgtcccccagccaagctctaaagcacatgtagccgctgagacctgctgtttctgctgggggcaggctcctcttcccccagccccgggagcctcccccagcttcctgcagccccgacctctcaggttagaccctgggccctggagcttaggggattctccccaccccagccccacacctgctccttccctaatgctttgaggttttcttggttggaagctgcagctggcccaagaaagaaaataaaaaacaacacttttgcatgagtcaaaa

SEQ ID NO: 116090 - DNA, 1000 bp, Homo Sapiens
tccttcaggaacttgcgtacagcttgccccagtgtctgatgctgacgctaagaagagacatcgtcttcagccaagcacttgctggattggtttgtggttttatcatcaaattacagacaagtctgtatgacccaggcttcctacagcagcttcacacagtggggttgatagtacaatatgaaggattgttaagtacatacagcgatgaaattggaatgttagaggacatgcccgttggcatttccgatttaaagaaagttgcatttaaaataattgaagccaaatccaatgatgtattgccagttataacaggaagacgagaacattacgtggtagaggtcaagcttccagccagaatgtttgagtcactacctctacagattaaagaaggacagttgcttcatgtgtatccagtactttttaatgttggaatcaatgaacagcaaactctggctgaaaggtttggagatgtctctttgcaagaaagtattaatcaggaaaacttcgaacttctacaagaatattacaagatatttatggaaaagatgcctcctgattatatttcacattttcaggaacaaaatgatttaaaagcattgctagaaaatctccttcaaaatatccaatccaaaaaaagaaagaatgtagaaattatgtggctggctgcaacgatttgccgcaaactgaatggtattcgtttcacctgttgtaaaagtgccaaagacaggacatcgatgtcagtgacacttgaacaatgctcaatcttgagagatgagcaccagttacacaaggacttctttatccgagcgctggattgcatgagaagagaaggatgccgcatagagaatgtactgaagaatatcaaatgcagaaagtatgctttcaacatgctacagctgatggctttccccaagtactacagacctccagaggggacttatggaaaagctgacacctaagtttaccaacatgttaataaacaggaacacaaatacatttc

SEQ ID NO: 116091 - DNA, 1000 bp, Homo Sapiens
aatgttttaaaaattcataacagcaaccttgaaaaaatagacttaaatgaatgcttctagaaacttccagcggctcacaaagaataagcctgccttagggctggcaacatctaagcctctaacagcacagggaagcaaatatcttaccaggcagcctatgaattaacccaaagaagctttggttggttttggtggatttttatcatgccatgttggacatgagattttttagatcttccttcccacattgctagacgtctcactcaaagacatttgttgggagtcacatttgcatcatagacgagacagtccattcatcttagttaaattggattgagaatgccttttgtttccaggaaaatattgatcaccatgaaagaagaatagttttttgtccccagagacattcatttagttgatataatcctaccagaaggaaagcactaagaaacactcgtttgttgtttttaaaggcaacagacttaaagttgtcctcagccaaggaaaaatgatactgcaactttaaaatttaaagtatcttgcactgataaatatatttaaaaattatatgtctataaagttattaatttgtaaaggcagtgttacaaaatgttcagtttatattgttttagattgttttgtaatttttaaaggtgtaaaataacatattttttctttatggaaatctataaaactttctgtagtaaaatgttttcattttactggtatattattgcttcatgttttgtaccatcataagattttgtgcagatttttttacagaaattattattttctatgacaatatgacacttgtaaattgttgtttcaaaatgaacagcgaagccttaactttaaatgacatttgtattctcagacactgagtagcataaaaaccacatagaactgaactgtaacttaaattccaaactatgactactacattccaaagaaacagttgaattaaacattttcataaaataaaaaaaaaaaaaaaaaa

SEQ ID NO: 116092 - DNA, 1000 bp, Homo Sapiens
ctgataatcgattgcattggcaatgagacagagcttcttcgagacaccttcacttccctgggctatgaagtccagaaattcttgcatctcagtatgcatggtatatcccagattcttggccaatttgcctgtatgcccgagcaccgagactacgacagctttgtgtgtgtcctggtgagccgaggaggctcccagagtgtgtatggtgtggatcagactcactcagggctccccctgcatcacatcaggaggatgttcatgggagattcatgcccttatctagcagggaagccaaagatgttttttattcagaactatgtggtgtcagagggccagctggagaacagcagcctcttggaggtggatgggccagcgatgaagaatgtggaattcaaggctcagaagcgagggctgtgcacagttcaccgagaagctgacttcttctggagcctgtgtactgcggacatgtccctgctggagcagtctcacagctcaccgtccctgtacctgcagtgcctctcccagaaactgagacaagaaagaaaacgcccactcctggatcttcacattgaactcaatggctacatgtatgattggaacagcagagtttctgccaaggagaaatattatgtctggctgcagcacactctgagaaagaaacttatcctctcctacacataagaaaccaaaaggctgggcgtagtggctcacacctgtaatcccagcactttgggaggccaaggagggcagatcacttcaggtcaggagttcgagaccagcctggccaacatggtaaacgctgtccctagtaaaaatgcaaaaattagctgggtgtgggtgtgggtacctgtgttcccagttacttgggaggctgaggtgggaggatcttttgaacccaggagttcagggtcatagcatgctgtgattgtgcctacgaatagccactgcataccaacctgggcaatatagcaagatcccatctctttaaaaaaaaaaaaaa

SEQ ID NO: 116093 - DNA, 1000 bp, Homo Sapiens
aggttctttttcttttctatgatacacacagccacgctgataatatgcaaatgaacattttcctttatgtctctccagataatgtttattgtctgaggtaaattaaattcccaccagggtttgctgtcagtattttaacacccacattagtatatgcgtccagggtcataaccccctaaaatccatcatgcaaccttattaatctgtcttgggattccagtttagtgcttggatttatttcctgattacactacatagaaaagtgagacatctgccattcccaactctgggaaaaccaactaatatacaaccatataaatgaaggccatcttgatggtctcaacactaatttttatgatgcaaatttatacactgatttttgtaaaggacaaagttttaaaagcgtatttaacttgatgttttctatcagcataaataaaatggtcatgaatagtcattaaaaacagttgccagtgataatctgcatgaaggaaaaagaaccctgcaaatggctattgagttggaagtattgtttttgatatgtaagagatattcagaatgctcacactgaaaatgcctcaactttttaaagtgtaagaaaccaccatgagtggtgtctagatttctaatgaagaatcatgatacagtttggattaagtatcttggactggttttaaacagtgctttgtaccggatctgctgaagcatctgtccagctggtatcctgtgaaagtttgttattttctgagtagacattcttatagagtattgtctttaaaatcagattgtctcttctatattgaaagcatttttatgttttctaatttaaaaattaatattttcttatagatattgtgcaataaagctgaagtagaatgtgtggtttttgcaaatgctttaacagctgataaaaattttacatttgtaaaattaatatattgtactggtacaaaatagttttaaattatattttaaaaagcttccaaaaaaaaaaaaaaaa

SEQ ID NO: 116094 - DNA, 1000 bp, Homo Sapiens
ttgttgtgatggtgcatttgattgaagcagcttgtctttattatgcaagactgtgtagagttttttttttttttggcattgtactttttgtttttgttataaaggaagacagaacaaactggaatgttttatgatgttgtatagcaatcgctttttacctttcaaagttccgggtaaaaatgtgttatatctgtagttttttgtttttgtttttttttaaagcactacatctgttttcactaattgttaatttctgtttgaacccttcatttaattttctcatagatttaagtaaacagatgtattttgcacagtgcacttatgtctattttaacaatcctcctgcatctgtattttatagtcagccttttgaccacctggtgccagctatataaggaataaagttgattcatatcaacattagaactccagtcccaaactaatctgtcaggttcactggtacataaatacctaggaaatatttttccagtctacaatttggtgctattgtgcagtaactaatagtactcttaccagaggagaaattatattaacgaccctgctaatatcctttcttagttatttgctccttgcaaattaaaaaagcaactaagagaaagaaaaacattgtagatatctatttatatttaaagtttatgtttcatgaactgcagctgcaggattctggcattttgcatgccattctccatcagatctgggatgatggctcagaacatgtacacagactaagagtaactgtgtgatctgttaaggggtggataacataatatgcagcttaggatgctattttgagatgtatgatattcagttcattcacctgattactttggttgcagcacaactgtatatattgtataaccgaaattgattattttcattgtccttaatgcagtgatttataattagagcatgtttaataagtttactcttcttgttaactagtcatttgactggaaaaaaataaaatacttttaaatgg

SEQ ID NO: 116095 - DNA, 1000 bp, Homo Sapiens
ttgaacacagaaaacctcagttgaaaatgcaactctaactctgagagctgtttttgacagccttcttgatgtatttctccatcctgcagatactttgaagtgcagctcatgtttttaacttttaatttaaaaacacaaaaaaaattttagctcttcccactttttttttcctatttatttgaggtcagtgtttgtttttgcacaccattttgtaaatgaaacttaagaattgaattggaaagacttctcaaagagaattgtatgtaacgatgttgtattgatttttaagaaagtaatttaatttgtaaaacttctgctcgtttacactgcacattgaatacaggtaactaattggaaggagaggggaggtcactcttttgatggtggccctgaacctcattctggttccctgctgcgctgcttggtgtgacccacggaggatccactcccaggatgacgtgctccgtagctctgctgctgatactgggtctgcgatgcagcggcgtgaggcctgggctggttggagaaggtcacaacccttctctgttggtctgccttctgctgaaagactcgagaaccaaccagggaagctgtcctggaggtccctggtcggagagggacatagaatctgtgacctctgacaactgtgaagccaccctgggctacagaaaccacagtcttcccagcaattattacaattcttgaattccttggggattttttactgccctttcaaagcacttaagtgttagatctaacgtgttccagtgtctgtctgaggtgacttaaaaaatcagaacaaaacttctattatccagagtcatgggagagtacaccctttccaggaataatgttttgggaaacactgaaatgaaatcttcccagtattataaattgtgtatttaaaaaaaagaaacttttctgaatgcctacctggcggtgtataccaggcagtgtgccagtttaaaaagatgaaaaagaataaaaacttttgaggaac

SEQ ID NO: 116096 - DNA, 1000 bp, Homo Sapiens
ggctcagcgtggacctgccccatgctgcagaacctggcctcacctggacttttcactagaattgccagcttcctcaacttagcagatcattcactcatgcgggcacaagcaaagatcaacactttcttttttggtaagcttgagttttacaagttattttttggtgatgcgtaagacattgcagtgggaaaccattcaacttgagtttattggagtttgctgttgtagcaggttttaactcaggaacaactcttgtctgatctctccgcccctctgccgggaggcgacattaactgtcctctcggagccggtagcgttgctgtccgagtccccaggacggatctcctgcagacctgccttaatgctcagatcgaagtatttcacaagaatacttgtgtttttaacagcccttcccctggacggtgcggccatgagggcctcatgttacggcattgccttttctttctgtggatccagtatcttcctcggctttttagggagcaggaaaaatgcgtctgagagcaactctttttaaaaacctgccctgttgtatataactgtgtctgtttcaccgtgtgacctcccaagggggtgggaacttgatataaacgtttaaaggggccacgatttgcccgagggttactcctttgctctcaccttgtatggatgaggagatgaagccatttcttatcctgtagatgtgaagcactttcagttttcagcgatgttggaatgtagcatcagaagctcgttccttcacactcagtggcgtctgtgcttgtccacatgcgctgggcgtctgggaccttgaatgcctgccctggttgtgtggactccttaatgccaatcatttcttcacttctctgggacacccagggcgcctgttgacaagtgtggagaaactcctaatttaaatgtcacagacaatgtcctagtgttgactactacaatgttgatgctacactgttgtaattattaaactgattatttttcttatgtc

SEQ ID NO: 116097 - DNA, 1000 bp, Homo Sapiens
gcaatgttggtttcactgagagctgcctcctggtctcttcaccactgtagttctctcatttccaaaccatcagctgcttttaaaataagatctctttgtagccatcctgttaaatttgtaaacaatctaattaaatggcatcagcactttaaccaatgacgtttgcatagagagaaatgattgacagtaagtttattgttaatggttcttacagagtatctttaaaagtgccttaggggaaccctgtccctcctaacaagtgtatctcgattaataacctgccagtcccagatcacacatcatcatcgaagtcttccccagttataaagaggtcacatagtcgtgtgggtcgaggattctgtgcctccaggaccaggggcccaccctctgcccagggagtccttgcgtcccatgaggtcttcccgcaaggcctctcagacccagatgtgacggggtgtgtggcccgaggaagctggacagcggcagtgggcctgctgaggccttctcttgaggcctgtgctctgggggtcccttgcttagcctgtgctggaccagctggcctggggtccctctgaagagaccttggctgctcactgtccacatgtgaactttttctaggtggcaggacaaatcgcgcccatttagaggatgtggctgtaacctgctggatgggactccatagctccttcccaggacccctcagctccccggcactgcagtctgcagagttctcctggaggcaggggctgctgccttgtttcaccttccatgtcaggccagcctgtccctgaaagagaagatggccatgccctccatttgtaagaacaatgccagggcccaggaggaccgcctgccctgcctgggccttggctgggcctctggttctgacactttctgctggaagctgtcaggctgggacaggctttgattttgagggttagcaagacaaagcaaataaatgccttccacctcaccgcaaaaaaaaaaaaaaaaaaaaaaa

SEQ ID NO: 116098 - DNA, 1000 bp, Homo Sapiens
ctccgactggggctcctccaggtggtcagccagattatagtgcagcctgggctgagtattatagacaacaagcagcctattatgcccagacaagtccccagggaatgccacagcatcctccagcacctcagggccaataataagaagtggacaatacagtatttgcttcattgtgtgggggaaaaaaacctttgttaaatatatggatgcagacgacttgatgaagatcttaattttgtttttggtttaaaatagtgtttccttttttttttttttttttgaaaatgtacaaaatatctatcactactgataggaggttaatatttctgtgtagaaatgaaaattggtttgtttttagtatttagtgtagatgtacacattccagcaaatgtatttgcaattatgtggttgatgctttgtgatataaatgtactttttcaatgtatactttcacttttaaaatgcctgttttgtgctttacaataaatgatatgaaacctcctgtgtcggtaagttggatatgtgggtatttaaaggattcataatttcttagcaatgataaattaagatacatatacacaaatatataagctttccccatgaaatattgagtttttaaacactggcatgtttttccccccttgcagtatagtggtagattggaggatcttttccatttattgtattggctctttcagcacaagtaatcctgatatcttcattttttttccttctgtttgattaaaaactgcatgtgtgtacaatgatcttttggcatacttccattgcattaacagtgaaatttccttttatacatgaccactgtttcagacctgtactgctgctataacagttaacctttctgttcttaatttgataatacttgatttccaagactgtttcggcataactaattttaaacagttttcagatagtgaatatgagtagtctaataagaacagtttttttccatgtgaagcaactctttcaatgtatataa

SEQ ID NO: 116099 - DNA, 1000 bp, Homo Sapiens
ttctgaggagccggacagccggggaggctcccctcagatggatgacatcaaagtgttccagaatgaagttttaggaacactacagcggggcaaagaggagaacatttcttgtgacaatctcgtcctggaaatcaactctctcaagtatgcctataacgtaagtctaaaggaggtgatgcaggtactgagccacgtggtcctggagttccccctgcaacagatggattccccgcttgactcaagccgctactgtgccctgctgcttcctctgctaaaggcctggagccctgtttttaggaactacataaagcgcgcagccgaccatttggaagcgttagcagccattgaggacttcttcctagagcatgaagctcttggtatttccatggccaaggtactgatggctttctaccagctggagatcctggctgaggaaacaattctgagctggttcagccaaagagatacaactgacaagggccagcagttgcgcaagaatcaacagctgcagaggttcatccagtggctaaaagaggcagaagaggagtcatctgaagatgactgaagtcacactgcctgctcctttgggtgtgattgagtgccctcctggctcctgggctgggacaagtgaggaactagctgcagagggatgagtgaccaccatccaggctgagactgaaaggagcagaggctggaactacagtattctttcccctgctagcaaccatgtgcctcccatcctgactgtggagttgggatgtggaagtggggctggaacaaagcttctgcctagggaggagctaagcaggcccggcagttggaggaaggccagaggaacagctttgtgctccggctttccctcagggaacagcagagagcagttggctctttctgctgcttgtatatgttaatattaaaagagagtggtgtaaaaaaaaaaaaaaaaaaaaaaaaaaaaaaaaaaaaaaaaaaaaaaaaaaaaaaaaaaaaaaaaaaaaaa

SEQ ID NO: 116100 - DNA, 1000 bp, Homo Sapiens
aggtaatcactgtcaattggatttggtcttcattattttatattctgattttatcagaattattctattttaaaattgttttaaaatttaaaacatttaattcatgatcatgttcatcagtagatgctattattcataagaactgtgattccagcaaactagggtaattggtgcctttttacagttttgaataaaagcatttacaatttctaaattatcagttttcacagtttcagcactcaacctcatcatacgctgatttaatattgttttacattaaaatagtccttttccctgttgtgccaccattcatttaagtgctgtttgttcttaaaatgcatttaaagaaaaattacccatattgactttcacacctcatataatcagatctattacaaatatatatcggagtgacggtgcccaggatagatgtaatatttcttacagatgctggcacagaggaaataatataccagctaatctagtcacctaaccttgtggttagaattgcaattttaagaccagaaaaatttgaagtctgatcagagatttacaactgttcattatagtggtgccttaggcaatctttccaaagtaaattcagggccccattgctacttatgccatatttggacatactttttttttcttcaattttgtaaacttcctggaaagctgtcttcactaagtatcccctagtctctatatatgtggttagtagtcatggaaatgacacataaagtacgccagaagtttgatggaacgtgttagaaactgttttgtgcttttatggatgtcatacttgacaatacatgtgtaagttactaatatatgaattgatgctaaatatatcttacatttgaattccttttggataaagttatttcttgatgtgacagagtagtgtgttttcatttttattctttacatgtgaccaaaacaatagaaaagttaaaaataaaatatagtgttttaggtggcaaaaaaaaaaaaaaaaaaa

SEQ ID NO: 116101 - DNA, 1000 bp, Homo Sapiens
atgtgatgggaggctgtcagatcaacttcactgtgggcgtggacttcactggctccaatggagacccctcctcacctgactccctacactacctgagtccaacaggggtcaatgagtacctgatggcactgtggagtgtgggcagcgtggttcaggactatgactcagacaagctgttccctgcatttggatttggggcccaggttccccctgactggcaggtctcgcatgaatttgccttgaatttcaaccccagtaacccctactgtgcaggcatccagggcattgtggatgcctaccgccaagccctgccccaagttcgcctctatggccctaccaactttgcacccatcatcaaccatgtggccaggtttgcagcccaggctgcacatcaggggactgcctcgcaatacttcatgctgttgctgctgactgatggtgctgtgacggatgtggaagccacacgtgaggctgtggtgcgtgcctcgaacctgcccatgtcagtgatcattgtgggtgtgggtggtgctgactttgaggccatggagcagctggacgctgatggtggacccctgcatacacgttctgggcaggctgctgcccgcgacattgtgcagtttgtaccctaccgccggttccagaatgcccctcgggaggcattggcacagaccgtgctcgcagaagtgcccacacaactggtctcatacttcagggcccagggttgggccccgctcaagccacttccaccctcagccaaggatcctgcacaggccccccaggcctaggttcccttggaggctgtggcaagtcctcaatcctgtgtcccagaggtccctctgggccacaacccaacccttctcactctcctcagtgctagcactttgtattttttgatacttttatacttgtttctgcttttgctgctcttgatcccacctttgctcctgacaaccctcattcaataaagaccagtgaagaccaaaaaaaaaaaaaaaaaaaa

SEQ ID NO: 116102 - DNA, 1000 bp, Homo Sapiens
ctgcagtcccacatgtccctgccagccactcgaggatatgccctcacagccctcatgaagctcagcactcgcctctgtggggacaacaaccgcatccgccaggtggtgtccatctacgggagctgcttggacgtggagctgcagcagcgggctgtggagtatgacacactcttccggaaatacgaccacatgagggctgccatcctggaaaaaatgcctcttgtggagcgagatggccctcaggctgatgaggaagcaaaggaaagcaaagaagcagcccagctttcagaagcagccccagtgcccacagagccccaggcctcacagctcctggatctgctagatctcctggatggggcttctggggatgtccagcatcctccccatctggacccctccccaggaggtgccctggtacacctgcttgaccttccctgtgtacctccacccccagctcccatcccagatctcaaagtgtttgagcgtgagggagtacagctgaatctgtctttcattcgaccccctgaaaaccctgctttgctgttaatcaccatcactgccaccaacttctcagagggtgatgtcacccatttcatctgccaggctgctgtgcccaagagtctccagctgcagctgcaggcccccagtgggaacacagttccagctcggggtggccttcctatcacccagctcttcagaatcctcaatcctaacaaggcccccctgcggctaaagctgcgcctcacctacgaccactttcaccagtcggtgcaggagatctttgaggtgaacaacttgcctgtggaatcgtggcagtaactgtctccactcacagcctgaaattctcctgtgtcccaaaccccagggggccccagcagcttcgaacctacacctgagggctaccagcaggtggcgctctggctttgcactgcaaaaactggggaccagcccccttctcccacaaataaagcccaataaagcctgagaagtgaggaaagcc

SEQ ID NO: 116103 - DNA, 1000 bp, Homo Sapiens
gtaaagcctttaagaaatggacacctcctcggtcaccttttaatctcgttcaagaaacactttttcatgatccatggaagcttctcatcgctactatatttctcaatcggacctcaggcaaaatggcaatacctgtgctttggaagtttctggagaagtatccttcagctgaggtagcaagaaccgcagactggagagatgtgtcagaacttcttaaacctcttggtctctacgatcttcgggcaaaaaccattgtcaagttctcagatgaatacctgacaaagcagtggaagtatccaattgagcttcatgggattggtaaatatggcaacgactcttaccgaattttttgtgtcaatgagtggaagcaggtgcaccctgaagaccacaaattaaataaatatcatgactggctttgggaaaatcatgaaaaattaagtctatcttaaactctgcagctttcaagctcatctgttatgcatagctttgcacttcaaaaaagcttaattaagtacaaccaaccacctttccagccatagagattttaattagcccaactagaagcctagtgtgtgtgctttcttaatgtgtgtgccaatggtggatctttgctactgaatgtgtttgaacatgttttgagatttttttaaaataaattattatttgacaacaatccaaaaaaaatacggcttttccaatgatgaaatataatcagaagatgaaaaatagttttaaactatcaataatacaaagcaaatttctatcagccttgctaaagctaggggcccactaaatatttttatcggctaggcgtggtggtgcatgcctgtaatctcggaaggctgaggcaggaggatcatttgagctcatgagggcccaggaggtcaaggcttcagtgagccatgatcatgccactgcactccagtctggatgacagagagagaccctgtctcaaaaaatatatatttaaaaaataaaaataaaagctgaccccaaagac

SEQ ID NO: 116104 - DNA, 1000 bp, Homo Sapiens
ggacggcgccactctctgccctgccatgcggctggtggtgccacagagcctcaccgtgcctgagtggcatgcccaggaggccgctctccttcagtaaatgtaacacagtcgaggcacgtcatcgggcagccttccctgtgtgccaacgccagccttcgcttctgaaaaccaaactccagccgctgccagtcgggacttggtcgcccggcgctgccagaatgctccactgccagccggcccccctgcctcggtttcccttctgtttagtggcgacacaggcacccagctttggggtggtgctgacgctcccaggggtgccaggagccactgggacagggtgaggctcccagacgctcctcgaggtgcccagctctccagggagcttctggcccaaggccgtctgagggatctgctccttaaccccccagtgccttggcgagggcaggttccaagccacagacgcctgccccgagtggactctgcggccagtccctggtgccctcctggccctgctgcccagtgagggctcctacgggtgggttcattggcctgggcccagcgagcccccacctgcattgaccttaggcccatagagagggcctgtcccggtgctgccccagccaggatctggtcgctgccccagggggactgatgggcagagtcgcccctgtggctggactgtgaccatccctgatggggcctgaccgcgggagctgaggaagcgccgctccaccgtctgccctccaaggacccgcatggaggcagtgggctggcagcttcctgctgctccctgtcagagtcaaagcacaaatcctcaggacgggctcaagggccagggcagccgagggaagctccaggtggggaccacgtcttcctgaggttggtgcccactggctgggaccctttgcagtggggtggcctcccctctgtctgcctggtggagggagccgtgggcgtggggacgtgactgaataaagccaccatgggtggatgtgcttgg

SEQ ID NO: 116105 - DNA, 1000 bp, Homo Sapiens
gtgacgttcctcatcacccgcctcacagggcccgccctgcagtgggtgatcccctacatcaagaaggagagccccctcctcaatgattaccggggctttctggccgagatgaagcgagtctttggatgggaggaggacgaggacttctaggccgggagaccctcgggcctgggggcgggtgctctggggagggtccgctgtgttactggccgccgccagggtcgccaccggcgccctccctccgcgcctccctccccctcgagccgccgcgatgtcccctgcgctcctgttccctcccgcgtagtgcttgcctttgttccaggaatagcgctccaggctcctgctgccgcccctgggcctcactctggagcgagccgccgccctctccttccagccagccagcccctcccatgtacatttggacgctgtcctgcgctccagctgcaagctgggctcctgttacacactggacagaccacccactgccgccgctgccaagccctctcctccccaccagactgccagacgactacatcattctgcccacagacctgcgctgccacagccatcgccatccatcgcatcccaccgacagactgctgctcctagtgatctggactcacctcggaggtatctgggctggccacagtccctggacagtgatccagacagctggccgccccccaagggatctgtcaccttcagcgagacctatttcctccccacccccagaaacctcttgtgttcttgcctaggcccaggtgttcctggcagccaaatcgagtctctcattttctcttgtggaccagttagttttgcccataacgcagtattctgagtttgcaactgtctctctgatgtgtgccttttgttcaacacagtaacccctgcattctgctctgctctaatacactacctggagaaagtcttttccttattttcaataaatgtcagacattattgaaaagaaaaaaaaaaaaaaaaaaaaaaaaaaaaaaaa

SEQ ID NO: 116106 - DNA, 1000 bp, Homo Sapiens
gactgaggtgggagaatcgcttgagactgggaggcagaggttgcagtgaaccgagatcatgccaccgcacttcagcctgggtgacagagaaggactccgtctcaaaaaaaaaagaaaaaagaatagtcatttttaaactacctatctcatgcaatgaaagcattttcttccacaaagagcttaatcctcatgataggattgcctagtgtctcccatttgcaggtttctgggttgatgtcttaatgcataatactgcaagtgacatcagctggctgtgatgcttcgaaataggtctgctcctcacagctttgggaatctgaatggaagaagaaaagagagaagttaacaacctccactggggcaactttgtgaacatgtaggcacttagtcataggaaacatattatgtgcaggtcctagcctggggtaggaaagtagatagacagaaaatcattaggtaatttaagtactaaattgggcagggctttttagtatcaaatcactactagaccgtttaatttgttaaattatctctaggatggtgatttataacctacccaaagttatcgatattcttactaaactctgaggcctgaagttctgtgatagaccttaaataagtgtcctaagtcagtggttcccaaatctggctggtcgggaatacctgggaagtttgttaaaattttttaaaaatgttttaagatttttgggtcctgagccaggcgtggtggctcacacctgtaatcccagcactttgggaggctgaggcaggtggatcgcctgaggtcaggagttcaagatcaacctggccaacatactgaaaccccgtctctactaaaaataagaaaaattagctgggcgtggtggcgggcacctgtaatcccagctacttgggaggctgaggcaggagaatcacttgaacctgggagttagaggttgcagtgagctgagatcacaccattgcgcttcagcctgggcaacaagagtgaaactccatctcc

SEQ ID NO: 116107 - DNA, 1000 bp, Homo Sapiens
gaaatttgattttaggtattgtgagtaaacaagtttatatagagagacattgtgaagttaaagttttcagaagttacatttgtgcagttcttaccttttcctcatatagtgccattgaaatagactgaaattatcttggcaaaagttagacaaccaaagacgactttagtggactggttttcaaaacttgagcagctgaaaagcaaaagccgttgtttcccatgacaatgtagcctttgtggatttgggtttgtgctttgggttgaaaagaagtttttagtcctaggccagtagatggcagcagcttttcattgcagacaaaacctcttgaaacccttcccccatggcacaaactcgcccatgatggaaagcatctagatttctgcctccttttacagttaatccaggagagggagtcctttgccaactgatgaccaacagttccaagccagatagtctcgtgaacagtgacaatacagaaataaggtgttatttctgttcagatctccaccggcctttgttcttttaaaacttgaatataggtgggagacataagaaaggaaagaaaagacttaaaactggagtgacaggacaaataatcattactttcaattcatgactgctttatattcatttgatgaaatcatttgtatacaaaccagggagagttttctttacacccttgacaatatatcacatactcttcaagatcataataatatcattaatataaatttaaacaacatggcttgttagaaaatatgctaattgctatggtctcattatgtttgcttagcttttatttgtttttctgtgaacagttagagagctaatttttttcaaaggtgattgtaagtcatattttatatagcattttgcttgattatttgctctgtactgaatttgtactctattgccattagatcttacaataatgttccactctgcaaatttttaaggttcaaataaagtttaattgtttgcaaaaaaaaaaaaaaaa

SEQ ID NO: 116108 - DNA, 1000 bp, Homo Sapiens
aactcaaggagctggagaagtgcatggaggcggacccctgagtccatcagctgccagccccggccctggcccccaccccaagttccctgaagcatcctccagctcactgtggccagctttgtgcaaccagggcccacggcgcccctcctgtgctgtgacgtgtgtgtcgtggctggccccgcggcgcctaccgccctggccgtgtctgtctggtgtgtgctgtgaacccctgcacccaaccccacatctgggtggccaacttggcaggacttggccagcagctgcccaggacacagtgcaggccagagcgggcttgaccacctggtgggcctccctgcccgcttccttgggctccccggccctgggtgggcggtgggcagctggtctccagggactcagtgagtggctgtgctctctgcacaacgggcaatgtgcagacgcatttttggtaatcacagctggggagtgaaaagggtgccactggcaccactgggtggatggtccagagcctccacccacagaggggatgcaaagggcaggtgagtcaagaaccgcataggtctccagtccccacggggctcccaggccggggaaaggttcccctgaggtcactctgaggccagggacgtcacccaaggctggtggtcagtgtgaagggctccgtgccaactggtcagctgtccttcacgcacatatccgtggccacctgagacctgctccacgacccttccaggcagagccgagagttcgccccaacccttccccaggcccagtgtgaaaaacagactcacaaggggcttcttggcctgcagcttcatttgcgagagcgccgaggcaggacacagagcacagctgtgctggaagtgtggggagaacccggacagctcagtcctgccagcagccgcaaagagccgaggctgccaggcccatttatgtccctcatgtctctagattttctcgtcacccagcctcaaaaatatatgtgtctgcaaccctcagt

SEQ ID NO: 116109 - DNA, 1000 bp, Homo Sapiens
ttcccattctctttggcaagaagtccccttctcgcccccaaaccagcaagggactcccccacctgggtctgtgccctgccccgcgctgggggccgagtccttgaatgtggcttcaggggctcctgtcctgggccagggcctgatgggcaccacgtgaggggcacttggtggacagggcggggctgacgtggcctcctctggggtcgcctgcttttgacccaaaggtcctgacggttgcgtccgggggaggggaaggaagggccgctgtcgccaaggttttctctcccagaacccacagtgggaaagcggtcttgccaggcgttgtccattgtcagtgtgctcgtgggctggtgactgggtcttgggatcccaggccacgcgccagccaggctgtgggcagggcggggccagggacgccaaagagaggttgcagtcagaaccgtggacggggtgggttgaggcctctctgccacccgtcttcctggtcagcagaagtgcatctcggcttgggtttggggtggtccgcatcccctgcttgccactatgcgcaccaaggtttccccacatccttcccagcacccttaggaaggcccaggcagggcctggaagcagcggacctgggctgttctgtgttgaaggagtgtgcccagtgcccttgggcaggacctgtgagagccacctcacaggcagagcccccaccaggcagggcaaggagactccgctcactccccacggccagcgtgggcacaggactgacccttcttcagagataatgacattttatcttctccttttgatgaaaactgtcactttagcatgtaatccattacagaatcccatgcagtgattccaggatttgaaattgtatgatgtgttacataagaatttatttgctatcgacattcccgtataaagagagagacatatcacgctgctgtcatgattttgtgtcaagatgatccaataaagttgtaaaacaggcatttccaaaaaaaaaaaa

SEQ ID NO: 116110 - DNA, 1000 bp, Homo Sapiens
cgtgctcgagtcctctgggcccgcagtgcgctcgggtctcaacgccaccttcatggcattcaaccggggcaagcgggagggcttcttcctgaagagcgtggagaatgcacccctggccaagcggcggaagcagaagctgcggagcgccaccgcctcccgccggggctcccctgcaccagccaacccgggccgagcccccgtcgcctccaaaggggccccccgccgagccaacggccccctgcccccctcctaatccccaccactgtgacccccttccctcataggggctgtgacctgggagcccggctcactcccggaggcctctgcctgcggctgacctgatccccaagggactgtcctttcctctcctaccccaccccactcccagacagagcagaagtatttttataagcagagaattttttatgtcttaccagatagagttgcagggaagggggggcctgctggggagtggggtttggggggccctctcccaggacactgcctcttctgggcagaaggcccctccagggggactgctccaacaggaaagagcccctcccccacttctaagcactgagttaggagtgctaactcctaaactgggaccccctaccctgttctcccctgaggccccgttcctgggaggggcacccctcaactgtcactttatggactgtctgtgcaattacgtccaccaaagacccgtgttgggggtactgaaggagaggccctgggggaccctctgaagcatttctgcctcactttatgtcatctgcttctcccctgttggggctaaggaaggagataggtggctcctaaaagaggaggccatcttctcacccaccccttcctctttggcacagctactcctggctgggggtggggccttgggggtctgggctgggcatccatggtcactgcctcagcccagccaggctgtgcctttgactttaaaataaaagtccacccagtgctgtgtgtggcaaaaaaaaaaaaa

SEQ ID NO: 116111 - DNA, 894 bp, Homo Sapiens
aggcggggcttgcacacgctggtcacgcggtcagctattgacacttcctggtgggatccgagtgaggcgacggggtaggggttggcgctcaggcggcgaccatggcgtatcacggcctcactgtgcctctcattgtgatgagcgtgttctggggcttcgtcggcttcttggtgccttggttcatccctaagggtcctaaccggggagttatcattaccatgttggtgacctgttcagtttgctgctatctcttttggctgattgcaattctggcccaactcaaccctctctttggaccgcaattgaaaaatgaaaccatctggtatctgaagtatcattggccttgaggaagaagacatgctctacagtgctcagtctttgaggtcacgagaagagaatgccttctagatgcaaaatcacctccaaaccagaccacttttcttgacttgcctgttttggccattagctgccttaaacgttaacagcacatttgaatgccttattctacaatgcagcgtgttttcctttgccttttttgcactttggtgaattacgtgcctccataacctgaactgtgccgactccacaaaacgattatgtactcttctgagatagaagatgctgttcttctgagagatacgttactctctccttggaatctgtggatttgaagatggctcctgccttctcacgtgggaatcagtgaagtgtttagaaactgctgcaagacaaacaagactccagtggggtggtcagtaggagagcacgttcagagggaagagccatctcaacagaatcgcaccaaactatactttcaggatgaatttcttctttctgccatcttttggaataaatattttcctcctttctatggaaatctggaaaaaaaaaaaa

SEQ ID NO: 116112 - DNA, 1000 bp, Homo Sapiens
gagagcccagggcccttcctccgttttaagggggaagcaacatttggaggggatggatgggctggtcagctggtctccttttcctactcatactataccttcctgtacctgggtggatggagcgggaggatggaggagacgggacatctttcacctcaggctcctggtagagaagacaggggattctactctgtgcctcctgactatgtctggctaagagattcgccttaaatgctccctgtcccatggagagggacccagcataggaaagccacatactcagcctggatgggtggagaggctgagggactcactggagggcaccaagccagcccacagccagggaagtggggagggggggcggaaacccatgcctcccagctgagcactgggaatgtcagcccagtaagtattggccagtcaggcgcctcgtggtcagagcagagccaccaggtcccactgccccgagccctgcacagccctccctcctgcctgggtgggggaggctggaggtcattggagaggctggactgctgccaccccgggtgctcccgctctgccatagcactgatcagtgacaatttacaggaatgtagcagcgatggaattacctggaacagttttttgtttttgtttttgtttttgtttttgtgggggggggcaactaaacaaacacaaagtattctgtgtcaggtattgggctggacagggcagttgtgtgttggggtggtttttttctctatttttttgtttgtttcttgttttttaataatgtttacaatctgcctcaatcactctgtcttttataaagattccacctccagtcctctctcctcccccctactcaggcccttgaggctattaggagatgcttgaagaactcaacaaaatcccaatccaagtcaaactttgcacatatttatatttatattcagaaaagaaacatttcagtaatttataataaagagcactattttttaatgaaaaaaaaaaaaaaaaa

SEQ ID NO: 116113 - DNA, 1000 bp, Homo Sapiens
ggccggggtcccgggccccgcggcggcggcagcggcggcggcggcggcaggatgatcaagctgttctcgctgaagcagcagaagaaggaggaggagtcggcgggcggcaccaagggcagcagcaagaaggcgtcggcggcgcagctgcggatccagaaggacataaacgagctgaacctgcccaagacgtgtgatatcagcttctcagatccagacgacctcctcaacttcaagctggtcatctgtcctgatgagggcttctacaagagtgggaagtttgtgttcagttttaaggtgggccagggttacccgcatgatccccccaaggtgaagtgtgagacaatggtctatcaccccaacattgacctcgagggcaacgtctgcctcaacatcctcagagaggactggaagccagtccttacgataaactccataatttatggcctgcagtatctcttcttggagcccaaccccgaggacccactgaacaaggaggccgcagaggtcctgcagaacaaccggcggctgtttgagcagaacgtgcagcgctccatgcggggtggctacatcggctccacctactttgagcgctgcctgaaatagggttggcgcatacccacccccgccacggccacaagccctggcatcccctgcaaatatttattgggggccatgggtaggggtttggggggcggccggtgggggaatcccctgccttggccttgcctccccttcctgccacgtgcccctagttatttttttttttttaacaccatgtgattaaggtcggcgctgcctcccccgacccactcagcgatgggaaatgaattggcttgtctagcccccctgctgggtgcttgttcagcccccactctgggctgtggagtgggtgggcaacgggcctgggtagctgggcccaggcaacccacccctccacctctggaggtcccaccaggctattaaaggggaatgttactgcaaaaaaaaaaaaaaaaaaaaa

SEQ ID NO: 116114 - DNA, 1000 bp, Homo Sapiens
tgttcaatggcacatgcacagctttgcttccatgggcaccgggatgctgtgaaattctttgtggcagtcccaggtcaagtcatcagcccacaaagtagcagtagtggcacggatctgacgggtgacaaagcagggccatctgcacaggagcctggtagtcagacgcccttgaagtctatgcttgtcatcagtggaggagagggctacatcgacttccgaatgggtgatgaaggtggagaatcagaacttcttggagaggatcttccacttgaaccttctgtcaccaaagcagaaaggagtcacttgatagtgtggcaagtgatgtatggcaatgagtgagcccatgggaaacaggtggagatggggaagccgtctcttctgcatggtttattttccctctatccttttatttaatgctcttttgtgagataagtttcaccacataatgtgtgagcattttttcctgttaactttatattacaaaatccgttctaccataacaatacagaggaactagctgtgttactgcaccagtgttataggtaacttcagtatattatgaacaaatcaaagaatgtttacttcctgcaaactggtgaattatagaaagcaatccagatgtggtttactctgccacagtctaatgtcattcacttcatttgatggggtcacttgttagctgtcactaataatggaattaatgggaaacacttgataaatgaaactgtaccgttaaatacaatagctgagttttccccagtgtattgtaaaattgacacacactaatacaagatggattatcaggatgtatctaaatgtcccgagagggttaaaagctaactgtaaattactttaactttcactttcaaatctgacaaatcttgtttatatggtatataaaactttgttttcatcagatttgggggggttttatattaaagaaattaagactacactatttaaataaacgtttcctgtttctgaaaaaaaaaaaaaaaaa

SEQ ID NO: 116115 - DNA, 1000 bp, Homo Sapiens
ggctttttttctataaaagccttaatgagccataattttaagaatataagaataatgactatgatattggtcagtcttagaacatgaaaatgtcagacaatgaatttaatcgggcccttggtggaaacatttatatatttaatgcagatgcatagtgtttttcaaatctttaacatcattttttcaacttttaagatataatatcaactattctaaatacaggtaatggtatatttaaggctaccataacatcctatttagagggtggttttttttaatttatctaatggctacgatatagccagattcaaataacatatgtactcaataggtttcaatcatatatataatatattttttgtaactatgaacatacacagttttccagaaatagattttacactgtttagaattccaacacctacagtggaaagactgtttattgtagtaatgcatggctgaagcataaaagggagagagaatttctttatatacacaaacatacatgaatatgcatatctatatgcatagatgtacctatcctgcacccaaaaaggtgcctggtattggcactaaaatcatgtagttatactgggcagcaataataattgggcatgaggctgattactcaatggtgagggtaggtatatgtagatagatgtgcatgtatgtgtttgtatatataattttataagtttcacgcataaattaatacatgcctgtgtgcatacatatgtatgggatatatttgtatatatatgtacaggtaataaacatccccaaggtttgtggctggccatacacataggcatcagtttaacaaccatcagacctcagctgtacaataacaggtgttttgtttaattaaaattatactgttctgcagcatttagacatttgtcacatttcattagctttgacaaccatactgtaacattaaacctagcattccacaagagaataaatataagattgaaactgtaaaaaaaaaaaaaaaaaa

SEQ ID NO: 116116 - DNA, 1000 bp, Homo Sapiens
gcctcaaccacaattcttccatgctggggctgatgtgggctagtaagactccagttcttagaggcgctgtagtatttttttttttttgtctcatcctttggatacttcttttaagtgggagtctcaggcaactcaagtttagacccttactctttttgtttgttttttgaaacaggatcttgctctgtcacccaggcttgagtgcagtggtgcgatcacagcccagtgcagcctcgaccacctgtgctcaagcaatcctcccatctccatctcccaaagtgctgggatgacaggcgtgagccacagctcccagcctaggcccttaatcttgctgttattttccatggactaaaggtctggtcatctgagctcacgctggctcacacagctctaggggcctgctcctctaactcacagtgggttttgtgaggctctgtggcccagagcagacctgcatatctgagcaaaaatagcaaaagcctctctcagcccactggcctgaatctacactggaagccaacttgctggcacccccgctccccaacccttcttgcctgggtaggagaggctaaagatcaccctaaatttactcatctctctagtgctgcctcacattgggcctcagcagctccccagcaccaattcacaggtcacccctctcttcttgcactgtccccaaacttgctgtcaattccgagatctaatctccccctacgctctgccaggaattctttcagacctcactagcacaagcccggttgctccttgtcaggagaatttgtagatcattctcacttcaaattcctggggctgatacttctctcatcttgcaccccaacctctgtaaatagatttaccgcatttacggctgcattctgtaagtgggcatggtctcctaatggaggagtgttcattgtataataagttattcacctgagtatgcaataaagatgtggtggccactctttcatggtggtggcagcagttaccagtaaaaaaa

SEQ ID NO: 116117 - DNA, 1000 bp, Homo Sapiens
cttataaatacagcttgtacatggacattctgcaaacccagctgtcacatttttcttgcaactccttttgcaaaagcagactaaaatgttttaaaatgtgaaaaaacattattttttcaaagcaagaaaataatttactgccctcttacataatgtatttataaagtttttccagataaactaatcaaataaattagaataatgtgacaacattacaaatttaatttgttagctgcattccttctgatgttaccacgatagaatgttactgatgattcagggctatttctgaagtctgtatgttgctgctgtccccagtgatggtggacttatctttgccttacctgatcacaaattatgttggggaaaataaagatttaatatttctttaaatagaaaaagaatttggttttgctcgtttaagagcaatgagaaaatgatggaatgttgactgtgtttggcacacaggacacggaccttcatggaagtccttgctctgcgtggcatctgtcagcttttcacctttcattcttattcttcacttttgctgctgagcctagctgtacaaacttgcactttcatttgctaatataaattcagttttattttaccattttagagactactaatgattaaatgtagaaggagagggtgcacatgtttttatgtggagtgtttaaaagataaatttataccactgtaatgtgcagcttttattaaaagagaaattggttgaactgctaggttgaatgagagacttcatctattggactattttttttaatccaggcatatggtctttagtaatggcttgtaatttgtgaaaacattaatttgggggttttccctgttttcagttgtccatgtacacatagtcattatattagaaaagaaagctgttcaacaaacttgtttaatttgtttaaatcaacatagcatgaaacaccaaataaaatgtttgacatagttttaaaaaaaaaaaaaaaaaaaaaaaaaaaaa

SEQ ID NO: 116118 - DNA, 1000 bp, Homo Sapiens
tttaactggataattccactgtcagttgcattatcctgttttggtggcctcaatgcctccattgtggctgcttctaggcttttctttgtgggctcaagagaaggccatctccctgatgccatctgcatgatccatgttgagcggttcacaccagtgccttctctgctcttcaatggtatcatggcattgatctacttgtgcgtggaagacatcttccagctcattaactactacagcttcagctactggttctttgtggggctttctattgtgggtcagctttatctgcgctggaaggagcctgatcgacctcgtcccctcaagctcagcgttttcttcccgattgtcttctgcctctgcaccatcttcctggtggctgttccactttacagtgatactatcaactccctcatcggcattgccattgccctctcaggcctgcccttttacttcctcatcatcagagtgccagaacataagcgaccgctttacctccgaaggatcgtggggtctgccacaaggtacctccaggtcctgtgtatgtcagttgctgcagaaatggatttggaagatggaggagagatgcccaagcaacgggatcccaagtctaactaaacaccatctggaatcctgatgtggaaagcaggggtttctggtctactggctagagctaaggaagttgaaaaggaaagctcacttctttggaggcacctgtccagaagcctggcctaggcagcttcaacctttgaacttactttttgaaatgaaaagtaatttatttgttttgctacatactgttccagacttttaaaggggacaatgaaggtgactgtggggaggagcatgtcaggtttgggcttggttgttttagaagcacctgggtgtgcctacctactcctcttttcttttaaaagggcccacaatgctccaatttcctgtctcctttagagagacatgaaactatcacaggtgctggatgacaataaaagtttatgttcct

SEQ ID NO: 116119 - DNA, 1000 bp, Homo Sapiens
ggaggaacgcacacaggcctatctggaggaaaaacgcaaggctgaagctctgctctaccaaatcctaccccattcagtggcagagcagttaaaacggggagagactgtacaggctgaggcctttgacagtgttaccatctacttcagtgacattgttggcttcacagcattgtcagcagagagcacccccatgcaggtagtgacacttcttaatgacctgtatacctgctttgatgccataattgacaactttgatgtctacaaggtggagacgattggggatgcttacatggtggtatctggcctcccaggccgaaatggtcaacgccatgcaccagaaattgctcgtatggccctagcattactagatgcagtttcttcctttcgcatccgccaccgaccccatgaccagctgaggctacgcataggggtccatactgggccagtctgtgctggggttgttggcctgaagatgccccgttattgtctttttggagacacagtgaacactgcttctcgaatggagtctaatggtcaagcgctgaagatccatgtctcctctaccaccaaggatgccctagatgagctaggatgcttccagctagagcttcggggggatgtggaaatgaagggaaaaggaaagatgcgaacatactggctcttaggagagcggaaaggacctcctggactcctgtaaacccccattctttccaagtcagatagtcttctgctgctggtacctgggtgggcaatggccaccatgtctgcacacaccagaaatggacattttcatatgcaatggaaaacagccacaaaaaaacctaccttatatggaagttgtagccctctgcagctcagccctgtacatatacctgtccctctctggcttggtccccttcctccctactttctgtaaatatctgtatctaaaccagaatattttggtcaaatataaaacaataataaaaaaagttctgatgtcaaaaaaaaaaaaaaaaaa

SEQ ID NO: 116120 - DNA, 1000 bp, Homo Sapiens
cccagtagaggcaccacactgttcagagtataaaatgcaaatggcagtctccctgcgtcttgccttgcctcccccgaccgagaatagcagcctctcctcaattacccttttagatccaggtgaacactactgctaaccagcatgccgatttcataccttatgctacacagacattaagaagagcagagctggcaccctgtcatcaccagtggccttggtccttaatcccagtacaatttgcaggtctggtttatataagaccactacagtctggctaggttaaaggccagaggctatggaacttaacactccccattggagcaagcttgccctagagacggcaggatcatgggagcatgcttaccttctgctgtttgttccaggctcacctttagaacaggagacttgagcttgacctaaggatatgcattaaccactctacagactcccactcagtactgtacagggtggctgtggtcctagaagttcagtttttactgaggaaatatttccattaacagcaattattatattgaaggctttaataaaggccacaggagacattactatagcatagattgtcaaatgtaaatttactgagcgtgttttataaaaaactcacaggtgtttgaggccaaaacagattttagacttaccttgaacggataagaatctatagttcactgacacagtaaaattaactctgtgggtgggggcggggggcatagctctaatctaatatataaaatgtgtgatgaatcaacaagatttccacaattcttctgtcaagcttactacagtgaaagaatgggattggcaagtaacttctgacttactgtcagttgtacttctgctccatagacatcagtattctgccatcatttttgatgactacctcagaacataaaaaggaacgtatatcacataattccagtcacagtttttggttcctcttttctttcaagaactatatataaatgacctgttttcacgcggccgc

SEQ ID NO: 116121 - DNA, 1000 bp, Homo Sapiens
ccagcgggagcttgatatcccttgtctgtaacatagaccccgggtactgcgggaggggagggctgctggggaggatggggggatgttatataaatatagatataattttattttcggagctaagatggtgttatttaagggtggtgatgggtgagcgctctggcccaggctgggccagactcccgcccaagcatgaacaggacttgaccatctttccaacccctggggaagacatttgcaactgacttggggaggacacagcttcagcacagcctctcctgcgggccagcccgctgcgaaccctccaccagctaccggagggaggagggaggatgcgctgtggggttgtttttgccataagcgaactttgtgcctgtcctagaagtgaaaattgttcagtccaagaaactgatgttatttgatttatttaaaggctaaaatttgtttttttattctttgcacaattgtttcattgtttgacacttaatgcactcgtcatttgcatacgacagtagcattctgaccacacttgtacgctgtaacctcatctacttctgatgtttttaaaaaatgacttttaacaaggagagggaaaagaaacccactaaattttgctttgtttccttgaagaatgtggcaacactgttttgtgattttatttgtgcaggtcatgcacacagttttgataaagggcagtaacaagtattggggcctattttttttttttccacaaggcattctctaaagctatgtgaaattttctctgcacctctgtacagagaatacacctgcccctgtatatccttttttcccctcccctccctcccagtggtacttctactaaattgttgtcttgttttttattttttaaataaactgacaaatgacaaaatggtgagcttatgatgtttacataaaagttctataagctgtgtatacagttttttatgtaaaatattaaaagactatgatgatgacatttaaaaaaaaaaaaaaaaaa

SEQ ID NO: 116122 - DNA, 1000 bp, Homo Sapiens
tatgcaagagcaagaggggctgataggatgtcttcatttggtgattttgttgcattgtccgatgtttgtgatgtaccaactgcaaaaattatttccagagaagtatctgatggtataattgccccaggatatgaagaagaagccttgacaatactttccaaaaagaaaaatggaaactattgtgtccttcagatggaccaatcttacaaaccagatgaaaatgaagttcgaactctctttggtcttcatttaagccagaagagaaataatggtgtcgtcgacaagtcattatttagcaatgttgttaccaaaaataaagatttgccagagtctgccctccgagacctcatcgtagccaccattgctgtcaagtacactcagtctaactctgtgtgctacgccaagaacgggcaggttatcggcattggagcaggacagcagtctcgtatacactgcactcgccttgcaggagataaggcaaactattggtggcttagacaccatccacaagtgctttcgatgaagtttaaaacaggagtgaagagagcagaaatctccaatgccatcgatcaatatgtgactggaaccattggcgaggatgaagatttgataaagtggaaggcactgtttgaggaagtccctgagttactcactgaggcagagaagaaggaatgggttgagaaactgactgaagtttctatcagctctgatgccttcttccctttccgagataacgtagacagagctaaaaggagtggtgtggcgtacattgcggctccctccggttctgctgctgacaaagttgtgattgaggcctgcgacgaactgggaatcatcctcgctcatacgaaccttcggctcttccaccactgattttaccacacactgttttttggcttgcttatgtgtaggtgaacagtcacgcctgaaactttgaggataactttttaaaaaaataaaacagtatctcttaaaaaaaaaaaaaaaaaaaaaaaaaaaa

SEQ ID NO: 116123 - DNA, 498 bp, Homo Sapiens
gcgcactctcggaagcgcagccgaacccgccctccgaatccagagaggcgctgctgacaccgccgccacaccgccgccacaccgccgctgcctcagtcatgccgaagcacgagttctctgtggacatgacctgtggaggctgtgctgaagctgtctctcgggtcctcaataagcttggaggagttaagtatgacattgacctgcccaacaagaaggtctgcattgaatctgagcacagcatggacactctgcttgcaaccctgaagaaaacaggaaagactgtttcctaccttggccttgagtagcaggggcctggtccccacagcccacaggatggaccaaagggggcaggatgctgatcctcccgctggcttccagacagacctgggacttggcagtcatgccgggtgatggtgttcctgcggagaccctcagttgtcctattccttcctagcttccctgcaataaaatcaagctgcttttgttggaaaaaaaaaa

SEQ ID NO: 116124 - DNA, 1000 bp, Homo Sapiens
cggggcgggcggacagactgcgggacggacggtggacgctgggacgcgtttgtagctccggccccgccgttccgacccccgccgccgtcgccgccatgacggggctagcactgctctactccggggtcttcgtggccttctgggcctgcgcgctggccgtgggagtctgctacaccatttttgatttgggcttccgctttgatgtggcatggttcctgacggagacttcgcccttcatgtggtccaacctgggcattggcctagctatctccctgtctgtggttggggcagcctggggcatctatattaccggctcctccatcattggtggaggagtgaaggcccccaggatcaagaccaagaacctggtcagcatcatcttctgtgaggctgtggccatctacggcatcatcatggcaattgtcattagcaacatggctgagcctttcagtgccacagaccccaaggccatcggccatcggaactaccatgcaggctactccatgtttggggctggcctcaccgtaggcctgtctaacctcttctgtggagtctgcgtgggcatcgtgggcagtggggctgccctggccgatgctcagaaccccagcctctttgtaaagattctcatcgtggagatctttggcagcgccattggcctctttggggtcatcgtcgcaattcttcagacctccagagtgaagatgggtgactagatgatatgtgtgggtggggccgtgcctcacttttatttattgctggttttcctgggacagctggagctgtgtcccttagcctttcagaggcttggtgttcagggccctccctgcactcccctcttgctgcgtgttgatttggaggcactgcagtccaggccgagtcctcagtgcggggagcaggctgctgctgctgactctgtgcagctgcgcacctgtgtcccccacctccaccctcaacccatcttcctagtgtttgtgaaataaacttggtatttgtctgggtc

SEQ ID NO: 116125 - DNA, 987 bp, Homo Sapiens
aatataagtggaggcgtcgcgctggcgggcattcctgaagctgacagcattcgggccgagatgtctcgctccgtggccttagctgtgctcgcgctactctctctttctggcctggaggctatccagcgtactccaaagattcaggtttactcacgtcatccagcagagaatggaaagtcaaatttcctgaattgctatgtgtctgggtttcatccatccgacattgaagttgacttactgaagaatggagagagaattgaaaaagtggagcattcagacttgtctttcagcaaggactggtctttctatctcttgtactacactgaattcacccccactgaaaaagatgagtatgcctgccgtgtgaaccatgtgactttgtcacagcccaagatagttaagtgggatcgagacatgtaagcagcatcatggaggtttgaagatgccgcatttggattggatgaattccaaattctgcttgcttgctttttaatattgatatgcttatacacttacactttatgcacaaaatgtagggttataataatgttaacatggacatgatcttctttataattctactttgagtgctgtctccatgtttgatgtatctgagcaggttgctccacaggtagctctaggagggctggcaacttagaggtggggagcagagaattctcttatccaacatcaacatcttggtcagatttgaactcttcaatctcttgcactcaaagcttgttaagatagttaagcgtgcataagttaacttccaatttacatactctgcttagaatttgggggaaaatttagaaatataattgacaggattattggaaatttgttataatgaatgaaacattttgtcatataagattcatatttacttcttatacatttgataaagtaaggcatggttgtggttaatctggtttatttttgttccacaagttaaataaatcataaaacttgatgtgttatctctta

SEQ ID NO: 116126 - DNA, 1000 bp, Homo Sapiens
cgaagcgcacggccaccctcagcatgaggaacacgagcgtcatgaagaaagggggcatattctctgcagaatttctgaaagttttccttccatctctgctgctctctcatttgctggccatcggattggggatctatattggaaggcgtctgacaacctccaccagcaccttttgatgaagaactggagtctgacttggttcgttagtggattacttctgagcttgcaacatagctcactgaagagctgttagatcctggggtggccacgtcacttgtgtttatttgttctgtaaatgctgcgttcctaatttagtaaaataaaagaatagacactaaaatcatgttgatctataattacacctatgggatcaataagcatgtcagactgattaatgtctactgtgaaaatttggtagtaaattttcatttgatattagatataaatatctgaatataaataattttaatatactagtcatgatgtgtgttgtattttaaaaattatctgcaaccttaattcagctgaagtactttatatttcaaaagaatgaataacattgataataaaatcgctactttaaggggtttgtccaaaataaatattgtggccttatatatcacactattgtagaaagtattatttaatttaaatggatgcaggttgtctactaaagaaagattatatataactatgctaattgttcataatcaacagaaaccaagatagagctacaaactcagctgtacagttcgtacactaaactcttcttgcttttgcattataaggaattaagtctccgattattaggtgatcaccctggatgatcagttttctgctgaaggcacctactcagtatcttttcctctttatcactctgcattggtgaatttaatcctctcctttgtgttcaacttttgtgtgcttttaaaatcagctttattctaagcaaatctgtgtctactttaaaaaactggaaatggaaaaaaaaataaatctt

SEQ ID NO: 116127 - DNA, 1000 bp, Homo Sapiens
gcctggactgcagctgccatgtaccaggccaccaggatttttgcctctaacctgaaggaacgcatggcccagcgcttctacaaccttgtcctgctccctcgagtacgagatgacgttgctgaatacaaacgactcaacttccatctctacatggctctcaagaaggcccttttcaaacctggagcctggttcaaagggatcctgattccactgtgcgagtctggcacttgtaccctccgggaagccatcattgtgggtagcatcatcaccaagtgctccatccctgtgttgcactccagtgcggccatgctgaaaattgctgagatggaatacagcggtgccaacagcatcttcctgcgactgctgctggataagaagtatgcactgccttaccgggtgctggatgccctagtcttccacttcctggggttccggacagagaagcgtgaactgcctgtgctgtggcaccagtgcctcctgactttggtccagcgctacaaggccgacttggccacagaccagaaagaggccctcttagaactgctccggctgcagccccatccacagctatcgcccgaaatcaggcgtgagcttcagagtgcagtcccccgcgatgtggaagatgttcccatcaccgtggagtgaggaaaacagtcagctgtcctggccaaaggggtttggaaggacaccaagacccccgttggtgactgaagatgacactgagctttaatggctgaagacccagatcagggcagtgacagatcacagggacatctgtggctcccagtccaggacaggaaggactgagggtctggctggttccctcttccattctaggcccttatccctgtttagttctgagagccaacttgagataccatatgctagcattcccagtccccagctggggcttggtgtgagtactttttctatggctattgtgtcaggtcactgtggataaaggcaaagacagatatttattgaaaaaaaaaaaaaaaaa

SEQ ID NO: 116128 - DNA, 1000 bp, Homo Sapiens
gacgctgatgagttccggcagggtctggccaaactcgggctggtgctggaccaggcggaggcagagggtgtgtgcaggaagtgggaccgcaatggcagcgggacgctggatctggaggagttccttcgggcgctgcggccccccatgtcccaggcccgggaggctgtcatcgcagctgcatttgccaagctggaccgcagtggggacggcgtcgtgacggtggacgacctccgcggggtgtacagtggccgtgcccaccccaaggtgcgcagtggggagtggaccgaggacgaggtgctgcgccgcttcctggacaacttcgactcctctgagaaggacgggcaggtcacactggcggaattccaggactactacagcggcgtgagtgcctccatgaacacggatgaggagttcgtggccatgatgaccagtgcctggcagctgtgagcagctccggctcagccctgctgccctggcctgtcactccccacccctgccggagacctcccttccctgggccccttctctcctgggcagccacaccacagagcggggaggggcaggtgggggaatggaggctgcaggactggctagaccaggtccctgccggtccaccaggcggaggtgggacaaaggtcctaacaggagtcactggctcaggaccccagggagaaacgctctccccacccacgccatgctgaccagaggtcttgcagcccctgtggatgcccccgccgaggtcccccgatccccgcacccggactgctgctccctgcccctcccttgcgggtcccccaggaagccaggtgaccccaggtgggaggctgtgtgtggaggccatcctggaaggaagtttagacctgcccaggtgtggagcgaggggcacaggggcatcctaacctcagaaactgaaataaagcctttgaaaaaaaaatctgtaaaacatcaacccccaatcagaagatggcaaatggggaataaaaatagcaggtaacacgtc

SEQ ID NO: 116129 - DNA, 1000 bp, Homo Sapiens
aatcactatcttctctgttggtgtggcttgggcacctctggatgacctgaaagatatggcttctaaaccgaaggagtctcatgctttcttcacaagagagttcacaggattagaaccaattgtttctgatgtcatcagaggcatttgtagagatttcttagaatcccagcaataatggtaacattttgacaactgaaagaaaaagtacaaggggatccagtgtgtaaattgtattctcataatactgaaatgctttagcatactagaatcagatacaaaactattaagtatgtcaacagccatttaggcaaataagcactcctttaaagccgctgccttctggttacaatttacagtgtactttgttaaaaacactgctgaggcttcataatcatggctcttagaaactcaggaaagaggagataatgtggattaaaaccttaagagttctaaccatgcctactaaatgtacagatatgcaaattccatagctcaataaaagaatctgatacttagaccaaaagcaacattcgttctctaaccattctgtattgattatataagcaaaatgaaaagagaaacttaaatgaacacagctctttaacatggttcaggtacacatattttgacccaagtggatattttcttaaaaccaatcaataatagctagctattactgcagactataaaatctggatatagaaaggagacctgtatcaaactgcttttgtagtgtgttttcataacaacttatgactaaaaatatcacactgaataagagagcaggattgccaggtatttttctatttctctccttaattttatatgtatatagatatatttggcttatattctaagtcacctaagtacttaaaagttaagttggtaaagtatttactgactgcttataaacatttaaagacaaagacatttcaaataactgcagaaaaaatattgtagtttgaatatttaagcaataaaactgctagtgagttattgt

SEQ ID NO: 116130 - DNA, 1000 bp, Homo Sapiens
ctacttttatgctgataacttgggatttcttgatagtccttcacccctgaaaccccgtatttacttaacaagatttagctcttagttcttcaagtaaaattaaagtctcttgtgtaagagccaacacatgcccagctgcggatgggagctgttcctggacagccttctactgcctgggaagtgatggaacaggaactcagggtgcccttaccccctccccagacctgttccctttctttgactgacagagcaccatccaggcaaaattagagcgccaaatggttttcttctcaatcttaaagcagtatacctttccacaggctcgtctgtgtccctgccactctgagttatccagaaaccaccacctacaaatgaggggactcatctagaagacctctaaggtccccttttggctctgaggggtctctaataatccccacttggaattcagcaccgcaaggaaattatgggtatgtgagccataatatgatggccagcaggtggcgctgccttccacccatggtgatggatggtttggaaagggaatgttggtgccttttgtgccacaagttaagatgctactgttttaaaggaaaaaaaaaaaaaaaagtactgatcttcaatatgaagacatgagcttttctcgcaggaaattttctttttcacagaactggtgtcaggaatcactgaagggctaaccgtgatagtccttgcaagtaagtcaaggttttatcctgattggaaatagaagacatttccggttgagagaacagattcgttggaagcttaacttttgttgcctcttaacgccaccaaattttagggtaatttgattatgaaagagtgaatttttctggacagaaaagggagagctaccaaattgtttttttctttttaaaaggaagtttaatgtccgttgtatcacaaatcagtgttaaaacaccagaactttagccaaaataaatgtcttacattacaaaggtaaaaaaaaaaaaaaaaa

SEQ ID NO: 116131 - DNA, 1000 bp, Homo Sapiens
tttccatcatttctgtctttaagaactaattcgtacataataagtttcataggtaacacattatattctcttatgatacttgaggtaccagttgtatttaattttattcattatccctagatagctattaagatacttagattagacctaacccaccatagtcaatccaagactagactactcaatattaaagggtctggaaaatagaagagtgtgttgggcaggtagtttgtaccatttatgaaggtttgttcctttgttaaatttagcagcctgtactagcttttgaaatccagaagttttaacttccagtggctggtttctgagagagtgccatgattgctagccagcattccatattgggaatatgtagaggagaacctggatgtacttaagagtggcatataattttcacttctgtctgttgaggcaaaaaaaaaacaagtttagaaagctggcaacatgaagaatgcattcaaaatataacaggtgcttctttgttgtacgcagaggaattttttcttttgattttgtttactgaaatttgttatacttcaaaagccataacttgaaaaatactggtggcgtcgatggtgagtgatttttatcccacgtgggccttttgctcagttccatggcaattttgtaaattgaccctagccagagaatagatcagtatttcactgataccacgaggaaaagaacaaacaaaacttaaaagtattcatacaccttgctaacctaaaagacagcagggacaagatacatatgaggacaaggtatacacccagttctgaataacttgaagaacaggcttggcaaagaagtaagtttatccaaatcttgaatttctgccaggcatggtagctcatgcctgtaaccctggcacttaaggggccaaggcaggaggatcacttgaggccagtgagctgtgatcactccagtgcactcgagcctgggtgacagggcaagaccctgtctcaaaaaaaaaaaaaaaaaa

SEQ ID NO: 116132 - DNA, 1000 bp, Homo Sapiens
ggacagcaagaatttcgatgactacatgaagtcactcggtgtgggttttgctaccaggcaggtggccagcatgaccaagcctaccacaatcatcgaaaagaatggggacattctcaccctaaaaacacacagcaccttcaagaacacagagatcagctttaagttgggggtggagttcgatgagacaacagcagatgacaggaaggtcaagtccattgtgacactggatggagggaaacttgttcacctgcagaaatgggacgggcaagagaccacacttgtgcgggagctaattgatggaaaactcatcctgacactcacccacggcactgcagtttgcactcgcacttatgagaaagaggcatgacctgactgcactgttgctgactactactctgccaatcggctacccctcgactcagcaccacattgcctcatttcttcctctgcattttgtacaaatccacgaattcttctggggtcaggtgccactgaccgggatccagttccagttcccatggtgtatgtggttttttttttttttttttaactgcactcatagggtgctctgaggtcaataaagcagagccaaggccacccagttgcctttttgcctttggtaacataactctgggagtcttggtttatcctgtgtgtcagagagtgggcagaaataacggcctgaaggttactgaggaagaagcactggatgggagactgaaatggacagtctcggagcctgttaatcagctgatcaccttacacatttaataataaaagagctgtacctacacgttgcctttacactgccccccctccatggtcaaatgacctagttcagtcagtgatggggcttccccaggtttggctattgaactgtcacttcaggcccatcctacactgaaagctcttgggtctggctgttctctgtgaaatgctgtagtctctccctttccagaattcaggttcagggcacagaacccaggcttgtaccatggtg

SEQ ID NO: 116133 - DNA, 1000 bp, Homo Sapiens
actcacccataacaaacaattacaccatggtataaagtgggcatttaatatgtaaagattcaaagtttgtctttattactatatgtaaattagacattaatccactaaactggtcttcttcaagagagctaagtatacactatctggtgaaacttggattctttcctataaaagtgggaccaagcaatgatgatcttctgtggtgcttaaggaaacttactagagctccactaacagtctcataaggaggcagccatcataaccattgaatagcatgcaagggtaagaatgagtttttaactgctttgtaagaaaatggaaaaggtcaataaagatatatttctttagaaaatggggatctgccatatttgtgttggtttttattttcatatccagcctaaaggtggttgtttattatatagtaataaatcattgctgtacaacatgctggtttctgtagggtatttttaattttgtcagaaattttagattgtgaatattttgtaaaaaacagtaagcaaaattttccagaattcccaaaatgaaccagataccccctagaaaattatactattgagaaatctatggggaggatatgagaaaataaattccttctaaaccacattggaactgacctgaagaagcaaactcggaaaatataataacatccctgaattcaggcattcacaagatgcagaacaaaatggataaaaggtatttcactggagaagttttaatttctaagtaaaatttaaatcctaacacttcactaatttataactaaaatttctcatcttcgtacttgatgctcacagaggaagaaaatgatgatggtttttattcctggcatccagagtgacagtgaacttaagcaaattaccctcctacccaattctatggaatattttatacgtctccttgtttaaaatctgactgctttactttgatgtatcatatttttaaataaaaataaatattcctttagaagatcactctaaaa

SEQ ID NO: 116134 - DNA, 1000 bp, Homo Sapiens
ttgaagacagcttcccatgccggtacacagccagtagcctaaatctccagtacttgagctgaccattgaactagggcaagtcttaaatgtgtacatgtagttgaatttcagtccttacgggtaaacagattgagcatggctctctattccctcagcctaagaaacactcatgggaatgcatttggcaacccaaggaaccatttgcttaaacctggaacatctcacctttttaaatcctaaaaaacactggcagttatattttaaattagtttttatttttatgatggttttatcaaaagacttttattattagattgggacccccttcaaacctaaaaatcaagttatttccttttataatacttttcttccccatggaacaaatgggatcaatttgtgagttttttcctttaatgataactaaaatccctctaatttctcatttatgcttttgtcttttttatgaaatatttcttttaaaagccccagtctcacctacgaaatatgaagagcaaaagctgattttgcttacttgctaaactgttgggaaagctctgtagagcatggttccagtgaggccaagattgaaatttgatactaaaaaggccacctagctttttgcagataacaaacaagaaagctattccaagactcagatgatgccagctgtctcccacgtgtgtattatggttcaccagggggaactggcaaaagtgtgtgtggggaggggaagggtgtgtgagtggttctgagcaaataactacagggtgcccattaccactcaagaagacacttcacgtattcttgtatcaaattcaataatcttaaacaatttgtgtagaagtccacagacatctttcaaccaccttttaggctgcatatggattgccaagtcagcatatgaggaattaaagacattgtttttaaaaaaaaaaaatcatttagatgcacttttttgtgtgttctttaaataaatccaaaaaaaatgtgaaaaaaaaaa

SEQ ID NO: 116135 - DNA, 1000 bp, Homo Sapiens
ctagttctaaaagtttactaaatgcctagtgcagttaaacatactcttgtttaagtgtgtgttgctaaattttttactgtcattactaaataatctgtgtggcaaaatgtgtgtcagcacttttccctccttttttatctcctattttcaggagtcaaatgtagccataaactgtatccttgtctgacactttagctaaaaatttccagttaggggagtttattgccaaattaaatttggctgttccccccaacccatatagatattaaggaaggtgtacttaaaaaatgtttggactgcttttaaaacctgagcaatgtcattaatccatatgtggactagtgatgaatagatattttcataagagtttaaatgctgatatttggtggaagtagagagtaactcatattctatcaattcaagtattcttactatggttgctttccctatttgttcaatagactgataatactggaatttatagagtttgagccattacaacttttgtgaggatgtgtttcaaacatttctggacaaatcttattttgtatttctggaagaatgtagtaatcttctagaccgcttaaaaccaatgctcccaagctgaatattcttgagaaatttgtttttattatgccatttgacatttcaaatcagtgctcatatacagtaaacttgtgatagaaattgtattttattgctttttggattataattcatataaatataattacttgaatattgtttgagatcattaacatgccagggcagttcccactgatttagatggtccaagataatctcattcaggaggcttgaaacattaatggtttagtcttgtgaattttaacagttctctgtcatcgtttaacaaaaccaacaactgacacaactccttaagctgtggtttcagtctctgctagttcatattgcatgtttattttggacagtcttttgttaagcatggtgcttgtactggtttaaataaaatgttaacatt

SEQ ID NO: 116136 - DNA, 1000 bp, Homo Sapiens
acttccctgagctgctgtcccccagcaacgtggccatctacggtggcctgtgcgccttggctacctttgaccggcaggagctgcagcgcaatgtcatctccagcagctccttcaagttgttcttggagctggagccacaggtccgagacatcatcttcaaattctacgagtccaagtacgcctcatgtctcaagatgctggacgagatgaaggacaacctgctcctggacatgtatctggccccccatgtcaggaccctgtacacccagattcgcaaccgtgccctcatccagtatttcagcccctacgtgtcagccgacatgcataggatggcggcagccttcaataccacggtggccgccctggaggacgagctgacgcagctaatcctggaggggctgatcagtgcccgtgtggactcacacagcaagatcctatacgcccgggacgtggatcagcgcagcaccacctttgagaagtctctgttgatgggcaaggagttccagcgccgcgccaaggccatgatgctgcgggcagctgtgctccgcaaccagatccatgtcaagtccccgcccagagaagggagccagggggagctgactccagccaacagccagtcccggatgagcaccaacatgtgaggggtgaaccttggcctccaggacatctgcaccccctccccacctccacggacctcggacctccaggcggctcagtgctgcctgcggcccagctaaggggcctggccactgggtgccacccagcctgtgtgccctccctggggctgaggaggcaggcggctgctagttgtggcccttcctggaaggagaggcctgcagggctcgaccctgtgggtttctgtccccagggagcagactgtgcggcacccaggcccagtggcaccatttcccagacccctcctgttcccgcctcagtcaggtgcagacaagtgggcggtgtccattaaagagcagactcagcgttaaaaaaaaaaaaaaaa

SEQ ID NO: 116137 - DNA, 1000 bp, Homo Sapiens
ctgagagctcatcagataagctgtcattggaaggaatagtggtacaaagagctgaatgccgaccagctgccagtgaaaactacatgcgattaaaaagattgcaaatagaagagtcttccaaaccagtgaggctatcacaacagctggacaaagttgtaacaaccaattacaaacctgttgctaatcatcaatacaatatcgaatatgaaaggaaaaagaaagaagacggaaagcgagctcgagctgataaacaacatgttttagacatgctattttcagcctttgagaaacatcaatactataatcttaaggacttggtggacatcacaaaacaacctgtggtgtacctgaaggaaatcttaaaagaaattggtgttcagaatgtaaaagggatccacaaaaacacatgggagctgaagccagagtacagacactatcaaggagaagaaaagagtgactaagaagactcctagccagcatgctagtgaaaggctagcagcgatgctatgcaaaaggcgctgatactggaaggcttgaacaccgtatgtttaataggggttaagtgacagtactttgatttctctcggtaaattttttaaacctgtaaggcttgtaaagtttcttaactgtttttttgaggagaaagaacagatttatttatagacttaacttgtattaaaccagattattcacagtaggaataggggttggaggattaagagggtttttcttaaatattagcttttaatgtgtacaattaggaaatttttttaagtgaggactctctacccttgccgtatctaaggagctgaggtaatacagatccaaggagaattgtatagcaagaaaaaaacagtcaactacagaaactcttaaaaggaataaaaacccaaagttccttattttgaaattgtcaaagaacaaacggtgtttttcttttaaacaggtgatcacgtttcttttcatactcaacgttaataaaaggagagagtttgtagtg

SEQ ID NO: 116138 - DNA, 1000 bp, Homo Sapiens
cacaacatagtatgtttgctttccttacccaattgtaccttctagaaaatcagtgttcacagagactgcctccaccacaggcatcctgcaaatgcagactccagaatccccagcatcagcgggaaccaccatcacatctttattcctcagcccagacactcgaggcactcaacagaatcagccatccacgtctaggtatcagagaggaccacaaatacaacattctccatctgctttcagagttattattttaataaaggaagatctgggatgggctggtgggccattccagcttgccgaaatcaaagccatctgaagcctgtctctggtgaacaaacttcctctctggcctctcaggaatcagggtggcatggctcacaacagcagggccttcttctttttgacgtgcagaatctcagtggcatctgggttcacctccccactctgatgatctccagcctccactgcttctgccccccgctgctgaaatcaaacataccccaagttaaaatgaagctcccccacccccactcccggccccggttcccacaggacacgctaagaagcacagggagcatttaacaggctcaccctccctttccttttcccctcttctaccctccccaagaaaaagggccttcaaggcaggaatgagaaagcaaagccaatctctcatttagacctggcttctttcttctgaacaaagtagggttcaaaatgcagactgtcatatccagcgagtccctgaccctttctgcgaatgtaacgagcaagcagtcagcacagcctgggctgccctggcccgggattgatgtagccccggtaggtttgcctctgcagaactaatggctgtgacttcagagaaagccctgcaggaagtttaacctgcgtgtcatctgcctggtcatctcagacccatgaaattaggcgccttgtttgagctgcgtttcacacttctttagagctagctgacctttggccaaaaataaactttgaaaag

SEQ ID NO: 116139 - DNA, 1000 bp, Homo Sapiens
agaaaccaagatggaagaattcaaggaccaattacctgctgatgagtgcaacaagctgaaagaagagatttccaaaatgagggagctcctggctagaaaagacagcgaaacaggagaaaatattagacaggcagcatcctctcttcagcaggcatcactgaagctgttcgaaatggcatacaaaaagatggcatctgagcgagaaggctctggaagttctggcactggggaacaaaaggaagatcaaaaggaggaaaaacagtaataatagcagaaattttgaagccagaaggacaacatatgaagcttaggagtgaagagacttcctgagcagaaatgggcgaacttcagtctttttactgtgtttttgcagtattctatatataatttccttaatttgtaaatttagtgaccattagctagtgatcatttaatggacagtgattctaacagtataaagttcacaatattctatgtccctagcctgtcatttttcagctgcatgtaaaaggaggtaggatgaattgatcattataaagatttaactattttatgctgaagtgaccatattttcaaggggtgaaaccatctcgcacacagcaatgaaggtagtcatccatagacttgaaatgagaccacatatggggatgagatccttctagttagcctagtactgctgtactggcctgtatgtacatggggtccttcaactgaggccttgcaagtcaagctggctgtgccatgtttgtagatggggcagaggaatctagaacaatgggaaacttagctatttatattaggtacagctattaaaacaaggtaggaatgaggctagacctttaacttccctaaggcatacttttctagctaccttctgccctgtgtctggcacctacatccttgatgattgttctcttacccattctggaatttttttttttttaaataaatacagaaagcatcttgaaaaaaaaaaaaaaaaaaaaaaaaaaaaaaaaaa

SEQ ID NO: 116140 - DNA, 1000 bp, Homo Sapiens
ggccatccgccggaaccgcgtggccctgaagggcaacatcgaaaccaaccataacctgccaccgtcgcacaaatctcgaaacaacatccttcgcaccagcctggacctctatgccaacgtcatccactgtaagagccttccaggcgtggtgacccggcacaaggacatagacatcctcattgtccgggagaacacagagggcgagtacagcagcctggagcatgagagtgtggcgggagtggtggagagcctgaagatcatcaccaaggccaagtccctgcgcattgccgagtatgccttcaagctggcgcaggagagcgggcgcaagaaagtgacggccgtgcacaaggccaacatcatgaaactgggcgatgggcttttcctccagtgctgcagggaggtggcagcccgctaccctcagatcaccttcgagaacatgattgtggataacaccaccatgcagctggtgtcccggccccagcagtttgatgtcatggtgatgcccaatctctatggcaacatcgtcaacaatgtctgcgcgggactggtcgggggcccaggccttgtggctggggccaactatggccatgtgtacgcggtgtttgaaacagctacgaggaacaccggcaagagtatcgccaataagaacatcgccaaccccacggccaccctgctggccagctgcatgatgctggaccacctcaagctgcactcctatgccacctccatccgtaaggctgtcctggcatccatggacaatgagaatatgcacactccggacatcgggggccagggcacaacatctgaagccatccaggacgtcatccgccacatccgcgtcatcaacggccgggccgtggaggcctaggctggccctaggaccttcttggtttgctccttggattccccttcccactccagcaccccagccagcctggtacgcagatcccagaataaagcaccttctccctagaaaaaaaaaaaaaaaaaaaaaaaaaaa

SEQ ID NO: 116141 - DNA, 1000 bp, Homo Sapiens
gcacgaaaattctcatagtatctacttaccatagatacctttcataactggtaactgcaaagccttttgtgctggacccaggaatccttaccatggagcagcagatagtcccagtatactcacttatctcatccatggatgtaaatgatgatgaatcaacatagtaactgaaatgaaatcttcttgattttaaataatatacgaatggtgctattaatattgctaaaatcaacgtgtgaagtgtgttgtggaagagacctgtaagtatggggggggggcgatattttatcagaccattttgtaaataaaggcagaatttgtgttgaagattcttatatgaataaccttcctggatttgtttagttttgcaccaataaaactgtgtactactgtttgttggtttaagagtagcagattgaaatataagaagccagattagactctaaaattgtggccattggaatctcatttataaatggaccttttaagtatattaattcctcttcagaattgagctggacacatttggcattcttagtttgtcatataaccaggtttatccttagtctaactgcaagggatagaacctgccccaggtcacaatcattctgtccaatccagccaaggttccctccacatatgaagatggaccatggcaggatacaactgattgtgtggcaccatgtattagcagtgggaatatgtatcacatatgatgcagcctttcatatttcagcagtttgccactgtgactgtctggcaagcccccagatggcgttatattaattggattagattattttgctcaccttatgtaatactgtaacttcctataacctaatattttcggtatcattaaccaaaatttcacactcatagttgctaaagagaatgttattcaatcattaaactctgaactgatttcttctatacatttaaattatccaccctcaataatacgggtgctcaaccctatgcattttttaagtgttgctatttc

SEQ ID NO: 116142 - DNA, 1000 bp, Homo Sapiens
acccagcgccaccatccacgccagccgcaccatgccgctcctaagcctgcacagccgcggcggcagcagcagtgagagttccagggtctccctccactgctgtagtaacccgggtccggggcctcggtggtgctcctgatgcccctcacccacccctgaagatcccaggtgggcgagggaatagtcagagggatcacaatctttcagctaacttattctactccgatgatcggctgaatgtaacagaggaactaacgtccaacgacaagacgaggattctcaacgtccagtccaggctcacagacgccaaacgcattaactggcgaacagtgctgagtggcggcagcctctacatcgagatcccgggcggcgcgctgcccgaggggagcaaggacagctttgcagttctcctggagttcgctgaggagcagctgcgagccgaccatgtcttcatttgcttccacaagaaccgcgaggacagagccgccttgctccgaaccttcagctttttgggctttgagattgtgagaccggggcatccccttgtccccaagagacccgacgcttgcttcatggcctacacgttcgagagagagtcttcgggagaggaggaggagtagggccgcctcggggctgggcatccggcccctggggccaccccttgtcagccgggtgggtaggaaccgtagactcgctcatctcgcctgggtttgtccgcatgttgtaatcgtgcaaataaacgctcactccgaattagcggtgtatttcttgaagtttaatattgtgtttgtgatactgaagtatttgctttaattctaaataaaaatttatattttacttttttattgctggtttaagatgattcagattatccttgtactttgaggagaagtttcttatttggagtcttttggaaacagtcttagtcttttaacttggaaagatgaggtattaatcccctccattgctctccaaaagccaataaagtgattacacccga

SEQ ID NO: 116143 - DNA, 1000 bp, Homo Sapiens
gttgaaccattccacattcccaccagcaatgtatgagaattccaatttctgtccacttcctcaccaacacttattattttccttttcctttttttaaaaaaaataagttatggccatcttagtgggtgtgaagtggtatctcattgtgttttttatttgcatttcctatgtaatgagctagaaactaaagtacaaactagatgggacatccagtccctttgatagataatgctgagtaaaaaatgagatgaaagacatttgtttgtttttagaacatgagtgacagtttgttaaaaagctttagaggaggaatgaaaacaaagtgaagtacacttagaaaagggccaagtggacatcttggatgtcaagtgcctagttcagtatcttttttttttttttttttttttttgagacagtgcctcactctgtcacccaggctggagtgtagtggcatgatctgggctcactgcaacctcctcctcctggattcaagcaattctcttgcttcagcctcccaagtagctgagactacaagcacccaccaccacacccggctaattttgtatttttcagtagagacggggtttcgccacattggccgtgttggtcttgaactcctggcctcaagcaatccgcctacctcagcctcccaaagtgctaggattacaggcataagccactgagcccagccctagttcagtatcttttatgtaaattataaacatctgcaacattatgtatcatatgcagatacttattgcatttcttttattagtggtgaaagtgttctatgcatttattggctcttgaatttcctcatctatgaattgtcattcacacacctacttttctgcttcgtttttacatatgtctttgcctattaaagatattatccctctgttttatattttctctcattcttgtattgccttttaaattttgttatgatgtttcattaataaacagtgttttgttttcctctataaaaaaaaaaaaaaaa

SEQ ID NO: 116144 - DNA, 1000 bp, Homo Sapiens
tttagatgacacgaccctacccacccctgtttccagcggatgcccgggcctggagcccacagaattcttccagtccctgggtggggacggagaaaggaacgttcagattgagatggcccatggcaccaccacgctcgccttcaagttccagcatggagtgattgcagcagtggattctcgggcctcagctgggtcctacattagtgccttacgggtgaacaaggtgattgagattaacccttacctgcttggcaccatgtctggctgtgcagcagactgtcagtactgggagcgcctgctggccaaggaatgcaggctgtactatctgcgaaatggagaacgtatttcagtgtcggcagcctccaagctgctgtccaacatgatgtgccagtaccggggcatgggcctctctatgggcagtatgatctgtggctgggataagaagggtcctggactctactacgtggatgaacatgggactcggctctcaggaaatatgttctccacgggtagtgggaacacttatgcctacggggtcatggacagtggctatcggcctaatcttagccctgaagaggcctatgaccttggccgcagggctattgcttatgccactcacagagacagctattctggaggcgttgtcaatatgtaccacatgaaggaagatggttgggtgaaagtagaaagtacagatgtcagtgacctgctgcaccagtaccgggaagccaatcaataatggtggtggtggcagctgggcaggtctcctctgggaggtcttggccgactcagggacctaagccacgttaagtccaaggagaagaagaggcctagcctgagccaaagagagagtacgggctcagcagccagaggaggccggtgaagtgcatcttctgcgtgttctctatttgaacaagcatttcccccagggaagtttctgggtgccccactaagtagaataaagaaaaacggttataaataaaaaaaaaaaaaaaaaaaa

SEQ ID NO: 116145 - DNA, 1000 bp, Homo Sapiens
attgttttgattcttatggttaaagggaaatagagccttgcattatattcaacacagccatttgtgtgtgcacaatgcaaactaaggtattctagacctatcttagagcagcatccagtatttgctttctagataatatgcccaataacatgacctagaggggcttctgtgctgtgtagggatttaaccaacttcagtggttcagggagctcaaactatatgtaaaacaagtttagaatgtatgctatctagcccgttatctctgatccttctctaaaaccatttgaaatagcttcattgatcaacatttcataaatgcatctgtggtagaggtagaaagcagcacctttcctaattggcaaatgatcagactaatgtgtgctaatgtttttcttccatgctttcagtcagattcaactattttatcctccacagttgcttaacttggtgttggaggagggtttaaacattaagataggaagcaggaaatttgattgctctaaatttagaaattatatccctaaaaattaaaacatgaatactgggtggtaatgataattgaggcaaatgtatttattttggtgacattttgcatatatgaagattttctgaaataggaccttcaagatcctagggggttttgtttggtttttaattgtgaggaataaaaaatcttctgcccacactggcattttaaggtgactgaggtcaaacgttgtttccttaggttgaaatagcagccaaaacattcttcacgcaggggcttgggatatggctgctggcaacacattttgttgtgggctccttaatttaatgataaaatttaagctaaacacaagccaaaaatgaataggtttttttaatttttatttttcactaaacaggcaattgaaatacatggtacaaaaataagtggtaagataattgtaaaatgaaatggacagaatattcaattttccatctatgaaaatttcacaataaaaatcatagtttactttgt

SEQ ID NO: 116146 - DNA, 1000 bp, Homo Sapiens
actggtacagtagtcacctgtgaaaaaaaaaaattggaacttactaatttgggcttttcaaaaacattctttgtttagaaggagattctaaagttatttatgatgcttagccatagtattcaggcaaatgttcatttctcctggtacctgtatttaaaatgtacattccacattttaataaattaaccacaagaaaataatcccacatatacaaggtcaggggtggggaagagtattaatggtatcttaattatacccagtctggttttttttttaaatggggtaaaaatcaaatgcaaccccatcttgttttaggaattttgagaactaataaatgcaccttaatggtcagtgttcctttcaaacatgtgagttctttaacaaaaatgaaataaaccaggtgtctgtgatttctaattaatcaccgctggccattacacaggttttgttgtttggggtggggagggggcttttgttcccttttgacataatatagtcaatgcactaacaattatgtatattcaaacttgattattttaaattcgatcttcagctgtactgtaaatagggtactgcattgtagtctccatatctgtattacttttctgtaatatttaagagttgcttaaaagcatacaaaatgtactgttactaaaacagctaattatttctctctccccctttgacaggaaggggcttcagttgttcctccatggctagaaccataataaacaatgtacccgtaatttgtaacataaagtattgcaatatgttagtaacaatcttgcagccttcctttccaaagttcattttattttgatcagttcagtatattgcactaattattttaggtattttcattatatgaaagctaccatgtgtcagagatgatttaatctatttaagtgttggactgctaggagaacttgtacatttatgataatgcagaattaggaaaacggttcaccagtgtttagttttatattgaggtgctcaggtt

SEQ ID NO: 116147 - DNA, 1000 bp, Homo Sapiens
ggggcaggtcctgaggcacgtgaatggccaggatcagattgtgcccggcctgtacgcctgtggggaggccgcctgtgcctcggtacatggtgccaaccgcctcggggcaaactcgctcttggacctggttgtctttggtcgggcatgtgccctgagcatcgaagagtcatgcaggcctggagataaagtccctccaattaaaccaaacgctggggaagaatctgtcatgaatcttgacaaattgagatttgctgatggaagcataagaacatcggaactgcgactcagcatgcagaagtcaatgcaaaatcatgctgccgtgttccgtgtgggaagcgtgttgcaagaaggttgtgggaaaatcagcaagctctatggagacctaaagcacctgaagacgttcgaccggggaatggtctggaacacagacctggtggagaccctggagctgcagaacctgatgctgtgtgcgctgcagaccatctacggagcagaggcgcggaaggagtcacggggcgcgcatgccagggaagactacaaggtgcggattgatgagtacgattactccaagcccatccaggggcaacagaagaagccctttgaggagcactggaggaagcacaccctgtcctttgtggacgttggcactgggaaggtcactctggaatatagacccgtaatcgacaaaactttgaacgaggctgactgtgccaccatcccgccagccattcgctcctactgatgagacaagatgtggtgatgacagaatcagcttttgtaattatgtataatagctcatgcatgtgtccatgtcataactgtcttcatacgcttctgcactctggggaagaaggagtacattgaagggagattggcacctagtggctgggagcttgccaggaacccagtggccagggagcgtggcacttacctttgtcccttgcttcattcttgtgagatgataaaactgggcacagctcttaaataaaatataaatgag

SEQ ID NO: 116148 - DNA, 1000 bp, Homo Sapiens
gaagtctcgagaccggatcctgaatgtcttccacgagctgaacctgaaggatgccatcagctacgtggctgagggagagcgccgcgggtccctggccttcatccgctcccccagcaccgacaacgtggtcaacgtggacttcacgccacgatcgtccaccgtggaggcctctgtctcctacctcctgagagaaaatgtcagcgctgtctgcctggacatgcagtctctggagcagcgacggcggagcatccgggacgcggaggacatggtcacgcaccacacgctacagcagtacctgtacaagccgcggcaggagtacaagcatctgtacagccgacacgagctcacgcccacggaggacgagaaacaggaccgggaaatcttccacaggaccatgcggaagcgcctggagtccttcaagtcgaccaagctggggctcaaccagaacaagaaggcagccaagctgtacaagcgggagcgtgcccagaagcggagaaacagcagcatccccaatgggaagctgcccatggagagccctgcgcagaatttcaccatcaaggagaaagacttggaactttcagacaccgaggagccccccaactatgatgaggagatgagtggggggatcgagttcctggctagtgtcaccaaggacacagcgtccgactcccctgcaggaattgacaaccctgtgttttctccggacgaggccctggaccgcagcctcctggccaggctgccgccctggctgtctcccggggagacggtggtcccctcgcagagggcccgcacgcagattccctactctcccggcaccttccgccgcctgatgcccttccgcctcagcagcaagtccgtggactccttcctgcaggcagacggccccgaggagcggccccccgccgccctccccgagtccacacacatgtgacaccggctccgacacgccgctaaccggccgctcgtccccgcgccacggtccgcccaccgccgccgccgc

SEQ ID NO: 116149 - DNA, 1000 bp, Homo Sapiens
atccaagggcctgctcaccgcttgcaaactgaaggtgttcgatttattaaaagatgaagcaccccagaaggctgcggatattgccagcaaagtggacgcctctgcgtgtggaatggagaggcttctggacatctgtgctgccatggggctcctggagaagacagagcaaggttacagtaacacagagacagcgaacgtctacctggcatcggatggcgaatactctctgcacggcttcatcatgcacaataatgacctcacatggaacctctttacatacctggagtttgccatccgagagggaacaaaccagcaccacagggcgttggggaagaaggcggaagatctgttccaggatgcgtactaccagagcccggagacgcggctgaggttcatgcgggccatgcacggcatgacgaagctgactgcgtgccaggtggccacggccttcaatctgtcccgcttctcctccgcctgcgacgtgggaggctgcacgggtgcactggcccgagagctggcccgtgagtaccctcgtatgcaggtgactgtgtttgacctcccagacattatcgagctggccgcccacttccaaccccccggaccgcaggcagtgcagatccacttcgcagcaggtgactttttcagggaccccctccccagcgctgagctgtacgtcctgtgccggatcctgcatgactggccagacgacaaagtccacaagttactcagcaaggtcgccgagagctgcaagccaggggccggcctgctgctggtggagacgctcctggatgaggagaagagggtggcgcagcgcgccctgatgcagtcactgaacatgctggtgcagactgaaggcaaggagcggagcctgggcgagtatcagtgcttgctggagctgcacggcttccaccaggtgcaggtggtgcacttggggggtgtcctggatgccatcttgccaccaaagtggccccctgaagcccaggcagcatgttcattatag

SEQ ID NO: 116150 - DNA, 1000 bp, Homo Sapiens
cgagatgaactcttcaagcagaccgtcatccaggaccccatgcccatggagcctcaaggccaaaagcctctcgcctcagcccacctgacttccgctgctggcgacactaggacacctggccatccaccgcccccagagattccatctgagctgggggcctgtgactttgagaagcccgagagcccccgagccgccagcagcagctccccaggatcaccagtggcctcaagccccagcaggctgagccccacccccgacgggcctccacccttggctcagcccccactgatcctgcagcccttggcctccccactgcaggtgggcgtgccacctatgactctgcccatcatcctcaaccctgcgctcatcgaggccacctcaccagtgcccctcctggccacaccccgccccacagatcccatacccacctctgaggtcaactaaggcaggtcactcagagatcaggaccagtgcttcccaccaggctttccttgaccccacttctggctgtcctgcgggccacaagctcttcaggccaagtcagagctgctgttgctgccacttggatggggacctgaaaaagagaatgttgatagccccagctaagacccccaatcagctgtgggacctttttcctcctctgcgctccattcctgggggttcagcctgagagtgaactcagctgtcatctgcagcctctgcctccagcccggcagctctggggaggcatccgtgtgccggccctgcagtgcctgcccacggtcaggcattgaaaactaagcccaaccactctgcactttgtttcccactcccattagccctgggccacctcctccagttcttcctcttttactaattagttggtcagtttggagagttgactggcaccatggagggtaggcaggtgggggctgggtgggggactgcccacaggagcatgtacatatggaaaaacagaacaacagtggactttttatgatataataaatgtcttagtacc

SEQ ID NO: 116151 - DNA, 1000 bp, Homo Sapiens
acgatgtcatgtctgatgaggaaatcgagaggatcaaggagatcgcaaaacctaaacttgcacgagccaccgttcgtgatcccaagacaggagtcctcactgtcgccagctaccgggtttccaaaagctcctggctagaggaagatgatgaccctgttgtggcccgagtaaatcgtcggatgcagcatatcacagggttaacagtaaagactgcagaattgttacaggttgcaaattatggagtgggaggacagtatgaaccgcacttcgacttctctaggaatgatgagcgagatactttcaagcatttagggacggggaatcgtgtggctactttcttaaactacatgagtgatgtagaagctggtggtgccaccgtcttccctgatctgggggctgcaatttggcctaagaagggtacagctgtgttctggtacaacctcttgcggagcggggaaggtgactaccgaacaagacatgctgcctgccctgtgcttgtgggctgcaagtgggtctccaataagtggttccatgaacgaggacaggagttcttgagaccttgtggatcaacagaagttgactgacatccttttctgtccttccccttcctggtccttcagcccatgtcaacgtgacagacacctttgtatgttcctttgtatgttcctatcaggctgatttttggagaaatgaatgtttgtctggagcagagggagaccatactagggcgactcctgtgtgactgaagtcccagcccttccattcagcctgtgccatccctggccccaaggctaggatcaaagtggctgcagcagagttagctgtctagcgcctagcaaggtgcctttgtacctcaggtgttttaggtgtgagatgtttcagtgaaccaaagttctgataccttgtttacatgtttgtttttatggcatttctatctattgtggctttaccaaaaaataaaatgtccctaccagaagccttaaaaaaaaaaaaaaaaaaa

SEQ ID NO: 116152 - DNA, 1000 bp, Homo Sapiens
agcactgcccaggacgtgtgtccctagcctggaatggactggcctggggaaggctttcccctcttgggccacacctgctcactctggggttgggggtccagctgccctctacgatcaggtgcaggggctgcccaggacaaagcgggggcaggggaaagacaccaccctcgccccaagactggggatcctggccactgttcccatcccatgtccctgtgggtagtgactgtctcgtttctgtcatggtggtgcgtcccgtccggagccactctccactttctctcacaggctgctagaacagcccagccctgtcagtgttgtgatcatggtccagtcttcgggtttcacctcctagtactccacaagctgctcctctctctgtggccccggcccctgcccaggtgtgggtggttctggccaggaaggcacaaggtagctgtgggccaagacaccagccctgtcctagcccttcagtaagaccttgccaggagaggagaaggatgcctgggtgccaggcaagacaagcccctcagcaggagagaggcccagaggctccagctggccaccgtgccccacaagatggcccctgtgtggttccctttaccttggcttcctggcccagtccctgcctctccacctgcaccctgcttcctggcccagtcccaggttggagtccctctgcatagctgactactcatgcattgctcaaagctggcttttcacattaagtcaacaccaaacgtggttgccacatttcatcagacagacacctccctctggagatgcagttgagtgacaaccttgttacattgtagcctagaccaattctgtgtggatatttaagtgaacatgtttacaatttttgtatatatcactctctccctctcctgaaagaccagagattgtgtattttcagtgtcccatgttccgactgcaccttctttacaataaagactgtaactgagctgactgtgaaaaaaaaaaaaaaaaaaaaaaaaaa

SEQ ID NO: 116153 - DNA, 701 bp, Homo Sapiens; identical to SEQ ID NO: 62107

SEQ ID NO: 116154 - DNA, 1000 bp, Homo Sapiens
ttatatctatatgtacttgtcaaagaaggtttgtgtttttctgcttttgaaatctgtatctgtagtgagatagcattgtgaactgacaggcagcctggacatagagagggagaagaagtcagagagggtgacaagatagagagctatttaatggccggctggaaatgctgggctgacggtgcagtctgggtgctcgcccacttgtcccactatctgggtgcatgatcttgagcaagttccttctggtgtctgctttctccattgtaaaccacaaggctgttgcatgggctaatgaagatcatatacgtgaaaattatttgaaaacatataaagcactatacagattcgaaactccattgagtcattatccttgctatgatgatggtgttttggggatgagagggtgctatccatttctcatgttttccattgtttgaaacaaagaaggttaccaagaagcctttcctgtagccttctgtaggaattcttttggggaagtgaggaagccaggtccacggtctgttcttgaagcagtagcctaacacactccaagatatggacacacgggagccgctggcagaagggacttcacgaagtgttgcatggatgttttagccattgttggctttcccttatcaaacttgggcccttcccttcttggtttccaaaggcatttattgctgagttatatgttcactgtccccctaatattagggagtaaaacggataccaagttgatttagtgtttttacctctgtcttggctttcatgttattaaacgtatgcatgtgaagaagggtgtttttctgttttatattcaactcataagactttgggataggaaaaatgagtaatggttactaggcttaatacctgggtgattacataatctgtacaacgaacccccatgatgtaagtttacctatgtaacaaacctgcacttatacccatgaacttaaaatgaaagttaaaaataaaaaacatatacaaataaaaaaaa

SEQ ID NO: 116155 - DNA, 1000 bp, Homo Sapiens
tagagtcatttcatttaacacaggaactgagacttttgaaggaagaaatcaattatgatgataaactacaggttaaaaatattttgtatcatgcagtcaaagaaatggtgagagccttgaagatacacgaggatgaagtagaggatatggaagaaaattaagtgtgatccagtttgatatttttaggttgttgaactgggattacttaaccttgaatgatgatatgtatgcacactgactttaagcttcataaaaccatcagtgccaagaaattctctttgtagtaattacttgttactgacaccacagcagtatagcatatgtcacagctcctgtgattcaatgttataaaacaagcagaattttaaaagcagcactatatagctgttttgtattatagtgtatatgatgtttgtgaaaatgccagatttaaaatgatgtatttatttttggtaaaaaataaaaaattctatgctatattgttgatcaagtgtaaatgtgaccttgtacagtttactaaaattactgatatttttcactacattgagacagttactgtgagaataggacacaaacaccagctattgcctgcatctgggaaattgctgaatcgcacagcagtcatgtcataatcagaaaattactgccaaataattgtaaaatttgtaaagtataaagtatataaagtagatactaaatacagacacttcaatattttgttgaagctattgactgtacaattaaacattttcaaaaggtgtaatttatttaaaattgtctcattttggtaaaatttatgtgaacttttaaagctaaatattaaacttaatatgctatgtaaatatatacatatatacatttaatgatgtatttttttaaaacattggcttgcttttgttaaagtgcaagtgttacatatggctttgtacattaaagttgaaaggggttttacattttccattaaaaggactttatcaaaaaaaaaaaaaaaaaaaaaaaa

SEQ ID NO: 116156 - DNA, 645 bp, Homo Sapiens
gcgccgccatcgccgtcatgctgggcgccgctctccgccgctgcgctgtggccgcaaccacccgggccgaccctcgaggcctcctgcactccgcccggacccccggccccgccgtggctatccagtcagttcgctgctattcccatgggtcacaggagacagatgaggagtttgatgctcgctgggtaacatacttcaacaagccagatatagatgcctgggaattgcgtaaagggataaacacacttgttacctatgatatggttccagagcccaaaatcattgatgctgctttgcgggcatgcagacggttaaatgattttgctagtctagttcgaatcctagaggttgttaaggacaaagcaggacctcataaggaaatctacccctatgtcatccaggaacttagaccaactttaaatgaactgggaatctccactccggaggaactgggccttgacaaagtgtaaaccgcatggatgggcttccccaaggatttattgacattgctacttgagtgtgaacagttacctggaaatactgatgataacatattaccttattttgaacaagtttccctttattgagtaccaagccatgtaatggtaacttggactttaataaaagggaaatgagtttgaactg

SEQ ID NO: 116157 - DNA, 1000 bp, Homo Sapiens
agagtgctctgaccctgggctttcacgggccccattccaccgcctccccaacttgagcctgtgaccttgggaccaaagggggagtccctcgtctcttgtgactcagcagaggcagtggccacgttcagggaggggccggctggcctggaggctcagcccaccctccagcttttcctcagggtgtcctgaggtccaagattctggagcaatctgacccttctccaaaggctctgttatcagctgggcagtgccagccaatccctggccatttggccccaggggacgtgggccctgcaggctgcaggagggcactggagctgggaggtctcgtcccagccctccccatctcggggctgctgtgtggacggcgctgcctcaggcactctcctgtctgaacctgcccttactgtgtttaacctgttgctccaggatgcattctgataggagggggcggcagggctgggccttgtgacaatctgcctttcaccacatggccttgcctcggtggccctgactgtcagggagggccagggaggcagagcgggagggagtctcaggaggaggctgccctgaggggctggggagggggtacctcatgaggaccagggtggagctgagaagaggaggaggtgggggctggaggtgctggtagctgaggggacgggcaagtgagaggggagggagggaagtcctgggaggatcctgagctgctgttgcagtctaacccactaatcagttcttagattcaggggaagggcaggcaccaacaactcagaatgggggctttcggggagggcgcctagtccccccagctctaagcagccaggagggacctgcatctaagcatctgggttgccatggcaatggcatgccccccagctactgtatgcccccgacccccgcagaggcagaatgaacccatagggagctgatcgtaatgtttatcatgttacttccccacccctacattttttgaaataaaataaggaattttattctc

SEQ ID NO: 116158 - DNA, 1000 bp, Homo Sapiens
taaaataatatgtttttcatgcagtttaaaatattactaacttaagggtttctatgtgctttttaaaatattccttctttgatgttgacatcaaataaagtatgtggtttaaaaaaatctccaaatacctttttttccccccaaatactttctaaactttttttttttgagatggtatctcactctgtagcccagtctggagtgcagtggtgtgatcatggttcactgcagtcttgacctcccaggcttaggtgatccttctgtctcagccttccgagtagctgggaccacaggcatgcacaaccacgcctggctaatttttgtattttttataaagacagggtttttccatgttgcccaggctggtttcgaactcggctcaagtgatctacctgcctctgcctcccaaagtgctaggattacaggcgtgagccaccatgcccagcctactctaaattattgataacctcttcctccagttgtctcctttaagctttcctgggtctaacctacataggtaatttaagaacatcctcagaaaggacagctgaaggcaataggaggcagattatctctttagggcgtcctcaagtttttttggtctgttctcccacttgattgacctcaccagttgagacacctagtgtatggctcatgcccagccttccacctgggattctccagcctccacccagcagccctggattgctttctccaattaaggcctttccatcagctctctgctttttcaaagcgaaaaaactaatggattagtgggttatcttttccaaggaacaggtttgcacttcttggaaaaagtgcctaaagtgtgcccattaatatgaggatagatttaggctcataagccttttggtaacactgaaagtagtatcatataggcaagctctccttataagtaaggctttcaatttttaaaacagacatcctgctttaacaatttgtaagatgactgtgcagtaataaaagtcctttgtatttc

SEQ ID NO: 116159 - DNA, 895 bp, Homo Sapiens
ttatttttctgtgtgtcccatacaggcccccaccatgaagggtttcacagccactctcttcctctggactctgatttttcccagctgcagtggaggcggcggtgggaaagcctggcccacacacgtggtctgtagcgacagcggcttggaagtgctctaccagagttgcgatccattacaagattttggcttttctgttgaaaagtgttccaagcaattaaaatcaaatatcaacattagatttggaattattctgagagaggacatcaaagagctttttcttgacctagctctcatgtctcaaggctcatctgttttgaatttctcctatcccatctgtgaggcggctctgcccaagttttctttctgtggaagaaggaaaggagagcagatttactatgctgggcctgtcaataatcctgaatttactattcctcagggagaataccaggttttgctggaactgtacactgaaaaacggtccaccgtggcctgtgccaatgctactatcatgtgctcctgactgtggcctgtagcaaaaatcacagccagctgcatctcgtgggacctccaagctcctctgactgaacctactgtgggaggagaagcagctgatgacagagagaggctctacaaagaagcgcccccaaagagtgcagctgctaattttagtcccaggaccagacatccccagactccacagatgtaatgaagtccccgaatgtatctgtttctaaggagcctcttggcagtccttaagcagtcttgagggtccatcctttttctctaattggtcgcctcccaccagactcacctgcttttcaactttttaggagtgcttcctcacagttaccaagaataaagaaagctggccaccataaaaaaaaaaaaaaaa

SEQ ID NO: 116160 - DNA, 1000 bp, Homo Sapiens
tccccattcccaaagtcagaaagcgaagccagatctcaagggctgatacctgaggcaaggagagctaaggggagagaaattggggctgagtggaagcagatgcctgcacaagccaagtgtgtcttattgatctgtacaagctgatagaaggaccatctgctgaaatccagggctcctgagttggtgggtttgcttgtgaagcttctaggacaaggcgcagccagatggaagggagagggtccagggcttcctaaatgcagccgcatcacctgtcaactcgctgcagtttcagagacagtggaagctgctctttacctcaaaagcacaaagcagaattggcaacttcacatgtctcgagagctccaagatcctttggtctcgtgtccttcggcaccccgtaactggactggggacaaatttgttacgtgtttccaaggctacagacatggtgccatcctcacaggcctagctcatgtcatggatcaggtgctttgctggggggatacaatgacccatgtggtctgcgtcttctgccattggcttgaactgggcaccccctgaagtctccatctcagctgtatattctagtccaaattttcctggctcccctgctccctcccaggtcctgcacactgtctttttgccaacacctcagccctgtttgctatttcatgtctgcatggtacgagacaccccttcacagcatacactgccatggtatgtacatatgcatccacgtgtgtgtatgtgtagcatgtagctcattctgctcagcctctggcgccgttccacattgctcccagccccattgctgtcactgtcgtcccagatgtccttgccatggccacagacaatctgccgtctcctggaaacgctggggctgcccttcagagagctggcagccccagcagtcagggcctgctttgcagaatagaatgtgaacccaactcctgatggcctacttgacttatttaattaaagatgaaatcatgcaatgagc

SEQ ID NO: 116161 - DNA, 1000 bp, Homo Sapiens
tgacttagcaaagtttcatttcggtgactctttatgcacacacaaaggagaaataccagctctgcctccctgcaaattcacaggaagtgagattcgtgtgagggatgacaagatgcctttggcgcaccttgcaatagctgttgaagctgttggttgggcacatccagatacaatctgtctcatggttgcaaacacgctgattggcaactgggatcgctcttttgggggaggaatgaatttatctagcaagctggcccagctcacttgtcatggcaatctttgccatagctttcagtctttcaacacttcctacacagatacaggattatggggactgtatatggtttgtgaatcatccactgttgcagacatgctacatgttgttcaaaaagaatggatgcgactctgtacaagtgtcacagaaagtgaggttgcacgagccagaaatcttctgaaaacaaacatgttgttgcagcttgatggttcaactccaatttgtgaagatattggtaggcaaatgttatgctataatagaaggattcccatccctgagcttgaagcaagaattgatgctgtgaatgctgagacaattcgagaagtatgtaccaaatacatttataataggagtccagctattgctgctgttggtcccattaagcaactaccagattttaaacagatacgcagtaacatgtgttggcttcgtgattaaaatgctcctaatcaagattgtttgaacacatgtatttataaaacagagctagagaaaaataaaaatgaacatgtatatacatttggaaatttgaattaaatactgtatcatactttcaaaggataaaaagactacccctctgaaggttgttttgtattaatggtcagtctttgttctctgagaaattatgttggaagcagcatactttcaaattattaccatgagtataattttaagaatgaaaatgtttacagtattttcagttttattataaaaatgcacacacaa

SEQ ID NO: 116162 - DNA, 1000 bp, Homo Sapiens
ctggagcaggctgtagacaactttgaaggcaagaagactgacaaaaagtacctgatgatcgaagagtatttgaccaaagagctgctggccctggattcagtggaccccgagggacgagccgatgtgcgtcaggccaggagagacggtgtcaggaaggttcagaccatcttggaaaaacttgaacagaaagccattgatgtcccaggtcaagtccaggtctatgaactccagcccagcaaccttgaagcagatcagccactgcaggcaatcatggagatgggtgccgtggcagcagacaagggcaagaaaaatgctggaaatgcagaagatccccacacagaaacccagcagccagaagccacagcagcagcgacttcaaaccccagcagcatgacagacacccctggtaacccagcagcaccgtagcctctgccctgtaaaaatcagactcggaaccgatgtgtgctttagggaattttaagttgcatgcatttcagagactttaagtcagttggtttttattagctgcttggtatgcagtaacttgggtggaggcaaaacactaataaaagggctaaaaaggaaaatgatgcttttcttctatattcttactctgtacaaataaagaagttgcttgttgtttgagaagtttaaccccgttgcttgttgttctgcagccctgtctacttgggcacccccaccacctgttagctgtggttgtgcactgtcttttgtagctctggactggaggggtagatggggagtcaattacccatcacataaatatgaaacatttatcagaaatgttgccattttaatgagatgattttcttcatctcataattaaaatacctgactttagagagagtaaaatgtgccaggagccataggaatatctgtatgttggatgactttaatgctacattttaaaaaaagaaaataaagtaataatataactcaaaaaaaaaaaaaaaaaaaaaaaaaaaaaaaaaaaaaaaaa

SEQ ID NO: 116163 - DNA, 1000 bp, Homo Sapiens
tgtgaacagacactacttgtgtcgctttgggtccttcactttacccccacagaagtctagaggcgtctgttataaagcgttacggggcgcctgcatgcaggaggaaggacctgtattagctggaaatcatcaggaacccagcttgcctccatctctctgagatgtgctgggtacagcctgcccctcctagttctgtccaccgggaagagccggctggcggcagatccccaggggcagagcccctgctggatcctgggagctcatctttacctgtgccggagtgggaactgtgattccagccgggcaggtcagagtggagcagtgctaagaggctgttgcaggagaactagacgggcggggcctgctgcatctggatcatgtttctgtgctctgccccgcgctagggactcagggtctgggcttctgccaggtgaggagcagagagactgttcccttgggtggagaggtgtgggcatgagagccacccattgccaagcagcaagaatgttcgtgcttttttccagagaggggaaccccactggtttttgtggaaacaatggaaacttacagatgcctgcctgggatgatgaggcacattcagaacaaatgcttttttttttttgagacagagtctcgctctgacgcccaggctggagtgcagtggcgcgatctcggctcactgcaaactttgcctcccaggttcaagtgattctcctacctcagcctcccgagtagctgggattacaccaccatgcccagcaaatttttgtgtttttagtagagacggagtttcaccatgttggccaggctggtctcgaactcctgacctcaggtgatccatccgccttggcctcccaaagtgctgggattacaggcgggagccaccatgcctggccagaacaaatgcctttttaaaccttttaagaacatttttaaaatgtctttttctatgtcaaatgtaacgtttatttttttaaacaataaaattgatttgccaaaa

SEQ ID NO: 116164 - DNA, 1000 bp, Homo Sapiens
cagtgactggagggtggactggggggttgcagcatctttagacctagatctgtctaactctggggaggcacattgacatttccattacacacagcactgctgcggtgccagggacctagcgcaggacttttggtaatccataaaatggattctgagactgcgacggcaaggctgtcctgtcccccaggcacccaaggatcctgccagacagcacactttggaggaaggtctgcagggagcagctgagccatttgttcttgaactctgggaggcagaagtccccgcacccatcatgcgtggactgataggacatcttttcgtggtgtgcaccagtgctttccacacttgacagtggttggctttgatgaaccctcatgctgcaccttcagagccagtcctctagtttggaataaaaattgcagaggtggtttttgggtctttaccacctgcggctggtggacagcagccagtgtgtctggacacccaggggcattgagactgcatgttgtcacatgaccacttctcttcacacatctgctttcagtgcctggtgaaaaatagaccttggcctaacagtgtgactctctccaccgcctcagtgtagggaagggtccaggccagggaaggagcaccctctagtggaggcgggggtgaattcttaggtcgagctgatgcaagaaactccggtagccagcctctgtgaccttgtacatgagtttggtgtgcctattgtgatttaaaacaggtgggttatcaagaggaacttgagatctctttattacatggacatttacttcagggggaccactgtaagaaaagccaaactccaagaccaagtaagttagaggagtcttgattttttagacttcactgcggagttctgtacaccctttgccctgatgaatttgaatgggtttgatttgcaaatttggatttacacccattgttttggaagcacatcagctgaataaagttgaggtttattttatttagaaaatca

SEQ ID NO: 116165 - DNA, 1000 bp, Homo Sapiens
ggccctgaggacccaggaaggggagggcgcgggtgccgacgagttcctgcctctgctgagcctcgtcttggcccactgtgaccttcctgagctgctgctggaggccgagtacatgtcggagctgctggagcccagcctgcttactggagagggtggctactacctgaccagcctctctgccagcctggccctgctgagtggcctgggtcaggcccacaccctcccactgagccccgtgcaggagctacggcgctccctcagcctctgggagcagcgccgcctgcctgccacccactgcttccagcacctcctccgagtagcctatcaggatcccagcagtggctgcacctccaagaccctggccgtgcccccagaagcctcgattgccaccctgaaccagctctgtgccaccaagttccgagtgacccagcccaacacttttggcctcttcctgtacaaggagcagggctaccaccgcctgccccctggggccctggcccacaggctgcccaccactggctacctcgtctaccgccgggcggagtggcctgagacccagggggctgtgacagaggaggagggcagtgggcagtcagaggcaagaagcagaggggaggagcaagggtgccagggagatggggatgctggggtcaaagccagccccagggacattcgggaacagtctgagacaactgctgaagggggccagggtcaagcccaggaaggccctgctcagccaggggaaccagaggcagagggaagccgggcagcagaggagtagcttgaagtggccagaagggtcattcggggcgggagaccctgagcctgctgagaaatccttttagcgccagcaagccccacccagggccctgtcctgtgtctgccaccacctttgtctgatacttgtttccagggaagctgggggaactgccacatctgaggaactggaataaagatgagggggcttcgggggcccccagactgtgaaaaaaaaaaaaaa

SEQ ID NO: 116166 - DNA, 1000 bp, Homo Sapiens
gcagattattgagaaagacaagcgtcagcaacaaagtgctagaaaactgcaggtgggaacaagagcccagtcagagcgaattcggacatataatttcacccaggatagagtcagtgaccacaggatagcatatgaagttcgtgatattaaggaatttttatgtggtgggaagggcctggatcagctaattcagagactgcttcaatcagcagatgaagaagccattgctgaacttttggatgaacaccttaaatcagcaaaataaatactaacttattattatttatgattatataaatgaaatggacctatatcaagaggcagactgaagcttggaaatcattatgaatatttgtaaattacagctttaagaacacattacacataaatatatgttttgtaattaatcgaagtcacatttcctgacctaagaatttattttaggtttcctgtaaagtacaatccaactcatcaagtagaaaataagcatgcatcattgaaaagagaaagtattgagaattgattgtgtcatttaggacaagtcacttgttctctttatatgccttttttccccagccatctatgaattaatttaaatatatttttaatctactacttcaggaaaatatggtaaaatttagtaaaatatgaattttagacttccttataaaccttttatttaaatacaaagtaccttggcctatagtggatgcttatgcctgtaatcccagtgctttgaagggccaaagggggaagatctcttgaggtaagaatttgagaccagcctgggcaaaatagaccccatgtctacaaaaaaactcaaaacataaagaaaaaccataatactgttaatcatgttaaagttaagacttagactgcaacttttaaataaaaattatgaagaatatgagtcattcaataacaatgagcatctgggtacagacagtaaagccctttgattgctgtatgaattccacactatataaacaataagctgata

SEQ ID NO: 116167 - DNA, 1000 bp, Homo Sapiens
gcccgtaggaggggcagagattgtgctgataggtcagtccagataggtgggttctagcaatttccccaggggattaaggggctctagggccacctttttttttttttttctgagatggagtctcgctctgtcaccaggctggagtgcagtggcgcgatctcggcacacctccgccttctgggttcaagcaattctcctgcctcagcctcctgagtagctgggactataggtgcatgccaccatgcccagctaatttttgtatttttagtagagacggggtttcaccatgttggccaggatggtctcgatctcctgacctcatgatccacccacctcggcctcccaaagtgctgggattccaggcgtgagccactgcgcccggccagccctgttgtctttcaaagaacctcggccccagtgatggctgatctcactcccactgtctcgtagaattacactccttcctggggatccctcttcctgcagccttgtccttggggagtacagggaagtacctgcagtgaccctgcccccatgaccttggccaggcaggatgattccagagcccgtactgtggggatcctcactgaccagcccagccccatccgcaagccaggctgggcctgggcataacttcgctgggctctcccaagaccatcagcagtgcatccagccccctggggcctgggctgctgctggttcttcatcagtcccttggtctctagcctcggccagggctgctctgctctccgccctcctttgtgtatcaagtgtcgctcacagccccattcactggggagcctttcggatctatttggtctttctcatgtcccccactggtctgtaccccagggagcgggtgcttgtactgtgtgaatccagtgttcacattcacacttaatgacttccttggcaccaatcatgtatttcaccgtttgcactttttgtatttcaataaaaatgttgatgcaaaaaaaaaaaaaaaaaaaaaaaaaaaaaa

SEQ ID NO: 116168 - DNA, 1000 bp, Homo Sapiens
gtctcctgtctcgttgctgcttctgcctgtgctgtgggggagagaggccgcagccaggcctctgctgccctttctgtgccccccaggttctatctccccgtcacacccgaggcctggcttcaggagggagcggagcagccattctccaggccccgtggttgcccctggacgtgtgcgtctgctgctccggggtggagctggggtgtgggatgcacggcctcgtgggggccgggccgtcctccagccccgctgctccctggccagcccccttgtcgctgtcggtcccgtctaaccatgatgccttaacatgtggagtgtaccgtggggcctcactagcctctaactccctgtgtctgcatgagcatgtggcctccccgtcccttccccggtggcgaacccagtgacccagggacacgtggggtgtgctgctgctgctccccagcccaccagtgcctggccagcctgcccccttccctggacagggctgtggagatggctccggcggcttggggaaagccaaattgccaaaactcaagtcacctcagtaccatccaggaggctgggtattgtcctgcctctgccttttctgtctcagcgggcagtgcccagagcccacacccccccaagagccctcgatggacagcctcacccaccccacctgggcccagccaggagccccgcctggccatcagtatttattgcctccgtccgtgccgtccctgggccactggcctggcgcctgttcccccaggctctcagtgccaccacccccggcaggccttccctgacccagccaggaacaaacaagggaccaagtgcacacattgctgagagccgtctcctgtgcctcccccgccccatccccggtcttcgtgttgtgtctgccaggctcaggcagaggcgcctgtccctgcttcttttctgaccgggaaataaatgcccctgaaggaaaaaaaaaaaaaaaaaaaaaaaaaaaaaaaaaaaaaaaaaaaaaaaaaaa

SEQ ID NO: 116169 - DNA, 1000 bp, Homo Sapiens
cctgaaaaaggcagagtttgaaagctcccatttaaaaacaaaatactttttaaagccctcttgcctcttccctgcccactcctgccccctgaccagaagacagaatttgaagctggaaagggaagaccccttttcccctcctcctgtccccagtgagtcttagcgagacttttgccctgcgcacaattgcatctgaatgtgcgggggagagggctgggggccggagggcaggcaaggcctggggggtgctcgtgatatgtgctcaagccagttgtgggaaaaactcgagtcctcccctcctcccgacctaccccgtgtggctgcttttggctggattccctgcacccagtgcaacacaccctttccccttcactctcccttggttactatggaaacaagggtgtcattgatgtgggctgagctggggaacatgtcggtgcacagctgaaagtcagcgattatgccggcggttagaaatgtgccagggttaaaggagtccgcagctcccacggctgctgggaggacatggtcctgcccccttccttcctccctccctccgtctccacttctctctccttgcttttgacaaatttctttattcccctctggactaaagtagtggctatttttgtgccactctgcgccccaccctcactgttggccgctccttatccggcctggcctggagggtgacaccatgtcaccctcaccaggactcgtctctccattcccgtcagagtttgctttgatttccctttcctttccttctcggggaccagttcttacttccttttatttttagctctgcactccatgtggtttcagggttcagtctgatccatcaaaaggttctttttttataatcccttttgaaaatgataatcaaaggaagagatgtggtgtttggtcatgtggaaaactcaatgtataatttagacgtctgtcaaaaatccgacaaataaaatttagctggaacgaaaaaaaaaaaaaaaaaaaaaaa

SEQ ID NO: 116170 - DNA, 1000 bp, Homo Sapiens
atgagaagttactgtgcaccaaactgccgaacaccattctaaactattcatatatattagtcatttaattcttacataacttgagaggtagacagatatccttattttagagatgaggaaaccaagagaacttaggtcattagcgcaaggttgtagagtaagcggcaaagccaagacacaaagctgggtggtttggtttcagagccagtgcttttcccctctactgtactgcctctcaaccaacacagggttgcacaggcccattctctgatttttttcctcttgtcctctgcctctccctctagctcccacttcctctctgctctagttcattttctttagagcagcccgagtgatcatgaagtgcaaatcttgccatgtcagtcccctgcttagaaccctccaatggctcactttctctttaggcaaaagtctttaccccatgccttctcccatctcatctcaaccccctcatttgttggctgtctgctgtcagccactcttctttcaggtcctcagatgcactgcaccctctcctgcctgggggtctttgctcctgctactacctctgcttgaacagctcctcaccttccttcctccaaccctacccttgtataggtgacttttgttcatccttcagaattcaactcacatgtctcttgcatggagaaccctcacctactgtgttgagaccctgtccagcccccaggtgggatcctctctcgacttcccatacatttctttcacagcatttacatagtccatgatagtttacttgtgggattatttggttaatctttgcctttaacaccagggttccttgggtgaaggagcttctttatcttggtaacagcattatttcaagcataacttgtaatatagttatattacatatataacatatatatatataacataacatatataacatatataacaagcataacttgttatatagtcttgtatatagtaagacctcaataaatatttggagaacaaa

SEQ ID NO: 116171 - DNA, 1000 bp, Homo Sapiens
tatattttatattgctaaatagagaaccacactttatataaagtagtttttgcatttgtttattgaatgatgcatcttcttcggtgaaatatttatatgcataaatggcaaaggaaagaaataatatatatttttatgtcattgagcaatattttttcaatgtgtacctgtcttatggaagaaatatgcaggtatataagaccacgattttctaagctgccatataagaatttttgtttttgtaaatggttaaatacatttcctgggtaacttaggaaattaagctttttcataaggcaacagatggtaaactgattgtcatgaatacccaaagatcatgtatataatcgaagtgtattagtaccatcccaaggtttttttctcatttaacatatttgtttcataattcagcaagtacagatgcaagcgcattgcacactttttcctttctaaacttaaagacaagtcaaaaagccattcttagaactagaggatttaagcagggtcggaattacgggtttgtatatatgtatatactcgtttgtatatatgtatatactgggacattttatcttctggcccaaagtcagaactttataaaaatcttgagtttgttcacttaatgtgaaataagctatgtgtccagggtattgctcccctgagtgtatatgagtgctgagtagtattgcagagaatgtgatgagttatcactgtcacaactttttctatagaaaacaggggctgcttttaaactctcactatgggacactttaccaaaatacttccatatcaattatttgaacccggtagtttgtttgacctagttagattgtggtgtttattcaagtttgaaatcatgtttgacaatactgtaaattaggttaattttgaagtcttagcatcatcatattgtgctgttttggataacacgtttgttcaagaacatttaaactgtttctttggtgtcctttacattgaaataaattgtgtttgtgcctcc

SEQ ID NO: 116172 - DNA, 1000 bp, Homo Sapiens
ttggacatctttttcctagaccatgtttctgtcttactcttaaacctggtaacacttgatttgccttctataacctatttatttcaagtgttcatatttgaatttctttgggaagaaagtaaatctgatggctcactgatttttgaaaagcctgaataaaattggaaagactggaaagttaggagaactgactagctaaactgctacagtatgcaatttctattacaattggtattacaggggggaaaagtaaaattacactttacctgaaagtgacttcttacagctagtgcattgtgctctttccaagttcagcagcagttctatcagtggtgccactgaaactgggtatatttatgatttctttcagcgttaaaaagaaacatagtgttgccctttttcttaaagcatcagtgaaattatggaaaattacttaaaacgtgaatacatcatcacagtagaatttattatgagagcatgtagtatgtatctgtagccctaacacatgggatgaacgttttactgctacacccagatttgtgttgaacgaaaacattgtggtttggaaaggagaattcaacaattaatagttgaaattgtgaggttaatgtttaaaaagctttacacctgtttacaatttggggacaaaaaggcaggcttcatttttcatatgtttgatgaaaactggctcaagatgtttgtaaatagaatcaagagcaaaactgcacaaacttgcacattggaaagtgcaacaagttcccgtgattgcagtaaaaatatttactattctaaaaaaatgagaattgaagacttagccagtcagataagttttttcatgaacccgttgtggaaattattggaattaactgagccaaagtgattatgcattcttcatctattttagttagcactttgtatcgttatatacagtttacaatacatgtataacttgtagctataaacattttgtgccattaaagctctcacaaaactttaaaaa

SEQ ID NO: 116173 - DNA, 1000 bp, Homo Sapiens
ttgaatgtgacagcacctacacctcagcagttacaagccttcaaaaatgaagtaggagtactcaggaaaacacgacatgtgaatatcctactcttcatgggctattccacaaagccacaactggctattgttacccagtggtgtgagggctccagcttgtatcaccatctccatatcattgagaccaaatttgagatgatcaaacttatagatattgcacgacagactgcacagggcatggattacttacacgccaagtcaatcatccacagagacctcaagagtaataatatatttcttcatgaagacctcacagtaaaaataggtgattttggtctagctacagtgaaatctcgatggagtgggtcccatcagtttgaacagttgtctggatccattttgtggatggcaccagaagtcatcagaatgcaagataaaaatccatacagctttcagtcagatgtatatgcatttggaattgttctgtatgaattgatgactggacagttaccttattcaaacatcaacaacagggaccagataatttttatggtgggacgaggatacctgtctccagatctcagtaaggtacggagtaactgtccaaaagccatgaagagattaatggcagagtgcctcaaaaagaaaagagatgagagaccactctttccccaaattctcgcctctattgagctgctggcccgctcattgccaaaaattcaccgcagtgcatcagaaccctccttgaatcgggctggtttccaaacagaggattttagtctatatgcttgtgcttctccaaaaacacccatccaggcagggggatatggtgcgtttcctgtccactgaaacaaatgagtgagagagttcaggagagtagcaacaaaaggaaaataaatgaacatatgtttgcttatatgttaaattgaataaaatactctctttttttttaaggtgaaccaaagaaaaaaaaaaaaaaaaaaaaaaaaaaaaaaaaccc

SEQ ID NO: 116174 - DNA, 1000 bp, Homo Sapiens
ggccacgtgccccggaagcaggtgtgtccagagtcagctgagggctctccccacaccacccagcaggcgctggtgctccttctgcctcatgggaccagtccagcttccagccgctctggctcgagggtggtctgagcacttccttctgagtgggcttctctgggagctctccagtggcactgctggacctgcccacgtttctgtaaaatcaggatacgtggctttagtaagcagaccaagcgcttcgtggcagggaaagcagcgtgcggggaagtcactgaaaagtgctgcctaaggaagtttggaaatagtccccgttccagattgccttgaattttaaaacattttgctttgggaaagtaggtcagcagcacctaagatcaaggatgcgttccattttcacacttcacagtcatgaaaactgagaagactgtcttcagcgtgaactaaagttcacaggcagatcactgatccagaacacttcaagaactcgtcaaacagctcgataagcctttttgactgtgtacatctgtaccgggaataacattcctaggctgaaatttccacaaagaatagaacctgtacccagttcttcaggctgatttccctgacctcttgggcatttgtatttgtagtaaagtattgcagagattcctaagtattttatagcagccatcaaaattggactttgtattgtttattcataaaagacacttggtaatagacttcagtgaactctgtatgaatgcagtagtgtgcgtgcaaaatccgcttcctgagcgtagggtgctgagctggcgctagggctcggttgtgaaatacagcgtagtcagcccttgcgctcagtgtagaaacccacgtctgtaaggtcggtcttcgtccatctgcttttttctgaaatacactaagagcagccacaaaactgtaacctcaaggaaaccataaagcttggagtgccttaatttttaaccagtttccaataaaacggtttactacctga

SEQ ID NO: 116175 - DNA, 1000 bp, Homo Sapiens
gccatggcccggctgggaggtgctgtgctcagcttctcggaagccacatcgtccgtccagaagggcgaatccctggctgactccgtgcagaccatgagctgctatgccgacgtcgtcgtgctccggcacccccagcctggagcagtggagctggccgccaagcactgccggaggccagtgatcaatgctggggatggggtcggagagcaccccacccaggccctgctggacatcttcaccatccgtgaggagctgggaactgtcaatggcatgacgatcacgatggtgggtgacctgaagcacggacgcacagtacattccctggcctgcctgctcacccagtatcgtgtcagcctgcgctacgtggcacctcccagcctgcgcatgccacccactgtgcgggccttcgtggcctcccgcggcaccaagcaggaggaattcgagagcattgaggaggcgctgcctgacactgatgtgctctacatgactcgaatccagaaggaacgatttggctctacccaggagtacgaagcttgctttggtcagttcatcctcactccccacatcatgacccgggccaagaagaagatggtggtgatgcacccgatgccccgtgtcaacgagataagcgtggaagtggactcggatccccgcgcagcctacttccgccaggctgagaacggcatgtacatccgcatggctctgttagccaccgtgctgggccgtttctagggcctggcttcctcagcctcttctctttaggcccagctgctgggcaaggaattccagtgcctcctacgggggcagcacacttagatattcctggacatccagatagctcacatgtgctgaccacacttcaggctctggactggagctctctggcatgggggtggggcctcagatgctggggcccagtctgccccatcttcattcctgcaccttaaacctgtacagtcatttttctactgacttaataaacagccgagctgtcccttga

SEQ ID NO: 116176 - DNA, 1000 bp, Homo Sapiens
cggcagatcgacaacccagattacaagggcacttggatccacccagaaattgacaaccccgagtattctcccgatcccagtatctatgcctatgataactttggcgtgctgggcctggacctctggcaggtcaagtctggcaccatctttgacaacttcctcatcaccaacgatgaggcatacgctgaggagtttggcaacgagacgtggggcgtaacaaaggcagcagagaaacaaatgaaggacaaacaggacgaggagcagaggcttaaggaggaggaagaagacaagaaacgcaaagaggaggaggaggcagaggacaaggaggatgatgaggacaaagatgaggatgaggaggatgaggaggacaaggaggaagatgaggaggaagatgtccccggccaggccaaggacgagctgtagagaggcctgcctccagggctggactgaggcctgagcgctcctgccgcagagcttgccgcgccaaataatgtctctgtgagactcgagaactttcatttttttccaggctggttcggatttggggtggattttggttttgttcccctcctccactctcccccaccccctccccgccctttttttttttttttttaaactggtattttatcctttgattctccttcagccctcacccctggttctcatctttcttgatcaacatcttttcttgcctctgtgccccttctctcatctcttagctcccctccaacctggggggcagtggtgtggagaagccacaggcctgagatttcatctgctctccttcctggagcccagaggagggcagcagaagggggtggtgtctccaaccccccagcactgaggaagaacggggctcttctcatttcacccctccctttctcccctgcccccaggactgggccacttctgggtggggcagtgggtcccagattggctcacactgagaatgtaagaactacaaacaaaatttctattaaattaaattttgtgtctc

SEQ ID NO: 116177 - DNA, 1000 bp, Homo Sapiens
ttgctttgcccaagataggagttctctgatgcagaaattattgggctcttttagggtaagaagtttgtgtctttgtctggccacatcttgactaggtattgtctactctgaagacctttaatggcttccctctttcatctcctgagtatgtaacttgcaatgggcagctatccagtgacttgttctgagtaagtgtgttcattaatgtttatttagctctgaagcaagagtgatatactccaggacttagaatagtgcctaaagtgctgcagccaaagacagagcggaactatgaaaagtgggcttggagatggcaggagagcttgtcattgagcctggcaatttagcaaactgatgctgaggatgattgaggtgggtctacctcatctctgaaaattctggaaggaatggaggagtctcaacatgtgtttctgacacaagatccgtggtttgtactcaaagcccagaatccccaagtgcctgcttttgatgatgtctacagaaaatgctggctgagctgaacacatttgcccaattccaggtgtgcacagaaaaccgagaatattcaaaattccaaattttttcttaggagcaagaagaaaatgtggccctaaagggggttagttgaggggtagggggtagtgaggatcttgatttggatctctttttatttaaatgtgaatttcaacttttgacaatcaaagaaaagacttttgttgaaatagctttactgtttctcaagtgttttggagaaaaaaatcaaccctgcaatcactttttggaattgtcttgatttttcggcagttcaagctatatcgaatatagttctgtgtagagaatgtcactgtagttttgagtgtatacatgtgtgggtgctgataattgtgtattttctttgggggtggaaaaggaaaacaattcaagctgagaaaagtattctcaaagatgcatttttataaattttattaaacaattttgttaaaccataaaaaaaaaaaaa

SEQ ID NO: 116178 - DNA, 1000 bp, Homo Sapiens
aagaggaaaaaaagcaaaatgatggtgaaatgcttgaaaaagaagaggaaagtgaacctgaggaaaagagtgaagaagaaattgaaatcatagaagggcaagaagaaagtaatcaatcaaataagtctgggtcagaggatgagatgaaagaagcagatgagagcacaggatctggagatgggccgataaagtcagtacgcaaaagaagagtacgaaaggactaaactagattgaaatatttttaattcccgagaggatgtttggcattgtaaaaatcagcatgccagacctgaactttaatcagtctgcacatcctgtttctaatatctagcaacattatattctttcagacatttattttagtccttcatttccgaggaaaaagaagcaactttgaagttacctcatctttgaatttagaataaaagtggcacattacatatcggatctaagagattaataccattagaagttacacagttttagttgtttggagatagttttggtttgtacagaacaaaataatatgtagcagcttcattgctattggaaaaatcagttattggaatttccacttaaatggctatacaacaatataactggtagttctataataaaaatgagcatatgttctgttgtgaagagctaaatgcaataaagtttctgtatggttgtttgattctatcaacaattgaaagtgttgtatatgacccacatttacctagtttgtgtcaaattatagttacagtgagttgtttgcttaaattatagattcctttaaggacatgccttgttcataaaatcactggattatattgcagcatattttacatttgaatacaaggataatgggttttatcaaaacaaaatgatgtacagattttttttcaagtttttatagttgctttatgccagagtggtttaccccattcacaaaatttcttatgcatacattgctattgaaaataaaatttaaatattttttcatcctgaaaaaaaa

SEQ ID NO: 116179 - DNA, 1000 bp, Homo Sapiens
ccatccccgcagtattcttggcgtatcaatgggataccgcagcaacacacacaagttctctttatcgccaaaatcacgccaaataataacgggacctatgcctgttttgtctctaacttggctactggccgcaataattccatagtcaagagcatcacagtctctgcatctggaacttctcctggtctctcagctggggccactgtcggcatcatgattggagtgctggttggggttgctctgatatagcagccctggtgtagtttcttcatttcaggaagactgacagttgttttgcttcttccttaaagcatttgcaacagctacagtctaaaattgcttctttaccaaggatatttacagaaaagactctgaccagagatcgagaccatcctagccaacatcgtgaaaccccatctctactaaaaatacaaaaatgagctgggcttggtggcgcgcacctgtagtcccagttactcgggaggctgaggcaggagaatcgcttgaacccgggaggtggagattgcagtgagcccagatcgcaccactgcactccagtctggcaacagagcaagactccatctcaaaaagaaaagaaaagaagactctgacctgtactcttgaatacaagtttctgataccactgcactgtctgagaatttccaaaactttaatgaactaactgacagcttcatgaaactgtccaccaagatcaagcagagaaaataattaatttcatgggactaaatgaactaatgaggattgctgattctttaaatgtcttgtttcccagatttcaggaaactttttttcttttaagctatccactcttacagcaatttgataaaatatacttttgtgaacaaaaattgagacatttacattttctccctatgtggtcgctccagacttgggaaactattcatgaatatttatattgtatggtaatatagttattgcacaagttcaataaaaatctgctctttgtataacagaaaaa

SEQ ID NO: 116180 - DNA, 1000 bp, Homo Sapiens
ctccaatgcctactgagtagggggagcaaatcgtgccttgtcattttatttggaggtttcctgcctccttcccgaggctacagcagacccccatgagagaaggaggggagcaggcccgtggcaggaggagggctcagggagctgagatcccgacaagcccgccagccccagccgctcctccacgcctgtccttagaaaggggtggaaacatagggacttggggcttggaacctaaggttgttcccctagttctacatgaaggtggagggtctctagttccacgcctctcccacctccctccgcacacaccccaccccagcctgctataggctgggcttccccttggggcggaactcactgcgatgggggtcaccaggtgaccagtgggagcccccaccccgagtcacaccagaaagctaggtcgtgggtcagctctgaggatgtatacccctggtgggagagggagacctagagatctggctgtggggcgggcatggggggtgaagggccactgggaccctcagccttgtttgtactgtatgccttcagcattgcctaggaacacgaagcacgatcagtccatcccagagggaccggagttatgacaagctttccaaatattttgctttatcagccgatatcaacacttgtatctggcctctgtgccccagcagtgccttgtgcaatgtgaatgtgcgcgtctctgctaaaccaccattttatttggtttttgttttgttttggttttgctcggatacttgccaaaatgagactctccgtcggcagctgggggaagggtctgagactccctttccttttggttttgggattacttttgatcctgggggaccaatgaggtgaggggggttctcctttgccctcagctttccccagcccctccggcctgggctgcccacaaggcttgtcccccagaggccctggctcctggtcgggaagggaggtggcctcccgccaacgcatcactggggctgggagcagg

SEQ ID NO: 116181 - DNA, 997 bp, Homo Sapiens
atgttgtgggaggtccctgaggccgctgaggtcgttcgtgtctgttgaacggctgtgggcgtcttgctgccttgggtagggggttaaaatcgttcttgagaggaacgtctctgtgcgaagagataatgagtttagctctgagaagtgagcttgtagtggacaaaacaaagaggaaaaaaagaagagaactgtctgaggaacagaaacaagaaattaaagatgcttttgaactatttgatacagacaaagatgaagcaatagattatcatgaattaaaggtggcaatgagagccttggggtttgatgtaaaaaaagctgatgtactgaagattcttaaagattatgacagagaagccacagggaaaatcacctttgaagattttaatgaagttgtgacagactggatattggaaagagatccccatgaagaaatactcaaggcatttaaactatttgatgatgatgattcaggtaaaataagcttgaggaatttgcgacgtgttgctagagaattgggtgaaaacatgagtgatgaagaacttcgagctatgatagaagaatttgacaaagatggtgatggagaaataaaccaagaggagttcattgctattatgactggtgacatttaaagaattacaaggataaacactaagaatgttgcagttaccatcttatattctatttttgtgcctggagccatgtgaaaaaaaccaacttagttcttttatcctaaaggaccaaaaataagcatcttatatatctgtattttactactgttaagtttctttgtatgaactgtgttgttagtactcagatagtttagctttgtatttataatagagcttttatataaagttttaaaaattgaatgtgtgatatgtgttctttgaaggttttttaatttaacatttatagtcactttttagtgcacacattttccagactttcgttaataaaatatttattttattagaattttaaaaaaaaaaaaaaaaaa

SEQ ID NO: 116182 - DNA, 1000 bp, Homo Sapiens
tgagccactgggctgtgggggaaggggtcaaggccatatcccaatacgtgtagggcgagggtccctgctggcacattcaggctgtgctgggaagaagagacctgggcttggaaggaaccggtccccgacggtttctgcttgcctcgcctcttcccccttttgtcagctgagcagtttgtggtttctatgcccgcaagtttcaggaagtattcacaaaagaaaaatacattttttcccccaggggtggggcaaggacagtggagagagtgctaggaaatgagtcccctgggaaaggggaccgggccgtgatgttaaatatctccggctcccaagtgactggatttgcctaggaccttcagatcaacagacttcagaccctcagacctgccccggggccaggtggagaaagtgagggccgtacaaggaagtgaaattctgagttgttggggctaagcctgaccccctctccatgctccccgccccaactcactctggcctcagtagatttttttttcagttgtggttgttgcccaggctggagtgcagtggcgccatcttggctcactgcacctccaccttccgggctcaagcgattctccagcctcagcctcctgagtagctaggactgcaggtgctccaccacgcccggctaatttttgtatttttagtagagatggggtttccccatgttggccaggctggtctcgaactcctggcctcaggtgtgatccgcccgcctccgcctccccaagcgctgagattacaggtgtgagccaccgtgcccaggccctcagtaggttttaaggagtccccagccctcctcccttctgggcccgaccagcttatactgctccatcttccccggccacatgccccgccaagtactgcacagggaccccccacccaggggccctgctccgtgagataatgtgaaatacgactgtggaccaaacgcaataaaacctctgtttgtacgaagaaaaaaaaaaaaaaaaaaaaa

SEQ ID NO: 116183 - DNA, 1000 bp, Homo Sapiens
cattggctctcactgaaacagatatatgcaagttgccgaaagacgaaggaacttgcagggatttcatattaaaatggtactatgatccaaacaccaaaagctgtgcaagattctggtatggaggttgtggtggaaacgaaaacaaatttggatcacagaaagaatgtgaaaaggtttgcgctcctgtgctcgccaaacccggagtcatcagtgtgatgggaacctaagcgtgggtggccaacatcatatacctcttgaagaagaaggagtcagccatcgccaacttgtctctgtagaagctccgggtgtagattcccttgcactgtatcatttcatgctttgatttacactcgaactcgggagggaacatcctgctgcatgacctatcagtatggtgctaatgtgtctgtggaccctcgctctctgtctccaggcagttctctcgaatactttgaatgttgtgtaacagttagccactgctggtgtttatgtgaacattcctatcaatccaaattccctctggagtttcatgttatgcctgttgcaggcaaatgtaaagtctagaaaataatgcaaatgtcacggctactctatatacttttgcttggttcattttttttcccttttagttaagcatgactttagatgggaagcctgtgtatcgtggagaaacaagagaccaactttttcattccctgcccccaatttcccagactagatttcaagctaattttctttttctgaagcctctaacaaatgatctagttcagaaggaagcaaaatcccttaatctatgtgcaccgttgggaccaatgccttaattaaagaatttaaaaaagttgtaatagagaatatttttggcattcctctaatgttgtgtgttttttttttgtgtgtgctggagggaggggatttaattttaattttaaaatgtttaggaaatttatacaaagaaactttttaataaagtatattgaaagttaaaaaaaaaaaaaaaaaa

SEQ ID NO: 116184 - DNA, 1000 bp, Homo Sapiens
tctgcagggtcaccacagtgacagagattggcaaagatgtgattggtttaaggatcagtcctctgcagtttcgctaaggccccctttgtgtgcatgggtcagtcaccatatgttccccccagagaatgtgtctatatcctccttctaacagcaccttccccctgcagctactcttcagatctggctctctgtaccctaaaacctagtatctttttctcttctatggaaaatccgaaggtctaaacttgacttttttgaggtcttctcaacttgactacagttgtgctcataattgtccttgcctttccagcttaattattttaaggaacaaatgaaaactctgggctgggtggagtggctcatacctgtaatcccagcactttgggaggctacggtgggcagatcatctgaggccaggagttcgagacctgcctggccaacatggcaacaccccgtctctaataaaaatataaaaattagcctggcatggtagcatgcgcctatagtcccagctgctcaggaggctgaggcatgagaatcgcttgaacctaggaggtggaggttgcattcaactgagatcataccacttcattccagcctgggtgacagagcaagactctgtctcaaaaaaaaaaaaaaaaaaaaaaaaaaaaaaaaaaggaaaactctgtgatggacatttgtttagtaaatcccttcagtatttatccctcctttccccacagcagctttctttcctgtcaactagaaaggagcaggatgtaataaatacattttggtgtgactaggccacaccaactcttaatcatctcccattttccttagacatttaaatttcaaggcaggtaccctctgtgtactcagaaatttgaagaagttatttggttttccaaaatgcacactgcgggttattgatttgttctttacaactattgttctcatatttctcacactaaataaatctctatgagagcttcttgaaaaaaaaaaaaaaaaagcg

SEQ ID NO: 116185 - DNA, 1000 bp, Homo Sapiens
ggtagaccaaatcaaatgctcactggggtcaggctgatggagacagtaacactggcgagcaggtgccccagctcggactatactgctgagttctggtctgttgctgccactctacaggtccagggttgttagatcttctgggtttttgttttgctttttgaaataaggaaaataagcttatcttaagtttatttttccttggatatacctagattccatacagtgacaatacaaatacaaaggaagaacatctggatttcatccttgacctcatttacaaagcaaaaagagatgctggattcagatataaatgtttaattttgcagtgtttaagtcagcaaatcttctgttttttaaaaataagccacatatctagatttttctgtgaaagctctcaattaagtgttgggaactaatttcaagattttaaaaaatgttatgcaggcttaacgtgtctgagagccataaatgacctaacgtttcccgttagtctctgaactaggtgatctcagttctctttcaactccagtactctgtaagtttctgtgacctgtagtgtaccattctcaggtggtgatatggtttggatgttttgtcccctccaaatctcatgttcaaagtgtgacattcagtgttagaggtgggcctagtaggaggtatttgggtcatgggggcggatcccttatgtatgactttgtgccatccccatagtaatgagtgagttctcactctggttgtttatgcaagagctggttgtttaaaagagcctggaacttcctcctctctcgcttgctctctctcaccatgtgacacactggctccccttcaccttctgccatgattgtaagcttcgtgaggccctcaccagaagcagatgccagcgccatgcttcctatacagttctatgcagaacagtgagccaaataaacctcttttctttctaaaaaaaaaaaaaaaaaaaaaaaaaaaaaaaaaaaaaaaaaaaaaaaaaaaaaaaaaa

SEQ ID NO: 116186 - DNA, 1000 bp, Homo Sapiens
gggacggactgagactgtgcgttcctgtaccagcgagtccacagcctttgtgcaggccatgatggaggggtcccacacaaaagcagacctgcgagatctcttccagaaggctgctaagaagcaccagaatatgtaccgcctggccatgaccggggcagggatcgacaggcacctcttctgcctttacttggtctccaagtacctaggagtcagctctcctttccttgctgaggtgctctcggaaccctggcgtctctccaccagccagatcccccaatcccagatccgcatgttcgacccagagcagcaccccaatcacctgggcgctggaggtggctttggccctgtagcagatgatggctatggagtttcctacatgattgcaggcgagaacacgatcttcttccacatctccagcaagttctcaagctcagagacgaacgcccagcgctttggaaaccacatccgcaaagccctgctggacattgctgatcttttccaagttcccaaggcctacagctgaaggttggagaaatgccagctgccctttcgtccccacactgtggaggaagggacctgtggcagctcacaggcatgaggggtggccgtgcacaggtgcccaggctccaaggacagctccggcagcaggtcctcgctgggcagatgctgctccctgagggcccaggtggtggaggtggggttggagcaggaagggaattttgatttttttttttcttgatagatactaataaaaataaggctgtgtaattttctctcagcccttaggtacctgtgttttgtttgggaactcggaggccctccccctcccccagctcagaccacagaggtggcaagagaagggctgaagctggaagactgttcatgagggacttgtgtgacctgctttgaaatgtgtgactctgctgagtgacgtaggctctgagatagctgtccacgcccacgtgtttgcttggaataaatacttgcctcagaaccttca

SEQ ID NO: 116187 - DNA, 1000 bp, Homo Sapiens
gttagtactaaattcttagtaaaatgctgatcagtaaaccaatcccttgagttatataacaagatttttaaataaatgttattgtcctcaccttcaaaaatatttatattgtcactcatttacgtaaaaagatatttctaatttactgttgcccattgcacttacataccaccaccaagaaagccttcaagatgtcaaataaagcaaagtgatatatatttgtttatgaaatgttacatgtagaaaaatactgattttaaatattttccatattaacaatttaacagagaatctctagtgaattttttaaatgaaagaagttgtaaggatataaaaagtacagtgttagatgtgcacaaggaaagttattttcagacatatttgaatgactgctgtactgcaatatttggattgtcattcttacaaaacatttttttgttctcttgtaaaaagagtagttattagttctgctttagctttccaatatgctgtatagcctttgtcattttataattttaattcctgattaaaacagtctgtatttgtgtatatcatacattgttttcaataccacttttaattgttactcattttattcactaagctcgataaatctaacagttactcttaaaaaaaaaaaaaagactaaggtggattttaaaaattggaaactgacataatgttaggttataatttctcatttggagccgggcgcagtggctcacgcctgtaatcccagcactttgggaggccaaggtgggtggatcacctgtggtcaagagttcaagaccagcctggccatcatggtgaaaccccatctctactaaaaatacaaaaattagccaggcgtggtggctggcgcctgtaatcccagctactcaggaggttgaggcagcagaattgcttgaacccaggaggcagagggttgcagtgagccgagatagcaccattgcactccagcctgggcgactccatctcaaaaaataaaaaaaaaaaaaaa

SEQ ID NO: 116188 - DNA, 1000 bp, Homo Sapiens
aaggaggcgtccagcacccaggacacgggcaagctgccagtcaagtggacagcccctgaggccctgagagagaagaaattctccactaagtctgacgtgtggagtttcggaatccttctctgggaaatctactcctttgggcgagtgccttatccaagaattcccctgaaggacgtcgtccctcgggtggagaagggctacaagatggatgcccccgacggctgcccgcccgcagtctatgaagtcatgaagaactgctggcacctggacgccgccatgcggccctccttcctacagctccgagagcagcttgagcacatcaaaacccacgagctgcacctgtgacggctggcctccgcctgggtcatgggcctgtggggactgaacctggaagatcatggacctggtgcccctgctcactgggcccgagcctgaactgagccccagcgggctggcgggcctttttcctgcgtcccagcctgcacccctccggccccgtctctcttggacccacctgtggggcctggggagcccactgaggggccagggaggaaggaggccacggagcgggcggcagcgccccaccacgtcgggcttccctggcctcccgccactcgccttcttagagttttattcctttccttttttgagattttttttccgtgtgtttattttttattatttttcaagataaggagaaagaaagtacccagcaaatgggcattttacaagaagtacgaatcttatttttcctgtcctgcccgtgaggtgggggggaccgggcccctctctagggacccctcgccccagcctcattccccattctgtgtcccatgtcccgtgtctcctcggtcgccccgtgtttgcgcttgaccatgttgcactgtttgcatgcgcccgaggcagacgtctgtcaggggcttggatttcgtgtgccgctgccacccgcccacccgccttgtgagatggaatcgtaataaaccacgccatgaggaaaaaa

SEQ ID NO: 116189 - DNA, 1000 bp, Homo Sapiens
catattcatctttcatttatataattgttacttattcctcccatgcagtctcttcgttgtctttaagtgtgtgcctccaggcatgcttatttatttttattgtctcaaggtaacatttaagatgtatattaaagtaaagctacatttttttacttcattattgcatttacagggatttaattgtactttgtaatttatttttcttattagccaaaagtttaatgcatttttttttgatgaattaggcacccacatgaacaccacaaatcaggacattgtttatcattgttgctatgaatcctatgaatgatcttttttttattttaaagacctacacttaacctacaaaacatttgctgtataatttggtcaacagtttctatctatctgtatactgtcatgatgtcttaaactgcaggagttacatactgagtttatatttttatttgctttgagcaaggtagataaacattttggccattataatgtgaaaccacttcttctttctttacagtatttgaccaaacttgtgtgtctatgatatttgtaaatacatgcgaatatctgtatttcttatcataagcctatttagttttattctcagtagggttttttggattgtacagtgtttatatgatctgaactccttatacataagaaggtgtgtatattaatccaattatggacttaaaatattttaaaagtataaatacccttatttgctgcaaagaccagtgtgtaggcatttgctttttagcaatatttttaagtgctccattttaatgccgaggaataagtcttttggcaacacaaactggtcaataataggtaatgcaggtatgttcaggttaagccaacaatgttttgcatttttatgcttattttctgtcaacactaatgaagtcaacattgcctgaatgtctgaataatgaaacacatccctgtttaaaagtatgtaactgaaaaagaaataaaaaaaaataaaagtagtttttttaaa

SEQ ID NO: 116190 - DNA, 1000 bp, Homo Sapiens
cctttggaaagatgaaacctcgttatgaaatcaactccctgattagataccactgcaaagatggtttcattcaacgtcaccttccaactatccggtgcttaggaaatggaagatgggctatacctaaaattacctgcatgaacccatctgcataccaaaggacttattctatgaaatactttaaaaattcctcatcagcaaaggacaattcaataaatacatccaaacatgatcatcgttggagccggaggtggcaggagtcgaggcgctgatccctaaaatggcgaacatgtgttttcatcatttcagccaaagtcctaacttcctgtgcctttcctatcacctcgagaagtaattatcagttggtttggatttttggaccaccgttcagtcattttgggttgccgtgctcccaaaacattttaaatgaaagtattggcattcaaaaagacagcagacaaaatgaaagaaaatgagagcagaaagtaagcatttccagcctatctaatttctttagttttctatttgcctccagtgcagtccatttcctaatgtataccagcctactgtactatttaaaatgctcaatttcagcaccgatggccatgtaaataagatgatttaatgttgattttaatcctgtatataaaataaaaagtcacaatgagtttgggcatatttaatgatgattatggagccttagaggtctttaatcattggttcggctgcttttatgtagtttaggctggaaatggtttcacttgctctttgactgtcagcaagactgaagatggcttttcctggacagctagaaaacacaaaatcttgtaggtcattgcacctatctcagccataggtgcagtttgcttctacatgatgctaaaggctgcgaatgggatcctgatggaactaaggactccaatgtcgaactcttctttgctgcattcctttttcttcacttacaagaaaggcctgaatggaggacttttctgtaaccagg

SEQ ID NO: 116191 - DNA, 1000 bp, Homo Sapiens
gggacccaggccagtgaggggtacttcagtcaatcacaggaggaggagtttgcccaatcggaagagctctgtgccaaggctccgcctcctgtgttctacaacaagcctccagagatcgacatcacatgctgggatgcagacccagttccagaagaggaggagggcttcgagggtggtgattagcggtggcgccagccctaggctacccttgccaaggccgcccacctgcatcagcctctggccagacggcccgccgtgcctgcattcgcagcagctccgcctggcacccactccggattccggccctggctggggacttggccgcttccctacccacagggcctgacttttacagcttttctctttttttaaaaagttgataggagacttgtacagttgactggctttcctctcgttggtagttgagacgctgttgcaaattccacccctccttccctggtccagattgtagctcttagtcctccctgctcagctggccgggttggaggcctcaccctgcttggggcctggcgtggggggagctctggtgggaaaatgtcccccacctcttttcctagttttatgtttcttgggaaaatatcactttgtattctctgtccagggcttcagatattttgcacgaattttaaaacatggcaataaatggctcgtgggctctggctccctgggaccccctccccgcccttcttttgaccccttcctgtctggcccaaaggaagtagcaggcccagctggggcccctcggctaccccccgtctcctgccgggcaggtcccaggttggaggccctaggcgcggttcaggtcagggctatggatggggcccaggggctttggtggcccctccccaactccttcctctttgcttgggttcctttttcacgtttagtaactgtttttttttttttttttttttttttggaaagcacaaacttctgtaacgggtcgtgctcatgtctgttaataaagaaatccagatcc

SEQ ID NO: 116192 - DNA, 1000 bp, Homo Sapiens
gaattcaaacatggaaaagctcctattctgattgctacagatgtggcctccagagggctagatgtggaagatgtgaaatttgtcatcaattatgactaccctaactcctcagaggattatattcatcgaattggaagaactgctcgcagtaccaaaacaggcacagcatacactttctttacacctaataacataaagcaagtgagcgaccttatctctgtgcttcgtgaagctaatcaagcaattaatcccaagttgcttcagttggtcgaagacagaggttcaggtcgttccaggggtagaggaggcatgaaggatgaccgtcgggacagatactctgcgggcaaaaggggtggatttaatacctttagagacagggaaaattatgacagaggttactctagcctgcttaaaagagattttggggcaaaaactcagaatggtgtttacagtgctgcaaattacaccaatgggagctttggaagtaattttgtgtctgctggtatacagaccagttttaggactggtaatccaacagggacttaccagaatggttatgatagcactcagcaatacggaagtaatgttccaaatatgcacaatggtatgaaccaacaggcatatgcatatcctgctactgcagctgcacctatgattggttatccaatgccaacaggatattcccaataagactttagaagtatatgtaaatgtctgtttttcataattgctctttatattgtgtgttatctgacaagatagttatttaagaaacatgggaattgcagaaatgactgcagtgcagcagtaattatggtgcactttttcgctatttaagttggatatttctctacattcctgaaacaatttttaggttttttttgtactagaaaatgcaggcagtgttttcacaaaagtaaatgtacagtgatttgaaatacaataatgaaggcaatgcatggccttccaataaaaaatatttgaagactgaaaaaaaaaa

SEQ ID NO: 116193 - DNA, 1000 bp, Homo Sapiens
gatgatgacacaggtggtatcaacttacataaagcaaaggaaagacttcaggaagaggacaaatttgacaaagaagaatataggaaaaaaattaaggcaaagcatcgggagaaaagactgaaagaaagggaagccagaagagaagccaacaagagacaagcaaaggccaaagatgaagaggaagcctttctggattggagtgatgatgatgatgatgatgatgatggatttgatccaagcacactcccagatccagataaatacagaagctctgaagattcagatagtgaagatatggaaaataaaataagtgataccaagaagaagcaggggatgaagaagaggagcaacagtgaagtggaagacgtgggaccaacaagtcataacagaaagaaggccaggtgggacactttagagcctttggataccggcctgtctttagcagaggatgaagagctggtgttacatctgctaagaagtcaaagctaaatacttcctgcgcctgccttctccttgaaaccttggttatgactgcgtaggcaagaagttgaaaaacagttgatttgggggcacttaggtaccatatgccccattcccaaagggcacatttctggatagaagcgatcgtatctccaagtccctctcacaggacatgctttgtgccatcactgagcatactcagatcgagggtggatgataccatttcctgaccccgttttccagcatgtgttctgttagatttttatccatgggttcctacgccttgtcattggaaacactgcctttgtcttactggcaagttctggagctcttgtgtcattgttagaaatccctgtcttgcttactgtacagaagtttctgttgctgttaaaattgctcatgatttcgacgtatttaatattttcaaagagactatgatggaccagccctgagaaagaatgagtatttttgaattgagatgatcaataataaacatatttcctataaaaaaaaaaaaaaa

SEQ ID NO: 116194 - DNA, 1000 bp, Homo Sapiens
tgatgcctaccgggttctcctgatttgagtttcctttaaatactccctttttgagtaattttctgatgggaggaaagtagcagtcatcatctttttgtgtgcaggctgtctcatttatttttagccattgtcgtttcattcattttgtgtaatataaaccgtgtgtcatgtcaaagtgaaagacatttcaaatctgtagcataggctagtgggcaggtccgcacagtcgaagccacacctggtctgttttctgtgcactgtagccttagtgtcacctttcttcttgtgtctccttatggtacactccagcggttgccttttttatcatttctactgaagttgggaaattcaaccccagaaattgacagatgaaaggagacaatggttgtgtagggagatggagaaaatgcttaatctgaggatgagacagggttttttcatttttgtgggggctagaaaaaacataaaatgaggcagttaaataataatagttaatgaaggtgtgctacagaaaataatctggtgttcttgctaactttgcccttcactgttgcttaattgtgaacagccaaaagctatatgttatggcttattgtgtgaaggtaactaagaagtggtgttccatgacttcagagtacatccatgcggagtccattatttgagtttgacatttaataactttgctggaaaatctgtaaaaaagaaaaacaagtttgctagtgactaagccccgcatatgtgagtgaaagtacttcaggcacgctgcctcctggtaacagctatgcagggagggaggacccacactgctacacttctgatcccctttggttttactacccaaatctaaatagatacttttgataatagataactgctcttttactaagacatagtctctacctatagaaatgtattttgaaaacacttattttacacagcaattttgtatccatttaaactaaccttttatcaataaagcactattgtttagatattaaaa

SEQ ID NO: 116195 - DNA, 1000 bp, Homo Sapiens
cccatctagatggccccccggccgtggctgtgggccagtgcccgctggtggggccaggccccatgcaccgccgccacctgctgctccctgccagggtccctaggcctggcctatcggaggcgctttccctgctcctgttcgccgttgttctgtctcgtgccgccgccctgggctgcattgggttggtggcccacgccggccaactcaccgcagtctggcgccgcccaggagccgcccgcgctccctgaaccctagaactgtcttcgactccggggccccgttggaagactgagtgcccggggcacggcacagaagccgcgcccaccgcctgccagttcacaaccgctccgagcgtgggtctccgcccagctccagtcctgtgatccgggcccgccccctagcggccggggagggaggggccgggtccgcggccggcgaacggggctcgaagggtccttgtagccgggaatgctgctgctgctgctggggggatcacagaccatttctttctttcggccaggctgaggccctgacgtggatgggcaaactgcaggcctgggaaggcagcaagccgggccgtccgtgttccatcctccacgcacccccacctatcgttggttcgcaaagtgcaaagctttcttgtgcatgacgccctgctctggggagcgtctggcgcgatctctgcctgcttactcgggaaatttgcttttgccaaacccgctttttcggggatcccgcgcccccctcctcacttgcgctgctctcggagccccagccggctccgcccgcttcggcggtttggatatttattgacctcgtcctccgactcgctgacaggctacaggacccccaacaaccccaatccacgttttggatgcactgagaccccgacattcctcggtatttattgtctgtccccacctaggacccccacccccgaccctcgcgaataaaaggccctccatctgcccaaaaaaaaaaaaaaaaaaaaaaaaaaaaa

SEQ ID NO: 116196 - DNA, 1000 bp, Homo Sapiens
cacccgggggaccccctgtccgggagctggctgccgtccccccggaattgacaggcagccgccagtccttccagaaggctatggggaacccctgcgagttcttcgtggacatcatgtgactcgtggcgcatgccccagccctgcctgaggtggggagctggcggtcctgccgcatgcagagctcgcgtgggcttgccttcgtgggggccaggacgggaggcagggtggggggcaggctggaccaccaccatctgccctggcagcctggctgctccagctcctgacagcacctgtgtctgagcagccgtgttgggggcgctccctctctgcccctcagcgagagcctcggacctcccaaccccttgtgtctggtggggatccctcctgggatgaggaagaccccctcgggctctcggctgacccccacctcctgcacagctgtgcccaggcccccagggtggtccatgcggggcaaccccctgcggtgcacaggccccctgtctggagtagggatctaatttatttatttattgcctggccggtgactcgggggaggaggcgaccctgtcatctgtcccacctgctgctgccccttggagcagcctgcaccttctctcctcccatccggcaacagtctgaaagtacgtggaggacgggaccggaagacgagagagggctggacatcctgcccaccgtgtcccagccagggcagggagggaccatggcccgcagggtcaaggggccccgatgtgcacagctgccacagggagggaggtcttggggagatgggcagtcaggtggcccgtccttggtgagtgcacacactgcgcgcacacatcgcggccttcctggcttctctggcccccacgtgtctgtgctgtagatactgtatcaaagtcccagcgtttagatggttaacatagagctgcttctgtgtaaatgctgcttattttaaacactaaaaagcgtttaattttatgggaaaaaaaaaaaaaaaaaa

SEQ ID NO: 116197 - DNA, 1000 bp, Homo Sapiens
agccggagcagtgggtcgacacggagtgatgggggggcagggcgcacggggaggcccgaggagcgggcccccgagtccaagtccggcagtggcagtgagtctgagccctccagccgagggggcagccttcggcggggtggggaagcaagtgggactagcgatgggggccctcctccatccagaggctcaactgggggtgcccctaatctccgagcccacccagggctccatccctatggaccgccccctggcatggccctcccctacaaccccatgatggtggtcatgatgcccccacctccacctccagtccctccagcagtgcagcctccgggggcccctccagtcagagacctgggctctgtgcccccagaactgacagccagccgccaaagcttccacatggccatgggcaatcccagcgagttctttgtggatgttatgtagcccactgtggggccaggctgggccgggcgctcctggtgtgtgactgggtgtcctggccgtcatgtgcttgctcttacagtgcctgggctcagcctaccagctgctgccatacaggagattgtggccactgtgactctcaccagcagtgcctggttcctcccccttccctcaggggtagacaagggacctttgattatttttagctttgtttttttataagcctttttgggggttaaaatagagtttcttacatttttgggacttttttaataggcatttcctcttttatatgaagaattcccatccattgggccccttctaaccccagaatgtgacctcctcctccagttacccacagccctgccctttgcagggttgggggtggtcagcggtaccccggggttaggcatcctagacagcagcctgaggaagctgggagatttgggccatgtagctgcctttgttactctatttattttagtcacttgtataaaacaccaaataaagcaatagaggcaaactcaaaaaaaaaaaaaaaaaaaaaaaaaaaaaa

SEQ ID NO: 116198 - DNA, 1000 bp, Homo Sapiens
agttcgagaccagcctggccaacatagcaaaaccctgtctctactaaaaatacaaaaattagatgggtgttttggcacctgcctgtaatctcagctactcaggaggctgaggcacaagaatcgcttgaatccaggaagcaagcggaggttgcagtgagttgagatcgcactccagcctgggtgacagagtgagattctgtctcaaaagcaaactaacaaagaaaaacaatacttcctggggttttggtgtgcagagggctttgttggaagtgtgactcaatcttgcctgccttctgggagctctagaattgttcccaacccagtccatggcttctagccaccactacagggctgtttcatgtacttctctctctgactctgtcttgtccgactctcttgagaatttctcaacgattgctcatgcctgtcagtatcagtgcttccatcgttccatctttgattcacttctctttcctttctatttactcccaaaatggagtcattcatcctgatgtcctcaattgctgctgatatgctggtgattcccaaatacatagctccaacccccaacttcccccagactttagatctgtattggtattacctactggacatctctatggacagttccgtatagactcaactcatctgcccaaccaagtatgttcctcctgaattcctctcctggttacttcatcacaatctacataggctcaccagctagaaacatttatgagcttacattccttcttcccatatcttatcagcatatcatatccatttcactccaacactctgtcttgaatttggccctccctctcccctctctactttaattcattggagcatgggatttggagttaggtggttttgggtttgaattccagctctactatttttggttgtgtgatagagttatttaacctctctgagcctcagttccctcgtatgtaaaatgatgataataatacctacctcacagggttgttgtgaggattta

SEQ ID NO: 116199 - DNA, 1000 bp, Homo Sapiens
ttccctgtttagaaagaaaaaaatcactccaatagtattgaaaagtccaaagatgaaatagtttcattttcttttcctaaggcttataaaaggccccctgcctgttgattccatccctcttttgtgtccagtggagccatgttactcttcagtggcccaggggttcactattaaagaaagatcagtccaggtttctgggcacatggcctaaacaggaagatggaagcatcagaggattaaaaacctttccccacagaaatgtgggcaagaagacacttccctgagccagcagaagggacaggtgcagcagcattccacacccagcgcagaggacagcagagccctcgatgtcccacttctgcttccgttccctttctagaagattgaaaaaaaggtcaaaaccacatgcctgtggagaaagtgcgacatgtttagaaatactggtagggaaccaggagtaagaaaagctttaccagcttttactacaaatggatgaaagacatcaggatcccaccaccgcaaggtaaagtgacttcccttttctggaacccctgtggcacaggagtaccaattttcctttccaacgaactggatttctggataggcattttggctgtatgtggacagataagaccacagtccttagcccaatcccagctatacagtcaccccaatttccacaaatgatgtgatggtaccgtataatcctgtaattgggaaatttcacatttttcctgtcctaatctcagaggtgggagaagcaagtctagaacatctccaggctcagactaaacgagagtacttggactgcaaccaagtaatcactgcaaagtagttccaagcagcaagaaataccagattctcatggaggctactatagggtacagaataacaacatgaaagcaatcaaccctgtataaataatgtttcttggcattttttttttaattaaagaaatccagtgtctcaaaaaaaaaaaaaaaaaaaaaaaaaaaaaaaa

SEQ ID NO: 116200 - DNA, 1000 bp, Homo Sapiens
ctcatccacccggagctcaacgagggcctcatgaagtgggagaatcggcatgaaggcgtcttcaagttcctgcgctccgaggctgtggcccaactatggggccaaaagaaaaagaacagcaacatgacctacgagaagctgagccgggccatgaggtactactacaaacgggagatcctggaacgggtggatggccggcgactcgtctacaagtttggcaaaaactcaagcggctggaaggaggaagaggttctccagagtcggaactgagggttggaactatacccgggaccaaactcacggaccactcgaggcctgcaaaccttcctgggaggacgggcaggccagatggcccctccactggggaatgctcccagctgtgctgtggagagaagctgatgttttggtgtattgtcagccatcgtcctgggactcggagactatggcctcgcctccccaccctcctcttggaattacaagccctggggtttgaagctgactttatagctgcaagtgtatctccttttatctggtgcctcctcaaacccagtctcagacactaaatgcagacaacaccttcctcctgcagacacctggactgagccaaggaggcctggggaggccctaggggagcaccgtgatggagaggacagagcaggggctccagcaccttctttctggactggcgttcacctccctgctcagtgcttgggctccacgggcaggggtcagagcactccctaatttatgtgctatataaatacgtcagatgtacatagagatctattttttctaaaacattcccctccccactcctctcccacagagtgctggactgttccaggccctccagtgggctgatgctgggacccttaggatggggctcccagctcctttctcctgtgaatggaggcagagacctccaataaagtgccttctgggctttttctaaaaaaaaaaaaaaaaaaaaaaaaaaagaaaaaaaaaaaaaaaaaaaaca

SEQ ID NO: 116201 - DNA, 1000 bp, Homo Sapiens
gagcctcgcgggtcgcccgccgctaggtcgctccccggccatgcgggcgctgcgggccggcctgaccctggcgtcgggcgcggggctgggtgcggtcgtcgagggctggcggcggcggcgggaggacgcgcgggcggcgccgggactgctgggccggctgcccgtgctgcccgtggcggcggcagccgagttgccccctgtgcccgggggaccccgcggcccgggcgagctggccaagtacgggctgccggggctggcgcagctcaagagccgcgagtcgtacgtgctgtgctacgacccgcgcacccgcggcgcgctctgggtggtggagcagctgcgacccgagcgtctccgcggcgacggcgaccggcgcgagtgcgacttccgcgaggacgactcggtgcacgcgtaccaccgtgccaccaacgccgactaccgcggcagtggcttcgaccgcggtcacctggccgccgccgccaaccaccgctggagccagaaggccatggacgacacgttctacctgagcaacgtcgcgccccaggtgccccacctcaaccagaatgcctggaacaacctggagaaatatagccgcagcttgacccgcagctaccaaaacgtctatgtctgcacagggccactcttcctgcccaggacagaggctgatgggaaatcctacgtaaagtaccaggtcatcggcaagaaccacgtggcagtgcccacacacttcttcaaggtgctgatcctggaggcagcaggtgggcaaattgagctccgcacctacgtgatgcccaacgcacctgtggatgaggccatcccactggagcgcttcctggtgcccatcgagagcattgagcgggcttcggggctgctctttgtgccaaacatcctggcgcgggcaggcagcctcaaggccatcacggcgggcagtaagtgagggtggagcccagtgagactgtgggtgtgtgcaggccggggagtattaaaggtggtgatttttgga

SEQ ID NO: 116202 - DNA, 1000 bp, Homo Sapiens
acagaagcagtgttccattttcttcctcaccaatgacattcttttcttttctcctttcgtactcctccctgagagtcccctcccttctcccacactcgtttccctttgctcatgactcctgtagggaagtttcttcaaacaaaacccagctcctgagtctccagatgttgttctgtcagttgccaaaggactttgctgaccactgcatggggatccaaccaattcaattaatgtcttcatattgaagaagagatgtaccttcaattgaaaacctcgtttttcttttgtttgcattttctgcaaaaaggaaaaagaaaccacaaattggggaaaaaaaaagaagaaaaacctgtttccgtgtgcaaaagcacacatatgtatgtctgtgttataaaatgactgtgcttgttcgtaacagatgcaaacaagaaagaagaactgggaagtctttgtccctaggaaatccaaaggggctggaatatggtgttggtttggctttctggttggcccaatcggcctattggctcaatgggaagagaggagagggagaaaaataaaatgaaaggaaaaaaaaaagtttgcaaattcagacaggaaacaggtgagtggtttgaattggatgcagtgtgggccatcctggaatgatactgactgattaattattcctgataacatctcaagaaaaggagaaggaaagtgtttctggagaatgttctttcacatcactggaatctgcaattcaagaagtgacaagggagaattcttgctttacctatggactggcttaagccgtgtggcatccgaggaatgtttcaaatgtgtctgtgtttctctttacattccttgttgtacctcattgttcaattcacttttgtaaattccacctaacatttaattattttaaatttctccttttaccttaatctccttgctaattttatctgtctaattaaaaagagcagaagcatgtctgggtttacgtaaaaaaaaaaaaaaaaaa

SEQ ID NO: 116203 - DNA, 1000 bp, Homo Sapiens
ggctggatgccatcaagatggggcggtacaaggagagcttcgtcagtgcggggtttgcatcttttgacctggtggcccagatgacggcagaagacctgctccgtattggggtcaccctggccggccaccagaagaagatcctgagcagtatccaggacatgcggctgcagatgaaccagacgctgcctgtgcaggtctgacaccggctcccacggggaccctgaggaccgtgcagggatgccaagcagccggctggactttcggactcttggacttttggatgcctggccttaggctgtggcccagaagctggaagtttgggaaaggcccaagctgggacttctccaggcctgtgttccctccccaggaagtgcgccccaaacctcttcatattgaagatggattaggagagggggtgatgacccctccccaagcccctcagggcccagaccttcctgctctccagcaggggatccccacaacctcacacttgtctgttcttcagtgctggaggtcctggcagggtcaggctggggtaagccggggttccacagggcccagccctggcaggggtctggccccccaggtaggcggagagcagtccctccctcaggaactggaggaggggactccaggaatggggaaatgtgacaccaccatcctgaagccagcttgcacctccagtttgcacagggatttgttctgggggctgagggccctgtccccacccccgcccttggtgctgtcataaaagggcaggcaggggcaggctgaggagttgccctttgccccccagagactgactctcagagccagagatgggatgtgtgagtgtgtgtgtgtgtgtgtgtgtgtgcgcgcgcgcgcgcgtgtgtgtgtgcacgcactggcctgcacagagagcatgggtgagcgtgtaaaagcttggccctgtgccctacaatggggccagctgggccgacagcagaataaaggcaataagatgaaaaaaaaaaaaaaa

SEQ ID NO: 116204 - DNA, 1000 bp, Homo Sapiens
aaatcttggccagtgtccagcacatgaagtcccaggccaagccgggaaccccgggtgggacaggaggaccggccccgcagtactgacctgcaggaactccccaccccagggacaccgcctccccattttccggggcagagtggggactcacagaggcccccagccctgtgccccgctggattgcactttgagcccgtggggtgaggagttggcaatttggagagacaggatttgggggttctgccataataggaggggaaaatcaccccccagccacctcggggaactccagaccaagggtgagggcgcctttccctcaggactgggtgtgaccagaggaaaaggaagtgcccaacatctcccagcctccccaggtgcccccctcaccttgatgggtgcgttcccgcagaccaaagagagtgtgactcccttgccagctccagagtgggggggctgtcccagggggcaagaaggggtgtcagggcccagtgacaaaatcattggggtttgtagtcccaacttgctgctgtcaccaccaaactcaatcatttttttcccttgtaaatgcccctcccccagctgctgccttcatattgaaggtttttgagttttgtttttggtcttaatttttctccccgttccctttttgtttcttcgttttgtttttctaccgtccttgtcataactttgtgttggagggaacctgtttcactatggcctcctttgcccaagttgaaacaggggcccatcatcatgtctgtttccagaacagtgccttggtcatcccacatccccggaccccgcctgggacccccaagctgtgtcctatgaaggggtgtggggtgaggtagtgaaaagggcggtagttggtggtggaacccagaaacggacgccggtgcttggaggggttcttaaattatatttaaaaaagtaactttttgtataaataaaagaaaatgggacgtgtcccagctccaggggtaaaaaaaaaaaaaaaaaa

SEQ ID NO: 116205 - DNA, 1000 bp, Homo Sapiens
ggtttgtgtctcatctccctgcgtgtcttttcctttgtctgtctttttctttcccccatgcacatcatgtagattaagctgaagatgtttattacaatcactctctgtggggggtggccctgctgctcctcagaatcctggtgccttgaagttctctgtgcatctgtccatcctccctatggccctggccagagctcagcatgggcaggggttctgggtaggacggtcactgtcctctctcctggactggtcttcccagccctaaaccctgccccaggaagcccacagcctcacctgctgctgcccctctaggtctgggcagccatgacctgcagggcccagagacactgtccttcccctcatccacccaaggccccagccagcgctcataccctgtcctttctccctgaccccaagggcacagaggcaaggcctcctgtctacagcagcttcctcagtttcctactgccttaggaggcccctgcttgtgctcagggaaggcctcttcatgggcatgttcctgctggggcggtgcggtttggtcccaactctgctaagttttctgagatgagggtctagccctgttggggacagaaaagtgtgtagaccttcttcctgctagggctgcactgtcctgggtgttgggcccttctggtggacaaggctgtgccaaccctgtacagaatcgagtgctgtagcctggccagaccccagagcccttgtgccatctttcttcctggccagagtgatggggttccagccatggggaagcaacccaatcctctgtctccttgctccaatggaggcagaagagcccaggacccaagcgtcttggcaggggtgctgtgaatgtccagtggtcccagctccccaccctggccctgccccagcctgtgtagctcttcctgcatgtggatgctgcatgtctggtctggggcttggatgttgcactgccccactgcctgtcccttctggtaaaataaagaactcttaatgcccg

SEQ ID NO: 116206 - DNA, 1000 bp, Homo Sapiens
gggttctacagagacgtaggctgtcagggagtgtttatttcgcgtccgcttctgtttctccgcgcccctgtgctgccccgactcacatactcgtccagaaccggcctcagcctctccgcgcagaagtttcccggagccatggccgagtactcctacgtgaagtctaccaagctcgtgctcaagggaaccaagacgaagagtaagaagaaaaagagcaaagataagaaaagaaaaagagaagaagatgaagaaacccagcttgatattgttggaatctggtggacagtaacaaactttggtgaaatttcaggaaccatagccattgaaatggataagggaacctatatacatgcactcgacaatggtctttttaccctgggagctccacacaaagaagttgatgagggccctagtcctccagagcagtttacggctgtcaaattatctgattccagaatcgccctgaagtctggctatggaaaatatcttggtataaattcagatggacttgttgttgggcgttcagatgcaattggaccaagagaacaatgggaaccagtctttcaaaatgggaaaatggctttgttggcctcaaatagctgctttattagatgcaatgaagcaggggacatagaagcaaaaagtaaaacagcaggagaagaagaaatgatcaagattagatcctgtgctgaaagagaaaccaagaaaaaagatgacattccagaagaagacaaaggaaatgtaaaacaatgtgaaatcaattatgtaaagaaatttcagagcttccaagaccacaaacttaaaataagtaaagaagacagtaaaattcttaaaaaggctcggaaagatggatttttgcatgagacgcttctggacaggagagccaaattgaaagccgacagatactgcaagtgactgggatttttgtttctgccttatctttctgtgtttttttctgaataaaatattcagaggaaatgcttttacagaaaaaaaaaaa

SEQ ID NO: 116207 - DNA, 1000 bp, Homo Sapiens
ccccggcgggagcccacatgttgcactgtaggacagcggcccgaagtggaagcctggctggaggctgccctataggtctctctccgcctcccctgccatgcaaccagatgtgtgtgaatgggccacgtgcccccacgctggatactccgccacgcttctgtctttcacggtgggcgctcggggggagctgagaaaaccccttagtactgtgcgagctgtggagtgcaggccagagcagggtgtgcgtagcccccagcacccaggttcttctgtcagaccctgtgacctgcgagctgctactactgtaaggagggaaatggatgaatctggctcgttttaaaatcacgttttctgacgaatcctttgccccttcacctttaccccgcccgcacccctaggccctctcagccttcctatcatcccacgtgtctacccagacccttgtgcggcccatgccctgggggcggcgtcctgtccctgagctgggaggcggctttggatggtccgggcgtcaagagcaggggtgggccggggaggggtcctttgcggtgagctatgtttacattgacacagtgtgccaaagtgacttactgcggttgcgttagtttctgtcatcaggacactatctcaccctcccactcctgtttttaaaactcagaattctttcctaagagcccttcgaagcaaagcgtgccgaagttagttgtcttctctgtgctggtcctttcttatgtcctcataaaagctcagatgatggtatctgtgagtatgttttgcaaattcaaaatatagtttggtaattttttttgccagttgatttttaaaaagaactgctgtacagagctagtactttgtccattttatgaatggaaaccatccttgaaaattgtttaacttaaataaagagaagatactttctagataccgctctttgctggccagagtctgtcctggtgtgtgaaggctgggtggggtgggtgtggggactgggattggggtc

SEQ ID NO: 116208 - DNA, 1000 bp, Homo Sapiens
ctattgtaatcatttggttaagtgcttattcctcttttgggtaaaatctgtaattgataataggtgggggaaaatgaattttgtatgctgaatttctaagcgcctattgtttgtaaaaccatcagatatttcttatggcacaaaaaatgaggaatagcaaaattcctgtgttcaatatttagaaaattttgtattaatttctgataaagttccttaagcatctgatagaatgatgttttaaaaaaatttgacgcttgcttaggagatttaccactttttttttttgtttttcgtcattttatatttagatctcctgtattcttgttcccgaagtaaaatacgatcggtttcatattttaaatctggcagagcctcagctgtacgaaaaagagcatatactggttattgaccctatcttctcattgtttgtttgtaagtttgaatttgtattaaaaagcctgcattctgagctggacatggtggctcagcttctaatcccagcactttggtaggcaaaggtgggaggatcatttgagctcaggagttccagaccagcctgggcaacatagcaaaatctcatctctacaaaaagtaaaaattaaaaaatgaaattaaaaataaaattacctaggtgtggtggcacgcatctgtagttccagctatacaggaaggtgaggcagaagcattgcttgagcttgggagatcgaggctacagtgagctatgattacaccactgcacttcagtctgtgtgactgagcaagactctttcaaaaaaaaaaaaaagcctacattctccagttgattatttccaactaatgtgtattatgtgcctaattttctatcagaagttgtattaagcccgttttcacactgctgttaaagacatacctgagactgggtaatttataaagaaaaataggttcaatggacccacaggtccgcgtggctggggaagcttcacaatcatggcggaaggtgaaagcatgtcttacgtggaag

SEQ ID NO: 116209 - DNA, 1000 bp, Homo Sapiens
tcatcagcttctatagtgctttgcctggctacatctgcagccatagccctgtggcggaaaacgacaccctttgctggaatggacaagaactcgtggagagatacagccaaaaggcagcaaggaatggaatgaaaaaccagttcaatctccatgagctgaaaatgaagggccctgagccagtggtcagtcaaattattgacaaactgaagcacattaaccagctcctgagaaccatgtctatgcccaaaggtagagttctggataaaaacctggatgaggaagggtttgaaagtggagactgcggtgatgatgaagatgagtgcattggaggctctggtgatggaatgataaaagtgaagaatcagctccgcttccttgcagaactggcctatgatctggatgtggatgatgcgcctggaaacagtcagcaggcaactccgaaggacaacgagataagcacctttcacaacctcgggaacgttcattccccgctgaagcttctcaccagcatggccatctcggtggtgtgcttcttcttcctggtgcactgactgcctggtgcccagcacatgtgctgccctacagcaccctgtggtcttcctcgataaagggaaccactttcttatttttttctatttttttttttttgttatcctgtatacctcctccagccatgaagtagaggactaaccatgtgttatgttttcgaaaatcaaatggtatcttttggaggaagatacattttagtggtagcatatagattgtccttttgcaaagaaagaaaaaaaaccatcaagttgtgccaaattattctcctatgtttggctgctagaacatggttaccatgtctttctctctcactccctccctttctatcgttctctctttgcatggatttctttgaaaaaaaataaattgctcaaataaaaaaaaaaaaaaaaaaaaaaaaaaaaaaaaaaaaaaaaaaaaaaaaaaaaaaaaaaaaaaaaaaaaaaaaaaa

SEQ ID NO: 116210 - DNA, 1000 bp, Homo Sapiens
ctggaagagaaaaacaccctttccattcagctctgcgataccagtcagagtcttcgtgagaaccagcagcactatggtgaccttttaaatcactgtgcagtcttggagaagcaggttcaagagctgcaggcggggccactaaatatagatgttgctccaggagctccccaggaaaagaatggagttcacagaaagagtgaccctgaggaactaagggaaccgcagcaaagcttttctgaagctcagcagcagctatgcaacaccagacaggaagtgaatgaattaaggaagctgctggaagaagaacgagaccaaagagtggctgctgagaatgctctctctgtggccgaggagcagatcagacggttagagcacagtgaatgggactcttcccggactcctatcattggctcctgtggcactcaggagcaggcactgttaatagatcttacaagcaacagttgtcgaaggacccggagtggcgttggatggaagcgagtcctgcgttcactctgtcattcacggacccgagtgccacttctagcagccatctactttctaatgattcatgtcctgctcattctgtgttttacgggccatctatagacttagttgttactctttggaccactcccttcaaaacttggaattctctcacctctaacatcagaacatcaattccagtggaacagtcttcccatttacaggtcttctctccaactcttcacggaaagtgcctgcaaaaacagaggtggatacgaggacaggttggagctgcagggactggcgagtctgctttcttctactgccctgagcctgaacgcttctgcttaatctgagaatcacatttggtttgttgagcctaatatttgttgagattttgcaggaccctgatcttttgtggtcctgtaaaagatactgaggaatgtctttcagccaagccaagaggatggtttcaataaacctaataatctgaagttcagctttttttttttttttt

SEQ ID NO: 116211 - DNA, 1000 bp, Homo Sapiens
tgagctggggcccatccggaagaaagaggaggatcaggcatcccagggttataaaggggacaatgctgtcattccatacgaaacagacgaagacccgcggaggaggaatattcttcgcagcctaaggaggaacactaagaaaccaaagcccaaaccccggccatccatcacaaaggcaacctgggagagtaactattttggggtgcccttaacaactgtcgtgactccagagaagccgatccccatttttattgaaagatgtattgagtacattgaagccacaggactgagcacggaaggcatctaccgggtcagcgggaacaagtctgagatcgagagtctgcagagacagtttgatcaagaccacaacctggacctggcagagaaagactttacggtgaataccgtggctggtgccatgaagagctttttctcagaactgcctgaccccctggtcccgtataacatgcagatcgacttggtggaagcacacaaaatcaacgaccgggagcagaagttgcatgcccttaaggaggtattaaagaaatttccaaaggaaaaccacgaagtcttcaagtatgtcatctctcacctaaacaaggtcagccacaacaacaaggtgaatctcatgaccagcgagaacctctccatctgcttctggcccaccttgatgagacctgatttcagcactatggacgccctcacagccacgcgcacctaccagacaatcattgaactctttatccagcagtgccccttcttcttctacaatcggcccatcaccgagccccccggcgccaggcccagctccccctctgccgtggcttccaccgtccccttcctcacttccacgcctgtcacaagtcagccgtcgcccccacagtcgcctccacccaccccccagtccccaatgcagccactgcttccctccccgcttcatccccaccgtcccactccacagccttcccgaaacattccctggcaaacaaaggaacactag

SEQ ID NO: 116212 - DNA, 1000 bp, Homo Sapiens
tggatataaataattgtagatcttgtatatttgatttttaaaaaactagaataaacagagaggcataaacatatcttagagtccaagtggtagtgtttagcattggatataataaatggatgttttacaaagtgtttccataattctcttcctatacataaatgtcttgttttcaaaagtggatggaacttggctgggtgtggtggctcacgcctgtaatcctagcactttgggaggccaaggcgggaggatcacttgagctcaggagtttgagaccatcctgggcaacatagtgagacctggtctcttgaaaaaaaaaaagtggatggaacttgtagcagagaattttatctacttctcaacctgcttcagaatacccatttgagatgttcccctggaaagatgaacacaatactgcatctgaagccatttcttcccacctaacattcttaaaatgattagagtctaaactttgtcattcattcctaattctggagctctgaggttgaggtgttcagagtttggtgaataattgggtttaagttttaacattttagtaataataaaagcaaacacatacatgttaaggcctgacaataggttgcaatacccatgcattgggactcatacccagcataaatggtgagggactgaacattagtgctttgagcaagaattggttaactacctgagatctctaaaacagtaatttgaattactaatacataaaccacaagtctcttcgaattgttaattgcctaaatttaccctaaaacttagttaacgctgcagtgcctttattaaagcttttttttgggggggggtgtgggcacagctactccataactttaaattttaaagcatgaaggtgatctagctagtgttagtgcttgagttggtagttacataggctgctcttgaatcgtcctgttttctttgcctagtattagcaccacaggtacatatttgtaaaataagcattaaaagtactttgtccagc

SEQ ID NO: 116213 - DNA, 1000 bp, Homo Sapiens
tgcgcgccctttgagcagaacctctccggggtgtgtcccggcgactccgccaaggcggcgggcgccaaggagcagagggactcggacttggcggccgagagtaacttccggatctacccctggatgcgaagctcaggaactgaccgcaaacgaggccgccagacctacacccgctaccagaccctggagctggagaaagaatttcactacaatcgctacctgacgcggcggcggcgcatcgagatcgcgcacacgctctgcctcacggaaagacagatcaagatttggtttcagaaccggcgcatgaagtggaaaaaggagaacaagaccgcgggcccggggaccaccggccaagacagggctgaagcagaggaggaagaggaagagtgagggatggagaaagggcagaggaagagacatgagaaagggagaggaagagaagcccagctctgggaactgaatcaggaaactcaaatcgaatagggaagtaaaaaaacaaaacaaaaaacaaaaaaaacaaaaaaaaaaccctatttaaatgaaaggagtttaaaaacattttttaaggagggagaaaggagaaattttggtttttcaacactgaaaaaatactacctataggaaagtctgtcaggtttggtttttttgtacaatatgaaaaggatattatctacctgttctgtagctttctggaatttacctccccttttctatgttgctattgtaaggtctttgtaaaatcttgcagttttgtaagccctctttaatgctgtctttgtggactgtgggtctggactaaccctgtggttgcctgccctcctgagcctccgccttcccagcagcggcaccaaggggccttagggagccccaaaacctaccactcgcgtgttccccaagcgcctggctgctgcttcttgcttcccgtcccccagccccatgctcccttttacattctgtgtgtatctaaaggatggaaaaataaaacgcaattaaaaataaa

SEQ ID NO: 116214 - DNA, 1000 bp, Homo Sapiens
acctaattacagaccattacccaaatatcctaccaggctttccatctgaatagtaaattaaacagttgttatcaaaatgattttaaagactatttctttttctgggtaactattgaagtttgtaattaaatgggggctcttactgactttaaattagcgcttataaaataaaaatgtttagttcaagaagagacccaagctgggtatggtggtgtgagagcctgtgagtcctagctacctggaggtgaggtgggaacatcacttgagcccaggagttggaggctgcagtgcgctacgatcacaccactgcacaccagcctggggatagagtgagatcccatctctaaaaaatgaaaaaaagaagagaggtagctttaaagtggtttttctcatgatattcactgtttattattaaagaaaatcagctttcgttagacttttacatttagatttattctagttttatatagaccatcaaaattatgttgagtactaaaaaggagaaaaaatcctggaaggtaacaaggctgaagaccttcaaatttcctggcttactggtttagtcacatcatttttcctgttcaggtatctgcagatatccctgttcaggaaagatcttttttcaggatggcaaacttttgacatagtttaaagacattttttccccattttttgaaatagagaatattttattatttttgtgaaaatagagttttggtaatcactttcttcctcaaaataagtccttctgttaatttgtaaaagcacattagtgctttacctgtgaaattccccgcccccctgcacacacacccactttagtacagttcctgtcaattggcaacatggagagggtgacctggctgctggtttaccactgtaccaacatctctggagcattttagtttcagaaccttaacactccccaacagctttgttgatgtagcttgtatctctgagaatttattgtattaaaattaatactgagatatttttaaaa

SEQ ID NO: 116215 - DNA, 1000 bp, Homo Sapiens
ataattttgtatcacacaccctggatatgtgttctgtttctaagcgacatttgtgagagattattgtaaaatgagagcgagcaaataaaacttaatttaatctttgcagatacatacttatgggaaatttgaacaaatgagtgaaactctgtttttagtaggctgtgataaacatttccggagcacttgcagaggacttgctatttgccaggtgctttatgtatcattaaatttttctcatagttcagaaaaatgtgcaaaggaaactattgtctcgctccttcaaaacagtcttaattaactttcatattagcagattaaactagcagagcaggttcaagggaaattaaatgatatggaccctaatttgtatcattctgagttgattgtgtggtttattcattctggaaacatgttgatacttacagtcagccactgcttttgataagtgatattgattaggttgaatcttcttgtaaatagtatttaccagttagcaaagtctgtgttttcagaattacagtgagcacagaggtgttcataaaatgggaattgagtcccactcggtaagagttgcttaaacttgacactgttgacatttgggctggataaaacccctgtggtggggtctgtgctgtgcattgcaggatggtgagcagcgtccctctcatgtgacacccacagttatgccggatgttgccagatgcccctaggggacagagtcaacccccaactgaggaccactgtcctacagagtcaggaaatattgtagggagaaaaaaataacaacaacaaaggcctgtgttaatgttaaatagatgagattatggaatgtgtatattaatgttaaaaattgtaccttgatcaatgtactttttataaacttgccatagatatctcagatttgaaacctcaagacagatttattattcttaaatgctgtatgataatgaagaaaaataaaaatttatttcttgcaaagttaaaaaaaaaaaaaaaa

SEQ ID NO: 116216 - DNA, 1000 bp, Homo Sapiens
actttgatattttcaacgcagccctgctttgggctgccctggtgctgccacacttcaggctcttctcctttcacaaccttctgtggctcacagaacccttggagccaatggagactgtctcaagagggcactggtggcccgacagcctggcacagggcagtgggacagggcatggccaggtggccactccagacccctggcttttcactgctggctgccttagaacctttcttacattagcagtttgctttgtatgcactttgtttttttctttgggtcttgttttttttttccacttagaaattgcatttcctgacagaaggactcaggttgtctgaagtcactgcacagtgcatctcagcccacatagtgatggttcccctgttcactctacttagcatgtccctaccgagtctcttctccactggatggaggaaaaccaagccgtggcttcccgctcagccctccctgcccctcccttcaaccattccccatgggaaatgtcaacaagtatgaataaagacacctactgagtggccgtgtttgccatctgttttagcagagcctagacaagggccacagacccagccagaagcggaaacttaaaaagtccgaatctctgctccctgcagggcacaggtgatggtgtctgctggaaaggtcagagcttccaaagtaaacagcaagagaacctcagggagagtaagctctagtccctctgtcctgtagaaagagccctgaagaatcagcaattttgttgctttattgtggcatctgttcgaggtttgcttcctctttaagtctgtttcttcattagcaatcatatcagttttaatgctactactaacaatgaacagtaacaataatatccccctcaattaatagagtgctttctatgtgcaaggcacttttcacgtgtcacctattttaacctttccaaccacataaataaaaaaggccattattagttgaatcttattgatgaagagaaaaaaaaaaa

SEQ ID NO: 116217 - DNA, 1000 bp, Homo Sapiens
caacatatgctataatttagaattttcttatgaatccactctacttgggtagaaaatattttatctctagtgattgcatattatttccatatcatagtatttcatagtattatatttgatatgagtgtctatatcaatgtcagtgtccagaatttcgttcctaccagttaagtagttttctgaacggccagaagaccattcgaaattcatgatactactataagttggtaaacaaccatacttttatcctcatttttattctcactaagaaaaaagtcaactcccctccccttgcccaagtatgaaatatagggacagtatgtatggtgtggtctcatttgtttagaaaaccacttatgactgggtgcggtggctcacacctgtaatcccagcactttgggaggctgaggcgggcgaatcatttgaggtgaggaattcgagaccagcctggccagcatggtgaaaccccatctctactaaaaatacaaaaattagccaggtgtggtggcacatgcctgtagtcccagccactagggcggctgagacgcaagacttgcttgaacccgggaggcagaggttgcagtgagccaagatggcgccactgcattccagcctgggcaacagagcaagaccctgtctgtctcaaaacaaaaaacaaaaccacttatattgctagctacattaagaatttctgaatatgttactgagcttgcttgtggtaaccatttataatatcagaaagtatatgtacaccaaaacatgttgaacatccatgttgtacaactgaaatataaataattttgtcaattatacctaaataaaactggaaaaaaatttctggaagtttatatctaaaaatgttaatagtgcgtacctctaggaagtgggcctggaagccattcttacttttcagtctctcccattctgtactgttttttgttttactttcgtgcctgcattatttttctatttaaaacaaaaataaatctagtttagcact

SEQ ID NO: 116218 - DNA, 1000 bp, Homo Sapiens
cctatttgtaatgccagtgtgacactaagcattttgttcacaccacgctttgataactaaactggaaaacaaaggtgttaagtacctctgttctggatctgggcagtcagcactctttttagatctttgtgtggctcctatttttatagaagtggagggatgcactatttcacaaggtccaagatttgttttcagatatttttgatgactgtattgtaaatactacagggatagcactatagtattgtagtcatgagacttaaagtggaaataagactatttttgacaaaagatgccattaaatttcagactgtagagccacatttacaatacctcaggctaattactgttaattttggggttgaactttttttgacagtgagggtggattattggattgtcattagaggaaggtctagatttcctgctcttaataaaattacattgaattgatttttagaggtaatgaaaacttcctttctgagaagttagtgttaaggtcttggaatgtgaacacattgtttgtagtgctatccattcctctcctgagattttaacttactactggaaatccttaaccaattataatagctttttttctttattttcaaaatgatttcctttgctttgattagacactatgtgctttttttttttaaccatagttcatcgaaatgcagctttttctgaacttcaaagatagaatcccatttttaatgaactgaagtagcaaaatcatctttttcattctttaggaaatagctattgccaaagtgaaggtgtagataatacctagtcttgttacataaaggggatgtggtttgcagaagaattttctttataaaattgaagttttaagggacgtcagtgtttatgccatttttccagttccaaaatgattccattccattctagaaatttgaagtatgtaacctgaaatccttaataaaatttggatttaattttataaaaaaaaaaaaaaaaaaaaaaaaaaaaaaaa

SEQ ID NO: 116219 - DNA, 1000 bp, Homo Sapiens
gagcgctccatcttcagtgactttgtgttcctggaggcgatgtacaaccagggattcatccgaaagcagtgtgtggaccactacaacgaggtgaagagcgtcaccatctgcgattacctgcccccccacctggtgatttacatcgatgtgcccgttccagaggtccagaggcggattcagaagaaaggagatccacatgaaatgaagatcacctctgcctatctacaggacattgagaatgcctataagaaaacctttctccctgagatgagtgaaaaatgtgaggttttacaatattctgcaagggaagctcaagattcaaaaaaggtggtagaggacattgaatacctgaagttcgataaagggccgtggctcaagcaggacaatcgcactttataccacctgcgattactggttcaggataagtttgaggtgctgaattacacaagcattcctatctttctcccggaagtcaccattggagctcatcagactgaccgtgtcttacatcagttcagagagctgccgggccgcaagtacagccctgggtacaacaccgaggtgggagacaagtggatctggctgaagtgaacgggccgccttctgctccagctgcatcacagtgatggccaagctgcatcagccgcactctcctggacgccatatagctttaagatcgggggagggtaaataatgcaaaaattgcacagtggaagaaggggtctcacaaaaagcaatccatcctgtagtataggtaatggagttgggggaagcagcttccattctggatgtttggaaccctttagctttgttttggaatggcccaccattctcactggaaaacagtggtctgctgtgaaaggccagctctcggcagcccctgtggtttcagcgctgccgctctgtgtcattcaggttgtgcacattgtttttcttctgacttccagaaataaaagtgtttccatgggaaaaaaaaaaaaaaaaaaaaaaaaaaaaaaaa

SEQ ID NO: 116220 - DNA, 736 bp, Homo Sapiens; identical to SEQ ID NO: 22959

SEQ ID NO: 116221 - DNA, 1000 bp, Homo Sapiens
gctcttaggtgggttatcctggagaaaatggactcaggagctaatactgtctacagtggagcttggtgcaattagaagcaaaagactgtacctaactggaatgaggttactttttatggcttatcaaatgcttgtcctggcccgatgcagtggctcatgcctgtaatcccagcactttgagaggctgaggcagggcagattgcatgagcccaggagttcgagaccaacttgggcaacatggtgaaacactgtctctacataaaatacaaaaattagctgggcgtggtggcacgttcctgcaatcccagctactcataaggctgaggtgggaggatctattgagccctggaattcgaggatgcaattaattgtggttgtgtcacagttcactgcagcctgggtgacactccagcctgggtgacaaaggagaccccgtcaaaaaaaaaagtacttgtcccaaaagtttttgtttcctagcttagaatttataatcagattaggttttggagataaagtatatgtggtattttttttttttttttgagacagtcttgctctgtcatcaggctggagtgcagtggcgcaatttcggctcactgcaacctccacctcctgggttcaagcaattctcctgcctcagcctcccgagtagctgggactacaggtgcatgccacgacgcccagctgatttttgtgtttttagtagagacggggtttcaccatgttggccaagatggtctcaatctcttgaccttgtgatccacctgccttggccttccaaagtgttggaattacaggcgtgagccaccgcgcctggtctatatgtgatttcaaattaggtggccttataaatataagcagatggtttctgggcaaaatcaaatgatttctgtctctattttcttgagtaccaattgtaaaaactgaaattaggttgaggaaagtgctttagaaataataaagatgtacaaataaaaaaaaaaaaaaaaaaaaaaaaaaa

SEQ ID NO: 116222 - DNA, 1000 bp, Homo Sapiens
aagaaagggagaagatgtttgagttctacgagcgagtgtctggagcccgaatgcatgctgcttatatccggccaggaggagtgcaccaggacctaccccttgggcttatggatgacatttatcagttttctaagaacttctctcttcggcttgatgagttggaggagttgctgaccaacaataggatctggcgaaatcggacaattgacattggggttgtaacagcagaagaagcacttaactatggttttagtggagtgatgcttcggggctcaggcatccagtgggacctgcggaagacccagccctatgatgtttacgaccaggttgagtttgatgttcctgttggttctcgaggggactgctatgataggtacctgtgccgggtggaggagatgcgccagtccctgagaattatcgcacagtgtctaaacaagatgcctcctggggagatcaaggttgatgatgccaaagtgtctccacctaagcgagcagagatgaagacttccatggagtcactgattcatcactttaagttgtatactgagggctaccaagttcctccaggagccacatatactgccattgaggctcccaagggagagtttggggtgtacctggtgtctgatggcagcagccgcccttatcgatgcaagatcaaggctcctggttttgcccatctggctggtttggacaagatgtctaagggacacatgttggcagatgtcgttgccatcataggtacccaagatattgtatttggagaagtagatcggtgagcaggggagcagcgtttgatcccccctgcctatcagcttcttctgtggagcctgttcctcactggaaattggcctctgtgtgtgtgtgtgtgtgtgtgtgtgtgtgtgtatgttcgtgtacacttggctgtcaggctttctgtgcatgtactaaaaaaggagaaattataataaattagccgtcttgcggcccctaggcctaaaaaaaaaaaaaaaaaaaa

SEQ ID NO: 116223 - DNA, 899 bp, Homo Sapiens
catctgagtaacatggcggcggcggcggtagccaggctgtggtggcgcgggatcttgggggcctcggcgctgaccagggggactgggcgaccctccgttctgttgctgccggtgaggcgggagagcgccggggccgacacgcgccccactgtcagaccacggaatgatgtggcccacaagcagctctcagcttttggagagtatgtggctgaaatcttgcccaagtatgtccaacaagttcaggtgtcctgcttcaatgagttagaggtctgtatccatcctgatggcgtcatcccagtgctgactttcctcagggatcacaccaatgcacagttcaaatctctggttgacttgacagcagtggacgtcccaactcggcaaaaccgttttgagattgtctacaacctgttgtctctgcgcttcaactcacggatccgtgtgaagacctacacagatgagctgacgcccattgagtctgctgtctctgtgttcaaggcagccaactggtatgaaagggagatctgggacatgtttggagtcttctttgctaaccaccctgatctaagaaggatcctgacagattatggcttcgagggacatcctttccggaaagactttcctctatctggctatgttgagttacgttatgatgatgaagtgaagcgggtggtggcagagccggtggagttggcccaagagttccgcaaatttgacctgaacagcccctgggaggctttcccagtctatcgccaacccccggagagtctcaagcttgaagccggagacaagaagcctgatgccaagtagctccagggaacgcatgtggatcctagacagcgccttatctatgattgagtgtccgtgtaaataaattcctacttagacttaaaaaaaaaaaa

SEQ ID NO: 116224 - DNA, 1000 bp, Homo Sapiens
aagatattctggaaagatttgtgcttcagaggtagactgcagaaagcaaacagtctacccagcagctctgaatgtcacctgccctggggcttacagcactatatgagttcctggcctatcctgcaaatatgcccatgctggccttctaaatagctggtacatccatcaccactgacgggcctggcctggaaacctggtttgtcccctgtcttgatggcctacgagaggccaagttccactgggctgggaaaagtcactttgtctgtcttgttcacctggagcctgacacaccgtaggtactgagtacaaatagcttgatttggctaggcttggctgcagggggacgtgcctaaaagacattccgggcatttgcacttgggaaacttgcctcaccttcaggcttgtggggcctctctatgcccaatgagtccaggcagtcctagcaagtactcaggagagcaggggtgggtgtgacagaggctggctctggattgggggacaacagaaccagagtaactcctcgcctgttgctgctttgcaatgaatttcctttacctttctggaacacaagctgctgtgaaccaaactgatatcaagtgattagctcaccgggccttggttgcttttcaaagatccccttcagccccctgccagagtcactgccccataatcaccatgtcagaagggaccctagggcattcgtgtcctatttatcaatcttcagcaccacctctaagatctctgagagagggtggatcagcctctgtgtaaacaaaaagctgttaggacttgttgcctctcaaggtggactattctgttttctgccaggacactgccattcatgcattgtcagatatttattaaacagcagcaaagtgccagccaatttgtcctggaggaattcatagcctcatggggcaaaagtaaataaacagcttattacaattcaacaaaaaaaaaaaaaaaaaaaaaaaaaaaaaaaaaaaaaaaaaaaaaaaaa

SEQ ID NO: 116225 - DNA, 1000 bp, Homo Sapiens
cttgtctgcaggctcggacttggtccgtagacttggctgcgcgggggggcggggcctattctcattgccggagcctctcgggagtaggagcaggaggaggcccgacccctcgcggccgtaggttttctgcaggcatgcgcgggcctcggcccaaccctgcgataatgcgaggaagatacggagtggctgccgggcgcggaggcagggtctcaacggatgactggccctgtgattgggtggccctgggagcttgcggttctgcctccaacattccgatcccgcctccttgccttactccgtccccggagcggggatcacctcaacttgactgtggtcccccagccctccaagaaatgcccataaaccaaggaggagagggtaaaaaatagaagaatacatggtagggaggaattccaaaaatgattacccattaaaaggcaggctggaaggccttcctggttttaagatggatcccccaaaatgaagggttgtgagtttagtttctctcctaaaatgaatgtatgcccaccagagcagacatcttccacgtggagaagctgcagctctggaaagagggtttaagatgctaggatgaggcaggcccagtcctcctccagaaaataagacaggccacaggagggcagagtggagtggaaatacccctaagttggaaccaagaattgcaggcatatgggatgtaagatgttctttcctatatatggtttccaaagggtgcccctatgatccattgtccccactgcccacaaatggctgacaaatatttattgggcacctactatgtgccaggcactgtgtaggtgctgaaaagtggccaagggccacccccgctgatgactccttgcattccctcccctcacaacaaagaactccactgtggggatgaagcgcttcttctagccactgctatcgctatttaagaaccctaaatctgtcacccataataaagctgatttgaagtgttaaaaaaaaaaaaaaaaaa

SEQ ID NO: 116226 - DNA, 1000 bp, Homo Sapiens
agccactagaagatcttcctccagcggcgccctggacggctgctcctgcgaacagcccatggcatcttctgctcttccctcccggctctgccctgcacatcctgttgagccaagccccagtgacccggagagctggcctgatgctgagagtgtgtcctcctggggctttagggggcaggaaggtgggacgaatgacgatgcccatccactacctgaagcactaggacactcttgcagggccaggctggaagaccggcccttttcttggttgagtcaaaagccttagcacagtggcaaaaaatgggacagaatgatgaccagcacctcagaaacttccagagggaggagaggatttgatggctaccaaattgtatctgttgccttttttctgactttttcacctgaccaggctggggtttggagtggctgtggggagacccgtcctggctggctggctggctcccttgctcccttgctgcagctgggaaaggggttctgggtgtaaagaggtgtgcgtcttgtgggccaaagggaaaaacaggcaggggtcagagccagcctgccagaggcaaatgcaaaagaggtccccagaacacagccagctgggcagccccttaaagccaaaccccacctgaagcagaaccactttggcctcccctgcccaaaatgggtagtgtctacacgtccccgggctcaggctcaggcccagccctgggctgacctgagaggaaggctccttcctggactgccctctgaaatgtgtatagattgattctaaaatctcttgtttcacttgactttagagtgtctgggacgctgctgtattctgaaagtcacatagcacacagtaatgttatctggaagctctgtttttgtttacatttctgtatccctgggttgactgccaatccgaggccgtcatgaagctctgtgttgtctgttttattttataaccttcctctcaactattaaaattagagatctaaaaaaaaaaaaaaaa

SEQ ID NO: 116227 - DNA, 1000 bp, Homo Sapiens
aacgccatggctacaatccagagtaacactatttttaccaatgtggctgagaccagtgatggtggcgtgtactgggagggcattgaccagcctcttccacctggtgttactgtgacctcctggctgggcaaaccctggaaacctggtgacaaggagccctgtgcacatcccaactctcgattttgtgccccggctcgccagtgccccatcatggacccagcctgggaggccccagagggtgtccccattgacgccatcatctttggtggccgcagacccaaaggggtacccctggtatacgaggccttcaactggcgtcatggggtgtttgtgggcagcgccatgcgctctgagtccactgctgcagcagaacacaaagggaagatcatcatgcacgacccatttgccatgcggcccttttttggctacaacttcgggcactacctggaacactggctgagcatggaagggcgcaagggggcccagctgccccgtatcttccatgtcaactggttccggcgtgacgaggcagggcacttcctgtggccaggctttggggagaatgctcgggtgctagactggatctgccggcggttagagggggaggacagtgcccgagagacacccattgggctggtgccaaaggaaggagccttggatctcagcggcctcagagctatagacaccactcagctgttctccctccccaaggacttctgggaacaggaggttcgtgacattcggagctacctgacagagcaggtcaaccaggatctgcccaaagaggtgttggctgagcttgaggccctggagagacgtgtgcacaaaatgtgacctgaggccctagtctagcaagaggacatagcaccctcatctgggaatagggaaggcaccttgcagaaaatatgagcaatttgatattaactaacatcttcaatgtgccatagaccttcccacaaagactgtccaataataagagatgcttatctattttacacaa

SEQ ID NO: 116228 - DNA, 1000 bp, Homo Sapiens
gtggtggacgtcaagggccaggtgcggatggaggtgcaaggcgaggaggagaagagggaggacaaggaggacgaggaggatgaggaggatgatgatgtgagccatgtggacgaggaggactgcctgggggtgcagagggaggaccgccggggcggggatgggcagatcaacgagcaggtggagaagctgcggcggcccgagggcgccagcaacgagagtgagcgggactagggctgcgcctgctgcctccagccctgaggatggcatctagtgtgcccgtgcgtggccataccctgcctccctctctggccctgggagggcagcttggagcccaggtagggggcagagctgtcctcagctgcactgcggcctggtggcagtgtggggagtcacacttctgtccacctggcctcctctcgcctggccgccagccccagccccagccccagccccaggcccagctgcctttggctttgatctcaagtcaggctgaaggcagcgaagcctcggggcccaagcccctccccagccccctctcccggacagacgccttgcccagggtgtgtttgctgagtgtcttgactaccgtgacaccacgcatggccagagctagcgtccctactgcctcccgactcctcagtggaggaggagctgcggtccctctggtgtctgccatccccctccctccctgggcccggccctggacccgtcaggtgcctgtccccagccccaaccccactcatgccccgtcgtcctcccagacaaatgaaaccacgctgcgcttccgatgcccccgcttgccgtgtaatggttcagctaatcccatggcgagatgggggctcattccggaggaggagccaggcagcagggccttcctgaccaacagccagttttgtccttccccccaggaaaaaaatgttcatttgtgtgatcatgtatagacctcagaacggaagataggactgtatataattgtaataaataccagttgccactattt

SEQ ID NO: 116229 - DNA, 1000 bp, Homo Sapiens
agtccctgggcaagggaggattttcccggccgcagcacagccttccattcatgtgcacgtgagtctggtgaaaatggccttgtgaagtccagtgtctgtcatgcccctgagttcttttggtcccagagaggcagcctgggcagtctgtttacagctggcaaacagactggctggcaagttgtggggctgggtcagaaagtgtctggacttgtaatcgggtgccctgctgtccacaggtggactctggggaagccaggcccctggatcccaagtcctttgtgtccggagcctttcctggcctgtgcctggagggtagcacatctttccagcctcccagggctttgcagcctgcagatgccacctgtccctgagagaagttagcgtccctggccctggccggtggtctctcatccttgtgtgctgctctgctaagagatgtccaaggcggagccggggcaagatccttccagactcatctgtcagagccccaagccctttagacccagagcccaaggaccatgcctttgggacattaggactgcagcctttgcttctgtgtattttggagttttggtgacttttgtcacctggacacactcatttgttagccatagtgggttcccttggtcagcaacagtgcatgtacctctggatgtcatctgaggtgagaccaccgaggccttttctctctgtgtacagaggggagttaggagttgctggactggatgcattacgaggactggggacagggtagagggacatccagggatcagggcatgagtgggggcaaccccccggcctctgccctggcatggtctccgcatgggctgaggtgtagctgattggctgccacatttcggccatgctggctggcgtgcccatgttgcagatattttcccgagttccccagaatggatggtattgaatctcagccacatgcaacactgtgtccagcattctttgcaataaatactttttaaaaaataaaaaaaaaaaaaaa

SEQ ID NO: 116230 - DNA, 1000 bp, Homo Sapiens
aaaagtcttgtgatttcctctcatcttttagagattcctgccaaaaattctaccaagcagagatggaggagcttgactttatcagcgccgtagagaagtccagaaaacacataaacacctgggtagctgaaaagacagaaggtaaaattgcggagttgctctctccgggctcagtggatccattgacaaggctggttctggtgaatgctgtctatttcagaggaaactgggatgaacagtttgacaaggagaacaccgaggagagactgtttaaagtcagcaagaatgaggagaaacctgtgcaaatgatgtttaagcaatctacttttaagaagacctatataggagaaatatttacccaaatcttggtgcttccatatgttggcaaggaactgaatatgatcatcatgcttccggacgagaccactgacttgagaacggtggagaaagaactcacttacgagaagttcgtagaatggacgaggctggacatgatggatgaagaggaggtggaagtgtccctcccgcggtttaaactagaggaaagctacgacatggagagtgtcctgcgcaacctgggcatgactgatgccttcgagctgggcaaggcagacttctctggaatgtcccagacagacctgtctctgtccaaggtcgtgcacaagtcttttgtggaggtcaatgaggaaggcacggaggctgcagccgccacagctgccatcatgatgatgcggtgtgccagattcgtcccccgcttctgcgccgaccaccccttccttttcttcatccagcacagcaagaccaacgggattctcttctgcggccgcttttcctctccgtgaggacagggcagtcttggtgtgcagcccctctcctctctgtcccctgacactccacagtgtgcctgcaacccaagtggccttatccgtgcagtggtggcagttcagaaataaagggcccatttgtgggatgccgcattcaaaaaaaaaaaaaaaaaaaa

SEQ ID NO: 116231 - DNA, 1000 bp, Homo Sapiens
tagtgggctccaggatggagatcttgctgctcatggttgatgattctcccctgattgtggagtggaggaccccagatggcaggaaccggcccagccatgtctggctctgtgacctgcctgctgcctccctcaacgaccagttgccccaacatacatttcgcgtcatttggacagcaggcgatgtccagaaagaatgcgtgcttttaaaaggccgccaggagggctggtgccgggactccacgacagacgagcagctattcaggtgtgagctgtcagtggagaagtccacagtgctgcagtctgagctggaatcctgtaaggagctgcaggagctggagcctgagaataaatggtgcctgcttaccatcatcctgctgatgcgggcactggaccccctgctgtatgagaaggagaccctgcagtacttccagaccctcaaggccgtggaccccatgcgggcaacgtatctggatgacctgcgcagcaagttcttgctggagaatagcgtgctcaagatggagtatgccgaggtgcgtgtgctgcacctggctcacaaggatctgacagtgctctgccatctggaacagctgctcttggtcacccatcttgacttgtcacacaatcgcctccgaaccctgccacctgcactggctgccctgcgctgccttgaggtgctgcaggccagtgataatgccatagagtccctggacggcgtcaccaacctaccccggctgcaggagctgctactgtgcaacaaccgcctccagcagcctgcagtgctccagcctcttgcctcctgccccaggctggtcctcctcaacctgcagggtaacccgctgtgccaagcggtgggcatcttggagcaactggctgaactgctgccttcagttagcagcgtcctcacctaagaggccctgccccctacccttgccctttaacttattgggactgaataaagaatggagaggccctctcaggctaccaaaaaaaaaaaaaaaaa

SEQ ID NO: 116232 - DNA, 1000 bp, Homo Sapiens
caagttgagggaggccgaggagacgcagagcacactgcaggccgagtgtgaccagtaccgcagcatcctggcggagacggagggcatgctcagagacctgcagaagagcgtggaggaggaggagcaggtgtggagggccaaggtgggcgccgcagaggaggagctccagaagtcccgggtcacagtgaagcatctcgaagagattgtagagaagctaaaaggagaacttgaaagttcggaccaggtgagggagcacacgtcgcatttggaggcagagctggaaaagcacatggcggccgccagcgccgagtgccagaactacgccaaggaggtggcagggctgaggcaacttctcctagaatctcaatctcagctcgatgccgccaagagcgaagcccagaaacagagcgatgagcttgccctggtcaggcagcagttgagtgaaatgaagagccacgtagaggatggtgacatagctggggccccagcttcctccccagaggcgcccccagccgagcaggaccccgttcagctgaagacgcagctggagtggacagaagccatcctggaggatgagcagacacagcggcagaagctcatggccgagtttgaggaggctcagacctcggcatgtcggttacaagaagaattggagaagctccgcacagccggccccctagagtcttcagaaacagaggaggcctcacagctgaaggagagactagaaaaagagaagaagttaacaagtgacctggggcgcgccgccacgagactgcaggagcttctgaagacgacccaggagcagctggcaagggagaaggacacggtgaagaagctgcaggaacagctggaaaaggcagaggacggcagcagctcaaaggagggcacctctgtctgagtttcctctttggaaaaagaagttactgttcaacttaccaaaatgccttacacattccttacaaataaaccaaccaacctacaaaaaaaaaaaaaaaaaaaa

SEQ ID NO: 116233 - DNA, 1000 bp, Homo Sapiens
aagtggccagagcatacagagtgtattacagccctggccccaaggacgaagatgaagactacatagtggatcacacaataataatgtacttgattggaccagatggtgagtttctagattattttggccagaacaagaggaagggagaaatagctgcttcaattgccacacacatgaggccatacagaaaaaagagctagccaaagcagtgttgctggatgcagtattctcttgctaagaggaaggaaactgtctcgcataggagcctatataaatataaacatatatacgtgcactctacagaatggccttcataccatgagaacatttctgttttggatggggatgttacccttgcgttcaaccaaaattgattcttggaactgtaaagattacaacccaaagtctcccaggaagctgtggggagaccagaggatcaagctgaagtgaagccagtgaagagcccacctgtggaaggacatggcggggcgaggcacagccagtgcattcctgcctgcgaacaggccctcccagcagctttgccgcctctccatcgtcttgggcccttgctcaaatagctgtgggactgaatttcacagaaaagaatataatttccatagtgctcttgcttgcctcttcttgagttctttgctcttctgagttcttggtggctaataacagtcagattagggtctctgccattcagagttgatgcttgaaaactttagttttccttattaatgaatatcactatcagatttgactaatgaagaggaaatctattgtttgggggaaaaaaaacatcagtttgatttctctaggggttcttttatgtgatttttagctaagtggtgtgccaggttttcagtgacataccaaatggaaataagaggatattgatcacgagtgtgatgctgagtacctttctgcatatactggattgtactttgtgtaaagtaaacatactcagttttgctgttcaaaaaaaaaaaaaaaaaaa

SEQ ID NO: 116234 - DNA, 799 bp, Homo Sapiens
cactcccaaagaactgggtactcaacactgagcagatctgttctttgagctaaaaaccatgtgctgtaccaagagtttgctcctggctgctttgatgtcagtgctgctactccacctctgcggcgaatcagaagcagcaagcaactttgactgctgtcttggatacacagaccgtattcttcatcctaaatttattgtgggcttcacacggcagctggccaatgaaggctgtgacatcaatgctatcatctttcacacaaagaaaaagttgtctgtgtgcgcaaatccaaaacagacttgggtgaaatatattgtgcgtctcctcagtaaaaaagtcaagaacatgtaaaaactgtggcttttctggaatggaattggacatagcccaagaacagaaagaaccttgctggggttggaggtttcacttgcacatcatggagggtttagtgcttatctaatttgtgcctcactggacttgtccaattaatgaagttgattcatattgcatcatagtttgctttgtttaagcatcacattaaagttaaactgtattttatgttatttatagctgtaggttttctgtgtttagctatttaatactaattttccataagctattttggtttagtgcaaagtataaaattatatttgggggggaataagattatatggactttcttgcaagcaacaagctattttttaaaaaaactatttaacattcttttgtttatattgttttgtctcctaaattgttgtaattgcattataaaataagaaaaacattaataagacaaatatt

SEQ ID NO: 116235 - DNA, 1000 bp, Homo Sapiens
acctcgtcgctattaaagcatgaagactttctgaaacctgccctagagctgggatattgtttgtgggcaatattttttattgtctcttgtttaaaaagtgaacagtgcctagtgaagttaggtgacttttacaccttttacgatgactacttttggtggagttgaaatgctgttttcattctgcatttgtgtagtttggtgctttgttccaagttaagtgttttcagaaaagtatgttttgcatgtatttttttacagtctaaattttgactgctgagaagtttctattgtacaaaacttcatttaaaaggtttttctactgaatccagggtattctgaagatcgaagcctgtgtaaaatgctaccaaatggcaaaaagcaacaataaacagtttgatttttacttttctttctaacatatcaatgcttagcagaactattcagattgtcagtagtaaatttaaagacaaatgcccgttttcctccagtccatgaaacataccatacttatatacctgcaactaagtgtttaaaattatgctctgtaactctgtactgctagtattagaactaaaaatcttaaaatacagccagtgcttaatgcttatatcaatgtggatttgtcggcttttatgtaatctgtaatatgtatagcaggaaatacgaagagttacacagtgtatgccttaaaaggctgtttcttaaaggtgttacaaggggataatggtatttcaactagttatcagcaagtgacaatacattccaccacaaatacactcttgttcttctagcttttagactatatgaaaaaaccgggtgcttcaaagtacatgataagggaacactatacctgtcatggatgaactgaagactttgcctgttcattttttaaatattattttcaggtcctttgcttaccaaaggaggcccaatttcactcaaatgttttgagaactgtgtttaaataaacgcaaatgaaaagaaaaaaaaaaaaaaaaaa

SEQ ID NO: 116236 - DNA, 1000 bp, Homo Sapiens
agttttgctttgttgaataatacatgtgtacctaaaagaggtaagagcaaaaagtgtaattccacatcatgttacttgagaagtgcttaacgttttcttaaatgttttcattgggaaaggacagctttgataatgtccaaatactctgaaatgcactagaccatataactgtgatgaaatatgaaactcatctgtaaacttttataccaagggggtaaaaaaaaaaactaaggcatttgattaaattatgaatgagttttacaaattcctttcagagttttactaagatcacacaaataacagctttcttattcagtgaaaaagatattttatttctgatgttttatttgcactcgtggaatatgttaccattaatcagaaacatcatggcaacccctaagaatagactaagtttgtgttggctgagggattctatttggtttgcttttttttttttgctttgttatattttattgctacaaggggtgtgacttgataatgatttcctctgaattataataacatagccagatgtagtctcacactgtttttcatactcttaagtgtaaataatataaaatgtttcaagcgcttaactccccctcattcacaaagtataacaattaaaatctcaactataaccagtttagctttttccttacttttaaaataaaattttttacttttaactatttttttagttaatatttttaaaagtatacatgtcaatggcctctttgtccattattcattttgtggcaaaatattcttctttgatagtgtaaacaaataataaagcaatctaggtcctttaggtttgaaaggcaatttttgagtagcatattaccagctagccagtcactaggaatttttttcagtattatttgtatgtattaaacttttcattacactaaagtgcattattttattgagcaagtatccttcattgtgaggtttgacattaaagcaatctgttgaaatgccaaaaaaaaaaaaaaaa

SEQ ID NO: 116237 - DNA, 1000 bp, Homo Sapiens
acatattagctgccctaaatgatcttggagagccaccaaaactttaggactacccaagtcatctagaaattgcaaaggaaaagacattctctcccctatttaggaaacttggttagagcagcacacgtcggagaacaggaggctcacaaaagaacgattttcagtgcccccagcaaggctgcaccctccttgatcatcacaggggccatttctgccttgtgatggacccaggaggtctctgcagagcaagtgccgttggaccagctgattcacaaagtgctgagcccctcttccccgtgtggcccaccccaggcacggctcattcctccagaattatagaagctcagcctggcctgctcccctctggtcaccgacacccctgtcctcgctgggacaagagggagacaattctagtcactacaaggacacccaaggggtgtctgagtcagggctccaatagtgcagttatcgtggcctctcgcagcccggggagcacgtcgcctcttgaaactcgagatttcttaaatcccaatataaaaatgataaccagttacttacttcttttgttgttttgcaggccacctagaaatacaaaatgccaattcacctaatttttatactgaaatgtagatgcccccaacatgattttggaaagatataatttcttgaaaatcttatcagaagatgcatagttaatttttttccattatgtactcatgtttttatgaaatacaataccatattttagggccagggattattttaaccttaaaattgtgcatgcatcattgtagccctcaatatttggtaatgctatttaaagtgactcaagaagcatgtgctatctggctttgaaggaaaaaaaaagaattctgcaattacagtggatggaggccttttcttttcagatgaatgctaaagcaatgcaaggctgtttgtcaggcacaactggcaaaacaaatccattattaaaaagctactttgcatttggctgaaagaa

SEQ ID NO: 116238 - DNA, 1000 bp, Homo Sapiens
tgggcctctgactctgagtccactgctccatttataaccccagcctgacctgagactgtcggagaggctgtctggggcctttatcaaaaaaagactcagccaagacaaggaggtagagaggggactgggggactgggagtcagagccctggctgggttcaggtcccacgtctggccaggcactgccttctcctctctgggcctttgtttccttgttggtcagaggagtgattgaaccagctcatctccaaggatcctctccactccatgtttgcaatgcttttatatggcccagccttgtaaataaccacaaggtccactccctgctccacgaagccttaagccataggcccaggatatttctgagagtgaaaccatgactgtgaccaccttctgtccccagccctgtcctggttccttcctatgcccaggtaccacccttcagaccccagttctaggggagaagagccctggacacccctgctctacccatgagcctgcccgctgcaatgcctagacttcccaacagccttagctgccagtgctggtcactaaccaacaaggttggcaccccagctaccccttctttgcagggctaaggcccccaaacatagcccctgccccggaggaagcttggggaacccatgagttgtcagctttgactttatctcctgctctttctacatgactgggcctcccttgggctggaagaattggggattctctattggaggtgagatcacagcctccagggccccccaaatcccagggaaggacttggagagaatcatgctgttgcatttagaactttctgctttgcacaggaaagagtcacacaattaatcaacatgtatattttctctatacatagagctctatttctctacggttttataaaagccttgggttccaaccaggcagtagatgtgcttctgaaccgcaaggagcaaacactgaaataaaatagtttatttttcacactcaaaaaaaaaaaaaaaaaa

SEQ ID NO: 116239 - DNA, 1000 bp, Homo Sapiens
ccggtgcctctcccatggctttgtgctgctgagtcgctctcatgaagcccttagggagagcacctgttgtgtgcctgacaccacgctggagctgtgtaccaatcgtctcagccttcattaggaggccgaggtaggagtcttatatcccaggtgaggaatttgaagctcagaaaggttgaggggctccccagaggtcacacagcctgtgtgcagtggagctggcaccattcagactttcagccgactcagcaactttcccttgccctgggctgcctcctcctgagagctgttccccaccgccctgcctcttccggttggaggctctcatgtctctttggggagagctggcagtgtgcggagctgataacattttcccaatattgagcagttcccaaggacagtcagcatttctagacttccacaaaattatgctgcatttggctggagcccggtgttcagtggtttccctgcccgaggtcgctgcagccccatctaccacatcttcatgtggacattgagattcacatgctggctcctgaagggtgctcagtctccttggtgattaaggtcctgcttgaactgctgccaactccatgtcagggaagtcgcttttggtgcctggctggtttgcccagagccaagctggggcaaggggcagccagccctggcttccaaggctcccgtactgtctgtgtccttgtataaggagctttgctcttggaattactgaaagtctgtggcccaagagagagacacaagtggccttaagtctttttgaagtgttatttcatccagggaaatgcctcgagccatagagcctgaaatcatctttgttggctcagaaaataccttagcttcactcagctggactgcattgaaggcgaggctgccccttggatcaagcagaaaacaagagaaagaaagaacgttccctttggggatagtctggaaagttgggatttgcaaataaaggctctggaagcaaaaaaaaaaaaaaaaa

SEQ ID NO: 116240 - DNA, 1000 bp, Homo Sapiens
ctactttgaggatgaggacagggcagaactataccgggtgcctgccaagagcaccttgctacaggttctacagcaccagaggtactttgtaaaagccctgacaccagcatttttggtctgtgtaggatcctctcctttttgcaagaattttctccgggggagaaaggtgtaccagatacgatgactaagccagggcccctggatctcctcccttaccctcctctgctgggaacctagcacacctgaatcagctggacatactgctggagtccagtgctttctttccgtcaccctggggatagtccttcctggcatcgtggtgggggaggagcctctggcttccctaaactgcagcctctctggctggtcttcactttcctcagttgatataaaactctgggtcttggccatgatgtccttggactccatcgctaaagggaccatctgctgcagttaccacagcaactgacctgagcggcaccctggtctgtggagatggactcaggatccagtgacatgattctgaacttttgtggagtttgacaccttagagaagctacccctcaaactgcacatctacacacaaacaaacaatgcataggattccaaggctttaaagctgagagaccctggcctcaagttatttcatgcgcacagagggaagccatgtggggttgctgaagatgccttgaggtgaaatgggggcaggaaagccacatcttgctctgcatttataaagaccgtacaaactgagatccttggtacccctaaaaagattgccaattttcttcatctttgccatatggaggactgtgacagactttggacagtggcctcttgagttcctctgcagttttgacatttaggattttgtgtcttttaaactggaaaatcttctagcatgttgggttgttacagagtatatttttgtctgcagctgtttgttgccccattcctaagaggagtttatccatcctgaaaaaaaaaaaaaaaaaaaaaa

SEQ ID NO: 116241 - DNA, 1000 bp, Homo Sapiens
gcaaaaagtctacatactttcatcctgactctgccccctgctggctcttctgcccaattggaggaaagcaaccggtggatcctcaaacaacactggtgtgacctgagggcagaaaggttctgcccggggaaggtcaccagcaccaacaccacggtagtgcctgaaatttcaccattgctgtcaagttcctttgggttaagcattaccactcaggcatttgactgaagatgcagctcactaccctattctctctttacgcttagttatcagctttttaaagtgggttattctggagtttttgtttggagagcacacctatcttagtggttccccaccgaagtggactggcccctgggtcagtctggtgggaggacggtgcaacccaaggactgagggactctgaagcctctgggaaatgagaaggcagccaccagcgaatgctaggtctcggactaagcctacctgctctccaagtctcagtggcttcatctgtcaagtgggatctgtcacaccagccatacttatctctctgtgctgtggaagcaacaggaatcaagagctgccctccttgtccacccacctatgtgccaactgttgtaactaggctcagagatgtgcacccatgggctctgacagaaagcagatacctcaccctgctacacatacaggatttgaactcagatctgtctgataggaatgtgaaagcacggactcttactgctaacttttgtgtatcgtaaccagccagatcctcttggttatttgtttaccacttgtattattaatgccattatcctgaattccccttgccaccccaccctccctggcgtgtggctgaggaggcctccatctcatgtatcatctggataggagcctgctggtcacagcctcctctgtctgcccttcaccccagtggccactcagcttcctacccacacctctgccagaagatcccctcaggactgcaacaggcttgtgcaacaataaatgttggcttgga

SEQ ID NO: 116242 - DNA, 1000 bp, Homo Sapiens
ggagattttgaagaggcttatcccctctcatcttcctcccctaaaccccaccccagtttaggagattatcaagctggttgtcattcattctctctctctctctctctctctctctctctctctctctctctctctcgccatacctctctgagtatttagctattgttctatatactggatacatctattatgggaacttaaatagataaaatactactaaacacaaagaaccaagtagcctagtaaataagaattaaatccagaataatcattcacttctcatttttaaatcacgttgtactgatcccaggttttttactttctgagtagttgtcgatcactttgaggacttgtgtatgggcttgtaccaatttactgacactgtcttaaatcctaaatctgtttttatgaggttttgccaagcaagaactcttgattactaagaggcagttagagacaaaccaatttaattccatgtcttcaattgtcacgcatttcttcttttactctttgaaactattctttgagtcaattttatggttctcagaagccaaaatacacaacttttagcacataaacaccaacgatggcctctttttgaggagttatgcatagacccactctagagtaatgatggtccctgtggtatatactttctcctactctagcaaacatgtagtttaatcttaatgtgttgtttccataagtgacatgaagtggatagattctcaattgttatgtccacttattcactaggtaaattttcagttttaatacttttctccttaccccttcctttgatcatttcatgtgaatattctatttgtatgatacactgtatttcaataaattccttgttgatgtacccttaaattgaagaaatttaagctgcaaaaccaaatctcattgtataagacttttttgaagtatcttgtatcgactacatatgtatttgaccctgtgggaggatggtacttttctttttaacttttattttaag

SEQ ID NO: 116243 - DNA, 1000 bp, Homo Sapiens
tgactgcgtcgggtacgtgatgaagaaggctcccgtgcggctgcaggagtgcattgagctcttcaccactgtggagaccctggagaaggaaaacccctggtactgcccttcctgcaagcagcaccagctggcaaccaagaagctggacctgtggatgctgccggagattctcatcatccacctgaaacgcttttcctacaccaagttctcccgagagaagctggacaccctcgtggagtttcctatccgggacctggacttctctgagtttgtcatccagccacagaatgagtcgaatccggagctgtacaaatatgacctcatcgcggtttccaaccattatgggggcatgcgtgatggacactacacaacatttgcctgcaacaaggacagcggccagtggcactactttgatgacaacagcgtctcccctgtcaatgagaatcagatcgagtccaaggcagcctatgtcctcttctaccaacgccaggacgtggcgcgacgcctgctgtccccggccggctcatctggcgccccagcctcccctgcctgcagctccccacccagctctgagttcatggatgttaattgagagccctgggtcctgccacagaaaaaaaaaaaaaaaagccctctctgcaatctcgcttctcgtgtccgccccgcttctcttattcgtgttaggtgcccccgccaggcattgcaggcttagtcgtggctactgttctcctgtgccgctgcatcgctctctcccgggaaagaacaggtcgtgtctcctcctagcagtgcgcgccccgcctgtgtttgcccttccagcagtgaccctcccttctagtctttatttatggtcgtgcccttccctctcctcagcccagagtgttctgcgtgggtggtgatgggggttcacctgaacacagagtgtattttcttattgaggccctgtaccttctgctgtgtgtgtgtatatataaagcaccagtctgctccccaaaaaaaaaaa

SEQ ID NO: 116244 - DNA, 1000 bp, Homo Sapiens
ttcttaagcaagaaacttttttcttgatgagactcacagatctacacaaactacaaaagttaattttcttgttacacccactgcactctgcaaccagtgttgcctgcctcatggcagttggatcagctcctttacaaaaaagaaaaaaaaaaaaccaacagcaacaaaacagagcccatccatgtcagccacaccaatagtttcatgttaattctttgccactggagtcaattttgctatgagcaatgtaaggctggtaacctttaaattatttggttgatgtggaaaattggtgatgtaacactgtttctagatttttttcattgcctttttattctgatattaggttaatcactttgaagctatagttatgctgtaacatttagcatggcttcacaccaagttagtgtagccaatgaggaaaaagttaccataatgacagcagttgtccgagaagtgacagctgtattactcagagcttttacttcttacacctagaatattaaaatataaaacaaggggagaaatgtgacagtctattttcagttgcacatatgttccttatatataatgtttgacagttcaatctctgggtggaataaagaacacttacgtatcagtaatgggaatttttaaagatttaaaacaaatatgcaaaaatttgctatgccaagatgctggagcataatataagactgtatttggtgtgcttgttttgtttctttggtagagtttattaggtgaatcttctaaaactttccttctgttggatcccagtgacgtggaagtcatcagaaccccacggtacttggagtacctctctgcaccaagatagctggctgattttctgctcagtcacaattttacttgaaagcaagaattgtcctagctccttttccattattccaaaacgtttaacgttcaaagcagggtctcattaaaaaagaaactactggttgatataattgagatattacaatttcagcatttgattaaaaat

SEQ ID NO: 116245 - DNA, 1000 bp, Homo Sapiens
gcagaatatatattttacctatcagagacatctatttttctgggctccaacccaacatgccaccatgttgacataagttcctacctgactatgctttctctcctaggagctgtcctggtgggcccaggtccttgtatcatgccacggtcccaactacagggtcctagctgggggcctgggtgggccctgggctctgggccctgctgctctagccccagccaccagcctgtccctgttgtaaggaagccaggtcttctctcttcattcctcttaggagagtgccaaactcagggacccagcactgggctgggttgggagtagggtgtcccagtggggttggggtgagcaggctgctgggatcccatggcctgagcagagcatgtgggaactgttcagtggcctgtgaactgtcttccttgttctagccaggctgttcaagactgctctccatagcaaggttctagggctcttcgccttcagtgttgtggccctagctatgggcctaaattgggctctaggtctctgtccctggcgcttgaggctcagaagagcctctgtccagcccctcagtattaccatgtctccctctcaggggtagcagagacagggttgcttataggaagctggcaccactcagctcttcctgctactccagtttcctcagcctctgcaaggcactcagggtgggggacagcaggatcaagacaacccgttggagcccctgtgttccagaggacctgatgccaaggggtaatgggcccagcagtgcctctggagcccaggccccaacacagccccatggcctctgccagatggctttgaaaaaggtgatccaagcaggcccctttatctgtacatagtgactgagtggggggtgctggcaagtgtggcagctgcctctgggctgagcacagcttgacccctctagcccctgtaaatactggatcaatgaatgaataaaactctcctaagaatctcctgagaaaaaaaaaaaaaaaaa

SEQ ID NO: 116246 - DNA, 1000 bp, Homo Sapiens
actattcaaaaagtaagaaagaaaatttggaaaatgagagaaacaggaaacaaagaatgccgaaaagaatgaaaacagagaaaaaatgtatgtgcttgaaagtaaaatacttacaatagtagcttaactatttcactctttaaataaaaatactaaagaagttcgtatatcctggaataacatgtcatcttcaaaatatttttattttctaatatttttaataataaacattttatagtgttaaagctgtatttttcttaataaataaaggacattacaaatatttctttaaggaagttcaaaaggatgttgtcttgttaacactggaacgaatataaatcttcaaaatacaattaatatatactgttttgtggaaacttagctcatactattctttaatgctcttcaaatttaaactaacccttacattccatgtgatgtgatgtaggcttataagatgctaaaatctataggttttggaagtgaaagattctattttttctttttttgtacataatgggaatttcattccagattatattttatttacatattaatttcacagaatattaatatttcttaacttcttaaagcatgctagcgttttatgtatatgtacacatatattcagacagggtaattttatctgctgcctaacattgtactaaaatattgctttatctgtttttaattacaaaatgctaatgatttcttaaattatagtttaaagacaattggcccaggaagcaaatcccctgcctttagtatgaaccactataagtaaccttacaaatagagttaatccaagacaatattaacaaactgtgctttgtctttaataaaagggataggattaacaaacatattgatggcataacctattcagctatgtccttatttttgcaataatgtaacctcaaatattggattgttgaaccaacaatggctgtgttaaagaagattaaataaaccgaaaaataaaaagcaaaaaaaaaaaaaa

SEQ ID NO: 116247 - DNA, 1000 bp, Homo Sapiens
ggccccccgcagacgccgctacacactgactccagccaggctgcgctgggaccacctcaacctcacctacaggatcctctccttcccgcggaacctgctgagcccgcgggagacgcggcgggccctagctgccgccttccgcatgtggagcgacgtgtcccccttcagcttccgcgaggtggcccccgagcagcccagcgacctccggataggcttctacccgatcaaccacacggactgcctggtctccgcgctgcaccactgcttcgacggccccacgggggagctggcccacgccttcttccccccgcacggcggcatccacttcgacgacagcgagtactgggtcctgggccccacgcgctacagctggaagaaaggcgtgtggctcacggacctggtgcacgtggcggcccacgagatcggccacgcgctgggcctgatgcactcacaacacggccgggcgctcatgcacctgaacgccacgctgcgcggctggaaggcgttgtcccaggacgagctgtgggggctgcaccggctctacggatgcctcgacaggctgttcgtgtgcgcgtcctgggcgcggaggggcttctgcgacgctcgccggcggctcatgaagaggctctgccccagcagctgcgacttctgctacgaattccccttccccacggtggccaccaccccaccgccccccaggaccaaaaccaggctggtgcccgagggcaggaacgtgaccttccgttgcggccagaagatcctccacaagaaagggaaagtgtactggtacaaggaccaggagcccctggagttctcctaccccggctacctggccctgggcgaggcgcacctgagcatcatcgccaacgccgtcaatgagggcacctacacctgcgtggtgcgccgccagcagcgcgtgctgaccacctactcctggcgagtccgtgtgcggggctgagcccggctgataaagcactttctctctgaaaaaaaaaaaaaa

SEQ ID NO: 116248 - DNA, 1000 bp, Homo Sapiens
ctgagagtgaaagaaaggaggaaagtctgccactctaccctgagctggcagtagggcactgagtacccttaggaagaagtcagagcaatggatacaaatgaccttgctcttggatttgctgagcatgatccctattctgatgtcagagattaggtttaaatggaatagagctatccatttgttcttactctctagggagacaatcttccaaaacagttttgggggggtcttctaaagctttcaaattggaagtaactttattcaactagagttgaataaaagaagggcaaaaataatctcacagagcttggaactgctgatagcccttactgagggcaaaagatggctatattgttagctatactcctaccaaagcaagcaaggagataggattatagataatttcacggacatttggaaataacattggtgattatacagacaagaataaactcacttcaagctggtctgttttaataaattttcaacgtaattgtctatttttttccctcccatctgcaacagaatacatttttttcagcctttatctagatgaggtaaagggaatcattcttatggtgctcttggagagtttcaggcctgtgcatgtgtgtacagcaggaggtaatatgctataatgtctgctgtaatatatttgcacagtagatgctatggatcattctgagctcagggtccagactttattcttattcccagaattttgtgttacgtttttacctcctaacatatgacacttcatcttatattaaggaaggtttagaatatctaatacgacttgaattcatttgttactaagccttctcaggcaagctgtatactagttactggtctccactgccatgccttttcaaggttcccatggtccagaatgatgtttgattcttaatttttctgtcccttttataatttgttttaatgattttgctacatttggaattcaataaaaaatgtgaacaataataaaaaaaaaaaaaaaaaa

SEQ ID NO: 116249 - DNA, 1000 bp, Homo Sapiens
acaaccctccagaccacttcctccctgagtcctacacctgtttcttcttgctgaagctgcccaggtattcctgcaagcaggtgctggaggagaagctcaagtacgccatccacttctgcaagtccatagacacagatgactacgctcgcatcgcacttacaggagagccagccgccgacgacagcagcgacgattcagataacgaggatgtcgactcctttgcttcggactctacacaagattatttaacaggacactaagatggggaaacgtcctcgtgagatgagagcctgagccaggcagcagagcgctcgctgctgtgtagactgtaggctgcctggtgtgtctgatgagaagcgtccgtcctcgagccaggcgggaggagggagtggagagactgactggccgtgatgggaatgacagtgagaaggtccgcctgtgcgcgtggaacactgtggacgctcgacttccaagggtcttctcacccgtaatgctgcattacatgtaggactgtgtttactaaagtgtgtaaatgtttatataaataccaaattgcagcatccccaaaatgaataaagcctttttacttgtgggtgcaatcgattttttttctttctcctttctttcaagtgtcgtgagtcgtcttgattgtatattggaaataactgtgtaacaaatcgtattataaatatttcaattaattttactctgaatttgtttattaaaagacttttgaacatgaaatgattagtattacttgaatgcatccagaggatatttaaaccaaaatgaaaaaccagaaggccatttggtgtcccccctcccaggtgtccccttgtagcatatgcattatgtcatctgaattgaggcctttctgtgaacagcatcataacttctatcatggaaagtgtactatatataatgtttgtgtcatgtatatgcctaaattttaattatctataaataaaacatctgacataaaaaaaaaaaaaaaaaaaaa

SEQ ID NO: 116250 - DNA, 1000 bp, Homo Sapiens
gcccgtctgggcagaaaccatgtggaagagctgctgcgctgcctcggggcacacatccacactcccaaccgccggcagctcgcccaggagctgcgggcgctgcaaggacggctgagggcccagggccttgggcctgcgcttctgcacagaccgctgtttgccttcccggatgcggtgaagcagatcctccgcaagcgccagatccgtccacactggatgttcgttctggactcactgctcagccgtgctgtgcgggcagccctgggtgtgctaggaccggaggtggagaaggaggcggtctcaccgaggtcagaggagctgagtaatgaaggggactcccagcagagcccaggccagcagagcccgcttccggtggagcccgagcagggccccgctcctctgatggtgcagctgagcctcttgagggcagagactgatcggctgcgcgaaatcctggcggggaaggaacgggagtaccaggccctggtgcagcgggctctacagcggctgaatgaggaagcccggacctatgtcctggccccagagcctccaactgctctttcaacggaccagggcctggtgcagtggctacaggaactgaatgtggattcaggcaccatccaaatgctgttgaaccatagcttcaccctccacactctgctcacctatgccactcgagatgacctcatctacacccgcatcaggggagggatggtatgccgcatctggagggccatcttggcacagcgagcaggatccacaccagtcacctctggaccctgagagctgaatgagggcatcataggccagacaggcccaaggatggatgaatggagaggacaaaggcagcttctgacacaccagccccaggacctggggcgactggaggaagccaggcgagtggggcccaggactggttccagtgagagaaaccaaccacaggcacccaagcactaccagacaaagcgtattaaacagaacacttttgaacctttaaaaa

SEQ ID NO: 116251 - DNA, 1000 bp, Homo Sapiens
tggcggagcaaaaagggaaccaagttccaccagtccattggcaaacactactcttctggctatggacagggagacgtcctgggattttatattaatcttcctgaagacacagagacagccaagtcattgccagacacatacaaagataaggctttgataaaattcaagagttatttgtattttgaggaaaaagactttgtggataaagcagagaagagcctgaagcagactccccatagtgagataatattttataaaaatggtgtcaatcaaggtgtggcttacaaagatatttttgagggggtttacttcccagccatctcactgtacaagagctgcacggtttccattaactttggaccatgcttcaagtatcctccgaaggatctcacttaccgccctatgagtgacatgggctggggcgccgtggtagagcacaccctggctgacgtcttgtatcacgtggagacagaagtggatgggaggcgcagtcccccatgggaaccctgaccaggtccctcttttctgtcaaggactttctgggaataatactgggggttttgtttttgtttttgaactgtctcaaatgttctcccaaagatgctaaaaacacagcctctccttttagcaagttaaaaggctgggtaggactgcgggagactgcctgcctttcaccattttctccccacttccagtgactgctcttattttgtgtaccataagccaacaaccgctgactccaggattgcataagccccctgtgaaatcggtgctgtactgcataccctgccagctgtgacttgttatcctactatattttctaaggagtgaataatattgtccgagtaactaacttatttaaaagacatttccttctgtgggcattgactgtatcccacctgttttccaaggaaatggtaacctgtttctgagaacacctgaaatcaatggctatacattccaaaccaatctaaacgctaaaaaaaaaaaaaaaaaaaaa

SEQ ID NO: 116252 - DNA, 1000 bp, Homo Sapiens
aaaaggggcatcaactccagctggattattttggagcctgcaaatctattcctacttgtacggactttgaagtgattcagtttcctctacggatgagagactggctcaagaatatcctcatgcagctttatgaagccaactctgaacatgctggttatctaaatgagaagcagagaaataaagtcaagaaaatttacctggatgaaaagaggcttttggctggggaccatcccattgatcttctcttaagggactttaagaaaaactaccacatgtatgtgtatcctgtgcactggcagtttagtgaacttgaccaacaccctatggatagagtcttgacacattctgaacttgctcctctgcgagcatctctggtgcccatggaacactgcataacccgtttctttgaggagtgtgaccccaacaaggataagcacatcaccctgaaggagtggggccactgctttggaattaaagaagaggacatagatgaaaatctcttgttttgaacgaagattttaaagaactcaactttccagcatcctcctctgttctaaccacttcagaaatatatgcagctgtgatacttgtagatttatatttagcaaaatgttagcatgtatgacaagacaatgagagtaattgcttgacaacaacctatgcaccaggtatttaacattaactttggaaacaaaaatgtacaattaagtaaagtcaacatatgcaaaatactgtacattgtgaacagaagtttaattcatagtaatttcactctctgcattgacttatgagataattaatgattaaactattaatgataaaaataatgcatttgtattgttcataatatcatgtgcacttcaagaaaatggaatgctactcttttgtggtttacgtgtattattttcaatatcttaataccctaataaagagtccataaaaatccaaaaaaaaaaaaaaaaaaaaaaaaaaaaaaaaaaaaaaaaaaaaaaaaaaaaaa

SEQ ID NO: 116253 - DNA, 1000 bp, Homo Sapiens
tctgtgagtgaaaatccagtttcaggaaccagagaattgggttgtcatgtctgtttaatgaagggaataggttttgtaatctatcattttagaaattatgtaactggctaatatggtttaattaaccttagtaacatctcgtgaccactgactgctgaaagttctgaaaagaatttttgttttgttacactgcacatttaagggagagtccctcccctatcttatgagttaaaaaagacttcactaggtgacctaaattaaacttagtggggaaaagtggccatgtttggacataaataaatggtattcacactgtatggttttaatatattagtacattctagaatgtaaaaggattaaactttacaatttagatcaatattttgaatatgtgaaaggattaatttaaactttacaatttacatcaatattttgaatatctgattttttttaatgggagaattattacatttcgctgaaatgaggacgagggcaagaaagcaacattgctgatctctctagtatgaaagatttggagggagtgttgcaatatatataaatgaaaacatttaattgtgttcatcatatttaaaaatatagaatatattagagaactgtgatttaaaagtactgttaatgtaaaaaataaagcaagtgtaattaattctttcagaatataaaatttgggcattctctgctgagcagttcccaaattaagtacaaggaatgtttattcattttctgcaatatactatatgtaatagggaataccttgctaaaataaaacttaggatatagtggtaatggctttcacatttttataacataacataactcacttcacaaccttcttggagctgtccactcttagaaactctgttgcctaatattgaggatgtggctttaatttcttccgtttgacagtgtatgtctataaaaacaataaacattttttaaaaaatgacaaaaaaaaaaaaaaaaaaaaaaaaaaaaaaaaaaa

SEQ ID NO: 116254 - DNA, 1000 bp, Homo Sapiens
attgagttacaggggattttattaattataaaatgcaatcaatttaaattacgtaggtttaagactagtcccttggataagccccaagcgaatttgtcttcagattattaaaattagtgctgtaaatcagggtgggcaattcacagcctttctgaactgactgaactagagcttgcagtgaagtgttctgctgagactgagcaccttacagatatttttctccagaagatggtgctgggtaataaaatcatcacaattagggaatggttagtggtctctactgtggcaaatgccaactgttggaattcactttattgtagaaaaacccaaactgagactcttaagttttgtttagcaatgtgtttctggtatgaaacaaactactgtgtcactgtccaggtaggaaacaattctttcaactgggttttcagcataaatgggaactgatgtagaaggcaggatttagcccttctaggcaaaagaaaagctcagttgggtttcacgagtgttcctgtgcttatattcagtctgtgcctacatgttctcatgcatgtctaacctgatttacctcttacctgtaacctaccttatcatgtggcttttaattgacagtcactcagccatttctaagcagatatagtagtacctttcagaactcacattggcaagtgtaaaaagatgacttaaggtgaagtgaggacaaaatcacattctgcatactaacctatttttttctccctttaaggtgctaaacttgcacctcatgtccactcagtaacaagtattgggacgtagagcacagcctcactcagctctgaaaggtaatacagcttgtgaggaagtgagccagcagtggcctttgcaattgtggatcttgagctctgctctcagcagatttcaggtgtaaccatttgttaactgtactgaaggtgtgtcctcaagaagaaagtgttcaaattaaaaaagctgctgccaagtacaaaaaaaaaaaaaaaaaaaa

SEQ ID NO: 116255 - DNA, 1000 bp, Homo Sapiens
ttaatggtggacacatatattaaactctatacaagtaagtcagagcttcctacagataattccgaaactgtggaaaatacctaagagacttttaaaaataggctttcttatatttgatatttggaagaaaaagccgtaaggtgtatgtagaccacttaatcactaaatatctttgcctataggactccattgaatacattagccattgataatctacctgtttaaatggcccctgtttgaactctcaagctttgaagacctacctgttcttccagaagagaacgttgaaagtgccatgtttccttttgcgtgatctctgttgatggcactctggaattgtttcagttaagtcattttagacatagcatttattatcactgtggatctctacttgttgggtgttatgaattctttgaagaaatatattttgaagaggtgtgggaggaaggaatacattttataaaatgttgtagtgaagcccacaattgacctttgactaataggagttttaagtatgttaaaaatctatactggacagttacaagaaattaccggagaaaagcttgtgagctcaccaaacaaggatttcagtgtagattttgtctttcttgaacttaaagaaacaaatgacaaagtttgaatggaaaagcctgctgttgttccacatctcgttgctgtttacattcctttgtggagcctgcatcttcctaagctttttagcaggtatatgttgaacacttctgtttcatggttgagacagaatcagaggccatggatactgacaactgatttgtctgttttttttctctgtctttttccatgactcttatatactgcctcatcttgatttataagcaaaacctggaaaacctacaaaataagtgttgtggtttatctagaaaaatatggaaaatattgctgttatttttggtgaagaaaatcaattttgtatagtttatttcaatctaaataaaatgtgaattttgttaaaaaaaaaaaa

SEQ ID NO: 116256 - DNA, 1000 bp, Homo Sapiens
ctcacctccgccatgacccgcgaggtggccaccgatcacaaagccttctacgtcctttttacctgggaccaggaggcccagatatacgagctggtggcacagactgtgtcggagcggaaaaactggtgtgctctcatcactgagactgccggatccctgaaagtccctgcccctgcctctcgccctaagccccggcccagcccgagcagcacccgagaacccctcctcagcagctctgagaacggcaatggtggccgagagacgtctccagctgatgcccggaccgagagaatcctcagtgacctcctgcccttctgcagaccaggccccgagggccagctcgctgccacggcccttcggaaagtgctgtccctgaagcagcttctgtttccggcggaggaagacaatggggcggggcctcctcgagatggggatggggtcccagggggcggccccctgagcccagcacggacccaggaaatccaggagaacctgctcagcttggaggagaccatgaagcagctggaggagttggaggaggaattttgccgcctgagacccctcctgtctcagcttggggggaactctgtcccccagcctggctgcacttgaggttcccgcccaggaaggccttttgcaagaaggagaggaatgggggagaggacgtgagggaccacccccacccacacagctgccgcagcatctcacaccccgagggcctgaggagagggagctgtgggccacgcctgggaggggcccagctggggttactggccccgcatgagcctcggccatctctccctcctgccctctgcttgggggactcagggctccattctggagggcaccacggtgacccgggccatctcagtattgcctgtgggggccacccctccacccccacccccaagtgccttcgctctgtttttataccctgaattggaggtttattttttaatatatattatctaagaagaaaaaaaaaaaaaaaaaaaaaaaa

SEQ ID NO: 116257 - DNA, 1000 bp, Homo Sapiens
atggggaaactcgctccttctgttggcagaggacagcccctggggaaccccaggcccaactctgtccggtatcccttttcctcccagctgccctcccctacttctcccttgctcccaaagctttccttggagaagggccctcctgcagctggaccctgcagggtggctccctcctccccatcaagcacaagagagggcccaggaaaaaaggtttcacataagtgtagagtcgcaaggacgcttagagtcggcagagtctggggtagggagacagcgacttgtccaaggtcaagcacagagggagaggttcaggagtcaggtcttctgccttctgagttggctcatcctgggcagtcacagactgtcctgcctgcacggctcctatccacctgggggtgtcgcagttgaggggctaattcccaggggactgacgttagttccctactccatccttccctggtgattcttgatcttcaaagcctcggggatcccaggtttccccatgtaactgagacaccctgcctgttagccctgggagacccctaaccttggcccaagacccctttgattctctaaggagcacgaaagggggaatgcccctcccaggagtttatgggagaagggactgggccggctgcctcccagcgatgcacttgacctgacactccccatgtcctggtgcgcacagcccttgtcggtgccccggcccctcccgcagcgttactgcctgtgtatagtataaatatatatattttctatatataagatgtataatataaggctccacaaatatatctgtgtgtgtgtgtgcgtgtgtgtgcggtgaagggcggtccccatcctgggcccccactctagacccccccaccacctggttaagtctcgagtgaatccagtggccccgtggcaccctcctttatgacatccatccatctgtggtgaaccaagtgaaggtggtgacttctggtgacatagtaataaagtgaagactcagaaccca

SEQ ID NO: 116258 - DNA, 1000 bp, Homo Sapiens
gcccctaccccagcatgcccagcactgcggctgatcccagcatggtgagtgcctacatgtacccagcaggggccactggggcgcaggcggccccccaggcccaggccggacccaccgccagccccgcttactcatcctaccagcctactcccacagcgggctaccagaacgtggcctcccaggccccacagagcctcccggccatctctcagcctccgcagtccagcaccatgggctacatggggagccagtcagtctccatgggctaccagccttacaacatgcagaatctcatgaccaccctcccaagccaggatgcgtctctgccaccccagcagccctacatcgcggggcagcagcccatgtaccagcagatggcaccctctggcggtcccccccagcagcagccccccgtggcccagcaaccgcaggcacaggggccgccggcacagggcagcgaggcccagctcatttcattcgactgacccaggccatgctcacgtccggagtaacactacatacagttcacctgaaacgcctcgtctctaactgccgtcgtcctgcctccctgtcctctactgccggtagtgtcccttctctgcgagtgagggggggccttcaccccaagcccacctcccttgtcctcagcctactgcagtccctgagttagtctctgctttctttccccagggctgggccatggggagggaaggactttctcccaggggaagcccccagccctgtgggtcatggtctgtgagaggtggcaggaatggggaccctcaccccccaagcagcctgtgccctctggccgcactgtgagctggctgtggtgtctgggtgtggcctggggctccctctgcaggggcctctctcggcagccacagccaagggtggaggcttcaggtctccagcttctctgcttctcagctgccatctccagtgccccagaatggtacagcgataataaaatgtatttcagaaaaaaaaaaaaaaaaaa

SEQ ID NO: 116259 - DNA, 1000 bp, Homo Sapiens
aaaagctgcaaaaacagccttgaatagtttcatgcattccaaagaagcaacagcaagagaaaaagacttattccgcagcgtaaaggacacagatttatcaagaaacattcctggcaaagtgaaagtgtctgcacccaatcttctgaacgtaaaaaggaaatagctgaaatgaaattctaaaatatttgagaagagccaattttatagccttttggaagttcaaagatgaaagcaccatgtatcaggatttccgcattataaaaatgaactaaacattgccttgctatattcaccaaaaggacttacttcttgttttttcccagttttatatagaggaaacactgtctatgataggatttccaaaagtatttgtggacagttaaatgctaattaatatacatctgtagttattctacattttcttgaaatttgggaggttaataccaagtattcatttcatgatgtaaagaaactgaacagtgaagtggcttgattgcttaaactattgacttggtaagtctactgtatataacatctaatatatatattacaggccaaatgaactaaacattgccttgctatattcaccaaaaggacttaattcttgtttttttcccagttttatatagaggaaacactatgataggatttcctaaagtatttgtggacagttaaatgctaattatatacatctgtagttattctacattttcttgaaatttgagaggttaataccaagtattcatttcatgatgtaaagaaactgaacagtgaagtggcttgattgcttaaactattgacttggtaagtctactgtatataacatctaatatatatatattataggccagctacaaggggtttaaatatttaggattgtgtcttgaaaactaagtattggagtggattttcttctgctttcattgatacttgtcagaaaaaaatattagaccaaaatgtaaaatataagtaataattctcatgaaaaaaaaaaaaaaaa

SEQ ID NO: 116260 - DNA, 1000 bp, Homo Sapiens
gcaaattgtccttgccagctcttgggatccttggatacctggggccatttaagaagctaggggaattaggccacaacaccccctgggacatccgaaagctacaccacagatgccagtggttcatgccttcttcccgcaactttaggaaaatttatttatttattgtttattagttatggggggagaggggagatttaaaggaccagggacatgggaaccaagccatagggatcagagggccttgtccttgaacactactggggtatattcaggctcatccacgcagctgctgggttcttgccctaacggccctcccctgcaacatccgtcttggaggagaggctgcagccacagcaccctactgccctttaaataaaggagggctgtgggcagggccatgtccctttctcctctcccctcaacctcttactgctgttctccctttctccgtccttcatggaagccctgggagataacctggcttcctggagttgatggaataaaggttggggtggccataatggtttgttgggggtgagggaaaaaacccacagggaccagaatgttttgttgttcttttgttttcttttttgtaccaaagtcaactgcacgtgttttatatttttaagagatcgtaggcaattagagatcgaagcctcctatctccacatctctgaagaagttgaggggtgggggagagaatgacttctgccttcatctgcagtaacggggggacctatactgacctcttccccagccatttagaaacaagttctagggtgggttggaaaatctccaagagccctgacctcatcttccacctcagcaaccatgacctgaaacctcagcgtgaatttgggggatttttcagtggaacccttgcccccaaatgtcgaccagcccccaaatgtcgaagaattttcttcttgccaattttgttgtttaaaaaaaaaattcagggaaaattaaaaacctggaactccaaaaaaaaaaaaaaaaa

SEQ ID NO: 116261 - DNA, 1000 bp, Homo Sapiens
ttttaaggaatttcacatgtataaggtggctccatagctttatttgtaagtaggctggataaatggtgcttaaatggtaatgtactccacttcttcctattggaagattaacattatttaccaagaaggacttaagggagtagggggcgcagattagcattgctcaagagtatgtaaaaaaaaaaaaaaaaaaaaagaaccaaaccactggaaataatcaaatgcaaaaaggtaacaaattcataactggaaagcaaagagaagaacaagtatgatttggatgataaagcattgttttaatggtgaaaacttcacagatcactaatgtttctagaggttaacttcaagtgggcaagctggggtttttaggtagtcagtggcctagttcctaaagccacagtataggatctgttaaactgaatgtctgttgaaagtttgttttagctgcttggaggcttccttttaagacaaactgtatgtgattaagttgttttgagggaactgaagaacctgatgtagcccctggccagataactgcctgatttctcagatattatttctctgggaaacattctacatagcacaggagcttaagagtggcattatcttctcgccttaatttccagagattatttctgtactgagaatcctggaactactatgctaggaaatttaaagctgcatggtctgtcttgttttcatttaattattgtgaatacctagaatctttcttggtcctgatttctcttgcttaatccagtctttatctctaactgccccttatttgatcaccatgtactaggagctctgatagccagctcagctcctaatccttgaggcaacattctttttctatttgaacttcagttctgtccttgaatcccgactagatatttcttgccctctggtctcagaattctcttggcttttattccttgatccacttgccagttttatcactttacccttgttcctcatggcttcccatcaagccatgggt

SEQ ID NO: 116262 - DNA, 1000 bp, Homo Sapiens
gagactccgtctcaaaacaaaacaaaagtgggtggctcacgggtccggaggttatgtcttcggtgtctcagccctaaaagtccagttcccccgtgcggccagcttttccacataaggtgtttttgatttgattaccggaaaggactcttgattcttctcttttaaactgaataccataggggaaatgaattttaaaatattgcccccggaggggttttccgtggctggattcctgcgagttgctttcagtcattcagggaaacagaaagacgttttccaacatgtagaactgctttttaactggaggaaaaatacttcaggaggcttagcatattgcttggattctacgtgcagcgggttctctgcctccgtgaagacaagctgggctggggagaacggtgtctaggagggatgaccccactcagctccaggcagtgttctgccgagaccccaagaactcggggtgtcagagggcaaaggaactacctgcctttcacggctgctgacttctcagggctgcaagcagcacagaatgttatccttacgtcctgagccggtttaagtctgtggaaaaggaagcacgggagaaatccacgtaacctttgctttctttttaagggaagcggttccgccgtgaacttggaaccctcagctccgggtgttctcggcagaagggcagctggaagggacacagtggggcaggctttggggttgctccctgttctgccccgaggccggggacgcagggcagcccacgcctccgtgggctccattctgtagcattgccagcgttctcttcacgtctctaacaatccttcgcttttcctcactcacgtggaaatgtgaactgtcccggctctgtcttcatttttatttttaagccatcgttcccctcctgaacggttgccccttatttaatgctgtaaagttggactgttgttcaataaaccagagcaatgcattagctcctcattcatttgtcaaaaaaaaaaaaaaaaaa

SEQ ID NO: 116263 - DNA, 1000 bp, Homo Sapiens
tgatgcttcacagctgggctgtaagtcagacttgaacccagctgatatgcaaggtcatggcgtgccagggtggtgacagttgaacaaagtgtatagtacgtgcccagtggtagcgatggaaaaaagtataccaaatggactttgaaggaccaaaggttttaaaagtcaattggtatcacctccacactgactagggtagtggggtgcatttggttttcaaattgggtacttttaacactttagtgcctgactgctgttctttactgacttgattcagtcactcgtagctttattggtctgaaccagctccttgttcccaggttacagacctgcctatcgttccaataatcctgtttcacttgaatgaagggagtatgtcttaaatgtaaagtttctggttctcacactgtactctgaggtccaaatactgtctgtcaatgtgtaacctgatgtctcaaccccctgtgagaagagtccattatttggtgttcaccaacgtgggagacttcaccggaacaggcttttttgctttgggctctgctatttgtttgcagaacacccaagagcgagcaaacacgctctcttcacagcagtaccttagggttttgccattgtaaatgggtctgatgtgatatgacaagaccagagaaattggatgtaaatttacatttttgaatatgcttgttgtttcacatgatacatttagggtatgcagctccttttgtagtttttatttttactatttaagtttggaaatgatgccaaatttttgtatttctttaatcaatgtgttctcttcggtgatatatattgcattatatattgatgtgtgtatcaatatatattgatatgtattacacttacacatacaaacacatataagagggggtgaaaaccgtagcctttgcattctctatagcctctgcagagagatactaagcagcaaaatcttggtgttgtgatgtacagaaatggagaagagtattaaaccatatttaag

SEQ ID NO: 116264 - DNA, 1000 bp, Homo Sapiens
tgctctactgctttaagttatagactgttacttgtagatttccatgtaatcattgaggttatcacccagattagaaagacatatttgttatcagtgtacgttctaattgagagcattccagtagtatcaaacaataatgtctactgtttatagtccacttaataaaaatagaggcatttactatttgccttaggctgataggaatgtgggttttcttgaccaaatatatcagcatctaattgaaatgaccaaatagcattcttagacttctgtattatgaatataattgatatttaaattaatgtcttgttcacatatgtgtactttcatatttgattttaaaatgtacattataacctgtatggtattttatttaaaggagataaacagccaaatagcaaataggtcactgaatgataagatttgcaccttagaacaataatcattttaaggataacaagtaaatgtctgaaagcatgaggggctttatttgcctttacctcatatgagtctttgatcttgaaccgatacttttggatctcattgttgatatacctgaatttactttgtaagagattttaacttcacttcatgctgatgatgtatcaaattcattttatagaaagatttaaagtttttttctggaagtgatatatgtcaaattacatttcctactgcagtatttgagcagggacagtcattttttaaatgtttttggccgggcgtggtggctcatgcctgtaatctcagtacattgggaggccaaggcaggtggatcacctgaggtcaagagttcgaggccagcctggccaacatggtgaaaccctgtctctactaaaaatacaaaaaattggccgggcgtgatggtgggcgcctgtaatcccagccactccagaggctgaggcaggagaatcgcttgaacctgcgaggcagagattgcagtgagccaagatcaagccattgtactccagcctggacaacaagagcgaaactctgtcta

SEQ ID NO: 116265 - DNA, 1000 bp, Homo Sapiens
gttcatcagaaggaaggcagtccttagaagtcacatacgttgagccacgttgctcctaagcctggctctgtcaagctgggtcaggggccttgaaactggagaagtggaagtctatggttggtctgagtaagtaacttcctgtcttcatgaaaaaagttgactttgaatcccaggtactcacagaaatggtgaacagacttagttgttacccaggcacccatggattgtgttgagtgtgcagacagggaggccaccccaataggaattcgtctccaggatttttcccatgtgtcccccagtacttataaaagggagtgaaaagaccgagctgtaaggcatgtgccttctgccacctgactttccgtgaggggactaaaatttactaattgtagttgctgcagccagttaagtcctgtagcttccaggccctcatgtctttgataggagagtgcttaggtggtccccaacagtgcctaggggtacagtacagtcccattacactagagcagggctctatttatttttaaaggatatggccgtgtgttttgataaaactttattcacaaaaacagccgggtcatgggatttggcttgtgagtctgtaacagttcttaaaaagaatatctgagaaactactctgttttagacctttgaaggtgatttagagttttgtgtacatctaggagaaggtgttcagcttctcagaggatgtggacattttggttgcagctaaaaatcagtctctgaagtctctctcccttctagaggttaggacttggtgaacatgtttgtgggccttttgactgagtggcagaaggaaactgctcaggaagagaaacaggtgactgatgggaaggttgattattttctcagtcatcctggcagccaaaaatgtgccaggaaaagaaagaatgtggagcacgcgtggctcctggaggacttggagatgcatgcacatttagggtgttttccctagaattacataaaaaaaaaaaaaaaa

SEQ ID NO: 116266 - DNA, 1000 bp, Homo Sapiens
ggcctatgagactatggcaggggcaggggttcctttctctgccaatggaaggcctctggcttcagggattcgttcaagctcacagccagcagccaagcgtcagaaactaaacccagctgatgcccccaatcctgtggtgtttgtggccacaaaggataccagggccctacggaaggctctgacccatctggaaatgcggcgagctgctcgccgacccaacttgcccctgaaggtgaagccaacgctgattgcagtgcggccccctgtccctctacctgcaccctcacatcctgccagcaccaatgagcctattgtcctggaggactgagcacctgtggggaagggaggtgggctgagaggtagagggtggatgcccagggcacccaaacctcccttccctttcgtgtcgaagggagtgaggagtgaattaaggaagagagcaagtgagtgtgtgtccctggaggggttgggcgccctctggtgttaccacctcgagacttgtctcatgcctccatgcttgccgatggaggacagactgcaggaacttggcccatgtgggaacctagcctgttttggggggtaggacccacagatgtcttggacagttttggggggagggttttttaattttttaaaagttttgcctccctttgtgaaaggggatggggaggggaagagtaaacagataacaggtggtggtacctggttgggggaggggggcgtgcactgccatgtctttttttttttttttttttttttttttcctaattgggggtttctctttctgtccggtgtccggactttcctaattggagtttgaggcccctaagctggcatcaaccccaggccacgctcgctctttccttccctcccctccccctctgccttttgtacgccagttctcagaaataaagatcttttgtccgtttttttaacctcggattctgtaattggttcttatagtaacaaataaaaagctgttttcttcagcttctcctgg

SEQ ID NO: 116267 - DNA, 1000 bp, Homo Sapiens
tggctctctttacgccctatgagatctgggtggaggccaccaaccgcctgggctctgcccgctccgatgtactcacgctggatatcctggatgtggtgaccacggaccccccgcccgacgtgcacgtgagccgcgtcgggggcctggaggaccagctgagcgtgcgctgggtgtcgccacccgccctcaaggatttcctctttcaagccaaataccagatccgctaccgagtggaggacagtgtggactggaaggtggtggacgatgtgagcaaccagacctcctgccgcctggccggcctgaaacccggcaccgtgtacttcgtgcaagtgcgctgcaacccctttggcatctatggctccaagaaagccgggatctggagtgagtggagccaccccacagccgcctccactccccgcagtgagcgcccgggcccgggcggcggggcgtgcgaaccgcggggcggagagccgagctcggggccggtgcggcgcgagctcaagcagttcctgggctggctcaagaagcacgcgtactgctccaacctcagcttccgcctctacgaccagtggcgagcctggatgcagaagtcgcacaagacccgcaaccaggacgaggggatcctgccctcgggcagacggggcacggcgagaggtcctgccagataagctgtaggggctcaggccaccctccctgccacgtggagacgcagaggccgaacccaaactggggccacctctgtaccctcacttcagggcacctgagccaccctcagcaggagctggggtggcccctgagctccaacggccataacagctctgactcccacgtgaggccacctttgggtgcaccccagtgggtgtgtgtgtgtgtgtgagggttggttgagttgcctagaacccctgccagggctgggggtgagaaggggagtcattactccccattacctagggcccctccaaaagagtccttttaaataaatgagctatttaggtgcaaa

SEQ ID NO: 116268 - DNA, 1000 bp, Homo Sapiens
tggtgaacaatgccgccgtggtccatgggaagagcctaatggacagtgatgatgatgccctcctcaagtcccaacacatcaacaccctgggccagttctggaccaccaaggccttcctgccacgtatgctggagctgcagaatggccacatcgtgtgcctcaactccgtgctggcactgtctgccatccccggtgccatcgactactgcacatccaaagcgtcagccttcgccttcatggagagcctgaccctggggctgctggactgtccgggagtcagcgccaccacagtgctgcccttccacaccagcaccgagatgttccagggcatgagagtcaggtttcccaacctctttcccccactgaagccggagacggtggcccggaggacagtggaagctgtgcagctcaaccaggccctcctcctcctcccatggacaatgcatgccctcgttatcttgaaaagcatacttccacaggctgcactcgaggagatccacaaattctcaggaacctacacctgcatgaacactttcaaagggcggacatagagacaggatgaagacatgcttgaggagccacggagtttgggggccacagcacctgggcacacacccgagcacctgtccattggcatgcttctgctgggtgagcaggacagctcctgtccccagcgaagaatccggctgcccctgggccagtcccaggacctttgcacaggactgatgggtataactgacccccacagggaggcaggaaaacagccagaagccaccttgacacttttgaacatttccagttctgtagagtttattgtcaattgcttctcaagtctaaccagcctcagcagtgtgcatagaccatttccaggagggtctgtccccagatgctctgcctcccgttccaaaacccactcatcctcagcttgcacaaactggttgaacggcaggaatgaaaaataaagagagatggcttttgtgaaaaaaaaaaaaaaaaaaaa

SEQ ID NO: 116269 - DNA, 1000 bp, Homo Sapiens
tgtttttgctgagcagggaaggctcagaatgggcccagagcccccgttcttttgcgttaacactgtggcattcagagggaatcaaagagccttggtgaaggtcagagctaaatggctccttaaggatgaactttttagagaagcaccttcctcctacaggaggggaaactgagcccacagtgagtatgtaacttgaccaaggtcactgagccaggactggacccaggaccctcgcgtcctggtccacccacctcgtctactagtgtcccacagtgctgcgctagtcccttttgccacccttcccagtcccaggacgggccctggagggagaaaggagcctgtgccccctgatggctctggctgtcctgatcctgtcttccctcccctgaaggaaagtttgcactggattttattggagccccatctccccagcgggcaggcgggcggagcctgtatatatgtatatactcagtgcctcagttcagcttcctccacctcgcttccactgcacaggcccaggaaggagaaaggccaagccaaagtgggccccaccctgcccccgtcgtgctccatccttccctgccggggcctgctggcccctgtaaggtcccgcccccaaagaccctggggccagcggggccgaaagcggagttgggtttgcttattttgctcattggattcaagttcttttgcatagtttttttctaacccctgttggagtccaggggctggagaaaaggacagatttatgcagctattttcatacattccctgttcagagtggggtaggggttttccgccgttacccgatccaatccatcccccaccctttgaggggtgagtgtgtctttgcatgtttcctttgctgtggtgggagatagtttgactgaacccccaccttgaccttggtctccaggggtgtggaatggtgggggaatttgtttaaaaagacattttattataataaagtctattttcacaaaaaaaaaaaaaaaaaaaa

SEQ ID NO: 116270 - DNA, 1000 bp, Homo Sapiens
tttttctgcctcaaaaccagccctaactggactactctggatgcattttgtggtgggccccctagagggaagatgggcctttatctgctccgtggggtgcactggagtgaggggggtggccgggctgcctctcgcatctctgtcttcccctgcaggcgctgtgtgagctggccctgcccctcctcattacagtatgaagggagccgtgacacgcagcattttcctgccgttctctcagggactctcagggcagctcctgccactccgccagggccagcatgccagtccaggcagagcaggtggctggctgtctggccgtctcgccccgcccctccacaggaccctggaccagggcggtgcagggcgcagccccgaggaggcaggtggaggagctgcgggttttcacagggccgcgtcgccacggctcctctgatcctttagggttggcgagcatctctggaaatagcttttgcagaggagtggtgggaggaatagagggggacagtctgtcacctccctccccgccactttgtgtagatcctacctggagggaatggctttaggcacttttgtgccagagcttgtgagggtgacagaagagggtccaggctggaaacctgaactttctgggtgggagaaccaggtggtgcctgccgaggtctgggcgtgtttgggccggtgctggagcctgtccagctggcccgggccctggcctggttctcaagtgtttcctagacagagaggcacctgggtcagtattagtctatttatcagaggtgtaaataatctatgtatagtttttctccttttagattattttgtatttgtttaaaagaagttttgtcaaaatacaaaaatataaagaaatgactgaaagttgttgacagggtttttaagaaataattattctaattgtttttgtttgtttgtttttgccttgtaaactagcgccaaggaactgcagcaaataaactccaactctgcccaagcaaaaaaaaaa

SEQ ID NO: 116271 - DNA, 1000 bp, Homo Sapiens
tagacctgataaattatatagacgttgcccagcaagatggaaagttgccttttgttcctccggaggaagaatttattatgggagtttccaagtatggcataaaagtatcaacatcagatcaatatgatgttttgcacaggcatgctctctacttaataatccggatggtgtgttacgatgacggtctgggggcgggaaaaagcttactggctctgaagaccacagatgcaagcaatgaggaatacagcctgtgggtttatcagtgcaacagcctggaacaagcacaagccatttgcaaggttttatccaccgcttttgactctgtattaacatctgagaaaccctgaatcctgcaatcaagtagaagtcaacttcatctgaaagttcagctgttttcaaactgcaatgctgaaatgttatgcaaataatgaagttatcccttgctctagattttctgaagaaaatggattgtgtaaaatgctgatcatttgtttattaaaatgtgtcctattacacagtgagttaactctcaatgaagtcatctattttctgggctaaaaaacttcatttgtctttttcaacttctaataagcttaacctaagtgtcacgaagacgagatgtcacagaggtccactcagtgacaaacacacactgaaggcctgagggaagactgaggacatgggctcagtggtggcttcccagtcatggtatcactggcatggacctctgtccggcagaggtgtggactggagaccaggattcatgctggtctggaacaatgacattgccaacttaagacacacaaagcagattttcagaagtgtctggtcaagataacatgctggccaaccacaattcctagagttaagagaaccttaaaagattaccgctcatgctaaaagtatgtaaagatcccatgtacagtatgatagtgtactttttttaaaggactgtcaatatacaaaactttaaagattaaaaacattaaaaataaaaaaa

SEQ ID NO: 116272 - DNA, 1000 bp, Homo Sapiens
aacagaagtggaaacaacttgctgaacttgccattagtaaatgtcagtttggcctagcccaggagtgcctgcatcatgcacaggattatgggggcctgctgcttttggccactgcctctggaaatgctaatatggtgaacaagctagcagagggtgcggagagagatggcaaaaataatgtggcattcatgagctactttttacagggcaaggttgatgcctgcctagagctcttaattagaactggacggctgccagaagctgccttcttggcccgaacttacttacccagtcaggtttcaagggtagtgaaactctggagagagaatctctcaaaagtcaatcagaaagcagcagaatcccttgctgacccaacagagtatgaaaacctgttccctggattaaaagaagcctttgttgttgaagaatgggtgaaggaaacacatgctgatctgtggccagccaaacaatacccacttgtcacgccaaatgaagagagaaatgtcatggaagagggaaaagactttcagccctcaagatctacagctcaacaggaacttgatgggaaacctgcttctcctactccggttattgtggcctcccacacagccaacaaagaagaaaagagtttactcgaactagaagtagatttggataatttggaattagaagatattgacacaacagatatcaatctggatgaagatattttggatgattgactgtaatgctttccatttacctgactaaacagatcattattatatataggtattgattgctaccctgaccacagtgctttggactatgagaaacttcttagatttttatatgtaaatgctgtggaccactgggagcacaatgcccacatcatcttaagaagagtttatgtgcagcatttaaatcactgtgttttccttgttaactaaaacagacatgggctttgatttttttcatactattagaccatatctcataaaaccttttgaattaaaaaaaa

SEQ ID NO: 116273 - DNA, 1000 bp, Homo Sapiens
tctaagaaggtgttggtactctgtttccctgaatgttgttctctagactggattgacttgttttccttgtgtcttcagtgtggctttcttcctcagtgttgtaggttgagcgaatgctaccagagtgtgagagaccattgtctcgttggctggcgctcacggacatgcagtcacggtagcgggagcaatcacaaaactgtaatttacttaccaaatctcttcctttccgtagcctcgcctgcctgacttagagaaagaaaagcaataattttacaggcattttgaggtgtctctttgggttctttctgtttgaaaggatatttgtcgaaaaaaagagcaaaaccgttttaaataaactccccctggaaaaaaacccaaaacactggcatctgagtaggaatatgaaaatgacaccttttccaaatattaaattggaaaacaaggtctacaaaatcatgatacttttttaaaaggcagagcattcttttttcggcaattttgataagcaaggtgtagatttacatttttgtccttgctcccaacgaaatggataaacaaaaataaattaccatctactcatggaatgttgttgtgttagccagtctgaaagcccaccttaatttttatataactgtctttagctcttcttttgacagggcaggccttgttctgaactgtttcgcttctgactgttaaacaccgatgacgcatgcactgcacttcttcgttttcttcttgctcccccattggcctgagtttcttgtgcattactcctctccctccttcgttagaataggtatatcagctgtgtaaatagagcaagaaaacagtattctgcatctgtggcatttatgtagagttgcagttgtgtactgctgaaaatgcaggcttttgtaacagtgtgatctttactgatgcactcatgacaagtacccaatgtattttagctattttagtagtatttgttcaataaatacgcaagctgtaaggtaactgtctg

SEQ ID NO: 116274 - DNA, 1000 bp, Homo Sapiens
gaccagtccttgtctatgacaagtaacacaatcttatctgcagacagaccctcaaggctcagcccagactttatgattggggaggaagatgatgatcttatggatgtggccctgattgggaattaggaaccttatttcctaaaagaaacagggccagaggaaaaaaaactattgataagtttataggcaaaccaccataaggggtgagtcagacaggtctgatttggttaagaatcctaaatggcatggctttgacatcaagctgggtgaattagaaaggcatatccagaccctattaaagaaaccacagggtttgattctggttaccaggaagtcttctttgttcctgtgccagaaagaaagttaaaatacttgcttaagaaagggaggggggtgggaggggtgtagggagagggaagggagggaaacagttttgtgggaaatattcatatatattttcttctccctttttccatttttaggccatgttttaaactcattttagtgcatgtatatgaagggctgggcagaaaatgaaaaagcaatacattccttgatgcatttgcatgaaggttgttcaactttgtttgaggtagttgtccgtttgagtcatgggcaaatgaaggactttggtcattttggacacttaagtaatgtttggtgtctgtttcttaggagtgactgggggagggaagattattttagctatttatttgtaatattttaaccctttatctgtttgtttttatacagtgtttcgttctaaatctatgaggtttagggttcaaaatgatggaaggccgaagagcaaggcttatatggtggtagggagcttatagcttgtgctaatactgtagcatcaagcccaagcaaattagtcagagcccgcctttagagttaaatataatagaaaaaccaaaatgatatttttattttaggagggtttaaatagggttcagagatcataggaatattaggagttacctctctgtggaggtat

SEQ ID NO: 116275 - DNA, 1000 bp, Homo Sapiens
ttacagctgagcacattctggctcagggaggttaagtgacttgcccagtttcagggctaacgaccacagggtctgcactctaaccctaggcatcacatgctcaatgactctctggtgagcgaggacattctctgacctactcgagggacttaagatgctaccttgtgacccagcactgcccaaagtgcttccaaggcagaagcagcaggggatggcgtggtcaagcactcgggaaacctggggctaatcaaatccaatgggggaaatgactaaaagtcttcggtcgttagaagttgaatgggcacagcaactctaagactacagcacacgtcatttcttagctaagcggaccagcctccctgtcggcctggtgttctgtgggatccctctgggcactggtaatcccaagatctgtgcagccccgcctccaggccacatggggctgggcagctaccatttcccttttgcggatgggaggggtaacttgcacctctgacctatcacttccactgcaccccgtctcattcctccacctgccgtggacttggggtcagagactgctgtgtttgagctctgcagcccagggaccgaaaagttggtgtcaatgaattttgcttggtggatgaaatgtcagtggaagaagcagatgagaaactcttgagatcttggtcctgtgttttttctgccaccaaaggccagggtcactgaaggcctggcccacagcaggtgctgagcaaagggaacagtgaggtgcccagctagctgcagagccaccctgtgttgacacctcgcccctgctccctcccatcccttccccctttactcatagcacttcccccattggacacgtggtgcattttgcttgtttattatgttttctctccatcagaatgaaagctcctcgagggcagggactttggtctattgtctgtatttgccggtgcctaggattgtgcctgtatgcaacaggcactcaataaatatttttgctgtagactgg

SEQ ID NO: 116276 - DNA, 1000 bp, Homo Sapiens
gttctggggcacactggagccatggccctcctccaccaggcatgccccctccagcctggcgtcagccgtctctgctggctcccccaggccccccaaactggctggggccccccacacaaagtgggacaccccgtggcggagccctgctgctgctaagaaacagcccccagcccctgcggcgggcagcctcggggggcagtggcagtgagaatgtgggcccccctgctgccgcggtgcccgggcccctgagccgcagcaccagtgtcgcttcccacatcctcaatggttcttcccacttctattcctgaggtgcagcggggaggagcagatgagctgggcagggcaggggtgggtggagcctgaccctggagggcactgagctggaggcccctgcaagggtaggggacaagatgtaggctccagctcccctcagacctcctcatctcatgagcttcttggggctggccagtggcccagggccagcttggcgataggtgcctcaaggctgcctgggagccccgcctccctaccatggtgccaggggtctccctccgccacctaggaaaggagggagatgtgcgtgtcaaatattcatctagtcccctgggggaggggaagggtgggtctagacatactatattcagagaactatactaccctcacagtgaggccctcagacctgccacagggcagagcaggtctggggcctgaggcagggagaatgagaggccaccttactggcaggaaggatcaggatggggtcttggggtcaggatgcctgggtctcttcccgtaactgtctgacgtcctgtgccgtcttgtcctttatctttttttttttttttttaattgggatcagggctggggcggggaaacaagggaaggaccttggaaggggctgctcccaggcctggggggcagtcgtgggagcccctctcagctgtggggctggcacagagccccaggcaagcttttaataaactgttggttattctaacag

SEQ ID NO: 116277 - DNA, 1000 bp, Homo Sapiens
tcaacctgcatagtgacaagtcccggcccggccagtacatccgctctgtggacccgggctcacctgccgcccgctctggcctccgcgcccaggaccggctcattgaggtgaacgggcagaatgtggagggactgcgccatgctgaggtggtggccagcatcaaggcacgggaggacgaggcccggctgctggtcgtggaccccgagacagatgaacacttcaagcggcttcgggtcacacccaccgaggagcacgtggaaggtcctctgccgtcacccgtcaccaatggaaccagccctgcccagctcaatggtggctctgcgtgctcgtcccgaagtgacctgcctggttccgacaaggacactgaggagagcggcctccacctgagccccacggcggccgaggccaaggagaaggctcgagccatgcgagtcaacaagcgcgcgccacagatggactggaacaggaagcgtgaaatcttcagcaacttctgagccccttcctgcctgtctcgggaccctgggacccctcccgcacggaccttgggcctcagcctgccccgagctcccccagcctcagtggactggagggtggtcctgccattgcccagaaatcagccccagccccggtgagcccccatcctgcccctgcccaccaggtactgggggcctgtggcagcaagatagggggagagagacccagagatgtgagagagagtcagagacagagacagagagagagagagagagacacagagagagacagagagagagcgagcgagcgcgcggcagccgcggggcgagggcctttgctgctctgccggggcctgctgactgaaaggaatttgtgtttttgctttttttccaaaaagatctccagctccacacatgtttccacttaataccagagaccccccccttcccctcccccttcccctcccccttgggacgcgctctaaataattgcaataaaacaaacctttctctgcaaaaaggaattc

SEQ ID NO: 116278 - DNA, 1000 bp, Homo Sapiens
tcagagtctctctttgtccgtggatggtgggaaccccaaaatcatcactaacttgtcaaagcagtccactctgaattttgactctccactctatgtaggaggcatgccagggaagagtaacgtggcatctctgcgccaggcccctgggcagaacggaaccagcttccacggctgcatccggaacctttacatcaacagtgagctgcaggacttccagaaggtgccgatgcaaacaggcattttgcctggctgtgagccatgccacaagaaggtgtgtgcccatggcacatgccagcccagcagccaggcaggcttcacctgcgagtgccaggaaggatggatggggcccctctgtgaccaacggaccaatgacccttgccttggaaataaatgcgtacatggcacctgcttgcccatcaatgcgttctcctacagctgtaagtgcttggagggccatggaggtgtcctctgtgatgaagaggaggatctgtttaacccatgccaggcgatcaagtgcaagcacgggaagtgcaggctttcaggtctggggcagccctactgtgaatgcagcagtggatacacgggggacagctgtgatcgagaaatctcttgtcgaggggaaaggataagagattattaccaaaagcagcagggctatgctgcttgccaaacaaccaagaaggtgtcccgattagagtgcagaggtgggtgtgcaggagggcagtgctgtggaccgctgaggagcaagcggcggaaatactctttcgaatgcactgacggctcctcctttgtggacgaggttgagaaagtggtgaagtgcggctgtacgaggtgtgtgtcctaaacacactcccggcagctctgtctttggaaaaggttgtatacttcttgaccatgtgggactaatgaatgcttcatagtggaaatatttgaaatatattgtaaaatacagaacagacttatttttattatgagaataaagactttttttctgcatttg

SEQ ID NO: 116279 - DNA, 1000 bp, Homo Sapiens
aaagaaaagcagtctgattctaaaggaaaagatcaggaaaggagtagaagtaaagagaagtctaaacagttagaatcaaagagtaatgagcatgatcacagtaaaagtaaggaaaaggatagacgcgcacaatccaggagtagagaatgtgatataactaaaggtaaacacagttataatagcagaacaagagaacgaagcagaagtagggacagaagcagaagagtgcgatcaagaacccatgacagagatcgcagcagaagcaaggagtaccatagatacagagaacaggaatacaggagaagaggacggtcacgaagccgagagagaagaacaccaccaggaagatcaagaagtaaagataggaggagaaggaggagagactcacggagctcagagagagaagaaagtcaaagcagaaacaaagacaaatacagaaaccaagagagtaagagctcacacagaaaagaaaattctgagagtgagaaaagaatgtactctaaaagtcgtgatcataatagctcaaataacagcagggaaaaaaaggctgatagagatcaaagtcccttctcaaaaataaaacaaagcagtcaggacaatgaattaaagtcctccatgttgaaaaataaggaggatgagaagatcagatcctcagtggaaaaagaaaaccaaaaatcaaaaggtcaagaaaatgaccatgtacatgaaaaaaataaaaaatttgatcatgaatcaagccctggaacagatgaagacaaaagcggatgagtgagttatataaacttacttccattctgtttcggattttaagtttgagagacttgctaatgaatctcctttatgttgttttccttttcattgtttttggattgttttatgtttgtccttttttttcttaatgtggatttcattgagttgattttttgataatctgcaatctggataatttgtactgctaaagttttaataaactcgacatgagaaaaacaaaaaaaaaaaa

SEQ ID NO: 116280 - DNA, 1000 bp, Homo Sapiens
gattctataagtcctttggaggtgagaagtggaaaacaaatgttttattaacatcatttctttgtcctgggattgtatttgctgacttctttataatgaatctgatcctctggggagaaggatcttcagcagctattccttttgggacactggttgccatattggccctttggttctgcatatctgtgcctctgacgtttattggtgcatactttggttttaagaagaatgccattgaacacccagttcgaaccaatcagattccacgtcagattcctgaacagtcgttctacacgaagcccttgcctggtattatcatgggagggattttgccctttggctgcatctttatacaacttttcttcattctgaatagtatttggtcacaccagatgtattacatgtttggcttcctatttctggtgtttatcattttggttattacctgttctgaagcaactatacttctttgctatttccacctatgtgcagaggattatcattggcaatggcgttcattccttacgagtggctttactgcagtttatttcttaatctatgcagtacactacttcttttcaaaactgcagatcacgggaacagcaagcacaattctgtactttggttataccatgataatggttttgatcttctttctttttacaggaacaattggcttctttgcatgcttttggtttgttaccaaaatatacagtgtggtgaaggttgactgaagaagtccagtgtgtccagttaaaacagaaataaattaaactcttcatcaacaaagacctgtttttgtgactgccttgagttttatcagaattattggcctagtaatccttcagaaacaccgtaattctaaataaacctcttcccatacacctttcccccataagatctgtcttcaacactataaagcatttgtattgtgatttgattaagtatatatttggttgttctcaatgaagagcaaatttaaatattatgtgcatttgaa

SEQ ID NO: 116281 - DNA, 1000 bp, Homo Sapiens
tataatgaaatgcatttcatttggaagaattcaatgaaccatttttccaagtgaccagtacgtgatgttacaaaatcatgcatggctcaaagattgattcaaaagtgtaagacaggccagtggattttaatgtattaacaatataagagtgcattaagttttcggagtctacattgcctttaagaaactatgacttgtagtaagccgggcgcggtggctcacgcctgtaatcccaacactttgggaggccaaggtgggtggatcacaaggtcaggagttcaagaccagcctggccaatatggtgaaagtccgtctctactaaaattacaaaaattagccgggcgtggtggcagatcccttgtagtcccagctactcgggaggctgaggcaggagaatagcttgaacccgggaggtggaggttgcagtgagtcgagatcgtgccactggactccagcctgggtgacagagcgagactccatttcaaaaaaaaaaaaaaaaaaaaaaaatcacttgtagtcttggtgtggtatcaaagaatagccacaattagctgaaaaggctattttaaaaacttttccaactgcgtatctgtgtgaagtcaacttacttcaacaaaaaagtttggatgtagaagcagctgtaagaattcaactgtttattataacaagatactaaagagactgtaaaatgccacccttctccttggattgttttggaagttattcttcataaaaaatgttaacgtgggctgggcatggtggctcatgcctgtaatcccagcactctgggaggctgaggtgggcggatcacttgagctcaggaattcaaggtcagcctgggcaacatggctaaactctgtctctattaagaaaaaaaatgttaacattatgatttaaaagtgcattaaccttaatctagataataaaagctttttggggcaacctccagaactgtgaaaaataaatttgttatttaaaaagaaaaaaaaaaaaacaaaaa

SEQ ID NO: 116282 - DNA, 1000 bp, Homo Sapiens
ccttcatgcagtacaatagcacgcgggcgggcggcgtggaggtggatgaagacaccatccggcgcatcgaggagctcaacgacctggacatgcagctgtacgactacgccaaggacctcttccagcagcgctaccagtacaagcggcagctggagcgcagggagcagcgcctgaggagccgcgaggagcgtctgctgcaccgggccaaggaggcactgccgcgggaggatgccgacgagccgggccgcgtgcccaccgaggactacatgagccacatcattgagaagtggtagtggcggtggtggccacggggaggcctcttggggggtgtgggggataaaacaggacagacgacaggtccacccaagactgtcaagggatgagcatcccaaacctgctccacagaggtagctgcgtcctgaaaaaaaacagagcagggatgtagtggggctgggcagggatgggggcttgagaaatcaacaggtgcagcccagtgggtcagaggaaagcgtgctcgaaggatgccatggtcagggcagggcctccagagcaggtgttgtgcctggagctgctctcctggcctccttggatttatcgcaaaaactgaaggtttgcgcaagagacgaggacagcggaaagtggacctgccaggccgggagtgtgtccctcaccaactatgcacacagcactcgctcttaactcctctgtccgggctactaggagtgagaccagcttctggcaactgccccagctccaggccatcccatagcccctcctcttctggctgcccccaatgccccgaggcctggggagcccccagctcacccatctgtagctccctcaaagtcagggcccaccccatctgaggcagagaagactcgagtccagcccccaggaagcctgctcccctctctggcccatggtcctgcttcatgctttgggtcaggaggccaaagctgatgttcaggccccacccactccctacagtcctcagaccccg

SEQ ID NO: 116283 - DNA, 1000 bp, Homo Sapiens
atgtggtggtggagatggccgaggcagacctgcgggccctgctatgcagagagctgcggcccctgggggcctacatgagtggacggctgaaggtgaagggcgacctggctatggccatgaagctggaggctgtcctcagggccttgaagtagcagccttggctgactttccagagcccagtcccaagcctggcaccaagcctgaggggcctcttggaggaggaggtgttcatctgcaccacagagagttgaggccctaacaaatttcaggcccagccaagagcccatgaatggaggctgcaggaggctgagtccggctgccatgcacgtctcccctacagtggttctctggacaaggctttgtccatcccggtccccagctgagtgcccagcgctgagctgggtgcacggtgtgattccaggaggagagccaggcctgccctgccctgctggcttcctgactggagagacaggacccacagaaacagcctgacagcagctggtttggtccttgtgtgagggaccaagcatgtggcccaggctctaagctctgcggggattggagagggatggggagggaagggaaggcagctccaagaagaggtccctgtggcgaagttacctggggatcctggctggcccaccttcctggctgcagtccaggcccgtgctggcgggattgggcatgggaaggagcagggcctgctgcttccctggcgctgctcccaaagatttctgactcatctgccagctccgtcctgcatgcctggcgagctggggcccagggcagcatgaaggagagccctgcgttctgtgcttcttaccagaggtttgcaagcctcagacaaataaatgtggtgtttacaatgtaaaaaaaaaaaaaaaaaaaaaaaaaaaaaaaaaaaaaaaaaaaaaaaaaaaaaaaaaaaaaaaaaaaaaaaaaaaaaaaaaaaaaaaaaaaaaaaaaaaaaaaaaaaaaaaaaaaaaaaaaaaaaaaaaaa

SEQ ID NO: 116284 - DNA, 1000 bp, Homo Sapiens
cagcttgtctgcactggcagtgacgatggcacagttaagctttgggacatccggaagaaagcagccatccagacatttcagaacacgtaccaggtgttagctgtgaccttcaatgacacaagtgatcagattatttctggtggaatagacaatgatatcaaggtctgggacctgcgccagaacaagctaacctacaccatgagaggccatgcagattcagtgactggcctgagtttaagttctgaaggctcttatcttttgtccaatgcaatggacaatacagttcgtgtctgggatgtccggccatttgcccccaaagagagatgtgtaaagatatttcaaggaaatgtgcacaactttgaaaagaaccttctgagatgttcttggtcacctgatggaagcaaaatagcagctggctcagccgacaggtttgtttatgtgtgggataccacaagcaggagaatattgtataagctgcccggccatgctggctccatcaatgaagtggctttccaccctgatgagcccatcattatctcagcatcgagtgacaagagactgtatatgggagagattcagtgaagatatggactggaagactccaaggccgcttgtctttgagacctcagactgcataagtgatgccaaatgttggatgtccaggctagcaccctcccttcagatgaccattgctagcaagaaacaggaggcggtggccatattccaaaaaccaattttgtcccatttcaccaggatgactaaggcaagcttccctgtggcctttaaaaaccacctgccagatttcagggactgtttttttttttctttttcttttttcctgttttctaatgcaggcccaatgtgacaaatttgttggttgggatttttttttttttttgtaactggcttgtatgatattttctttctgtatttctctatatcattttgtattaaaagccaaatagatgcctttttacaagaaaaaaaaaaaaaaaaaaaa

SEQ ID NO: 116285 - DNA, 1000 bp, Homo Sapiens
aagctgctggtggcgaggttcctggagcagtcctcttgtaccatgaccccagacatccatgaacttgtagaaaacattaaatctgttttgaaatctgatgaggagcacatggaggaagccatcacaagtgccagttttctagaacagataatggccccattgcagcccagcacatccagggcccacaggctgccctcgcggagacagcctggcctgctgcacctccagagctgcggcgaccttcacaccttcacaccagcggggaggccccgagccgagaggaggccccggcgagtggaggctgagcggccacacagcctcattggggtcatccgagagactgtcctgtgaaccctggaagacagaaggccactccaaggggaaggatccctctcctctctgccatttcttggctgggagctgtggtccacctcaaaaaaaaaggagcactctggaggacacgttttcccacctgttggctcccgtgtctgctgactgagggcattcaggagtaaatgcacaggtcggtccaggcccgtctgggtttgggatgcactgagttggaggttatgaaagctttgatcctcttcttcctctgctgggcctcgcagcattcccaagggtcacatgccctggcatgggcagaaactgggctaatgattctttgcccacttcacccctcgtgtctctctttgttgctaagttctttccctcttggaaggacagatctgccgggctgctatttatagttgcctttggcctttcactgctctgcgatttggcaggaaataaggcgattaaccctatgtgtccacaagcctcaagccttgtttcaggtcaccctcaaatcacactctctttaggcaaaacaggaaacttcttaagtgacaaattttaatgccagacatttaaggagaggattattgttgattccatttactcatgcttgcaaaactagagacccctaaggcagaactgagaataaacatgtttactttgg

SEQ ID NO: 116286 - DNA, 1000 bp, Homo Sapiens
tgtctatggttgtcaactatgatatggccaaaaatattgaagattacatccaccgcattggccgcacgggacgagcaggcaagagtggggtggccatcaccttcctcacaaaagaggactctgctgtgttctacgagctgaagcaagctatcctggaaagcccagtgtcttcctgtccccccgaactagccaaccacccagatgcccagcataagccaggcaccatcctcaccaagaagcgccgggaagagaccatctttgcctgacacagcactcttcctgtgggctgagggcatctccaaagctgcctgatgcctgtttttcagaaccctcacatccctctttccaggtcctcactcttgggatatgggggcttaggaaaacaatccaactccctagcccagaccctcaggtcaggaggcctgcgtgtggggctgcaaaaggagaggacgacgctgtcggaggcagggagagcaaattaccacagcttcttggcccagttctgcccttctttgctttgggattgcactgggccatcagctcatgccaggctatgggggcagccagttggcattgctccccagactgaacagaaacctggccgccggatgggacctcctttggcacagacttgactgtgtaactgcataaactgcagtagcatcattgccctagatgccccaggagacctggcaccatgaggattacagacagtggaatcttactgtcatctggacagctgttttcctgtttggatggtaaaggaagttgagagtctttagacctgtgcacagccccgcaccaaggggtgctgtatgctctaggcatcccctcccccaggggattttctaagtagatggggggacacggtgaactggctgtgtccatctttgtcactgagtgaaatctctgttttctattctctgagaagataagtttgtatgttctgagaataaatacatgaatattaagactgttaaaaaaaaaaaaaaaaaaaaaa

SEQ ID NO: 116287 - DNA, 1000 bp, Homo Sapiens
tgatggcccaaaatggtcaggactttaatggaggaggtgaggtgttgaaagcacaggcagagtggtcagggctgaagtcggagaagcatagggactaggcccaatccagcctggaaagtcagggaggacttcctagaggaagggacatcgaactaagacctgaactatgagaaataggcaggaagaagttgtacctgactcatttttctcaggtgtctccagggagcaggacccatggagggacccctggtgtaggcctgggcgatagactcttcctcagcagcctggcaggcaggaaacagacataggaccccagcccagatctgaatggcatgggaggtgctgcccttaaccatgacaccattgtaagagctgtccacatttgtatgttgtgccctggaatcagcctggttgagctcaaatcccaacttagccacgtctggcctgtgtccttgggcagtcacactacctctctgattttgtttccttatctgtaaaatggtgatcatcataatacaacttcaaaaggatttcaggctgagtgtggtggctcacgcctatacacccagcactttggaaggctgaggaaggaggatcgcttgaggccaggagtttgagactagcctaggcaacacagtgaggccttatctcaacaacaaccacaaaatctaaaaattagctgggtgtggtggtgcatgcctgtgatcctggctacttcagaggctgaggtggaaggatcacttgaggccaggagtttgaggctgcagtgagttatgatggcactgctgcactccagcctgcgggacagagtgagaccctgtctgaaagaaagagagaaagaaagaaagaaagagagagaaagaaagaaagaaagaaagggaaagatggaaggaaggaaggaaaaagaaagagaaagagagagagagagaaagaaaaagaaagaaaagtaagaaagaaaaaagaaaaagaaagaaaagtaagaaagaaaaaaaaaaaaaaa

SEQ ID NO: 116288 - DNA, 1000 bp, Homo Sapiens
tggatctggtggtaacagaaatgtatgacacacccaccctctcggttcatcctggacccgaagtgatctcgggagagaaggtgaccttctactgccgtctagacactgcaacaagcatgttcttactgctcaaggagggaagatccagccacgtacagcgcggatacgggaaggtccaggcggagttccccctgggccctgtgaccacagcccaccgagggacataccgatgttttggctcctataacaaccatgcctggtctttccccagtgagccagtgaagctcctggtcacaggcgacattgagaacaccagccttgcacctgaagaccccacctttcctgcagacacttggggcacctaccttttaaccacagagacgggactccagaaagaccatgccctctgggatcacactgcccagaatctccttcggatgggcctggcctttctagtcctggtggctctagtgtggttcctggttgaagactggctcagcaggaagaggactagagagcgagccagcagagcttccacttgggaaggcaggagaaggctgaacacacagactctttgaagaatgaccatgagacacagtggccatgggtggatctgaaagctggtgttgagcctgggcggcgtgagctctgtgttggacccacggaggagggagtcactgcagggaaagagggacactggcattccatttgtcagagcatcccggacgatgcagagggtgggagaactacatgctaaatttctttttttttttttttgagcctgggcgacagagcgagactccatctcaaaaaaaaaaaaaaaaaaaaaaaccacataggctcagtcttttcagtatctgctttactggttcagtaaaagccaggaaacacaactttgtggtaatctgaatgttattgaactgtattttgttcactttattgtaaatactagtgaacagtgaataaatggttgtatattcctaataagaaaaaaaaaaaa

SEQ ID NO: 116289 - DNA, 1000 bp, Homo Sapiens
aggcgggagggagggggcgggagtcacgcggtctctctgcgctcttccctcaaaactctttttgtgaaatgctgctaccagtttactaacaaaattgcgaagaaggaccgcgtggaaggaaggacggcaaagtgagttcagaactctatagcaaaccagctataaaaagcgttagtccctcacccccaaagaggtgcggacactttccagcacctgaaagctggggcctcagttgcaggcaggcacagaaaacctgtgggagaggtcacctttaacacagcaacagaagcacgcatctcatctctcttgcattttctgttctttaatttggccctgagtgtcttgagacagtgggccatgccactgcctctgtttgctccctacccagccactgtcaggccagtgttgtctgtcatgtgccagaagcttctcagctgtggtgagccactggcattgggcaggcgggccagctggccagccagtgtgacccacactccatgggcagccacctgtttatatctggtttcagttataacccagtttttaaagaaatgctgcaaaaatttaagttttctcatgtttattttaaacaattcctcttccatcagaccaccagacaaaaaaacctttcctttcttcctcccttttcttttttcccttcctgtacacatctagaaaacttcacctttctagagtccccccaaaacaacacaaaagttattgtgggtgctactggttttatgctgtactgtggggcgagggggaagacctgtctgtacgctggaaacactcataaccattcctttagattcgtttgccttatggttatttgtcataaacgcgatttgcaaaaacaaggagccttagtgaatgtacagtacctagacttctgtgttctcaggacgcagaagggagcaactttgctatttggtccagtaagtggacaccttgtgatataaatgtggaaataaaaaaaaaaaaaaaaccatttgcacaaacc

SEQ ID NO: 116290 - DNA, 1000 bp, Homo Sapiens
aaacaaaaaaagcgtttaccagctcttaggatgtaaactagctttgtggaagataaatcgtgcactatttttacacataaatagttatatcaatgtcagcctattttgattaacaaatgtttttaaagtattattggttatagaaacaataatggatggtgttggaactaatatatccttgatgtctgtctattattcattcaactctttttacagacctcagtattagtctgtgactacaaaatattttatttgctttaaatttgctggctaccctagatgtgtttttattcctggtaaagacatttgtgattacattttcacacttaagattcaaaatttttcccaaatataaagaaaactaagacagactgtagatgcattttaaatatttaaatatgatcctcagacatgcagctgtgtgtggcagtattttagtaccgggttaagaaaactggcaactgggaagaagtggcctcaaaggcacttaatttgatttttattttttaaatgctgtcaaagttacagtttacgcaggacattcttgccgtattctcatgatcccagataagtgtgtgttttatactgcaacaatatgcagcaatggtaagcgtaaagttttttttttgtttttgtttttttttatattatgaagtcttttaacagtctctctttatataaatacacagagtttggtatgatatttaaatacatcatctggccaggcatggtggcttacgcctgtaatcctagcactttgggaggccaagacgggcggatcacctgaggtgaggagttcaagaccagcctgcccaacatagtgaaactccgtctctaccaatatacaaaaattagccgggcatgatggtggtggcctgtaatcccagctacttgggaggctgagacaggagaatcgcttgaacccaggagacggtggttgcagtgagcgaagatcgagccactgcactccagcctgggcagctgaacaagactccgtctc

SEQ ID NO: 116291 - DNA, 1000 bp, Homo Sapiens
aatattcaatctgttgtgaagaacctgatttgcactctgtagtgtttaaagaaacaaagaaactctaatattgaatctcttaaatttagtgtatgtaaacagcttacaaatacgtattgtctaaatgcatttaaatctgttttattcaaagaaaagctaaagcaaaaacactggcatatgaccatgcaagactgtcagtgccaacaaagacaacactaatcagcacatcgtacactggattgcagtgcttcccagattattgaaaaatgttacagacaacttgcctgatttttaaatgagcgtaaaaggccctctaacctatgcaggtttccccattatgcatatagaaaatgctagtatgttttgctcacttcatatgtaacaggtgcccttatgttgtgctgtatcctgtgctttttctgtgggaccattccattcaggagcaaagagcaccatgattccaatcttgtgtgtgtttactaacccttccctgaggtttgtgtatgttggatattgtggtgttttagatcactgagtgtacagaagagagaaattcaaacaaaatattgctgttcttcagttttgtttgtggaatttgaaattactcaaatttaaaataaattactggactgtggaaataacatagaattgaagttttaattaaataccactcaaacgaaaagaacagtagtttttgtagttttatattggatactgaggcattagggaggcatgaaaggaagaggaatgaggattgagacatgtgaagacattgtgcattatatcaatgtgcattcctgtagttcattaacaaggtacatgcaatagtctaaagaaccagagtcactactatagtggcttaacatttaatctgtctccaatattttaaccaagtgacaccgaggtttttatcgaagcatttcacttaaatgaacaaatcatggctgttatattaacttgaaataaaatatatttaaacatgtaaaaaaaaaaaaaaaaa

SEQ ID NO: 116292 - DNA, 1000 bp, Homo Sapiens
aaaatagggctggatcttatcactgccctgtctccccttgtttctctgtgccagatcttcagtgcccctttccatacagggatttttttctcatagagtaattatatgaacagtttttatgacctccttttggtctgaaatacttttgaacagaatttcttttttttaaaaaaaaacagagatggggtcttactatgttgcccaggctggtgtcgaactcctgggctcaagcgatccttctgccttggcctcccgaagtgctgggattgcaggcataagctaccatgctgggcctgaacataatttcaagaggaggatttataaaaccattttctgtaatcaaatgattggtgtcattttcccatttgccaatgtagtctcacttaaaaaaaaaaaaaagaaaaagaaatggataatttcatctactgcctttacttggggttaatgtgattcttaaacaccttcatcatggaactctcagagtggggtccgttttggtttcctggtggtgggttttgaaagataagggaaagcacattttgagcatgtctgggtaccatggtgcggatgcttgggaaccagaactgtttcagaggaatctaaagtctgattttagttttcagagacacagcttgttgtaaaacatgagaagacatgatttctaggactcaagcagcaagccaggattctaggttggctgctgtgtcatctttgaagtcaagacaaagctgggctcgaccttcaagggtcctcgttttgataatacttcagaatagggaactcatgtgaatactactatgtagaaataaaacctagaccttgagcgaacatctgtatattggttgaaaacgatagtggtaaccattgatcccccttcatttgatgtttggaaaattccagtaattatcatttttgcaacgaatatggataccacatagtactttggtgttacctgcttttgaaaaataaagtctttggttcacccggtaaaaaaaaaaaa

SEQ ID NO: 116293 - DNA, 1000 bp, Homo Sapiens
tggcaaactggcgagtggcagatatctgcctcaaacttatgtggttcgagaagacctagttgctgtggaggaaattcgtgatgttagtaaccttggcatctttatttaccaactttgcaataacagaaagtccttccgccttcgtcgcagagacctcttgctgggtttcaacaaacgtgccattgataaatgctggaagattagacacttccccaacgaatttattgttgagaccaagatctgtcaagagtaagaggcaacagatagagtgtccttggtaataagaagtcagagatttacaatatgactttaacattaaggtttatgggatactcaagatatttactcatgcatttactctattgcttatgctttaaaaaaaggaaaaaaaaaaactactaaccactgcaagctcttgtcaaattttagtttaattggcattgcttgttttttgaaactgaaattacatgagtttcattttttctttgaatttatagggtttagatttctgaaagcagcatgaatatatcacctaacatcctgacaataaattccatccgttgttttttttgtttgtttgttttttcttttcctttaagtaagctctttattcatcttatggtggagcaattttaaaatttgaaatattttaaattgtttttgaactttttgtgtaaaatatatcagatctcaacattgttggtttcttttgtttttcattttgtacaactttcttgaatttagaaattacatctttgcagttctgttaggtgctctgtaattaacctgacttatatgtgaacaattttcatgagacagtcatttttaactaatgcagtgattctttctcactactatctgtattgtggaatgcacaaaattgtgtaggtgctgaatgctgtaaggagtttaggttgtatgaattctacaaccctataataaattttactctatacaaaaaaaaaaaaaaaaaaaaaaaaaaaaaaaaaaaaaaaaaaaa

SEQ ID NO: 116294 - DNA, 1000 bp, Homo Sapiens
tgaacctgggaggcagaggttgcagtgagctgagatcgcgctactgcattccagcctgggcgccgagatagcgccattgcactccagcctgggcgactgaataaaactctgtctcaaaaaaaaacaaaaacggtaagcttttatatttaattaactgatacctttcactgtgcaatctcaagaggaagattttctaaattagacattgtctttaccttaaagaagaaaattgtctatttcagtgtcttttttagcaagattgaccaaaacaggtggtaggtgtgtaatttttaactgtcatgaaatactgtaatgcgcacctttgctaataaggaaatggtctccctttgaattatgggaagtttcttgtctgtgatatggggtgtctgtgtacatatatgtatatttccttttttaatacaggataataatatggggtcttgtccttcaccttttaagttcagggaacagtttgtcctgaccacacatatgttatcagtgtaatgctttatgaagctttagaaatgagctcatgactcattaaaaaataataaacgatgctattttaatattttcaaataaataatctgaggatgtgtttcatactttagcatcaacgctgagttgtgccttgtagaattgcattgtctatacatgcaaaagactattaagttaggatgaactagattccctaattacagtgaaattctatcttgcaaatgctatagaataacttgcattttaaagtgtatttgcacattttacatatgctatgtggttgcctttgggttttctgtacagattgtttttgttattaaatggaaaaggcctgaattatgctcttatgtgaagtaaattgatataacctattgactgtattctgtgtattattctttattttgggaccttctgtgtaaaagaaaatattacctaaattggttagatacaaagaaatcattaaaattattaatgtatatatgaaaaaaaaaaaaaaaaaaaa

SEQ ID NO: 116295 - DNA, 1000 bp, Homo Sapiens
atgctctgccacgtattctacgcggaggacgcccagctcatcgcccaggccattggccaggccttcgccgccgcctacagccagttcctacgggaaagcggtattgaccccagccaggtgggcgtgcacccgagcccaggcgcctgccacctccataatggggacctggaccacttctccaacagtgacaactgccgggaggtgcacctcgagaagcggcgaggggagggcctgggcgtggccctggtggagtcgggctggggctccctgctgcccacagccgtcatcgccaacctgctgcacggggggcctgctgagcgctcgggggccctcagcatcggggaccgcctgaccgccatcaacgggaccagcctggtggggctgcccctggctgcgtgccaggccgctgtccgcgagacgaagtcgcagacgtcggtgacactcagcatcgtccactgccctcccgtcaccaccgccatcatccaccggccccacgcccgcgagcagctgggcttctgcgtggaggacggcatcatctgcagcctcctccgtggtggcatcgccgagcgtgggggcatccgcgtcggccaccgcatcattgagatcaatgggcagagtgtggtggccacgccacacgcccgcatcatcgagctgctcaccgaggcctatggcgaggtgcatatcaagacgatgccagctgccacatatcgcctccttacaggccaggagcagcccgtgtacctgtgaccacctcatcccttgcctgccactgtgccttcgcctccatggccccggagccccatcctgggcctgccctggctggccaggaccccagcggttcttggtcctgtatgatttcctaatataaaaacagtaaaagcttatgcatttggcaaagtctcggatcagggtctacgggaccgaggaccttgtccttcctggaagccactagaagccggtgctgtgaaaatactctgtttattaaagaccaggcggaggg

SEQ ID NO: 116296 - DNA, 1000 bp, Homo Sapiens
ccaacggtcagtttttacattttatagctgcgtgcgaaaggcttccagatgggagacccatctctcttgtgctccagacttcatcacaggctgctttttatcaaaaaggggaaaactcatgcctttcctttttaaaaaatgcttttttgtatttgtccatacgtcactatacatctgagctttataagcgcccgggaggaacaatgagcttggtggacacatttcattgcagtgttgctccattcctagcttgggaagcttccgcttagaggtcctggcgcctcggcacagctgccacgggctctcctgggcttatggccggtcacagcctcagtgtgactccacagtggcccctgtagccgggcaagcaggagcaggtctctctgcatctgttctctgaggaactcaagtttggttgccagaaaaatgtgcttcattcccccctggttaatttttacacaccctaggaaacatttccaagatcctgtgatggcgagacaaatgatccttaaagaaggtgtggggtctttcccaacctgaggatttctgaaaggttcacaggttcaatatttaatgcttcagaagcatgtgaggttcccaacactgtcagcaaaaaccttaggagaaaacttaaaaatatatgaatacatgcgcaatacacagctacagacacacattctgttgacaagggaaaaccttcaaagcatgtttctttccctcaccacaacagaacatgcagtactaaagcaatatatttgtgattccccatgtaattcttcaatgttaaacagtgcagtcctctttcgaaagctaagatgaccatgcgccctttcctctgtacatatacccttaagaacgccccctccacacactgccccccagtatatgccgcattgtactgctgtgttatatgctatgtacatgtcagaaaccattagcattgcatgcaggtttcatattctttctaagatggaaagtaataaaatatatttgaaatgta

SEQ ID NO: 116297 - DNA, 541 bp, Homo Sapiens
agttgttgttggttgggggccttttggccggtgacggagactgcccaggtgtggtcaccatgttcctctccgcggtcttctttgccaagagcaagtcaaaaaacattctggtgagaatggtgagcgaagctgggacaggtttctgcttcaacaccaagagaaaccgactgcgggaaaaactgactcttttgcattatgatccagttgtgaaacaaagagtcctcttcgtggaaaagaaaaaaatacgctccctttaaacggtggattgaaaatgactttgatttataaagagaagactgagggcggggatactgattcagaaatcctgtagcgtgtaataaaagaagaggaaatggcatggaatcactgcctcctgtgatttgaaggccattgtgaaggaaaacaatgcagtgaaagaaagttcttcatattaggacagatatcattgcatcacatttatttatctttctgggtatttttatagcccttaataaaaaatattaaaatcgaaaaaaaaaaaaaaaaaaaaaaaaaaaaaaaa

SEQ ID NO: 116298 - DNA, 1000 bp, Homo Sapiens
aacgggcccttggaagtagctggagctgctgtcagcgcaggccatggcctgcctgccaagtttgtgatccactgtaatagtccagtttggggtgcagacaagtgtgaagaacttctggaaaagacagtgaaaaactgcttggccctggctgatgataagaagctgaaatccattgcatttccatccatcggcagcggcaggaacggttttccaaagcagacagcagctcagctgattctgaaggccatctccagttacttcgtgtctacaatgtcctcttccatcaaaacggtgtacttcgtgctttttgacagcgagagtataggcatctatgtgcaggaaatggccaagctggacgccaactaggctgagcaatgacagaaccagctgcaccatgtaccccaccttcagtttaaaagaaaaaaaaaatccccttcactcctactgggaggtgggacccctttcattttcagttttgctcatctagggaaaataaggctttggtttccagtttaattgtttttgaccttctaaaatgtttttatgttagcactgatagttggcattactgttgttaagcactgtgttccagaccgtgtctgacttagtgtaacctaggagattttatagttttattttaatgaaaccctgattgacgcacagcagtggggagaacagcgtcttttacctgtcaccgaagccaggaagccccgtttgtaagcgtgtgttgtggtgctttattgtacatcctccagtggcgttctttttactctaatgttcttttggtttcccccctcagaagaatcatgaatttgcaacagacctaatttttggttactttttgtcttattgatggatttgaaaatgaaagatttaataaggcaaagcagaatctgttgtccttaattatatttgcaatttggaatttgtgtgagttgatttagtaaaatgttaaaccgttaaaaaaaaaaaaaaaaaaaaaaaaaaaaaaaaaaaaaaa

SEQ ID NO: 116299 - DNA, 627 bp, Homo Sapiens
gacctttccgagttggctgcagatttgtggtgcgttctgagccgtctgtcctgcgccaagatgcttcaaagtattattaaaaacatatggatccccatgaagccctactacaccaaagtttaccaggagatttggataggaatggggctgatgggcttcatcgtttataaaatccgggctgctgataaaagaagtaaggctttgaaagcttcagcgcctgctcctggtcatcactaaccagatttacttggagtacatgtgaaagaaaacgtcagtctgcctgtaaatttcagcaagccgtgttagatggggagcgtggacagtcactgtacacttgtataagtaccgtttacttcatggcatgaataaatggatctgtgagatgcactgctacctggtactgctttcagtgtgttccccctcagcccctccggcgtgtcaggcatactctgagtagataatttgtcatgcagcgcatgcaatcagaatctcactgagccacccatcattgtgaaataattacctcagttgtacaggacttggtgatcaggatccaggcactcacttgtattctactgctcaataaacgtttattaaacttgatcctgctactaaaaaaaaaaaaaa

SEQ ID NO: 116300 - DNA, 1000 bp, Homo Sapiens
cttccagaattttatcctctttgaggtcttctgtgctatgaatattagatttctttccccaagggattatgtggcaggtcattatggccttcttttttttggccatattaagtaacagttttgctatattccagtagtaccgttgtgtgttttctgcaatgtggagttgacttagcttggcattttagatttgttaaaactattttttccataaatactttgaaacgtatttatatatttcaatttaaggaatctttttgccatgtgtatgcaaatattattttcttcatacattcattttcttttcaggggaaaattttgggatgggggactcaggaggacctgtgaagcatgtagttatctagatctgggtaatttcatgtttattaaactcgaactttggctagttaaactcatattgaaacttcatctagtctcttaattttttaacactaaattcaagtcatttgttttaagtctctaaaaaagaagattgcagtcatccattcatatgcatggggtctgatcgcaaatacactaaatgtggagtgtaggaaccaaaatgaaacctgctgtatggaaactactttcacttatggttcattggtttttgtaccaatattttttatgcacttcagtgcaagtcttgtcagttaaccttactttatgagtaagctaaataacccaaattacatttctttaaacctgttttactactatggcactttgataaaatggtcaggaaccaactttactggcaaaagggtccatgtaccaccatgtgctggagcatctgttctacatgtggatatctatgaatggtaatgttttccttcatgtaagtgcctattcagagtttcagaattttaaaatgccaaatattttcatggtcatttgcatgtagtaagccagaaaatattcaaagagattttgaaaaccaattgtatttaaccagcctcaaattgtgcaaccatgatgtataataaagaatttgaaacag

SEQ ID NO: 116301 - DNA, 1000 bp, Homo Sapiens
ttttccaggaggaggatgtctcattgattacgttcctcaagtatgccacctgctcaccaacaaggtgcagtacgtgattcaagggtatcacaaaagaagagagtatattgctgcttttctcagtcactttggcacaggtgtcgtggaatatgatgcagaaggctttacaaaactcactctgctgctgatgtggaaagatttttgttttcttgtacacattgacctgcctctgtttttccctcgagaccagccaactctcacatttcagtccgtttatcactttaccaacagtggacagctttactcccaggcccaaaaaaattatccgtacagccccagatgggatggaaatgaaatggccaaaagagcaaagggatgccaagggagcagagatgcctgcagcccgtgggagcaagtcctggcctttgcagttgcaaaaactggctgcaagctgctccagccccagaggaactggccaagctccagagggcctccttggagggcctcagagggagagagaactgctcagtaattttgatcactttgggcttatttcaaaacctttgtccctcagttccaggaggcagcatttgccaatggaaagctctaggaaacaccagtcttgagaggtggccagccagactgcctgtccacatgcgtgtcagcacatacagccgcttcctggaagccgcctggaatgtcttcacggcagcgttttgctcacacagcagcttttgcacgccccaggcagccccgactgctgaaatccaacttgagctggctggtggtccctggatcctagagcccttcacttcgggttactccctctttcttgcctctatttcttagttggaagaaataaactcacaaattatggtgcagtaattttccggggaaagtaaagcctcaggaatgcccacgcctttcttccaaagcctttgtctctgagacctcttaagttctaagattaaatgcccctcgctgttcttcctctgaaaaa

SEQ ID NO: 116302 - DNA, 1000 bp, Homo Sapiens
gggactggagactttgacctgtgtcgagagactatccagcctttcatgaataaaacaaacgagacccagacttccctcaatggggtctaccagcccccaattcacttccagaacagtgaattctatggcttctccgaattctactactgcaccgaggatgtgttacgaatggggggagactacaatgctgctaaatttactaaagctgcaaaggattattgtgcaacaaagtggtccattttgcgggaacgctttgaccgaggactgtacgcctctcatgctgacctccacaggcttaagtatcagtgcttcaaatcggcctggatgtttgaggtgtttcataggggcttttcgtttcctgtcaactataaaagcttaaagactgccttgcaagtttacgacaaggaggttcagtggacccttggagccatcctctacaggacccgctttctaccgttaagagacatccagcaggaggccttccgagccagtcacacccactggcggggcgtttcctttgtctacaaccactacctgttctctggctgcttcctggtggtgctgctggccatcctgctgtacctgctgcggctgcggcgcatccacaggcgcactccccggagcagctcggccgccgccctctggatggaggagggccttcccgcccagaatgccccggggaccttgtgatccagctcacagctccacgaagactcaaaaggaaaagccatttttgcctcagggtttctcctctttattttcctgtggttttgttttttctttcccttttttgttcctccaaacaaaaacaaaatgcaggccgagcgcggtggctcacgcctgtaatcccagcactttgggaggccgaggcgggcggatcatgaggtcaggagatcgagaccatcctggctaacacggtgaaaccccgtctctactaaaaatacaaaaaattagctgggtgtggtggcgggcgcccgttagtccaactactcaggaaggc

SEQ ID NO: 116303 - DNA, 1000 bp, Homo Sapiens
atgcattgcatggcaggtggtttgctggtaaaatgataacagcagcatatgtacctcttccaacttaccacaacctgtttcctgattctatgacagcaacacagctactggttccaagtagacgatgaaggaagatatagtcccttatgtatatagctttttttctttcttgagaattcatcttgagttatcttttatttagataaaaataaagaggcaaggatctactgtcatttgtatgcaatttcctgttaccttgaaaaaataaaaatgttaacaggaatgcagtgtgctcattctccctaaatagtaaatcccactgtatacaaaactgttctcttgttctgccttttaaaatgttcatgtagaaaattaatgaactataggaatagctctaggagaacaaatgtgctttctgtaaaaaggcagaccagggatgtaatgtttttaatgtttcagaagcctaactttttacacagtggttacatttcacatttcactaatgttgatatttggctgatggttgagcagtttctgaaatacacatttagtgtatggaaatacaagacagctaaagggctgtttggttagcatctcatcttgcattctgatcaattggcaagaaagggagatttcaaaattatatttcttgatggtatcttttcaattaatgtatctgtaaaagtttctttgtaaatactatgtgttctggtgtgtcttaaaattccaaacaaaatgatccctgcatttcctgaagatgtttaaacgtgagagtctggtaggcaaagcagtctgagaaagaaataggaaatgcagaaataggttttgtctggttgcatataatctttgctctttttaagctctgtgagctctgaaatatatttttgggttacttcagtgtgtttgacaagacagcttgatatttctatcaaacaaatgactttcatattgcaacaatctttgtaagaaccactcaaataaaagtctcttaaaaaggcca

SEQ ID NO: 116304 - DNA, 1000 bp, Homo Sapiens
cccagccttaagtctcttggagaagctggtgctgtgagccagaggatgtcagctgccaattgtgttttcctgcagcaattccataaacacatcctggtgtcatcacagccaaggtttttaggttgctataccaatggcttattaaatgaaaatggcactaaaagtttcttgagattctttatactctctgccttcagcaatcaattccattcatacatcagcactctgctggttctgtttgaaatatgttctgtatttaaaactcaaatcttgttggatctctgcagggcttgtgaccaatgaagtcatatttgttgatggttgacaaagcttgcttcactccatcagagaatgactatcaatttttttttaactgtcctatcacgtcctctcctgtcacccattttgaagagtggcagaacttgaagttcaacttcctctgtaaatatccaagtataaagcccaggaacttctagaataacccagatgcgctttaattttttttaatatgttttgatcacagaacttctagaataacccagatgctctttcatattcttttaatacatcttgatcacagctgggggaaaaaaagctttttaattctataccttcctagtagataagtgaagagcagggaaagagacctttaaatattttgctataaaaaaatttgtgataagtttctatcaaaatggggagattgcagaaaaggcttcccttggctcccaaggaggtgtagcaggtgtgagcaatattagtgccatgtgcctttcacacagggtttgcatttatcagtctgttttccgatgatgtgtacatgaaagagtacaccatgtgaagagaagagagaatgattgaaaatgttttagtatagaactcttcttgcagtgggttgctattttctagattttactttttagggaacaaaataaaatcctttgttaaaactgggaaaaaaaaaaaaaaaaaaaaaaaaaaaaaaaaaaaaaaaaaaaaa

SEQ ID NO: 116305 - DNA, 799 bp, Homo Sapiens
gtgcaatggctagtactatgtgtcaacttgtctaggctatactgctcagctgtgtggtcaaacagtagtctagatgttgctgtgaaggtattttgtagatgtgatcaacatttacaatcagttgattttaagtaaagcagtttaacttccaatatgtggatgggcctcatccaattagttgaaggtgttaagagaaaagaccaaggtttcctggaaaaggaattctaccacaagactaacataaaaatgcactgtgagtttcatgcctgctggcctgccttcactgtcctgggggaggcttggagagaccaggtggactggagtatactgttgagagacgctggtctggtgaagatgtccaggaaaccacgagcctccagcccattgtccaacaaccacccaccaacaccaaagaggttcccaagacaactcggaagggaaaagggacccatcgaggaagttccaggaacaaaaggctctccataaaagaccgccgcttcaaaaaaacctgaggaatggagtgggccaacactatccagccactctgaccagccgaacgaggaactcaatcaaaatgagccatagcgggaccacaagggcaaggagaccaccactttctccagtctcttttcggacagccagtaattcccgggcaaggccagagacttcaagtctatctgaaaagtctccagaggtctaaccccagataaatagccaacagggtgtagagtacgttttacaccccaaagggtatgccccatgtgagggaaataaaatgaacatgttgtaaaaaaaaaaa

SEQ ID NO: 116306 - DNA, 1000 bp, Homo Sapiens
atgccgaatgctgcctgactgtggtggcccgcggcacggaggctgtggtcttcagcatcgacggctccttcaccgccagcgtctccatcatgggcagcgaccccaaggtgcgagctggcgccgtggacgtggtcaggcactggcaggactccggctacctgatcgtgtatgtcacaggccggccggatatgcagaagcaccgcgtggtggcatggctgtcgcagcacaacttcccccacggcgtcgtctccttctgcgacggcctcacccacgacccactacgccagaaggcaatgtttctccagagcctggttcaggaggtaggactgaacatcgtggccggttatgggtctcccaaagatgtggctgtatacacggcgctggggctgtccccgagccagacctacatcgtgggccgtgccgtgcggaagctacaggcgcagtgccagttcctgtcagacggctatgtggcccacctgggccagctggaagcgggctcgcactcgcatgcctcctcgggacccccgagagctgccttgggcaagagcagctatggtgtggctgcccccgtggacttcctgcgcaaacagagccagctgcttcgctcgaggggccccagccaggcggagcgtgagggcccgggaacaccacccaccaccctggcacggggcaaagcacggagcatcagcctgaagctggacagcgaggagtgaggcccacaccagcctggacctgggttatttattgacacacccaaggggcccgaggggctgcgtgtgggaggctggggacccagacttttggccccagcgctggcccccccagccccacaccctatatctccgtgtgctcctcggtgttacttccctttcatatgaggggacccagcgccggggggagggaggagggcgtgggcatgggcgcagaggcttttccagtgtgtataaatccatgaaaataaacgccacctgcaccccaaaaaaaaaaaaaaaaaaaaaaa

SEQ ID NO: 116307 - DNA, 1000 bp, Homo Sapiens
cgtgtacaacagcctggccaagaagtacaagggccaaaagggcctggtcatcgccaagatggacgccactgccaacgacgtccccagcgaccgctataaggtggagggcttccccaccatctacttcgcccccagtggggacaaaaagaacccagttaaatttgagggtggagacagagatctggagcatttgagcaagtttatagaagaacatgccacaaaactgagcaggaccaaggaagagctttgaaggcctgaggtctgcggaaggtgggaggaggcagacgccctgcgtggcccatggtcggggcgtccacgccgaggccggcaacaaacgacagtatctcggattcctttttttttttttttaattttttatactttggtgtttcacttcatgctctgaatactgaataaccatgaatgactgaatagtttagtccagatttttacagaggatacatctatttttatcattatttggggtttgaaaaatttttttttacaccttctaatttctttatttctcaaagcagataattcttctgtgtgaaaatgttttctttttttaatttaaggtttaaaattccttttccaaatcatgttgattttgctctttgctttttcgttgtctgagaaattgttggcgtagatttggcttctggtatgtgtttctgattgcttcctgttgagcacaaagtgagagctgccactgagcagccctgccaggggtgctgtttcaggctgggcatcgccaggcggcctccctgcaaaccaagggctgggggcaaaggggcatgatccagggtcccccagggtgggctcagctccagggagaggccacccacgtggcagccccacctcttgagagcccccagtgccggagcagaaaggaccctggacccagaggcagatactgcggggtggtagaaaaggtagagtaggctgtggcaatggaataaaacacgattaaaaacgttaaaaaaaaaaaaaaaaaaaa

SEQ ID NO: 116308 - DNA, 1000 bp, Homo Sapiens
ctctggggggagggggagatataaggagacaccttctttctgggctcaagtatcctgccactctgtcatgtcctgctgatggaaggtgcccctgttccctcattctaccctctttttcctgctaatcctgtcataatgaatgtagcttctcagttcactgtatatgattcggtattgggggtttggaggcacccagaccctggcaatattatgtgtccctttggaccagtctcccaagaggagaggggcaggcaggaaagagtggggatcctaaggttactacagggggctcagtgtcatccacaacttcctatattagggataaaacatataggtgcacaagagctggggtatagcccataggtggtggagagaaaagtggtcagtccttcttgggcctggaggttagcagtcaagtttctctgctttcactgctcgctcgctctctcctgcaatgattgatgatcactccgtggatagagaggcacactgtcagaggtgaccggagaactgagttgcaaaatatattaagatctggtagaggtaccagcttcctttccagctggagaggccccaacactggatggttctgtagggagcctagggagcctggtcatcaacttgcaatacctcacagagccagttcacatcccactctgagctcccacgagaaacactgcttctccaggcccggggttgttggggagagaggcagaggcagctggagcgccgttctctcctgctgggacaccgcttgggctttggtattgactgagtggctgacagttatcttccaaccccaactggcttgggggcaggacaagggctaggcttgatggtggccaggcttgcctgctccccacctgggatgcccctgctctggacctctcatttctcttcattggtttatttttcaatgcatctttaatttgtaaagaaataaaataaattaagatgtaaaaaaaaaaaaaaaaaaaaaaaaaaaaaaaaaaaaaaaaaa

SEQ ID NO: 116309 - DNA, 1000 bp, Homo Sapiens
ctctgcagtcctccggggtgggtgggtgggcagggaggggctggggcaggctctctcctctctctctttgtgggttggccaggaggttcccccgaccaggttggggagacttggggccagcgcttctggtctggtaaatatgtatgatgtgttgtgcttttttaaccaaggaggggccagtggattcccacagcacaaccggtcccttccatgccctgggatgcctcaccacacccaggtctcttcctttgctctgaggtcccttcaaggcctccccaatccaggccaaagccccatgtgccttgtccaggaactgcctgggccatgcgaggggccagcagagggcgccaccaccacctgacggctggggacccacccagcccctctcccctctctgctccagactcacttgccattgccaggagatggccccaacaagcaccccgcttttgcagcagaggagctgagttggcagaccgggcccccctgaaccgcaccccatcccaccagccccggccttgctttgtctggcctcacgtgtctcagattttctaagaaccaaaaaaaaaaaaggaaaaaaaacacaaaacaacaaaaaccaaaaaaaaaaaaaatcacaaaaacaaaaaaactataaaaaagaaagaattaaaaactttcagagaattactatttactttattaacttacggatttattatataaatatatattcacctagcaacatatctctgccgtctctcctgctctcataatgaagacatagccgattctctgcccgggccccttgctgatgctcctccgggtctgcgtcgggcgtgggtctctggggaccctccagaggtggaggtgggctgatggcctggctgcctggtggttgatggttttgctccccctaccttttttttttgagtttattctgattgattttttttcttggtttctggataaaccaccctctggggacaggataataaaacatgtaatatttttaagaagg

SEQ ID NO: 116310 - DNA, 1000 bp, Homo Sapiens
cttcgtgtaccagctgatgatcggctgccacctggagcagcccccaccctccaacgaggaagagaatgtgaagctggcccatgtgaagcacaaggagcagatctgagtgggcaggggccatctccccactccgctgccctggccttgagcatccactgactgtccaagggccactcccaagaagcccccttcacgatccaccctttcaggctaaggagctccctatctaccctcaccccacgagacagccccttcaggatttccactggaccttgcccaaatagcaccttaggccactgcccctaagctggggtggaaccggaatttgggtcaatacatccttttgtctcccaagggaagagaatgggcagcaggtatgtgtgtgtgtgcatgtgtgtgcatgtgtgtgcatgtgtgtgcaggggtgtgtgtgtgtggggggggttcccagatattcagggcaagggaccagtcggaagggattctggctattgggggagcccagagacaggggaaggcagcctgtccatctgtgcataaggagaggaaagttccagggtgtgtatgtttcaggggcttcacatggaggagctgcagatagatatgtgtttctgtgtatgtgtatgtctgcctttttttctaagtgggggcttctacaggcttttgggaagtagggtggatgtgggtagggctgggaggagggggccacagcttaggtttggagctctggatgtacatacataagtaggagcagtgggacgtgtttctgtcataatgcaggcatgaagggtggagtgaagtcaggtcataagtttcatgtttgcttttgttttgttttgtttttaatgtatgtagcagatgttacagtcttagggatccgggatgggagaccccactttagaaagggtcgtcactcctttaatcctctactcaacaatgtactcttttacttttatattaaaaaaaataaaataaatatgtgcctaaaaaaaaaaaaaaa

SEQ ID NO: 116311 - DNA, 1000 bp, Homo Sapiens
atgtgacatctttttaaaaaaaataacaacaaaaaaaaaatgagagaaaagctaaaaaaaaaaaagtaaggggtgagcagttaatggtattcattccacatacaatatctgtgtaaaacgatttcctgtagaagtagctttaatggtttttgctctagaataccgtaggtctatccttagagcactcacgccatgctttcttccctgggttttaaacttcatataactttcagaaattggagagcaaaaattttgcttgtcactgcacatcaatataaaaaagcttatttaacttatcaaaacgtatttattgccaaactatgcttttttttgttaattttgttcatatttatcgggatgacaaatccatagaatatattcttttatgttaaattatgatcttcatattaatcttaaaattttgtgacgtgtctttttcctttttttccacagttttaatatattattcttcaacgacattttttgtaactttacacttttttggttattttattttaaaaaaatgaaaaattaatttaaaaaaatgcaaaaaactgttggattatttattttagaaattcccccctttgtgttggactgcaaattgagtttctttctctttaggcctttcacaactaggactgagaatgtatgtaaaagttctgtgacagtacagaaggaaaacaactttttatgtatagcttctaaaaggggaaaaaaaaaaaaagagaaaccctttgacttccacgtgcccatctcaagacattccactcacagatttgaggttctggattccaggtctggagttttccaatgttaatgtaaacagaactggcacacacacattaagatgaatgtaattattattcctcttgctggtcactaccgtcgctttctatttctctttctttgtgtgaatttatttaaaagaaaaaaaaactttttgtaacgactatttgcagtttaaaaatcaataaaccccgttttttcaagaaacatt

SEQ ID NO: 116312 - DNA, 1000 bp, Homo Sapiens
atctctcatcctccagtaccttgcttcttactgataattttgctggaattcctaacttttcaatgacattttttttaactatcatattgattgtcctttaaaaaagaaaagtgcatatttatccaaaatgtgtatttcttatacgcttttctgtgttataccatttcctcagcttatctcttttatatttgtaggagaaactcccatgtatggaatcccactgtatgatttataaacagacaatatgtgagtgccttttgcagaagagggtgtgtttgaaatcatcggagtcagccaggagctgtcaccaaggaaacgctacctctctgtcccttgctgtatgctgatcatcgccagaggtgcttcaccctgagttttgttttgtattgttttctgacagtttttctgttttgtttggcaaggaaaggggagaagggaatcctcctccagggtgattttatgatcagtgttgttgctctaggaagacatttttccgtttgcttttgttccaatgtcaatgtgaacgtccacatgaaacctacacactgtcatgcttcatcattccctctcatctcaggtagaaggttgacacagttgtagggttacagagacctatgtaagaattcagaagacccctgactcatcatttgtggcagtcccttataattggtgcatagcagatggtttccacatttagatcctggtttcataacttcctgtacttgaagtctaaaagcagaaaataaaggaagcaagttttcttccatgattttaaattgtgatcgagttttaaattgataggagggaacatgtcctaattcttctgtcctgagaagcatgtaatgttaatgttatatcatatgtatatatatatatgcactatgtatatacatatatattaatactggtatttttacttaatctataaaatgtcgttaaaaagttgtttgtttttttctttttttataaataaactgttgctcgttaaaaaaaaaaaaaa

SEQ ID NO: 116313 - DNA, 1000 bp, Homo Sapiens
caccctgctagctgtgtacaactcctggaagaacaacaagttctccaacccatggtgctatgagaactttatccaggctcgttccctgcgccgggcccaggacattcgcaagcagatgttaggcataatggacagacacaagctggatgttgtttcctgtggcaagtccacagtccgagtgcagaaggccatctgcagtgggttcttccgtaatgctgccaagaaagacccgcaggagggttaccggacactgatcgaccagcaggtggtctatatccatccttccagtgccctcttcaacagacagccagaatgggtggtgtaccatgagctggtgctcaccaccaaggaatacatgcgtgaagttaccaccatcgaccctcggtggcttgtggagtttgccccagccttcttcaaggtctcagacccaactaagctaagcaaacagaagaagcaacagcgtcttgaacccttgtacaaccgctatgaggaacccaatgcctggagaatatctcgagctttccgacggcgctgaaaggcaagattgttcctttgcctctccagcagcagtagccagggcttggacttatcgatgacaggctggtcctgaggatacagctgtcccgtgactgactgtcttaactgagcattttctcaactcgactctcatttcttccctgctggtaaaatagaaacagggatttaaacctggctttggcaagagcctgcagcctccatcaccccaagtccttgggcccagttgggagctcatatctaacacagagacacattgcatcaacttcaagaaagggacaatttgtgcagctccaggatgggaaggtggagtgggtgagcatcttgtgcagggacatggtgagtgccctgatgccccagctagcaggagctactgtgctcatctaaagtgtttgccccacttcccaccccgtctccagcccctgtactttggcttgacctcgtggaaatatttattttcttaagg

SEQ ID NO: 116314 - DNA, 1000 bp, Homo Sapiens
ctcttcccagccccgcctcagatcccatctcggccagttcggatccccccagggattcccccaggagtgcccagcagaagaccccctgctgcgcccagccggcccaccattatccgcccagccgagccatccctgctcgactaggcctcgaggggggcgtgctctcgggggggcctcacgcacccgcggcgcaggagcttcagtggtctggggccctccgccgcccctatgctgggaccaggctcccagtgggcagccctggcctcttccttaacgctggccccggtccagggccggcccctgtgcctggctggacaccgcactgcgcaaaggggccctggagctccaggcagggggcgctggggtgttgcactttgggggatggagtctcagggtggcagaggggggaccagaacccttgacaccatcctgaatgaggggtccagcctgggggggactctaccaaggtcttcttgggctgggaaagcccatgtagggcaggccttctataagtgcgggcaccaagggcgcctacatccccaggccttgctggggtgcaggggtatatcaacttcccattagcaggagctccccagcggcaagcctggcccagtgggctcggtagtgcccagctggcaggcctgaggtgtacatagtccttcccggccatattaaccacacagcctgagcctggcccagcctcggctgccagaggtgcctttgctaggcccggagccgttggcccgggccggccttgccctattcctctcctcctcctcctcctgggtcccccagggtggctgggcttgggctatgtgggtggtggtggcggggggtcttgggggcctctcagctcccgcccatgcctccctgatgggtgggcccagggcggcctctctctgaggagacctcacccactcctcgctcagtttgaccactgtaagtgcctgcactctgtattctattaataaactaaaataaagggaagacgctgctggtg

SEQ ID NO: 116315 - DNA, 1000 bp, Homo Sapiens
tattaagacaaacaagaaaacgggacagcccatgattaatttgtacacagacagggaaactggcaagctgaagggagaggcaacggtctcttttgatgacccaccttcagctaaagcagctattgactggtttgatggtaaagaattctccggaaatcctatcaaggtctcatttgctactcgccgggcagactttaatcggggtggtggcaatggtcgtggaggccgagggcgaggaggacccatgggccgtggaggctatggaggtggtggcagtggtggtggtggccgaggaggatttcccagtggaggtggtggcggtggaggacagcagcgagctggtgactggaagtgtcctaatcccacctgtgagaatatgaacttctcttggaggaatgaatgcaaccagtgtaaggcccctaaaccagatggcccaggagggggaccaggtggctctcacatggggggtaactacggggatgatcgtcgtggtggcagaggaggctatgatcgaggcggctaccggggccgcggcggggaccgtggaggcttccgagggggccggggtggtggggacagaggtggctttggccctggcaagatggattccaggggtgagcacagacaggatcgcagggagaggccgtattaattagcctggctccccaggttctggaacagctttttgtcctgtacccagtgttaccctcgttattttgtaaccttccaattcctgatcacccaagggtttttttgtgtcggactatgtaattgtaactatacctctggttcccattaaaagtgaccattttagttaaattttgttcctcttcccccttttcactttcctggaagatcgatgtcccgatcaggaaggtagagagttttcctgttcagattaccctgcccagcaggaactggaatacagtgttcggggagaaggccaaatgatatccttgagagcagagattaaacttttctgtcatggggaaaaaaaaaa

SEQ ID NO: 116316 - DNA, 1000 bp, Homo Sapiens
ggagcatgtgagttccccatgcctaagatcgttcgtccatccaaccatgccaccatccagagcattgtcagggctgtgggcatcatccctggcatcccagagccctgctgtgttcccgataagatgaactcccttggggtcctcttcctggatgagaatcggaatgtggttctgaaggtgtaccccaacatgtccgtggacacctgtgcctgccggtgagaccactccagggtggaaagaagccacgcccagcagagctgccttctcggagccttctgcaaccaggacttgtggtgcagctgcagacacagagcacagctcatgggcaacatcactggggcccagagagagctgtccgccagtgcatcattagggggtctttcattgctagtgactagccccttaaatgccagcctgagtacctgaaggaatctgggaattagccctggcctgaaagtggcccatcattcatacccactgttctgaaggcttgaaaacaaaacatatccacaacattggcttgatgtgatcatcatctcataactgagcaagaagactatgcaaatcttagggcgctcgctccctgcacacggaaagaactctgtttaaatgctcagttcagaacactttgggccacatagtgattttggaaaacaggataatcgtggtgtaaatgagtgtttcctttcaaagtccactgcagagcttttatccatatggtatgcacatgtagccaatattggtttctttttcttaatatatatattttattttaaaacaacaaaaagggagggcgttgacaccattccccacagagatagtcatgctgagtgtgggttgtttaaacatgcatattgaaataacacatatagtaacgtgggaatactaaaaaataaccaagattttatatttttgtaaattatactttctatactgtagattgtgtatgttatgtgtttttatggaaagctaataaattaaaggtacagtggtatcttga

SEQ ID NO: 116317 - DNA, 1000 bp, Homo Sapiens
ccacatcagtccttccaatatgactaaccagaacacgaatgagtacctggagaagatcaaacagcgactgtttgagaaccttagaatgctgccgcacgcacctggggtccaaatgcaggcgattcctgaggacgccatccctgaggagagtggcgatgaggacgaagacgaccctgacaagcgcatctcgatctgctcctctgacaaacgaattgcctgtgaggaagagttctccgattctgaagaggagggagaggggggccgcaagaactcttccaacttcaaaaaagccaagagagtcaaaacagaggatgaaaaagagaaagacccagaggagaagaaagaagtcaccgaagaggagaaaaccaaggaggagaagccagaagccaaaggggtcaaggaggaggtcaagttggcctgaatggacctctccagctctggcttcctgctgagtccctcacgtttcttccccaacccctcagattttatattttctatttctctgtgtatttatataaaaatttattaaatataaatatccccagggacagaaaccaaggccccgagctcagggcagctgtgctgggtgagctcttccaggagccaccttgccacccattcttcccgttcttaactttgaaccataaagggtgccaggtctgggtgaaagggatacttttatgcaaccataagacaaactcctgaaatgccaagtgcctgcttagtagctttggaaaggtgcccttattgaacattctagaaggggtggctgggtcttcaaggatctcctgtttttttcaggctcctaaagtaacatcagccatttttagattggttctgttttcgtaccttcccactggcctcaagtgagccaagaaacactgcctgccctctgtctgtcttctcctaattctgcaggtggaggttgctagtctagtttcctttttgagatactattttcatttttgtgagcctctttgtaataaaatggtacatttct

SEQ ID NO: 116318 - DNA, 1000 bp, Homo Sapiens
ttacttcaatcattttcacaggcagccaacaagcaattaagagcagttataatagaggaagctgggggacccattttgcaccatgagtttgtgaaaaatctggattaaaaaattacctcttcagtgttttctcatgcaaaattttcttctagcatgtgataatgagtaaactaaaactattttcagcttttctcaattaacattttggtagtatacttcagagtgatgttatctaagtttaagtagtttaagtatgttaaatgtggatcttttacaccacatcacagtgaacacactggggagacgtgcttttttggaaaactcaaaggtgctagctccctgattcaaagaaatatttctcatgtttgttcattctagtttatattttcatttaaaatcctttaggttaagtttaagctttttaaaagttagttttgagaattgagacacaatactaatactgtaggaattggtgaggccttgacttaaaactttctttgtactgtgatttccttttgggtgtattttgctaagtgaaacttgttaaattttttgttaactaaatttttttcttaaaataaagactttttcacaatgactggcacagattactcagcaaaagatagcaaaacgggtggttgaagataattcattttaatcgtaatgtattttagtgtgaatttaaaaatttcatacatcaaatctatgatctcccttatattcttatgatgaggctaaataaaagtctaataaaaatgttaaatatgtgaatggtggaaatggtgactagcagcacacattctgggaagcatcaaatagacacacggccccagccacctgcaacttatgtgcactgttgtaaaccattcagaattttcctgctaggcccttgatgctggagtcacatctgttgatagctggagaactttagtttcaagtactacattgtgaaagcaattattttgtttctcgtttttataaaatgctgacttaaactttt

SEQ ID NO: 116319 - DNA, 1000 bp, Homo Sapiens
gagctgaagagctggggagaatggggctgggcccacccaagcaggaggctgggacgctctgctgtgggcacaggtcaggctaatgttggcagatgcagctcttcctggacaggccaggtggtgggcattctctctccaaggtgtgccccgtgggcattactgtttaagacacttccgtcacatcccaccccatcctccagggctcaacactgtgacatctctattccccaccctccccttcccagggcaataaaatgaccatggagggggcttgcactctcttggctgtcacccgatcgccagcaaaacttagatgtgagaaaaccccttcccattccatggcgaaaacatctccttagaaaagccattaccctcattaggcatggttttgggctcccaaaacacctgacagcccctccctcctctgagaggcggagagtgctgactgtagtgaccattgcatgccgggtgcagcatctggaagagctaggcagggtgtctgccccctcctgagttgaagtcatgctcccctgtgccagcccagaggccgagagctatggacagcattgccagtaacacaggccaccctgtgcagaagggagctggctccagcctggaaacctgtctgaggttgggagaggtgcacttggggcacagggagaggccgggacacacttagctggagatgtctctaaaagccctgtatcgtattcaccttcagtttttgtgttttgggacaattactttagaaaataagtaggtcgttttaaaaacaaaaattattgattgcttttttgtagtgttcagaaaaaaggttctttgtgtatagccaaatgactgaaagcactgatatatttaaaaacaaaaggcaatttattaaggaaatttgtaccatttcagtaaacctgtctgaatgtacctgtatacgtttcaaaaacaccccccccccactgaatccctgtaacctatttattatataaagagtttgccttataaattt

SEQ ID NO: 116320 - DNA, 1000 bp, Homo Sapiens
aaactcagagagggtcttcgttgctcagtcagtcaagttcctcggagatctgcctctgcctcacctaccccagggaacttccaaggaaggagcctgagccactggggactaagtgggcagaagaaacccttggcagccctgtgcctctcgaatgttagccttggatggggctttcacagttagaagagctgaaaccaggggtgcagctgtcaggtagggtggggccggtgggagaggcccgggtcagagccctgggggtgagcctgaaggccacagagaaagaaccttgcccaaactcaggcagctggggctgaggcccaaaggcagaacagccagagggggcaggaggggaccaaaaaggaaaatgaggacgtgcagcagcattggaaggctggggccgggcaggccaggccaagccaagcagggggccacagggtgggctgtggagctctcaggaagggccctgaggaaggcacacttgctcctgttggtccctgtccttgctgcccaggcagcgtggaggggaagggtagggcagccagagaaaggagcagagaaggcacacaaacgaggaatgaggggcttcacgagaggccacagggcctggctggccacgctgtcccggcctgctcaccatctcagtgaggggcaggagctggggctcgcttaggctgggtccacgcttccctggtgccagcacccctcaagcctgtctcaccagtggcctgccctctcgctcccccacccagcccacccattgaagtctccttgggccaccaaaggtggtggccatggtaccggggacttgggagagtgagacccagtggagggagcaagaggagagggatgtcgggggggtggggcacggggtaggggaaatggggtgaacggtgctggcagttcggctagatttctgtcttgtttgtttttttgttttgtttaatgtatatttttattataattattatatatgaattccaaaaaaaaaaaaaaaaaaaaa

SEQ ID NO: 116321 - DNA, 1000 bp, Homo Sapiens
ggagctccaggcacagaccaggggaggggatatttaggggctccccttacaatccacaatgagcaattgcttctccaaggcctggagctattctggtaccttccccatggaggacactgaaaaggctgggttggggacagggagtatcactccataagtgatcctaaaaggtagcctcttcataggaacccaggaggacaaaaccaccatgcattaagatttatttattgtatttaaacctggtgagaggacaagtgaggtctgctcagaccttgtaggcttctatcaaaacagcaccctgcttgctcaccaggcctagagaatggctgtaggtggccgctgacaagtgcctttagttgaagagcacatttctttcatctctcttgtccatacctgatagacacattcctctctgccaccttccttcagggaggacccgccctctgcagactgggcttagcgtgagcaggcacttcccatgtacgtgccaagggtaagctggcctgctgagcccagggcgacagaggggcactggtttacactttgccgggaccatcagggccgccaagcaggtcaggggctgggggctgggggctgggctgctggctttgctttctctgggtcttcaattagaatgtggctggcccatattggtttgtgtttaaatgctgtacttactacaagaaggatcttttttcaagctgtacatttataaaaacagatcatatactgtatatataaaaatcttgagatggtagaaacatgtatgaatgtactaagtagtattccactgtactcattcataaggtaggttttcttacaaaactcacaccaggtacttaaagatgtgctctgcttttttccaactacggagtgtcactgctttctaggtcagtccctgcagactcttctcaactctttccctataggaaacttactccgcgtcctgcccccacctcctaaataaataaaggaatcggcgaacaaaaaaaaaaaaaaa

SEQ ID NO: 116322 - DNA, 804 bp, Homo Sapiens
gcgcagtgcatcctgggttggcgtagccatggcgtctcgtgtcctttcagcctatgtcagccgcctgcccgcggcctttgcgccgctgccccgggtccggatgctggccgtggcccggcctctcagcaccgctctctgctccgcggggacccagacgaggctcgggactttgcagccggccttagtgctcgcgcaggttcctggtagagttacacagttgtgccgccagtatagcgacatgcctcctttgacgttagagggcatccaggaccgtgttctttacgtattgaaactctatgacaagattgacccagagaagctttcagtaaattctcattttatgaaagacctgggcttagacagtttggaccaagtggagattatcatggccatggaagacgaatttgggtttgaaattcctgatatagatgctgaaaagttaatgtgtccacaagaaattgtagattacattgcagataagaaggatgtatatgaataaagtatcagaccctttggctttgctgagagaggactcagatgatagtgacgaatgtctggcagtgaggacacattttggcattcttgctgactctgacagagtgattctgatggacttgtatttaaattgtatgtgttttactctttgaaaataaatctataaaaccaaaaaaaaaaaaaaaaaaaaaaaaaaaaaaaaaaaaaaaaaaaaaaaaaaaaaaaaaaaaaaaaaaaaaaaaaaaaaaaaaaaaaaaaaaaaaaaaaaaaaaaaaaaaaaaaaaaaaaaaaaaaaaaaaaaaaaaaaaa

SEQ ID NO: 116323 - DNA, 1000 bp, Homo Sapiens
gctccctgccagcttcccccctgaggttgtgtatcatattatctgtgttagcatgtagtattttcagctactctctattgttataaaatgtagtactaaatctggtttctggatttttgtgttgtttttgttctgttttacagggttgctatcccccttcctttcctccctccctctgccatccttcatccttttatcctccctttttggaacaagtgttcagagcagacagaagcagggtggtggcaccgttgaaaggcagaaagagccaggagaaagctgatggagccaggacagagatctggttccagctttcagccactagcttcctgttgtgtgcggggtgtggtggaattaaacagcattcattgtgtgtccctgtgcctggcacacagaatcattcatacgtgttcaagtgatcaaggggtttcatttgctcttgggggattaggtatcatttggggaggaagcatgtgttctgtgaggttgttcggctatgtccaagtgtcgtttactaatgtacccctgctgtttgcttttggtaatgtgatgttgatgttctccccctacccacaaccatgcccttgagggtagcagggcagcagcataccaaagagatgtgctgcaggactccggaggcagcctgggtgggtgagccatggggcagttgacctgggtcttgaaagagtcgggagtgacaagctcagagagcatgaactgatgctggcatgaaggattccaggaagatcatggagacctggctggtagctgtaacagagatggtggagtccaaggaaacagcctgtctctggtgaatgggactttctttggtggacacttggcaccagctctgagagcccttcccctgtgtcctgccaccatgtgggtcagatgtactctctgtcacatgaggagagtgctagttcatgtgttctccattcttgtgagcatcctaataaatctgttccattttgatgacaaaaaaaaaaaaaaaaaaaaa

SEQ ID NO: 116324 - DNA, 1000 bp, Homo Sapiens
attcccttcaagatataggcatggaccaccaagctcttctaaaacaatttgatcacctaaaccacctgaatcctgacaagtttgaatccacagatttagatatgctaatcaaagcggcaacaagtgatctggaacactatgacaagactcgtcatgaagaatttaaaaaatatgaaatgatgaaggaacatgaaaggagagaatatttaaaaacattgaatgaagaaaagagaaaagaagaagagtctaaatttgaagaaatgaagaaaaagcatgaaaatcaccctaaagttaatcacccaggaagcaaagatcaactaaaagaggtatgggaagagactgatggattggatcctaatgactttgaccccaagacatttttcaaattacatgatgtcaatagtgatggattcctggatgaacaagaattagaagccctatttactaaagagttggagaaagtatatgaccctaaaaatgaagaggatgatatggtagaaatggaagaagaaaggcttagaatgagggaacatgtaatgaatgaggttgatactaacaaagacagattggtgactctggaggagtttttgaaagccacagaaaaaaaagaattcttggagccagatagctgggagacattagatcagcaacagttcttcacagaggaagaactaaaagaatatgaaaatattattgctttacaagaaaatgaacttaagaagaaggcagatgagcttcagaaacaaaaagaagagctacaacgtcagcatgatcaactggaggctcagaagctggaatatcatcaggtcatacagcagatggaacaaaaaaaattacaacaaggaattcctccatcagggccagctggagaattgaagtttgagccacacatttaaagtctgaagtccaccagaacttggaagaaagctgttaactcaacatctatttcatctttttagctcccttcccttttctctgctcaataaatattttaaaagca

SEQ ID NO: 116325 - DNA, 1000 bp, Homo Sapiens
caggactcatgtctcaatgcccacagtgagcccaggcagcaggtgtcaccgtcccctacagggagggccagatgcagtcactgcttcaggtcctgccagcacagagctgcctgcgtccagctccctgaatctctgctgctgctgctgctgctgctgctgctgcctgcggcccggggctgaaggcgccgtggccctgcctgacgccccggagcctcctgcctgaacttgggggctggttggagatggccttggagcagccaaggtgcccctggcagtggcatcccgaaacgccctggacgcagggcccaagactgggcacaggagtgggaggtacatggggctggggactccccaggagttatctgctccctgcaggcctagagaagtttcagggaaggtcagaagagctcctggctgtggtgggcagggcaggaaacccctcccacctttacacatgcccaggcagcacctcaggccctttgtggggcagggaagctgaggcagtaagcgggcaggcagagctggaggcctttcaggccagccagcactctggcctcctgccgccgcattccaccccagcccctcacaccactcgggagagggacatcctacggtcccaaggtcaggagggcagggctggggttgactcaggcccctcccagctgtggccacctgggtgttgggagggcagaagtgcaggcacctagggccccccatgtgcccaccctgggagctctccttggaacccattcctgaaattatttaaaggggttggccgggctcccaccagggcctgggtgggaaggtacaggcgttcccccggggcctagtacccccgcgtggcctatccactcctcacatccacacactgcacccccactcctggggcagggccaccagcatccaggcggccagcaggcacctgagtggctgggacaagggatcccccttccctgtggttctattatattataattataattaaatatgagagcatgct

SEQ ID NO: 116326 - DNA, 1000 bp, Homo Sapiens
ttttcattttgattaacaggactagcttatcatgagagccctcaggggaaagggtttaagaaaaacaactcctctttcccatagtcagagttgaatttgtcaggcacgcctgaaatgtgctcatagccaaaacattttactctctcctcctagaatgctgcccttgacatttcccattgctgtatgttatttcttgctctgttatcttttgccctcttagaatgtccctctcttgggacttgcttagatgatgggatatgaatattattagacagtaattttgctttccatccagtatgctagttcttattcgagaactatggtcagagcgtatttggatatgagtatcctttgcttatctttgtagtactgaaaatttgccgaagtaactggctgtgcagaatgtaatagaagcttttcttattcttttattcttaagatcagtatctttttacagtattctttctacatgatccttttttgtacatttaagaatattttgattatattaaacaagactgctgattttgctactttttttaaggggtcttcaagtaagtaaaacatacatcgtagctagaagaaaaatgtaccttaaatttgcatcttccctctcatacccaagctgtaaacaattgaaatattttgtcttaaatcacttggttcaatacatgcttatttgttttaaaacctgtatcatcaaactctctctctaaatttaaaatgctgttgaatatgatacttttgaggagagagtgtgctcagaacttagacgggatttggtaggccaagtatgctaagtgtacaatatattttttaattttacacctgaaacaaagaaatgtggtcactaaaaataaaagtatatatgtaggaattaatgtactcttgctttgtcaagctgtttgctatagtttccaaggtattatgttactctaactctgaaaagtgatgtaatctggtagcaatgtagtagttcaaataaaggcatttacataat

SEQ ID NO: 116327 - DNA, 1000 bp, Homo Sapiens
cagaagttttaagatacgtggacagttcaaaggctgttattgagacagcagatagagccaagctgcaacctatagctttaagctgtgtactgaatattggtgcttgtaaactgaagatgtcaaattggcagggagcaattgacagttgtttagaggctcttgaactagacccatcaaataccaaagcattgtaccgcagagctcaaggatggcaaggattaaaagaatatgatcaagcattggctgatcttaagaaagctcaggggatagcaccagaagataaagctatccaggcagaattgctgaaagtcaaacaaaagataaaggcacagaaagataaagagaaggcagtatatgcaaaaatgtttgcttagaaaggattcagttttgcttattgtgtgttgattgtataaatgcaataagaaaatgtaaaggtttttgtctatgaatatgatccctaatgtgtttcttttgacaccttagttccttactgtttacagtttaggagtactgataggggttcatgcttaataaacatgtcacaatacagtaagtaaagtggttttgtttgtttctttgagatggagtcttgctctgtcacccaggctggagtgcggtggcgcaatctcggctcactgcatcctctgcctcccgggttcaagcaattctcctgcctcagcttcccaagtagctgggattacaggcacgtgccaccacgcccagctaatttttgtatttttagtagagatggggtttcaccatattggtcacgtcacgttggtcttgaactcctgaccttgtgatccaccccgccttggcctcccaaagtgctgggattacaggtgtgagccaccgtgcccggccaagtaaaatgttttttaaaatggttatgtgcattattcataaaaaataatggtgtccagtctttttaaacttgtaaagacacatcttattgaataaagagatgagagcttaagtttgtaaaaaaaaaaaaaaaaaa

SEQ ID NO: 116328 - DNA, 1000 bp, Homo Sapiens
catgtaattttttttgctgtttaccaatgaactttgccctgttgtggttttgggggatcagaaggattcctaaactgtcatttcatttattggtaggtcatgattgctgagggttttgctttggatttttcatacctataaagtcaatcttgagttgatcagagaaagggaaacttactcctaataaacagactcagaacagaagggacatatgcataaatcaggataccatctcattaatttacaaaggataatctttcttttcattgacaacacctacacccacctgttttccagtgttcttctctctaaacagcaaagccaaagcactctgcacaccaaatcacctgttcagaggtttatgcatgagcatatttcttttaggccgtggtgaagttgataaaccacccctgctttgtaacaaaattattttaaagtgactggaattatctagtccccagattgatcatctcccctggcaacgtgactctgttttttgtgtgtgtttccatgctgactagtcccctactgttaatatcactactaattaggctataaccaggtctttcctggcctgagaaatattctcttaaaatgacctttgttttaatctcattcatgatgttgattttttttcaatgtggtgcaatatatacaataaaatttgtcataactattttaagtgtacagttcagtatattacatatgttcataagttgtacaaccatcaccaccatccatcttcagaattattttcatcttatacaattgaaactgtattcattaaacaataactgtctattccctcttttccccagcctctggcaaccaccattctgcttcatgacattgattttattcacttaacatcagattttggggggatgccctctctcctatgtatggtctacacattctgattttttttttagattgaataaaatttgtaaatcattattttcatttcataagtaaaaaaaaaaaaaaaaaaaaaaaaaaa

SEQ ID NO: 116329 - DNA, 1000 bp, Homo Sapiens
acaccaggaggactgacagcgaagatcgagctcaggttcgccacatagatcccgtgcaggagccgcatgggtcctgtgcaggacccctagcagtggtgggctgagcccaggtctaggtttctgtgggggacattgaatctcccagtgttcagtctcccaggactctgctgcctcagccagagcctccatatgcttgaagtgctgattacctacaaatgatttcagatcatgtttgctaaagagaaatctggaagtgtgagatctgtaagaaatgaaagaaatgactcttggagtcaagagatctggaaatcttttaatcagttaaattgtgcagcaatagatttttaactttaactgaccatttaagttttttaataagttttttacaaagaaaagttaaacattaaaaagaattacagctttctgtcttctctatcatggaatgattttttttattgaatctccagatttgtatttgacagcttggtgggaagggaagcacactctgctgttctggaatcttatgcccagggtttttcacttctccccacatctccctttccacttgccagtgttgtgtagttagaacctgaaccactaacttctaggggcctttggtctgccctaccttaacccaaatgaaagtaaatccctttccccttagccaaaataaggttgggttttctaaaaaaatagtctatattagggaacaacaacagcaaattagacaaaacccagaaagcacaaagcatgaggtggagttactgtgcccaaagtcctcactcagaccagtgcccctccagttcagttgtctatgtattaccttccttaccttcataatgtttgccaggcttctgtacttctagtacttgagttacttaatatttttaaaaacaaaccttttaagtttaaatggatttttaagtgaaattttacacttaacatagatggaaagtaactaaaaataaatacaagaaaaacaaaaaaaaaaaaaaaaaaa

SEQ ID NO: 116330 - DNA, 1000 bp, Homo Sapiens
ccacacagtaacatttagactaaatatgctctgagtaaaggagaaatgaaaaaatattaaatcaagagtgaacatgtacacaaagtgcaattggaagtgggctacaaatttagcccccagcttcccagcaggcaactcaaagaggtaactgaggtaaaatgttccagctcagaagcattggatcttggataaaaagcctacatgatgcaaactgtggcaactgagatgtcagatctcaagatctcaaattgtacttgtgggagcacagtcagtgaccccagatgaccttgactgacctaaaagttgtgggggaagtcggatgtcagagccttaacaccagcaggtgaccatccaacctggggcaatgcctgcctgttcaccacttagcctctttctggcaagtcattagaatgtcctccatcttcattggctgcaacttgatgagctacagcctctttcctaacttcctttatgatgctagtttaggttggttataccagcttggaagtatgcttagattaagttacagcagatacacaaattagatgcaagtaaaaaaaatcagaatttctgtagtagaaactacgaaaaataaaaaggaaagtttttactttttgggtatttttttacgaataagaaaaagtgagcgttaatcagttcaaaaggaggtactgctgtgtaatgggctttgtacgttccttctcatgtcacttacgtcactacttcgccatcaaattgaacaagcttttaattagatcctgaaaattcactatgctagtagtttattggtagtattatattttgagtagaactctgattttccctagaggccaaattctttttatctgggttaatttcttttaaacataacaatgttaatgctgaattgtatattaaatcccatttctaaaaaccacacaattttttctcatgtaagttgagtggaatgtggttagttaactgaatttggaatgttcatataaataatttgttgctgctc

SEQ ID NO: 116331 - DNA, 1000 bp, Homo Sapiens
cgtactgagcgctttgggcagggaggtgcggggcctgtgggtggacagggtcctagaggaatggggcctggaactccagcaggatatggtagagggagagaagagtacgaaggcccaaacaaaaaaccccgattttagatgtgatatttaggctttcattccagtttgttttgtttttttgtttagataccaatcttttaaattcttgcattttagtaagaaagctatctttttatggatgttagcagtttattgacctaatatttgtaaatggtctgtttgggcaggtaaaattatgtaatgcagtgtttggaacaggagaatttttttttcctttttatttctttattttttcttttttactgtataatgtccctcaagtttatggcagtgtaccttgtgccactgaatttccaaagtgtaccaatttttttttttttactgtgcttcaaataaatagaaaaatagttataatattggatcttcaactttgccattcatgcttctatgcatattaggctacgtattccacattgaaagcatgagagtgtctaggcctttgaatggcatatgccatttctgggaaatgcatctggaggctaagtattgctttctacaaataattgccccctttgttttaaaaagaagaaatgcatattgaagtagtttgatgatttgtttggcatataggaagcacgctggtgctaagtattttttaaatggttatgtaagcaaagctgaactgtaaatcttcaggaatatgtattaagattgtggaatgggtgtaagacaattggtagggggtgaaagtgggtttgattaaatggatcttttatggccctatgatctatcctttacttgaaagcttttgaaaagtggaaaggtcattttgttgcatttccccatttcttgtttttaaaagaccaacaaatctcaagccctataaatggcttgtattgaacttttacatttgaattaaagatgttaaacatgaaaaaaa

SEQ ID NO: 116332 - DNA, 1000 bp, Homo Sapiens
gggcatagtgctctatgtttaataaaggtttttatagatgttttattccatatgtcttcacaagtcaggacccacaattacccgtgttttgtttgaacagcagtgtcccatctggcttcgacccaacaaagttcattaacctgggatgaatggggttggcctgttggtgatttggatgctgttctgtgatctaaaacaactcttattgaattgtatttactccctaaacaacacttgacaggctgttgcacagggcttctatagatcagtgtgttaggaatgggaggccccttcctgcctgccttcccatattggtcccttgacattgacaaaagcacagtgactgtcagcagattcctttacttttgtttgtgggaggtaggaattgttttaatgcattttaaacagtgtttctgaaattggatggctggctaatagacactgaatcacccggagtgcttatcttaaaattgcagatttagggagcctgccaatttaacagtctcatcaggtgattcttttcaacagtaatgtttgagaattactgggttaaattgtgggaaagggtccagattttaaaggtgctttaaggttgccctctgccgatactgtttgtctttctactgtttcatcccctaacttcccccaaccctcaaattaaaactagaactatagatccacatgaacgcacgcctgagatttggccactcacctatgttttgggtggattgcctaggaaagcaagtcatatggccattgatagttctcatgtaattagttttgctcaccactagtacagatgacccgtttacacgtggcttccctcggaagccctcctcaacagtagctggtgtgaaagactaaatcagtagagttggaaaagctttataaccggtgtgtcatatgcttgctatttaaagctgtgtgttggttttgtttttctgccacattcactagttttttaataaatattttccaaaaatggataaaaaaaaaaaaa

SEQ ID NO: 116333 - DNA, 1000 bp, Homo Sapiens
tgagactgaccaagactgagcgggagcgagaagcccagctggtcaaggatcggcactcggccctgaggctggagagcctgtactcggacgaggaagatgagtctgcagtgggggctgacaagatccagatgacgtggaccagggacaagtacatgactgagacctgggaccccagccatgcccctgacaatttccgggagctggtgcacattaagccggaccaatccaatgtgcggcgcatgcacactgctgtgaagctcaatgaagtcattgtcacgcgctcccacgacgcccgcctggttctcctaaacatgcctggcccacccaggaacagtgagggcgacgagaactacatggagttcctcgaggtgctgaccgagggccttgagcgggtgctgttggtgcgcggtggtggccgtgaagtcatcaccatctactcctgagcccagtgtcatcttgtggcctggagtcgaggtcttggccaggacataacaagctgtggtctggggtaacagcctcttcccagcacccacctgccagccctgcttgcctggccctgtcctggacccagctttgctaggtctccttggaaaccaggcctgggcctcaaaatggagatggatcccaggtcttgtgggaccctgggatgtttggggactttactatctagcaccccagtaggcctgtcctggccagagaagactggtaggggccgagtggggtttgaaggcagccggcccggcccagcccaggagcgctatttattgcatatttattgtttggatgtcaccatcagagacgaagggaagggtagccagggagggagtccagcccagctgcctgcaggaagatctggctcagtctactatgggcagggccccccaccaagctgagccgaatggagacagctgagctgaggcctgactttttcaataaaacattgtgtagttctgggcaaaaaaaaaaaaaaaaaaaaaaaaaaaaaaaaaaaaaaaaaaaa

SEQ ID NO: 116334 - DNA, 1000 bp, Homo Sapiens
cagcgtactcattccatgtgagtgctgatgggcagatgcagcccgtgcccttcccccacgacgccctggcaggccccggcatcccgaggcacgcccggcagatcaacacactcagccacgggggggtggtgtgtgccgtgaccatcagcaaccccagcaggcacgtctacacaggtggcaagggctgcgtgaagatctgggacatcagccagccaggcagcaagagccccatctcccagctggactgcctgaacagggacaattacatgcgctcctgcaagctgcaccctgatgggcgcacgctcatcgtgggcggcgagggcagcacgctcaccatctgggacctggcctcgcccacgccccgcatcaaggccgagctgacgtcctcggctcccgcctgttatgccctggccattagccctgacgccaaagtctgcttctcctgctgcagcgatgggaacattgctgtctgggacctgcacaaccagaccctggtcaggcagttccagggccacacagatggggccagctgcatagacatctcccatgatggcaccaaactgtggacagggggcctggacaacacggtgcgctcctgggacctgcgggagggccgacagctacagcagcatgacttcacttcccagatcttctcgctgggctactgccccactggggagtggctggctgtgggcatggagagcagcaacgtggaggtgctgcaccacaccaagcctcacaagtaccagctgcacctgcacgagagctgcgtgctctccctcaagttcgcctactgcggcaagtggttcgtgagcactgggaaagataaccttctcaacgcctggaggacgccttatggagccagcatatcccagtctaaagaatcctcgtctgtcttgagttgtgacatttcagcggatgacaaatacattgtaacaggctctggtgacaagaaggccacagtttatgaggtcatctactaaacaagaactccagcagg

SEQ ID NO: 116335 - DNA, 1000 bp, Homo Sapiens
cgttttgaccacatatataccaagcccctagtcttagagataccctctgagacagagagccaagctaatgtggtagtgaaaatcgaggaagcacctctcagcccctcagagaatgatcaccctgaattcattgtctcagtgaaggaagaacctgtagaagatgacctcgttccggagctgggtatctcaaatctgctttcatccagccactgcccaaagccatcttcctgcctactggatgcttacagtgactgtggatacgggggttccctttccccattcagtgacatgtcctctctgcttggtgtaaaccattcttgggaggacacttttgccaatgaactctttccccagctgattagtgtctaaggaatgatccaatactgttgcccttttccttgactattacactgcctggaggatagcagagaagcctgtctgtacttcattcaaaaagccaaaatagagagtatacagtcctagagaattcctctatttgttcagatctcatagatgacccccaggtattgtcttttgacatccagcagtccaaggtattgagacatattactggaagtaagaaatattactataattgagaactacagcttttaagattgtacttttatcttaaaagggtggtagttttccctaaaatacttattatgtaagggtcattagacaaatgtcttgaagtagacatggaatttatgaatggttctttatcatttctcttccccctttttggcatcctggcttgcctccagttttaggtcctttagtttgcttctgtaagcaacgggaacacctgctgagggggctctttccctcatgtatacttcaagtaagatcaagaatcttttgtgaaattatagaaatttactatgtaaatgcttgatggaattttttcctgctagtgtagcttctgaaaggtgctttctccatttatttaaaactacccatgcaattaaaaggtacaatgcaaaaaaaaaaaaaaaaa

SEQ ID NO: 116336 - DNA, 1000 bp, Homo Sapiens
gtaccacatgcggatccacaaggaggaacggaagtacctgtgccctgagtgtggctacaagtgcaagtgggtcaaccagctgaaataccacatgaccaagcatacaggactgaagccataccagtgtcccgagtgtgagtactgcaccaaccgggctgatgcactgcgtgtgcaccaggagacccggcatcgagaagcacgggctttcatgtgtgagcagtgtggcaaggccttcaagacgcgcttcctgctgcgcacccaccttcgcaagcacagtgaggccaaaccctatgtgtgcaatgtgtgccaccgtgctttccgctgggctgctggcctgcgccatcatgccctcacccacaccgaccgccaccccttcttttgccgcctctgcaactacaaggccaagcaaaagttccaggtggtcaagcacgtacgcaggcaccaccctgaccaagccgacccaaaccagggtgtgggcaaagaccccaccacccccacagtgcacctgcatgatgtgcagctggaggatcccagccctcctgctcctgccgctccccacactggacctgagggctgaaagcctgccccacctcctgtataggaagagggtatggtctgagatgtgcagactgggaccagcgctagcctgaggagctcagagcctaaggaaagactggcttttggggtacaagggtgactagaaccttcctgggactctggctatagtactttgaaattatcacccatataaaagagggacatggactataacgttgatttcttattgctgtacattgcgtttttaacctgcaagttctcagtttcttcaccatcactccatcaaagtccctggctataagatctggattttacccactccatcttctctttccttcttactgtgtcaattcctattttctttcagaatcttctaaaaacagttgtatctaaccgcatgtgctgttgtgcctaatgctctataaagcatgttaaacagaaa

SEQ ID NO: 116337 - DNA, 1000 bp, Homo Sapiens
gcttttgccaagcttcaggttttgggtctagtaatactggttctgtgtttggtcaagcagccagtactggtggaatagtctttggccagcaatcatcctcttccagtggtagcgtgtttgggtctggaaacactggaagagggggaggtttcttcagtggccttggaggaaaacccagtcaggatgcagccaacaaaaacccattcagctcggccagtgggggctttggatccacagctacctcaaatacctctaacctatttggaaacagtggggccaagacatttggtggatttgccagctcgtcgtttggagagcagaaacccactggcactttcagctctggaggaggaagtgtggcatcccaaggctttgggttttcctctccaaacaaaacaggtggcttcggtgctgctccagtgtttggcagccctcctacttttgggggatcccctgggtttggaggggtgccagcattcggttcagccccagcctttacaagccctctgggctcgacgggaggcaaagtgttcggagagggcactgcagctgccagcgcaggaggattcgggtttgggagcagcagcaacaccacatccttcggcacgctcgcgagtcagaatgcccccactttcggatcactgtcccaacagacttctggttttgggacccagagtagcggattctctggttttggatcaggcacaggagggttcagctttgggtcaaataactcgtctgtccagggttttggtggctggcgaagctgagggcgtgtcagcaggcctttcgatccctgggaccaaccgcatcctcagcttcttccccgagaaatgctggagcaggctgttcagaccgacgttgccatcaaaacacatacacccagaaagaaacaacagaaaccaaaactcacaaggcgcatgattacttgttttatatttcatgttgggttttccctcccactattaaacagtctgtttccgtacaaaaaaaaaaaaaa

SEQ ID NO: 116338 - DNA, 1000 bp, Homo Sapiens
agcgagcggtcgcgctcccggtccccgagcaggcaccgcagtacctggaacaggtaatgacgggcacggcctccccacggcctgtccgggaaagaccaggacctgctcgagcctcctggccgctccttggccgctctccgtccacccctgcaaagccaagacccttctgcagccacgaatgtccacggagcccgccggcaggaaggaagacaccatgctttagagatccatctttctccactcaccgcagcgtacttggcacttcagtttcaaacacgtagtcctttaaaacttgatccgatagctttaatgcggccggtcctctctcagtcaggaaaattgcacagaccgacagtcgtgaggatggcagagctgctgcattcccccacacggggatttctgtgtctgcttggcgacctccctgcgtgcacggcctaggaggtgcacgggccaccatagtcacactggcactgaaaagaaagcgttgccctggtgattctttcccccccgtttgtaatgttaactgatcaggaagtgcagtttgggtgggatgccgaatcgtcgtgctgacattgagtcacggatgaggaaggtacaagtcctttaagatcaaaactcaaacgggccgttctttctaaggtgtcggtatgtggggagtggtacaaaatggtctgatgctccttcaaaaacattcactttttacaacgtcaaggaattaagcataaaaaagattggttaaaagctttggtttctagtaaaggttagtgtgtgtggtttttttaagaagctgttttgctaaattatttttacttggaatgtttcaaacagatttcaggctgcaaacttgttttataatcgtttgcttctccaagtgaagctcagaaatacctaaaaatagctgtaacgttcgcgttaggaaagatggtgtttattccagtttgcatttttatggtgaaataaaatccttttccaatgaactaaaaaaaaaaaaaaaaaaaaa

SEQ ID NO: 116339 - DNA, 1000 bp, Homo Sapiens
cccagaaccacccgtggatttcagagtaatggagaaggatcgagctaattgtcccttctacagtaaaacaggagcttgcagatttggagatagatgttcacgtaaacataatttcccaacatccagtcctacccttcttattaagagcatgtttacgacgtttggaatggagcagtgcaggagggatgactatgaccctgacgcaagcctggagtacagcgaggaagaaacctaccaacagttcctagacttctatgaggatgtgttgcccgagttcaagaacgtggggaaagtgattcagttcaaggtcagctgcaatttggaacctcacctgaggggcaatgtatatgttcagtaccagtcggaagaagaatgccaagcagccctttctctgtttaacggacgatggtatgcaggacgacagctgcagtgtgaattctgccccgtgacccggtggaaaatggcgatttgtggtttatttgaaatacaacaatgtccaagaggaaagcactgcaactttcttcatgtgttcagaaatcccaacaatgaattctgggaagctaatagagacatctacttgtctccagatcggactggctcctcctttgggaagaactccgaaaggagggagaggatgggccaccacgacgactactacagcaggctgcggggaaggagaaaccctagtccagaccactcctacaaaagaaatggggaatccgagaggaaaagtagtcgtcacagggggaagaaatctcacaaacgcacatcaaagagtcgggagaggcacaattcacgaagcagaggaagaaatagggaccgcagcagggaccgcagccggggccggggcagccggagccggagccggagccggagccgcaggagccgccgcagccggagccaaagttcctctaggtcccgaagtcgtggcaggaggaggtcgggtaatagagacagaactgttcagagtcccaaatccaaataaactagttttgttctt

SEQ ID NO: 116340 - DNA, 1000 bp, Homo Sapiens
catctgtcctggaaactgtagaattgaataaatcactgaaaatagaacacttcttggaggctttcttcagaactgaactagaaacaaggtttccaggctcccaggtcagtagaccaaaccaacttccttagatttttttttttaagctgtttgcagaaaactgggtggtagcgtgtctgaaccaaacggaagaatagccagcggagcatggactgttccagcacgggccagatggccagctgtcgagagcagccctgcccagattgcggtgggggctgtgccagcggctccgcagggcccttccaactctggagtgtctgtagttcttgtgaaaccaaaacgttgactacctgcctctttcctcgggcatcgacgtgctcatttccaaagatgatggtgcaggtgaccttttccatcgtgagctaagagaaggttaggaggcctgaggggcgggccttgtgtcccctcctccccctccacagcccctgaggtggagcttccctcacagaccccatctggtcgagcctacggctgcccagtgtacactcagtgatgcttataccaaatagggcatgtgcgctggtgtctgttggggacagccccatccctaccttggagtcggcagagaagcagcaataagcattaggcgaatgattgaaagggctgctgcgccaagaggccttcagtccccttaacgtggctttccaacttcctgacgaggctacaaaggctccgctcacaaaagaaagccaataatgtaaataaatagaaaacgaagcctccacgcgtggtttttaaagggggatgatgaatgtgacaccacccacagaatgcattagaatctggtttttctgtgctttgtcattttactctgataggaatttttgttacctaactctgtgcataacttatttaatgtactgtataaatgaaccaaaactgttaaatatgtatttagtttgttctacttaaagtagtcaataaaaaggctatattcctt

SEQ ID NO: 116341 - DNA, 1000 bp, Homo Sapiens
tccatctccctcatctccattctcagtttcttccccacaaaatttggaatcaaagcttttatgacgtttgccaattgcagaacttcttcagctaaggttaatttgacgctatgataaaactgagagatgtcaaaaagcctcttagaaattttaatcttgaaagacttttcagggtatctcattttttaggtgggggtggcaggtgtatttcttttttaacaaataaaaggcatttaagtaaaactaaaatgaaaaaagtaggccttctgacattgtgtacttggtggttctgtccctctgcctgtaacaaatctcatttttgttaccaagaactgtatgaaagaagtaaatccaccccgattctgtatgattaattccatctgtgtttgtcatttctgactggaaaacttcttactccataccttgttcgatatggaggacaaataattggattgtctgataagtctgccaataaactatccagaaatagcaagtgtaatagtccccactatacgaattttatggtttgtataaacactaacattttccccttctgtagttgtatgaaaaaacaaatattgttagcatagtagataaattgttatgaaataccagaaaaaaaaatctgtatcttttactgagaacacccaatacccagataaatgactgtatcaggatttcatttgcatgttagtccacagagttgcccagaaccctaaatttattcataagagaaaatattgattaattattggtcattcctcataagtgtagctgttgatgtgtgcgtctgattattgcttttttaattttatgaaaattgtgtaaaattacattttttttccaggggagaaaaaaacatcaaacaaaaacatctaaatcatcctttttgttctttttcagtttttaaccacttttaggttttccccttacagaaaccacagaaatattcccttagaataaaatagtatatttgtatttgaaaaaaaaaaaaaaaaaa

SEQ ID NO: 116342 - DNA, 634 bp, Homo Sapiens
cggctgagaggcagcgaactcatctttgccagtacaggagcttgtgccgtggcccacagcccacagcccacagccatgggctgggacctgacggtgaagatgctggcgggcaacgaattccaggtgtccctgagcagctccatgtcggtgtcagagctgaaggcgcagatcacccagaagattggcgtgcacgccttccagcagcgtctggctgtccacccgagcggtgtggcgctgcaggacagggtcccccttgccagccagggcctgggccctggcagcacggtcctgctggtggtggacaaatgcgacgaacctctgagcatcctggtgaggaataacaagggccgcagcagcacctacgaggtccggctgacgcagaccgtggcccacctgaagcagcaagtgagcgggctggagggtgtgcaggacgacctgttctggctgaccttcgaggggaagcccctggaggaccagctcccgctgggggagtacggcctcaagcccctgagcaccgtgttcatgaatctgcgcctgcggggaggcggcacagagcctggcgggcggagctaagggcctccaccagcatccgagcaggatcaagggccggaaataaaggctgttgtaagagaat

SEQ ID NO: 116343 - DNA, 1000 bp, Homo Sapiens
gttgtgcatataatccaagccagggagccctctttacgtgattcaaacccagaagagattgagattgattttgaaacactcaagccatccacacttagagagcttgagcgctatgtcctttcctgcctacgtaagaaaccccggaagccctacaccattaagaagcctgtgggaaagacaaaggaggaactggctttggagaaaaagcgggaattagaaaagcggttacaagatgtcagcggacagctcaattctactaaaaagccccccaagaaagcgaatgagaaaacagagtcatcctctgcacagcaagtagcagtgtcacgccttagcgcttccagctccagctcagattccagctcctcctcttcctcgtcgtcgtcttcagacaccagtgattcagactcaggctaaggggtcaggccagatggggcaggaaggctccgcaggaccggacccctagaccaccctgccccacctgccccttccccctttgctgtgacacttcttcatctcacccccccccgcccccctctaggagagctggctctgcagtgggggagggatgcagggacatttactgaaggagggacatggacaaaacaacattgaattcccagccccattggggagtgatctcttggacacagagcccccattcaaaatggggcagggcaagggtgggagtgtgcaaagccctgatctggagttacctgaggccatagctgccctattcacttctaagggccctgttttgagattgtttgttctaatttattttaagctaggtaaggctggggggagggtggggccgtggtcccctcagcctccatggggagggaagaagggggagctctttttttacgttgatttttttttttctactctgttttccctttttccttccgctccatttggggccctgggggtttcagtcatctccccatttggtcccctggactgtctttgttgattctaacttgtaaataaagaaaatatt

SEQ ID NO: 116344 - DNA, 1000 bp, Homo Sapiens
cccccagggattatgatagaaatatgaagccaccaagtctagacttgatggtgttcaagaataaataatactgattgcctccctagtccttgtccagctaactcagctgtttataattgaagggattcaacaaaattatctctagcatcaggtgctagacatggttagaatctcaccatggtttagtgactggtagatagctattaggtaggtagataaataaatgatgctagaggcaacaggtctagggttaaggattaaggcctgggaattggagtctcaccatggctccccttccttgtctggggcctggacacactgaggacaatgcggctatagcagatggccatggcagtcagtggcagcagaaagaggcagcagaaggtgaagaggttataggtggtctcttgccattgagccttgaagctgcctttggtgacacactgagtgaaagggactgggccagctcagtggaccgtgtggaacaggaacagctggagtggagttgaggactattagaactggttcccctcaccacccaacctacccacctatgtcatactgtctcctcccaattcatccttaattccaagtgaagcagcacagtgctgagaaacagttcatccatggtgccatgttaaagaagttggaaatatatcttgaaaatcctatcttccttttaggcttgaatatgatgctgaacagtaagtttgttaaatcttggaacttaaaacaatcctgctttctcaagtactattctaacattgcgctttataagggatgatatttctaccacctcactcatatttttagctgaaatgattttcctggtatgtctgttattttgtggaaaaagaaatattgtgtaaaatgggtgctgccaaaattccaggccattttgcagggactctgaagtgacctttagtagtaatagtcttatgtgcagtaactataatggtaaagaatgttaaataataaaatttaacattttccaaatgct

SEQ ID NO: 116345 - DNA, 1000 bp, Homo Sapiens
ccttcagtgcaatctgacgagctgcttcacagtaaacactcccacccacttgactcaaatcagacttcagatgtcctcaggtttgttttggaacagtacaatgcactctcctggctaacctgtgaccctgcaacccaggacagacgctcatgtctcccaattcattttgtggtgctgaatcagttatataactttattatgaatatgctgtgatcttcatttgatggaactgtgcaagaaaagaacaaggaaaaatggatgtttcgctgcaggattaagttacaattatcttctcagtgaaggtcatttgtgatggggtctaattcttattacttcaacaaatattgttttgacttggggggaggggctataaccctgctatttttcattgactctattgaactctttaggatgatgactgatcatacaaaacgtattataacattttcgtagcaaaattaaccttttttttttccagtcacagtatttgtgaaaagtaatgagccatagtacccagtcatgttaaatgaatattaaaagcatggagaggaaacatgaggaacaatgaatttcaacatatggcttcagaacatgaagatgttcttgtatggattatagtatctagtattcaaaaatgcctgcatctcttctcttatttattgtaagtttttaaatgtataaattgtcttatatttcttaacctcttttataaaaattttcctagaaggtttatactgccttcttgctttaaagcaattggtctaaaatatatgtaatcgtcttaattaaaaagttgcagtagggttgcttttagagtattatttttttgtaagggggtgggtgggacagtaaatttgtattgtctcgatgtacagtttaacggggatagagggggaataatgtccataccattgtgtgtggaggatttacagctaagctgtagttgcagagtacatgtacagtaatgaagttcactgtgtttataaattgaaaaggtacc

SEQ ID NO: 116346 - DNA, 1000 bp, Homo Sapiens
ggcgccactgcccagcctgcaggttgcagaagtgcttagatgctggcatgaggaaagacatgatactgtcggcagaagccctggcattgcggcgagcaaagcaggcccagcggcgggcacagcaaacacctgtgcaactgagtaaggagcaagaagagctgatccggacactcctgggggcccacacccgccacatgggcaccatgtttgaacagtttgtgcagtttaggcctccagctcatctgttcatccatcaccagcccttgcccaccctggcccctgtgctgcctctggtcacacacttcgcagacatcaacactttcatggtactgcaagtcatcaagtttactaaggacctgcccgtcttccgttccctgcccattgaagaccagatctcccttctcaagggagcagctgtggaaatctgtcacatcgtactcaataccactttctgtctccaaacacaaaacttcctctgcgggcctcttcgctacacaattgaagatggagcccgtgtggggttccaggtagagtttttggagttgctctttcacttccatggaacactacgaaaactgcagctccaagagcctgagtatgtgctcttggctgccatggccctcttctctcctgaccgacctggagttacccagagagatgagattgatcagctgcaagaggagatggcactgactctgcaaagctacatcaagggccagcagcgaaggccccgggatcggtttctgtatgcgaagttgctaggcctgctggctgagctccggagcattaatgaggcctacgggtaccaaatccagcacatccagggcctgtctgccatgatgccgctgctccaggagatctgcagctgaggccatgctcacttccttccccagctcacctggaacaccctggatacactggagtgggaaaatgctgggaccaaagattgggccgggttcaaagggagcccagtggttgcaatgaaagactaaagcaaaac

SEQ ID NO: 116347 - DNA, 1000 bp, Homo Sapiens
ggattgtactttgtgctggggttatctgaagtcagatctgcctaaggacttctttaattttggaattttcctcctttctctttcgttacagaagccccaccctgcctcacccacccttttttaaataaataaatagctagactggtgactgattcttcagcaaaaatattttatgatccagcagattattcactgatttgacatagtctggctgtacccaggaatggagcctgcacggtgaatggctttgtatagaacctctttgtctacaccattatgtgcgctgataagcgttcatggaacgcgttgaaattgtaattatatctgaggaattctgtatagattagaattctgtatagattagagagtgttgaaacggatgatttctatgctgagtttgtgctggtgtatgtgtgaagtgagtgagttgggtgtattgtgcgctaaacttttctgatagaggaagcctgattaaagaatggtccgtgctaaggacttgttagatctagttcactctccatttaataattatatgctatttctatattttcattctcctatcacctgtcttgcctttttcattattttattatgaaacttgtgtaaatacaattttgtttctgtactttttggcataacataaatctgtgaacttgaaatttgaattttgtgttagagatttttttgttgtttgtttagtcttgtctcagattttattatgtaaatcccattattcaaagttgcctaaatccatttggaaatctttaaaaaaaaaattggggattcttaaagttgaatttattggcttttctgatccagttttgtttggaccaaaaaccagtattgtacaaagtattaagcatatatttttatatttactaaaatggactgtggtgactttggataataaggaaaagtttaatattaaagccatgtttattacagtataattaacatgttaaaccatgggataaatgccatcaataaaaaattatgacat

SEQ ID NO: 116348 - DNA, 1000 bp, Homo Sapiens
tttatcaactactatctgaaaacccccccgatggagaaagattttcaaagatggtagagcatatattaaacactgaagaaaactggaactcgtggaaaaatgaaggttgcccaagttttgtgaaagaaagaacatcagataccaaacctacgagaataattcggaagagaacagcacccgaggacttcctagggaaaggacccaccaaaaaaattctgacgggaaatgaggagttaacaaggctttggaatctttgccctgataatatggaagcctgtaaatcagagacaagggaacacatgcccactttggaggaattctttgaagaagccattgaacaggcagaccctgaaaatatggcggaaaatgaatataaggctatgaacaattcaaattatggttggagagccctgaaactattagcacggagaagccctcacttcttccagccaaccaaccagcagtttaaaagtttacaagaatatcttgaaaatatggtaataaagctagccaaggaattaccgcctccttctgaagaaataaaaacaggtgaggatgaagatgaggaagataatgatgctctactgaaggaaaatgaaagtcctgatgttcggcgagacaaacctgtaacaggagaacaaatagaggtatttgccaacaagctgggtgaacaatggaagattctggctccctacttggaaatgaaagactcagaaattaggcagattgagtgtgacagtgaagacatgaagatgagagctaagcagctcctggttgcctggcaagatcaagagggagttcatgcaacacctgagaatctgattaatgcactgaataagtctggattaagtgaccttgcagaaagtctaactaatgacaatgagacaaatagttagcttcttttttttttctttttattaaaactgtgatagattttgttaccaagcagcatttgataagaggtccactggttttggtaaacaataaacatttttataac

SEQ ID NO: 116349 - DNA, 1000 bp, Homo Sapiens
tcctggccccccgctcctgggcccgctgcctcacagacatgcgttggctgcggaaccaagtgatcgccccgctgacagaggagctggtgttccgggcctgtatgctgcccatgttagcaccgtgcatgggcctgggccctgctgtgttcacctgcccgctcttttttggagttgcccattttcaccatattattgagcagctgcgtttccgccagagcagcgtggggaacatcttcttgtctgctgcgttccagttctcctacacagctgtcttcggtgcctacactgctttcctcttcatccgcacaggacacctgattgggccggttctctgccattccttctgcaattacatgggtttcccagctgtttgcgcggccttggagcacccacagaggcggcccctgctggcaggctatgccctgggtgtgggactcttcctgcttctgctccagcccctcacggaccccaagctctacggcagccttcccctttgtgtgcttttggagcgggcaggggactcagaggctcccctgtgctcctgacctatgctcctggatacgctatgaactctcaccggctccccagccctccccaccaaggggtactgcaggggaagggctggctggggtccccgagatctcaggaatttttgtaggggattgaagccagagctagttgcgtcccagggaccaagagaaagaagcagatatccaaagggtgcagccccttttgaaaggggtgtttacgagcagctgtgagtgaggggacaaggggcaggtcccaggagccacacactcccttcctcactttggactgctgcttctcttagctcctctgcctctgaaaagctgctcggggttttttatttataaaacctctccccaccccccaccccccaacttcctgggttttctcattgtctttttgcatcagtactttgtattgggatattaaagagatttaacttgggtaacatggcaaaaaaaaaaaaaaaaaa

SEQ ID NO: 116350 - DNA, 1000 bp, Homo Sapiens
cgtcctcaacctactagaaggcttgaatctcggtgtctttcctgcttccatgagagccgaggttcagtgggcattcgccacgcatgtgacctgggatagctttcgggggaggagagaccttcctctcctgcggacttcattgcaggtgcaagttgcctacacccaataccagggatttcaagagtcaagagaaagtacagtaaacactattatcttatcttgactttaaggggaaataatttctcagaggattataattgtcaccgaagccttaaatccttctgtcttcctgactgaatgaaacttgaattggcagagcattttccttatggaagggatgagattcccagagacctgcattgctttctcctggttttatttaacaatcgacaaatgaaattcttacagcctgaaggcagacgtgtgcccagatgtgaaagagaccttcagtatcagccctaactcttctctcccaggaaggacttgctgggctctgtggccagctgtccagcccagccctgtgtgtgaatcgtttgtgacgtgtgcaaatgggaaaggaggggtttttacatctcctaaaggacctgatgccaacacaagtaggattgacttaaactcttaagcgcagcatattgctgtacacatttacagaatggttgctgagtgtctgtgtctgattttttcatgctggtcatgacctgaaggaaatttattagacgtataatgtatgtctggtgtttttaacttgatcatgatcagctctgaggtgcaacttcttcacatactgtacatacctgtgaccactcttgggagtgctgcagtctttaatcatgctgtttaaactgttgtggcacaagttctcttgtccaaataaaatttattaataagatctatagagagagatatatacacttttgattgttttctagatgtctaccaataaatgcaatttgtgacctgtaaaaaaaaaaaaaaagaaaactcgaggagggcccgggcc

SEQ ID NO: 116351 - DNA, 1000 bp, Homo Sapiens
agaaggacctagccaccttcctatatcacttacgcattgaggcggaggtagaagtggtggagatgcatgacagtgatatatcagcatatacttacgagcgcactttgatgatggaacaaaggtcccagatgcttcggcacatgcggctatccaaaacagagcgagacagagaggcacaattggtgaaagaccgaaactcaatgctacgattgaccagcattggctctgatgaggacgaagagacagaaacctatcaggagaaggtgcacatgacttggacaaaagacaagtacatggcatcccggggacaaaaagcgaagtcaatggaaggattccaggacctgcttaacatgcgtccggaccagtccaatgtgaggcggatgcatacagcagtgaaactcaacgaggttatagttaacaagtcccatgaagcaaagctggttttattgaatatgccagggccaccccgaaaccctgagggtgatgaaaactacatggagttcctagaggtgcttaccgagggactagagcgagtcctacttgtccggggtggtggcagtgaagtgatcaccatttattcataacctactctgaatgaccgtgcttgacctgttttcttaaaaggcctacgtcctccatggaagtgccagctcattactaccactcccactcaactagaagcctgtgttctgtacacatcatactgaactcttgatgagctgagcctcaagtacctgtgtaaaagagctcccatctgatctgcagtcattacagaaaaagcaaatattccctcaacatcagaacaatgctcaagtctttcaagccacgtctgagcagtcaaaggcaaattagaattaacaagctgagccaataaatgaattggtaaaagggatgctagaaattcaactgaagaaaaaaagcaagtcaagtacgtattcagcattaaagatgaatctcagaagtcatggttcaatgttgacactgtgaggataacaactag

SEQ ID NO: 116352 - DNA, 1000 bp, Homo Sapiens
gagttttgttactgaattgcctgtccctgagcttggcctgctggagcatgatgctggaggctgtgtgcgggcaggcttgtgctccccttggagaagggctgctacttaacaaggaagtcctggccacaagagtcccctactggctgcagaggacgaagcaggaagcatgccgtggatcccacatgcactggggcagggcagccaggttccagagcagcaggcatgtgcattatgggtgccaggtggccagtgagggcccgaggaccacgcagcagagtcccccacgggcctgagcctgagagctcagaggattcctgccaggcctcagaactgtgtgtgcgggacagggtggctggcacgagatgtgtgggactgggacgcttcctttggggaccagaggaacattaggggccggtcagacacgtagggggcagtgaggaaacggggtaaagtggaccatgcaggctgcagagggtgggccttgggctggccggggttgctgggtggccccttccccatgggcctccacaagcactcgggcctccacaagcactcaggccactggcacgttgggccaggcagaaggtccacatggcagggctgcctggaacaccgctgccactgtggctccaggaggcccttgggagcatgaggagagctggactcgctcatctgttcttgcaccaccatccagaatgccccctttgcaaggcctgctgcagtccccagtctgaccagcaagtcccggggtcacccttgctgaaccttgtgctccaggggtcctcctcctctaggaccagcttgccacggtttctcagagcccaggtgccctctgacctgccatgcggaggtgggatttgatactgtacattgtcttgatgcctgtttttttatgttttcattaagggtttttagtttttggttgggttgacactaacttttcttaagatgctgtgagaatcatttcatccaaatgccaaataaacttgtgttccgggag

SEQ ID NO: 116353 - DNA, 1000 bp, Homo Sapiens
ttcagcagtcagatgtttactgcacacctattacctattatttgctgttcttgcatggttcaaaccaccattctgtagccacccatcctttgccttatctaacaaacatttttccaggaaggtggaaaaggaagtgttgctctcattgtgtgactcagtgctgctgtccatcccatggaaacatgggcacaatcaagtatttgtccagcctattgcaggcttttcctgactttaaaataaattgtgatcaataatagtacctttgattatacatttattattgtgtctctctctgatgtactgtggattgtacatttaactttggaatggctttgtaataatcagtcttaagaaaatgttgacaagctctggttgcttatttttagaaaatgaggacatttaataataataaaaaaaaagggattaatagcttttgacctcaagtcttttgtcttctgagtgttggagcttggctgaagacatgtttaatactgtacaatttctgaagatggttattaacactgtgctgttaagcatccatttaaaaatatttgttatcttctttgcctgcctgtattttaaaaagaaatacaaagttgtaaaagtaatggatttctttggatgctgaatgcagtgatgttatcagtcagattctttccttggctcagttgtgtttgtatttcctttcttaattccccaaatcttggctgggcacggtggctcacgcctgtaatcccagcactttgggaggctgaggcaggtggttcactggaggttgagttcgagaccagcctggccacatggtgaaaccctgtctctactaaagatataaaaattagctggatgtggtggtgcacacctgtgatcccagctacttgggaggctgaggtgggagaattgcttgaacctggaaggcagaagttgcagtgagctgagatcacaccactgcactccagcctgggtgacagagagactctgtctcaaaaaaaaaaaaaaaaaa

SEQ ID NO: 116354 - DNA, 1000 bp, Homo Sapiens
ttggatatccagtcagacaagatacgcacagtccaggatgcactggagagcttggtggcaagagaatctgtccaaggttataccacaaaaaccaaacaagaggttgagataagtcgaagagtgactctggaaaaactccctcctgtcctcgtgctgcacctgaaacgattcgtttatgagaagactggtgggtgccagaagcttatcaaaaatattgaatatcctgtggacttggaaattagtaaagaactgctttctccaggggttaaaaataagaattttaaatgccaccgaacctatcggctctttgcagtggtctaccatcacggcaacagtgcgacgggcggccattacactacagacgtcttccagatcggtctgaatggctggctgcgcatcgatgaccagacagtcaaggtgatcaaccagtaccaggtggtgaaaccaactgctgaacgcacagcctacctcctgtattaccgccgagtggacctgctgtaaaccctgtgtgcgctgtgtgtgcgcccagtgcccgcttcgtaggacaccacctcacactcacttcccgcctctctttagtggctctttagagagaaactctttctccctttgcaaaaatgggctagaatgaaaaggagatgccttggggttcgtgcacaacacagcttctgttgactctaacttccaaatcaaaatcatttggttgaaacagactgttgcttgattttagaaaatacacaaaaacccatatttctgaaataatgctgattcctgagataagaaagtggatttgatccccagtctcattgcttagtagaataaatcctgcaccagcaacaacacttgtaaatttgtgaaaatgaattttatctttccttaaaaaagaaattttttaatccatcacacttttcttccctaccctttagtttttgataaatgataaaaatgagccagttatcaaagaagaactagttcttacttcaaaaaaaaaaaaaaaaaa

SEQ ID NO: 116355 - DNA, 1000 bp, Homo Sapiens
gcatgcttaaatcagcattgtcaactgatttgttgttgtattattttcacttcttggatctatgtagtagttgtaataacaaatatttaaatagctatttttttgatgccattaaaaaaatcatactctggccttttttcccccttactgttgtttcccagatcttttaaaaattcatcccatatccagaaagtaccagttataaagattgctgaccaagcaaagttttgcatcaaagtgtcacctcattgctctgaccaaagactgactgttgtggttttaactcctctctgtaaagcattttgcattttccccaagctcctttctgaaagaagaaccagtgcagagcggcctttactttcaatttctactgctgaatagactacttagagaaaatgtgagtttcagtgtgaacagaatggattaggatgacgagtttgatgggcattttcagtactgtatctaagaaaaaaaaaatagcacagctaggagcctctgacattgtctggtgttttacgtggtctgttcatcaaaattccccttttcagtttttaagaatgttcgtctaacagaagaaaatgctgtaaatatttgtaacaacattttttttaacaaggccaaaaaagaaaaaaaggtttttgggaacaaatgaacttataaagtggttttatataaaacatcaattgtcttgtatattttggataagcagcagtaccagctttcatttgtaacagtctgtggcattggaaaaaaaggagtctgtgattgttgaagtgaattatgttataaatgcaaagagaagataaaatattaaaaaacatattttctaaatgcgtagtgcatggttaattcaagcttctgtacactacagtatattccattttcgttcagtttgtatatttgctgactattacttgatatctctaatctcttttcctaacaaatatagcattgtagcatgccttttaataaatgtcatgacatctgtactctcttaaaa

SEQ ID NO: 116356 - DNA, 1000 bp, Homo Sapiens
tttctgatgatattaaaagttgaagatatttctgcacttgggccctcctctgggagccgcacccacatgactgccctgcctctgaccagtctgttccggggccccctcagccaggtgggaatgacggacacgtactatccaagtgtatgggattaactaatcattgaaggcattcatccgtccatcattggaaagatttacagtgattctgaaggacaggccgtggagttttaggtttcaggggcaagagcagttttcaaaagtctttgagtccagtgtgcacgagtcgacaagcagtacctggcatgcaggagcactcatgggtgagtccgtctcaggtctcgacaattagcagttgtgtgacagtcattctggttccttctgcctgaccctgggagacatatcagtaatggatgtacaaaagcaggtctgttttatgtcttagtataatttcagatgaattgtattgaaaaaatgctgaggaatgaatgtgtcaaaatgggttaactgtgtatattgactttcatgtcgtcatgcatctgtcatgaatgaatgatactttgcactgggctgtacgacagtgaggaccttagggcatgaagcctttttcctggtcccagcagcatctgccctgtgaagtttgttttctcccactgcctccaggccccactgatacccccaaatagatgctgggttatgagaaccagcgaaatcccccatgtcatcagtcttaaaaaaaaaattttacaaatccacgtatttgtcccattcttggagtagttttagtgtatgtctttacattaactactaacagtataaataacttgacatcgtaattgtctgcatcctgtccttgatatttttagcagttccaaatctttgtttttgtatttgtttgctgtgttcatgggcaaagtaagtactttttaatgcagttattttgagagtttggaagataattaccaaaagggtccattatttcataagagttactttgcaa

SEQ ID NO: 116357 - DNA, 1000 bp, Homo Sapiens
acaccactaaggtgcagtgctacatggactactccatggtggccactgtgagctcagagtgggcctgggaggtgggccttggggtctcgtccaccaccgtgggctttgtggtgcccttcaccatcatgctgacctgttacttcttcatcgcccaaaccatcgctggccacttccgcaaggaacgcatcgagggcctgcggaagcggcgccggctgctcagcatcatcgtggtgctggtggtgacctttgccctgtgctggatgccctaccacctggtgaagacgctgtacatgctgggcagcctgctgcactggccctgtgactttgacctcttcctcatgaacatcttcccctactgcacctgcatcagctacgtcaacagctgcctcaaccccttcctctatgcctttttcgacccccgcttccgccaggcctgcacctccatgctctgctgtggccagagcaggtgcgcaggcacctcccacagcagcagtggggagaagtcagccagctactcttcggggcacagccaggggcccggccccaacatgggcaagggtggagaacagatgcacgagaaatccatcccctacagccaggagacccttgtggttgactagggctgggagcagagagaagcctggcgccctcggccctccccggcctttgcccttgctttctgaaaatcagagtcacctcctctgcccagagctgtcctcaaagcatccagtgaacactggaagaggcttctagaagggaagaaattgtccctctgaggccgccgtgggtgacctgcagagacttcctgcctggaactcatctgtgaactgggacagaagcagaggaggctgcctgctgtgatacccccttacctcccccagtgccttcttcagaatatctgcactgtcttctgatcctgttagtcactgtggttcatcaaataaaactgtttgtgcaactgttgtgtccaaaaaaaaaaaaaaaaaaaaaaaaaaaaaaa

SEQ ID NO: 116358 - DNA, 1000 bp, Homo Sapiens
ccccctccactccactctgcttccacaaagtcggctcccgagagctcgaggctgcttctgtttatatgtgcagggcccgggcgggtgaagggtcagagagacggacacaaggagccggcaggagggcggagcgaggatgtcctttcccgggagacaagtcgggaaagcctggctggactgcctcagccccgcgcgcctcctggactcagggttccccgtcctgagctcgggagatgttcagagtcacactgccgcccggtctgccacgcagaggtccaacttgccacccgcgtccctggtacctgagaccaccgacatcctcaggttcctgaccgtggcgcccttctacccagcccagtgtgcggccgccgcgctgtctgcacagctgggggcctctgagcctggtgggcttcctggactcttggcctcactccttgccccctccccacgacacccatgagccgaaaggatgtcactaaggatggctgattccccaagggcacccgctctccctccctccctgctggaggaacacgtcatatcagatgagaggaagatggcctctgatggacagaatttttctcttaactcagcttttgctactttggcaaaaactagcgaggggtagcagaaacctgcaccaaggattgtccctatgtcttggccactcctagagcgtgtgcagactgatgattttatatgtaaatcaagactcacatccctttcctagtcccccacatccaaagcccctcagcctgccttgcagaccaatgggctccatgttctgtagccccctcccctacgcctcacccctcctccctctcacaggttctgggcggccagtgagagaaacgcagtgggggaggcagggagtctggtgcctgcagagattctctgcttctttcctggggggaggtggggaggtcttagcaggagcgggccctgtacccacctgctgacctgctgtttggtagagaaataaaggttgtgtgactggggg

SEQ ID NO: 116359 - DNA, 1000 bp, Homo Sapiens
ttggattagcaggggtgggtccaggaagatgatatttgcgtcttttgcccacccccctggcattcagctggacccaactaggccatcatgagtggcttctccctgtcatccccaggggtcataggatatctacaccgcctttctgaccccaccctgcactcccatcctttcctctctccccgttcatgccctgcactacatagcacagccgggatgcttggaacagaggccttggctgctccgcagtgcacagggcttccctctctcggggttggcttcttcccaggccttgcatgggccctgcccacaagcacaccctcaggccgagggtgcagactgatgctcttccctgatggagaccctgagatcttccccacccccaatcatgatgtcttcagtgtgggactggggtcctcttggttctgcctgcagcctgcctggctccgcccctagtgccccctcctcaccacactggccccaggtctcaggaggggtgtcctgggcagggaaggtcagtgtcactgatggtttgctgtttggaagccattggcagggctgccgtgcatgtggctgtgagggctgcacagtcctgccaaggggcttcctccttgtcaccccgaaccttgtaatcgtgtgctggcgtggcagccctggctaagttaatccccaccgctttcagtggtagaaagaattccctgagtgggccaggctggtgccctcctcctaccctggcttttctgagtgagctgcctggagccctcatcccctctcccaggctgggctggccctgggcggggccactgtgtgctggcccactgtgacctgacccgaccttgtgcagcccccctgccctggtgtcctgggttttcgtgatgatctttgctctgtttccagtggggtttgaagcagagttcagggaaccctgcccaaggtcctcctgttcagacattcctatgttgaataaagtatgtttgacttccccggaaaaaaaaaaaaaaaa

SEQ ID NO: 116360 - DNA, 1000 bp, Homo Sapiens
ccgacatcgacgcagtggacattaagagcggccgctccccgctcatccacgccgtggaaaacaacagccttagcatggtgcagctgctgctgcagcacggcgccaacgtgaacgcgcaaatgtactccggcagctccgccctgcactcagcgtccggccgcgggctcctcccgctggtgcgcacgctggtccgcagcggcgctgacagcagcctcaagaactgccacaacgacacgccgctcatggtggcgcgcagccgcagggtcatcgacatcctgagggggaaggccacccggcctgcttccacctcccagccagacccctcccctgaccggagcgccaacacctcccccgagagcagcagccgcctcagctccaatggtcttctctccgcatcaccatcctcctcaccctcccagtctccccccagggacccccctggattccccatggctcctcccaatttcttccttccttccccatctccacccgccttcctgccctttgctggggtcctccgaggccctggccggccggtgcccccctccccagctccaggaggcagctgagggggatgggggggcagatcttggactcatgaggaggggcccccctgcccagaggggtcaacccttctggaaactgtgaagatctgacttcgcccccccccccccccatcttcgggaccaggatttgcacagaagcacatgcacctacccatacaccccctcttctgagcacagatgttcccccatctcgctccctcccaggactctgaccccagcattctcaggcaccagtccctgtccggaatgccacccacatcttccatttccatgtcccctcccagagctggtggacccagggaacagccactcccctccactctctaccagataactgaggaggggagaggtgggccgtaacgggcacggatcacgatgtaaattattaagcattttggttggatttcttttgtaataaactatttttgtaccat

SEQ ID NO: 116361 - DNA, 1000 bp, Homo Sapiens
tcatgcattcagaaatgattgttaaaattctcccaactggttcgacctttgcagatacccataacctatgttgagccttgcttaccagcaaagaatatttttaatgtggatatctaattctaaagtctgttccattagaagcaattggcacatctttctatactttatatacttttctccagtaatacatgtttactttaaaaattgttgcagtgaagaaaaacctttaactgagaaatatggaaaccgtcttaattttccattggctatgatggaattaatattgtattttaaaaatgcatattgatcactataattctaaaacaattttttaaataaaccagcaggttgctaaaagaaggcattttatctaaagttattttaataggtggtatagcagtaattttaaatttaagagttgcttttacagttaacaatggaatatgccttctctgctatgtctgaaaatagaagctatttattatgagcttctacaggtatttttaaatagagcaagcatgttgaatttaaaatatgaataaccccacccaacaattttcagtttattttttgctttggtcgaacttggtgtgtgttcatcacccatcagttatttgtgagggtgtttattctatatgaatattgtttcatgtttgtatgggaaaattgtagctaaacatttcattgtccccagtctgcaaaagaagcacaattctattgctttgtcttgcttatagtcattaaatcattacttttacatatattgctgttacttctgctttctttaaaaatatagtaaaggatgttttatgaagtcacaagatacatatatttttattttgacctaaatttgtacagtcccattgtaagtgttgtttctaattatagatgtaaaatgaaatttcatttgtaattggaaaaaatccaataaaaaggatattcatttagaaaaaaaaaaaaaaaaaaaaaaaaaaaaaaaaaaaaaaaaaaaaaaaaaaaa

SEQ ID NO: 116362 - DNA, 1000 bp, Homo Sapiens
gcggagcctcctctccagtgctgagaacgagcccccagtgcctcttgtgagcaactggcgacctccacagcctatcaataacagggtggtgagagcttccttcaaatgaggctgctggatcttgccctcttcaggaaaggaaacctaccattggagagcttggttccttgcctccttctggtgctcttactccaagtctatttcatttttccacactgagcaatgaatgtgagagatgtggtcaccaagatctaagttacttgttgaaagaaagttactttcgacaagatctaatatgaaagcatagatttcacatttgatctctgtaataatcatctttcctataaaagtagcatttttggtaaagtttcaaagaagaagaaacagagatggaagagtaaagatatttttaaaatggctagctattgggcaccagtttttctgttatctaaaatttcacacaacttcatgtttttatttttatattatgagttgtccatcttaaagaaatatgagtaattctacatgtagtagaggtgtatgaagatcatataacaattaaacataagccagaaattaaaatgactatagacagcaagaattgagctaataatatgttttaactcttaacaccagcaagaagtcagtcatttattgaagttttagctactaagattacttggttttgattaccagtgaaaagaaaacacaatacaatcaggagttttcaaatttttgattcagtatttgaatttcttcttcataaatgtagttggaatttatcctagtatttttctttacctgaaggagggccatttatttttaatttcactacatttttctttgcatgattattaaaataaaaactgcctctgttgtgtttctcactggaggctggaatgaatgatcactagaacacaaaagagtgaatgatgacacttgaagtcaaagcagttgtactgatcaccagaaccaataaagacataaatggaaaacgttg

SEQ ID NO: 116363 - DNA, 1000 bp, Homo Sapiens
ggcaacggcaccgtggacttccccgagttcctgggcatgatggccaggaagatgaaggacacggacaacgaggaggagatccgcgaggccttccgcgtgttcgacaaggacggcaacggcttcgtcagcgccgccgagctgcgacacgtcatgacccggctgggggagaagctgagtgacgaggaggtggacgagatgatccgggccgcggacacggacggagacggacaggtgaactacgaggagtttgtccgtgtgctggtgtccaagtgaggccggcgcccaccatgctcctgggcgcccacgcggcccacagggcaagaacccggggcctcccgcctcctcccccatccccctgcctcccctgggcactgtggcttcctcctgcgcctggttgattcagcccacctctctgcatcccgcttcccgcgtctcttctctgcactcctgccgaccttcccacctgctcatctgaatgacacggaacgctcccactgcaggcaaaccgtgacgccctccccactcgggagaagcagagctgaccttaggaccgagcaccagggcaggttgcgctgactctgcggccctccaggacggacaccgggtgaccccttagggcacccaggcaagatccctaagaggcacccaatgcccaggccaggggggctgcagccctcagcccccgccaggattcccgcaggctcctggactggaagctccctccgcggtcggattctggagggtgggaggcatcttggcctgcagtaagcggtgctgacggggactctggccacagaggtcaggcctcctgaaaacagcactgccttccgcgctgccccagcttgccccattccttgtccgccaacccaccgtgattcatcttctgaagctgggagtgaaactgggtcagctgtaacctgttcctattcatctggaaggagggaggcttggatgagcaggggatgagagctgcagggaaataaatgagatattcgtcctt

SEQ ID NO: 116364 - DNA, 1000 bp, Homo Sapiens
ccatcttccggaagtttgacctggacaagtcgggcagcatgagtgcctacgagatgcggatggccattgagtcggcaggcttcaagctcaacaagaagctgtacgagctcatcatcacccgctactcggagcccgacctggcggtcgactttgacaatttcgtttgctgcctggtgcggctagagaccatgttccgatttttcaaaactctggacacagatctggatggagttgtgacctttgacttgtttaagtggttgcagctgaccatgtttgcatgaggcagggactcggtcccccttgccgtgctcccctccctcctcgtctgccaagcctcgcctcctaccacaccacaccaggccaccccagctgcaagtgccttccttggagcagagaggcagcctcgtcctcctgtcccctctcctcccagccaccatcgttcatctgctccgggcagaactgtgtggcccctgcctgtgccagccatgggctcgggatggactccctgggccccacccattgccaagccaggaaggcagctttcgcttgttcctgcctcgggacagccccgggtttccccagcatcctgatgtgtcccctctccccacttcagaggccacccactcagcaccaccggcctggccttgcctgcagactataaactataaccactagctcgacacagtctgcagtccaggcgtgtggagccgcctcccggctcggggaggccccggggctgggaacgcctgtgccttcctgcgccgaagccaacgccccctctgtccttccctggccctgctgccgaccaggagctgcccagcctgtgggcggtcggccttccctccttcgctccttttttatattagtgattttaaaggggactcttcagggacttgtgtactggttatgggggtgccagaggcactaggcttggggtggggaggtcccgtgttccatatagaggaaccccaaataataaaaggccccacatctgtctgtg

SEQ ID NO: 116365 - DNA, 1000 bp, Homo Sapiens
cagcggcaggcaatctggtcactaggtctttgtgatgccaaaaataaaagagggtggggtgggtgctttctgttcctctgattggatggagtccgccagcaggcatggggctacattccagtgcctgactatagggaggcactcctgattccatggagcagcccggactttgagaatgggctctggtttgcggggggcaggcgtaccagactgcaagaccccccagtacctcaccgtgccaaataggaagaggtggccttggtgtagccaaatggatctttttaacagtgtgcctttggggagggacccatgtccatggcttcgttgagggccatccatatgccagctgggggccagcccacagtggccatattggctgcagcaggaatggtgcccacctcggcgaattgaagggctaagagtcccagatagctaggccagagctggaagcagacagtaaggggaagagctgctcccacaggagagggagagattccagctcactgcgcagcctgggaggaggcgtggatcctggcacgctgagcctcaggcaccagcctccctgtgctcgacagcaaagtcttgactccttcctgctgagcactgtgctaccttcactgctccaaagccagactaacagctctccaagcccttggggtgactcggcttccaggagctgttggagaaatgaggatgtctgtccctgtctgcctgggcaggccagattcctccccagcagccgggtctctccagaccctgattcggtgcctttctgtttaccagctacttcaatcccaaagtttgaatctgcagataccttactcccagccactttgccttcttactgtgttgtgtgtttttcctggtgcttcaagagcgtgtgcagggcaagtgccgtcactgggaactgcaccagatgctcagacttggttgtcttatgtttaccaataaataaaagtagactttttctatttttatttgctgctaaaaaaaaaaaaaa

SEQ ID NO: 116366 - DNA, 1000 bp, Homo Sapiens
gcggtgccgagcggcagcagcgggagcctctccacgtcctcctcgtccagcccgcccggcacgccgagccccgctgacgccaaggcgcccccgaccgcctgctacgcgggggccgcgccggcgccctcgcaggtcaagagcaaggccaagaagaccgtggacaagcacagcgacgagtacaagatccggcgcgagcgcaacaacatcgccgtgcgcaagagccgcgacaaggccaagatgcgcaacctggagacgcagcacaaggtcctggagctcacggccgagaacgagcggctgcagaagaaggtggagcagctgtcgcgcgagctcagcaccctgcggaacttgttcaagcagctgcccgagcccctgctcgcctcctccggccactgctagcgcggcccccgcgcgcgtccccctgccggccggggctgagactccggggagcgcccgcgcccgcgccctcgcccccgcccccggcggcgccggcaaaactttggcactggggcacttggcagcgcggggagcccgtcggtaattttaatattttattatatatatatatctatatttttgtccaaaccaaccgcacatgcagatggggctcccgcccgtggtgttatttaaagaagaaacgtctatgtgtacagatgaatgataaactctctgcttctccctctgcccctctccaggcgccggcgggcgggccggtttcgaagttgatgcaatcggtttaaacatggctgaacgcgtgtgtacacgggactgacgcaacccacgtgtaactgtcagccgggccctgagtaatcgcttaaagatgttcctacgggcttgttgctgttgatgttttgttttgttttgttttttggtctttttttgtattataaaaaataatctatttctatgagaaaagaggcgtctgtatattttgggaatcttttccgtttcaagcattaagaacacttttaataaacttttttttgagaatggttacaaagcc

SEQ ID NO: 116367 - DNA, 1000 bp, Homo Sapiens
gccgtgcccaccctggagctgtgccacgacgagctcttcgccgacctcttcaacagcaatcacaaggcgggcggcgcggggcccctggagcttcttcccggcggccccgcgcgccccttgggcccgggccctgccgctccccgcctgctcaagcgcgagcccgactggggcgacggcgacgcgcccggctcgctgttgcccgcgcaggtggccgcgtgcgcacagaccgtggtgagcttggcggccgcagggcagcccaccccgcccacgtcgccggagccgccgcgcagcagccccaggcagacccccgcgcccggccccgcccgggagaagagcgccggcaagaggggcccggaccgcggcagccccgagtaccggcagcggcgcgagcgcaacaacatcgccgtgcgcaagagccgcgacaaggccaagcggcgcaaccaggagatgcagcagaagttggtggagctgtcggctgagaacgagaagctgcaccagcgcgtggagcagctcacgcgggacctggccggcctccggcagttcttcaagcagctgcccagcccgcccttcctgccggccgccgggacagcagactgccggtaacgcgcggccggggcgggagagactcagcaacgacccatacctcagacccgacggcccggagcggagcgcgccctgccctggcgcagccagagccgccgggtgcccgctgcagtttcttgggacataggagcgcaaagaagctacagcctggacttaccaccactaaactgcgagagaagctaaacgtgtttattttcccttaaattatttttgtaatggtagctttttctacatcttactcctgttgatgcagctaaggtacatttgtaaaaagaaaaaaaaccagacttttcagacaaaccctttgtattgtagataagaggaaaagactgagcatgctcacttttttatattaatttttacagtatttgtaagaataaagcagcatttgaaatcg

SEQ ID NO: 116368 - DNA, 1000 bp, Homo Sapiens
ttaaccgtgagatgctcacgagtacccttcctgttgttttgttagcattgaaatcgagactatttatttggaatatatacaacagtgtttttccactgtatttcatttgcaaaagttgagaactgctttctctaccttttgcaaaataattgatattccatattggattctcaaagacttcgatatggtgaacctattaaacctagaaattgtattcatcctttcatgactgtggcctgagttccccagcccctctcctccttttttttagatgagatttagcacactctcagttatttaaacatgcaacatttcttgagtatgtatgttgaggccatctgagctcatagctgattcagtaaccagtttcatgctgtgtcattcacactcactacttaatactgccatggtgaaaatgtggaggaaaaatgtatccatgtgtgtctgggaagcatatacacttgtacattttttaatactctgattctgtaacatttctgagttttgttttgttttacagaaaaaaaaaaaaagtgataaagcaatcagaagaccaagaggtttactattgatgcttagggtcgtctgaccttggctggccaatagacctacacggccaaattaatttacgagagtaataatttttcaaaagccaattttttttctgtattttctgtatgaaactgccaatatcatgaatagaaagggagaaccataaaggagaaagaacgtgatgttctgttatgttcatgtaaacctaaagaaacagtgtggaggcaggcgcgatcagccgaactctagggacttggtgttgcttggaaggcatccatacctgcattttgcattcttcgtatgtaatcatattgccaaagacaaactatttcatcatttattgtaaataacacttttccccagacctaccataaagtttctgtgatgtattgtcttccagttgcaataaaaattactgagttgcatcaattgaagaaaaaaaaaaaaa

SEQ ID NO: 116369 - DNA, 425 bp, Homo Sapiens
ccagagaggggaggtgaccccaggccccaggaaagggagcgaggacagcgctggttcccggctccccgcaccatcatggctttgcctctgaggcccctgacccggggcttggccagcgctgccaaaggaggccacggaggagcaggagctcgtacctggcgtctgctgaccttcgtgctggcgctgcccagcgtggccctctgcaccttcaactcctatctccactcgggccaccgcccgcgccccgagttccgtccctaccaacacctccgcatccgcaccaagccctacccctggggggacggcaaccacactctgttccacaatagccacgtgaaccctctgcccacgggctacgaacacccctgaggccccggacgcccccggacacaataaaggtgtgaagcttaaaaaaaaaaaaaaaa

SEQ ID NO: 116370 - DNA, 700 bp, Homo Sapiens
ctcgcgtgccgcgctcacccacccgcggcatgagcagcgcccccgcgccgggcccggcgcccgccagcctcacgctctgggacgaggaggacttccagggccgtcgctgtcggctgctaagcgactgtgcgaacgtctgcgagcgcggaggcctgcccagggtgcgctcggtcaaggtggaaaacggcgtttgggtggcctttgagtaccccgacttccagggacagcagttcattctggagaagggagactatcctcgctggagcgcctggagtggcagcagcagccacaacagcaaccagctgctgtccttccggccagtgctctgcgcgaaccacaatgacagccgtgtgacactgtttgagggggacaacttccaaggctgcaagtttgacctcgttgatgactacccatccctgccctccatgggctgggccagcaaggatgtgggttccctcaaagtcagctccggagcgtgggtggcctaccagtacccaggctaccgaggctaccagtatgtgttggagcgggaccggcacagcggagagttctgtacttacggtgagctcggcacacaggcccacactgggcagctgcagtccatccggagagtccagcactaggctccacggccccagacaccttccctgaggacactcaataaaggttcctgaatcttcctgccaaaaaaaaaaaaaaa

SEQ ID NO: 116371 - DNA, 1000 bp, Homo Sapiens
ctctcattcaggtcaagacactgaggaagcagggagctctatgtccactctggagaggtcgctggctgcacgccgagccccccgggccaagctcatgattcccatggatgcccagtccaacaatcctgctgtcgtgagcgccatcccggtgccaacgctagaaagtgcccagtacccaggaatcctcccgtctcccacctgtggatatccccacccgcagttcactctccggcctgtgccattcccaacactctcagtggaccgaggtttcggagcaggaagaagtcagtcagtgagtgaaggaccaactacccaacaaccacctatgctgcccccatctcagcctgagcattctagcagcgaggaggcaccaagcagaaccatccccacagcttgtgttcgaccaactcacccactccgcagctttgctaatcctttgctacctccaccaatgagtgcaatagaaccgaaagtcccttacacaccacttttgtctcagccagggcccactcttcctaagacccatgtgaaaacagcctcccttgggttggctggaaaagcaagatcccctttgcttcctgtgtctgtgccaacagcccctgaagtgtctgaggagagccacaaaccaacagaggattcagccaatgtgtatgaacaggatgatctgagtgaacaaatggcaagtttggaaggactcatgaagcagcttaatgccatcacaggctcagccttttaacatgtatttctgaatggatgaggtgaattttccgggaactttgcagcataccaattacccataaacagcacacctgtgtccaagaactctaaccagtgtacaggtcacccatcaggaccactcagttaaggaagatcctgaagcagttcagaaggaataagcattccttctttcacaggcatcaggaattgtcaaatgatgattatgagttccctaaacaaaagcaaagatgcattttcactgcaatgtcaaagtttagctgct

SEQ ID NO: 116372 - DNA, 1000 bp, Homo Sapiens
ccatcccaacacctcaccctctgtctacaaggaaatgggaggtggagcctcctggctgagaaattgttttgcaaatggatctatttttgtatgaaaaaaaaaatttttttaaagaaaactgttccttccccctttcccctccataatgtaagaagctttggtggcaggttacagagttctgggatttcttctcacaggcccaatcctgaatgtgcccctggaccttctggacccttgagtccaaggcagatcctctctcccagggaatccgacacaggaggaaccccttctctggttgagctgggccaggcctaagagtagcaggaactctaagaccacagagttttttataaatgtataaatgtatcaagccaaatgtgcagatgctaactggacattctggggaactgggcaccaggagtgccttcatacactgtaccccagctctcttctaaaagagaagtgggtgggcacactgaactgtttggtggccccaaccacaggaagctgcaattctctggcttagggtgatacttttgccctccttgtgcccctctcagctttccatccccagctaggaagaaagaatggcactcttgggcttggcccagaattagagttattagagcaagagagagcttaggaagcatgagggcaactatagtgaggccttattgccaggagggagggttttggttgctggcgcttgtgtataaaggggcaagagcagctcctttggactattcctgggaggactctgatgcagggcgtctgttgctcccctgggtcacctcctccctgctcgctgacatctggggctttgaccctttcttttttaatctacttttgctaagatgcatttaataaaaaaaaagagagagagagagaggtgtgagggacaaaatgcaaacctatttcccttgcctcataggcttctgggatgtcatcacctccagtttgttggttttgtttccaactgttaataaagcattgaaacagt

SEQ ID NO: 116373 - DNA, 1000 bp, Homo Sapiens
tgaggggcatgaagctgctgggggcgctgctggcactggcggccctactgcagggggccgtgtccctgaagatcgcagccttcaacatccagacatttggggagaccaagatgtccaatgccaccctcgtcagctacattgtgcagatcctgagccgctatgacatcgccctggtccaggaggtcagagacagccacctgactgccgtggggaagctgctggacaacctcaatcaggatgcaccagacacctatcactacgtggtcagtgagccactgggacggaacagctataaggagcgctacctgttcgtgtacaggcctgaccaggtgtctgcggtggacagctactactacgatgatggctgcgagccctgcgggaacgacaccttcaaccgagagccagccattgtcaggttcttctcccggttcacagaggtcagggagtttgccattgttcccctgcatgcggccccgggggacgcagtagccgagatcgacgctctctatgacgtctacctggatgtccaagagaaatggggcttggaggacgtcatgttgatgggcgacttcaatgcgggctgcagctatgtgagaccctcccagtggtcatccatccgcctgtggacaagccccaccttccagtggctgatccccgacagcgctgacaccacagctacacccacgcactgtgcctatgacaggatcgtggttgcagggatgctgctccgaggcgccgttgttcccgactcggctcttccctttaacttccaggctgcctatggcctgagtgaccaactggcccaagccatcagtgaccactatccagtggaggtgatgctgaagtgagcagcccctccccacaccagttgaactgcaggaagagaggacccatcctgccacaggacccagaaaaaaagcccaacacacactcgggttaagaaatacctttaaatttaggtaaataaagctcaaggaggtggggctgtcaaaaaaaaaaa

SEQ ID NO: 116374 - DNA, 1000 bp, Homo Sapiens
agccctggagccccctgtccctggccgtcctcccagcctgtttggaaacatttaatttatacccctctcctctgtctccagaagcttctagctctggggtctggctaccgctaggaggctgagcaagccaggaagggaaggagtctgtgtggtgtgtatgtgcatgcagcctacacccacacgtgtgtaccgggggtgaatgtgtgtgagcatgtgtgtgtgcatgtaccggggaatgaaggtgaacatacacctctgtgtgtgcactgcagacacgccccagtgtgtccacatgtgtgtgcatgagtccatctctgcgcgtgggggggctctaactgcactttcggcccttttgctcgtggggtcccacaaggcccagggcagtgcctgctcccagaatctggtgctctgaccaggccaggtggggaggctttggctggctgggcgtgtaggacggtgagagcacttctgtcttaaaggttttttctgattgaagctttaatggagcgttatttatttatcgaggcctctttggtgagcctggggaatcagcaaaaggggaggaggggtgtggggttgataccccaactccctctacccttgagcaagggcaggggtccctgagctgttcttctgccccatactgaaggaactgaggcctgggtgatttatttattgggaaagtgagggagggagacagactgactgacagccatgggtggtcagatggtggggtgggccctctccagggggccagttcagggcccagctgccccccaggatggatatgagatgggagaggtgagtgggggaccttcactgatgtgggcaggaggggtggtgaaggcctcccccagcccagaccctgtggtccctcctgcagtgtctgaagcgcctgcctccccactgctctgccccaccctccaatctgcactttgatttgcttcctaacagctctgttccctcctgctttggttttaataaatattttgatgacgtt

SEQ ID NO: 116375 - DNA, 1000 bp, Homo Sapiens
ccttttagggtggttaggacatctcccccacctccccacttttttccccaagacaagacaatcgaggtctggcttgagaacgacctttctttctttatttctcagcctgcccttggggagatgagggagccctgtctgcgtttttggatgtgagtagaagagttagtttgttttgttttattattcctggccatactcaggggtccaggaagaatttgtaccatttaatgggttgggagtcttggccaaggaagaatcacacccttggaatagaaatttccacctcccccaacctttctctcagacagcttatcctttttcaaccaactttttggccagggaggaatgtcccttttgttcttccccctgagaagccattcctttgtctgccaacctccctggggtcctgcctgtttcctcccaatggagggtttttttggggggtggtccccgtctggggggcccctccagccagtactccaggtctccctgtctctcccccgctgccattttgatagtataatctatttttaaatggggcttttcaataggggagagggagtcatctcttcctatatttggtggggtgggtgggaaggaagggatttgggggggaatcttctgcctcctccccactccaagtgtttatttttgataccaaacatgaattttcagttccctccctcccagccccccaatttcctgcgggcgggtacaaaggaccctttcaatgtccctggagttgggagggaggaatgggggacataaagcctgtcctgtctctattctaggcaagagagagtgggttcaaaagactcctgggctcacctgttagcgctggcccagcccaggccttgggacctgggggttggtgatttgggggacagtgctacactcgtctccactgtttgttttacttccccaaaatggaccttttttttttctaaagagtcccagagaatggggaattgttcctgtaaatatatatttttcaaagtga

SEQ ID NO: 116376 - DNA, 1000 bp, Homo Sapiens
tggccgaccaggtggcgctgctgcgcctgagctggagcgagctcttcgtgctgaacgcggcgcaggcggcgctgcccctgcacacggcgccgctactggccgccgccggcctccacgccgcgcctatggccgccgagcgcgccgtggctttcatggaccaggtgcgcgccttccaggagcaggtggacaagctgggccgcctgcaggtcgactcggccgagtatggctgcctcaaggccatcgcgctcttcacgcccgacgcctgtggcctctcagacccggcccacgttgagagcctgcaggagaaggcgcaggtggccctcaccgagtatgtgcgggcgcagtacccgtcccagccccagcgcttcgggcgcctgctgctgcggctccccgccctgcgcgcggtccctgcctccctcatctcccagctgttcttcatgcgcctggtggggaagacgcccattgagacactgatcagagacatgctgctgtcggggagtaccttcaactggccctacggctcgggccagtgaccatgacggggccacgtgtgctgtggccaggcctgcagacagacctcaagggacagggaatgctgaggcctcgaggggcctcccggggcccaggactctggcttctctcctcagacttctattttttaaagactgtgaaatgtttgtcttttctgttttttaaatgatcatgaaaccaaaaagagactgatcatccaggcctcagcctcatcctccccaggacccctgtccaggatggagggtccaatcctaggacagccttgttcctcagcacccctagcatgaacttgtgggatggtggggttggcttccctggcatgatggacaaaggcctggcgtcggccagaggggctgctccagtgggcaggggtagctagcgtgtgccaggcagatcctctggacacgtaacctatgtcagacactacatgatgactcaaggccaataataaagacatttcctacctgca

SEQ ID NO: 116377 - DNA, 1000 bp, Homo Sapiens
tctggccagatgttttttctcctttgtccaaaggccagagaccatcccaggaagagtggtgggtggtttatacactggaaatgttgcgtttatgctttttaaaaacacacgttaacttcagaggaaggatgggcaaatctggtctagctgggtgaaacccttattttcccagagatgccttaacctttgttggttttggctttagggttcagagtcacttttgttcccttctccattctggagagggacttcccctacatagagccctgatttttgtggctgtggggattggaggtagcattcaaagatcagatgtgcttttcctcactttggagatgaacactctgggttttacagcattaacctgcctaaccttcatggtgagaaatacaccatctctcttctagtcatgctgtgcatgccgcttactctgttggggtctatataaatttgttgaactcttacctacattccaaagaagtttcaaggaaccataaatatatgtatacatatacatatataaaatatatatattaaaataaaattatcaggaatactgcctcagttattgaacttttttttttaagaatactttttttttaagctgagaagtatagggatgaaaaagatgttatattgtgtttgactattttccaacttgtattttcatataatttatattttttaaaagctgaaaatttagaagcaagatgaaaaaaaggaaaagcaggtgctttttaaaaatcagaactgaggtagcttagagatgtagcgatgtaagtgtcgatgtttttttaaaaaaaaatgcaaaaaaattcttatggcggagttttttgtttgtttattttagtagctgatgctggcacatcattttgctggagagttttttatatactgtagcctgatttcatattgtattttaaactgtgtgaaattaaaaacaaagaatttcattcataaaaaaaaaaaaaaaaaaaaaaaaaaaaaaaaaaaaaaaaaa

SEQ ID NO: 116378 - DNA, 1000 bp, Homo Sapiens
aaataagaatattatttttggaaatatgcaactccttttcagagatcaggagggatttatgtagcagctatttttactgcaaaagtaattcactggaaaaaaaatgtaatttgtaagaaagctttatttttatctcagctctatgtaaagttaaagttactgtacagagctgaaggacggggggcggtaggggtcttgatgaaacctcttgaacgaagcacagtttgtcccatctttgttcactcgtgtgtctcaaccatcttaatagcatgctgctcctttttgctcagtgtccacagcaagatgacgtgattcttattttcttggacacagactattctgaggcacagagcggggacttaagatgggaaagagaaagcatcggagccattcattcggagaaaacgttttgatcaaaatggagacttttgtagtcgtttcaaaagagcacctgagtcatgtgtattcccggcctttataaatgacccggtcaagttggtttcaaagtccgacaggcttgtctgtttactagctgcgtggccttggacgggtggctgacatctgtaaagaatcctcctgtgatgaaactgaggaatcgggtggccgggcaagctgggaagagcaaagccagagctgcgctgcctcaatacccacaaaagaccattcccagtatacataagcacaggatgtttttctcaagagggatgtatttatcacttggacatctgtttataatataaacagacatgtgactgggaacatcttgctgccaaaagaatcctaggcagtggctcattgtatgtgaggttgaaccacgtgaaattgccaatattaggctggcttttatctacaaagaaggagtttcatggggttcagcctaacagttatggaaactacagtccttataaaccattggcatggtaataaacagatcttaagtataaaaattttgtaattgggcctttactctctcaataataaagtattttgtttatataaa

SEQ ID NO: 116379 - DNA, 1000 bp, Homo Sapiens
tggcgcgtctcatcaaggacgatgagtacaacccctgccaaggttccaagttccccatcaagtggacagccccagaagctgccctctttggcagattcaccatcaagtcagacgtgtggtcctttgggatcctgctcactgagctcatcaccaagggccgaatcccctacccaggcatgaataaacgggaagtgttggaacaggtggagcagggctaccacatgccgtgccctccaggctgcccagcatccctgtacgaggccatggaacagacctggcgtctggacccggaggagaggcctaccttcgagtacctgcagtccttcctggaggactacttcacctccgctgaaccacagtaccagcccggggatcagacatagcctgtccgggcatcaaccctctctggcggtggccaccagtccttgccaatccccagagctgttcttccaaagcccccaggctggcttagaaccccatagagtcctagcatcaccgaggacgtggctgctctgacaccacctagggcaacctacttgttttacagatggggcaaaaggaggcccagagctgatctctcatccgctctggccccaagcactatttcttccttttccacttaggcccctacatgcctgtagccctttctcactccatccccacccaaaagtgctcagaccttgtctagttatttataaactgtatgtacctccctcacttctctcctatcactgctttcctactctccttttatctcactctagtccaggtgccaagaatttcccttctaccctctattctcttgtgtctgtaagttacaaagtcaggaaaagtcttggctggacccctttcctgctgggtggatgcagtggtccaggactggggtctgggcccaggtttgagggagaagtttgcagagcacttcccacctctctgaatagtgtgtatgtgttgatttattgattctgtaaataagtaaaatgacaatatgaatcctcca

SEQ ID NO: 116380 - DNA, 1000 bp, Homo Sapiens
tctgggggactgtctgattatttcacacatcaaaatcaggggtcttcttccaaccctttaatacattaacatccctgggaccagactgtaagtgaacgttttacacacatttgcattgtaaatgataattaaaaaaataagtccaggtattttttattaagcccccccctcccatttctgtacgtttgttcagtctctagggttgtttattattctaacaaggtgtggagtgtcagcgaggtgcaatgtggggagaatacattgtagaatataaggtttggaagtcaaattatagtagaatgtgtatctaaatagtgactgctttgccatttcattcaaacctgacaagtctatctctaagagccgccagatttccatgtgtgcagtattataagttatcatggaactatatggtggacgcagaccttgagaacaacctaaattatggggagaattttaaaatgttaaactgtaatttgtatttaaaaagcattcgtagtaaaggtgcccaagaaattattttggccatttattgttttgtccttttctttaaagaactgtttttttttcttttgtttacttttagaccaaagattgggttctagaaaatgcacttggtatactaagtattaaaacaaacaaaaaggaaagttgtttcagttggcaacactgcccattcaattgaatcagaaggggacaaaattaacgattgccttcagtttgtgttgtgtatattttgatgtatgtggtcactaacaggtcacttttattttttctaaatgtagtgaaatgttaatacctattgtacttataggtaaaccttgcaaatatgtaacctgtgttgcgcaaatgccgcataaatttgagtgattgttaatgttgtcttaaaatttcttgattgtgatactgtggtcatatgcccgtgtttgtcacttacaaaaatgtttactatgaacacacagaaataaaaaataggctaaattcaaaaaaaaaaaaaaaa

SEQ ID NO: 116381 - DNA, 1000 bp, Homo Sapiens
cctggggatggggcccatggccacagagctggagcccctgtgcactccggtggtcacctgtactcccagctgcactgcttacacgtcttccttcgtcttcacctaccccgaggctgactccttccccagctgtgcagctgcccaccgcaagggcagcagcagcaatgagccttcctctgactcgctcagctcacccacgctgctggccctgtgagggggcagggaaggggaggcagccggcacccacaagtgccactgcccgagctggtgcattacagagaggagaaacacatcttccctagagggttcctgtagacctagggaggaccttatctgtgcgtgaaacacaccaggctgtgggcctcaaggacttgaaagcatccatgtgtggactcaagtccttacctcttccggagatgtagcaaaacgcatggagtgtgtattgttcccagtgacacttcagagagctggtagttagtagcatgttgagccaggcctgggtctgtgtctcttttctctttctccttagtcttctcatagcattaactaatctattgggttcattattggaattaacctggtgctggatattttcaaattgtatctagtgcagctgattttaacaataactactgtgttcctggcaatagtgtgttctgattagaaatgaccaatattatactaagaaaagatacgactttattttctggtagatagaaataaatagctatatccatgtactgtagtttttcttcaacatcaatgttcattgtaatgttactgatcatgcattgttgaggtggtctgaatgttctgacattaacagttttccatgaaaacgttttattgtgtttttaatttatttattaagatggattctcagatatttatatttttattttatttttttctaccttgaggtcttttgacatgtggaaagtgaatttgaatgaaaaatttaagcattgtttgcttattgttccaagacattgtcaataaa

SEQ ID NO: 116382 - DNA, 1000 bp, Homo Sapiens
cgggcctttcctgccctctgtggtcatctgccacctgctggatcaagtgctttctcttttacactcccctgtccccaccccagtgcactcttctggcccaggcagcaagcaagctgtgaacagctggcctgagctgtcgctgtggcttgtggctcatgcgccattcctggttgtctgttgaatctttctggctgctggaattggagataggatgttttgcttcccactgcaggagagctgccccctttcacggggttggggaagggtccccctggcctccagcaggagcacagctcagcagggtccctgctgcccacccctctgagccttttctccccagggtatggctcctgctgagtttcttgtccagcagggccttgacaggaatccagggagtagctcctggccagaaccagcctctgcggggcttgtgctctgcaaagactctgctgctggggattcagctctagaggtcacagtatcctcgtttgaaagataattaagatcccccgtggagaaagcagtgacacattcacacagctgttccctcgcatgttatttcatgaacatgacctgttttcgtgcactagacacacagagtggaacagccgtatgcttaaagtacatgggccagtgggactggaagtgacctgtacaagtgatgcagaaaggagggtttcaaagaaaaaggattttgtttaaaatactttaaaaatgttatttcctgcatcccttggctgtgatgcccctctcccgatttcccaggggctctgggagggacccttctaagaagattgggcagttgggtttctggcttgagatgaatccaagcagcagaatgagccaggagtagcaggagatgggcaaagaaaactggggtgcactcagctctcacaggggtaatcatctcaagtggtatttgtagccaagtgggagctattttcttttttgtgcatatagatatttcttaaatgaaaaaaaaaaaaaaaaaaaaaaaaaa

SEQ ID NO: 116383 - DNA, 1000 bp, Homo Sapiens
gagagaccacagggtgagagtgagccaggaacagcaaggacgttgattggttggggcaggggggccagagtagctgatgtaggagtactgggaggccagacggcacgaggtctccaaggccccagcaaagccatggcttctacccctagttcccctgacaggaagttcttggcgggtttggagccaggggatggcatggagtgatgtggctttgaagggtcctctggctgctgagctgggatgaggcaggtaagggtggaacaggaggggtggggaggaagccggggcagtcaccgagtgaccaccaagaggaagacccaccccacggcggggacagatgcggggtacgttaaagggagagccagagaactcatggggtgaggatggagtccgaggagactgctgggagccgccgtgtgggtcagagatggagaaggctgagtgcagcaaggtggggggtgactgggacccagcctttgggcctccccagccagagcagcccagcaacagtgtgtcctgtggtcataaaactccagggacctctatcctccaggagtctcagcctttccctgggcgcaggcccaccttggcatggccgcctcaggcctccatggagggagctgctatgtccccaccagattggccccgtgcggctgctggcttctgtagaggctgcccagaggggccaggtggcacaaataagagaggggagatggggggcagccaggagaggaggtgtcccttcctcgcccagacacagcgcgcttctctctggcctttcccgaggcctgtgagtgcctcaggaagcagctgggccctctgggaaggctgtgttcagcttaggaacataccgcctgtatctgctgtccctcccctgcccccctgccccccccaccgccttccctttttccctgtcttccttaaagtttcactcctgaataaaacttcactttgccttagaaaaaaaaaaaaaaaaaaaaaaaaaaaaaaaaaaaaaaaa

SEQ ID NO: 116384 - DNA, 1000 bp, Homo Sapiens
ggcccgaggccgacctggggctgccggaggacgacctggtgcttccagacgacgtggtgcagtacatcaaggcgcacgccagtggcgctctggacgagggcaccgggcaggtgtatcccacggaaagcactggcttctctgacaaccccagactacccagcccggggctgcacggccagcgcaggatggtggctgcggactccaacgtgggcccctccgcccctatgctgggaggatgccagttaggctttggggcgccctccagcctgaacaaaaataacatgcctgtgcagtggaatgaggcatcagcaacatggctgtcggggacatgagctccatgctcaccagcctcgccgaggagagcaagttcctgaacatgatgacctagaggcccgagcgcctggtgctgagtgcacccggaggggtcatcgctgcccagagcctggggattccagctgtcttgtctttttccaaaaaagtgttaaataggcttgaggggttgttgcgcaatggccgcttcagatgacagatgttgtaagagaaggtttatgggcatcctctctggtcttttggattattcctcagaacaatgaaaaaagtctccataggacaggaaggaatgcaaaactcatttacacagtgctttccagcctttggtgcttacaggaccgcgctgttccggcttcttcacggctgacattcggctaacgagggattactttggccaaaacctttcaaaggatatgcagaaagatggtagggagcatttgggtttgaatctgaatgctatactggatactctgctccggaaagatgagctttttattctactacttggaaggaaaaggaattcctctatgaagcctaactcttgaggtctctaacataccttgtcatagaggaaaagcacagattatacctggatgattcaggagagtgtatatgaatgaataaggcatccaagtatatatgaatgaataaagtatgtaagtatcaccag

SEQ ID NO: 116385 - DNA, 698 bp, Homo Sapiens
cacaaactgggaggaaaactgagacctcctggtacccgccgccgggccttttagaaactcccacaagctctgccttccctccctggtcctcttcagaccccctcttagttcttcgcggctaacggctcgcgctcggggccgggtgtggagctggaacagagggctggcaaggcgcgcatcggaccgagggtggagccgctgagcacagaaccggaaacttagagacaaagttcggagccccgcccccgccgcgcgccgctgagttgtctggccccgccgacccacggcccacgacccaccgacccacgaatcggcccggccgtcgcgtgcaccatgtctggctcctccagcgtcgccgctatgaagaaagtggttcaacagctccggctggaggccggactcaaccgcgtaaaagtttcccaggcagctgcagacttgaaacagttctgtctgcagaatgctcaacatgaccctctgctgactggagtatcttcaagtacaaatcccttcagaccccagaaagtctgttcctttttgtagtaaaatgaatctttcaaaggtttcccaaaccactccttatgatccagtgatattcaagagagctacatttgaagcctgtacaaaagcttatccctgtaacacatgtgccataatatacaaacttctactttcgtcagtccttaacatctacctctctg

SEQ ID NO: 116386 - DNA, 1000 bp, Homo Sapiens
cgcaaagcagagaaagcctgtacccgagggaataaacggcagattcaactagagagtcagatgaactgtacagtagtggcactgaccattttatatggattttgcattattcctgaaaatatctgcaacattgttactgcctacatggctacaggggtttcacagcagacaatggacctccttaatatcatcagccagttccttttgttctttaagtcctgtgtcaccccagtcctccttttctgtctctgcaaacccttcagtcgggccttcatggagtgctgctgctgttgctgtgaggaatgcattcagaagtcttcaacggtgaccagtgatgacaatgacaacgagtacaccacggaactcgaactctcgcctttcagtaccatacgccgtgaaatgtccacttttgcttctgtcggaactcattgctgaaggacagtacttggttgggtcagatttatttgtttgattttcatatcccgtgaaagtttttaattcatatttttccttatagggaaaaatgcaaaaaagaaacaataaagaaagaaatattaactactgtagaactgattttacaaattaatatttgtgctttgaaaaaaagtttctatttagttatttaagaagaatgagaaggccaatagttttagattattttatctggtatggtgctaatattttatttgaaaaaagttactgcaacttaacttaaaattgctaacgttttttcttcttttaaaaatacaattattgtatattgattatagcaatgtgattttgtaggttattttatatttgagttgtgattgaaagtatgttgtatatggtattgtgagatgatttgtacttggaagcattcacaaagtagcaccaaataaattacactttattctttaaaaaaaaaaaaaaaaaaaaaaaaaaaaaaaaaaaaaaaaaaaaaaaaaaaaaaaaaaaaaaaaaaaaaaaaaaaaaaaaaaaaaaaaaaaaaaaaaaaaaa

SEQ ID NO: 116387 - DNA, 1000 bp, Homo Sapiens
gtacggggtgcagctgtacaagaattaccagcaggcacagtctcgccatctgcatccatcttgtttgggctccccacccttgagaagtgcctcagataataccctggtggccatggacttctctggccatgctgggcgtgtcattgagaacccccgggaggctctgagtgtggccctggaggaggcccaggcctggaggaagaagacaaaccaccgcctcagcctgcccatgccagcctccggcacgagcctcagtgcagccatccaccgcacccaactctggttccacgggcgcatttcccgtgaggagagccagcggcttattggacagcagggcttggtagacggcctgttcctggtccgggagagtcagcggaacccccagggctttgtcctctctttgtgccacctgcagaaagtgaagcattatctcatcctgccgagcgaggaggagggccgcctgtacttcagcatggatgatggccagacccgcttcactgacctgctgcagctcgtggagttccaccagctgaaccgcggcatcctgccgtgcttgctgcgccattgctgcacgcgggtggccctctgaccaggccgtggactggctcatgcctcagcccgccttcaggctgcccgccgcccctccacccatccagtggactctggggcgcggccacaggggacgggatgaggagcgggagggttccgccactccagttttctcctctgcttctttgcctccctcagatagaaaacagcccccactccagtccactcctgacccctctcctcaagggaaggccttgggtggccccctctccttctcctagctctggaggtgctgctctagggcagggaattatgggagaagtgggggcagcccaggcggtttcacgccccacactttgtacagaccgagaggccagttgatctgctctgttttatactagtgacaataaagattattttttgatacaaaaaaaaaaaaaaaaaaaaaaaa

SEQ ID NO: 116388 - DNA, 1000 bp, Homo Sapiens
agtgatggaaatgctctgtaatctacactgttcagtacaggtagctacggagcatctgaaatatggctagaaactacatttttgttttgattaatttaaatagccatacagttgctaccatactggtcacggcagctgtagactgactgggtccatagttcatcacctcaaaattctttcaaaatttattatctctttctctccttacatgtttatttcccaggcctaccctggtgattagaacagctgaagggcctttcttgttaggctgtccatgccctaaggatgggttcctgtttatccttgccacgcagctgagcttactgcatgtttatatctcccaaggactgttctctgctcagaaatgccctgtcaagggtgtggcatcacgcagtttcatccaagttgtttcaggaattgctgacactgctgggtgcagttctatcccctaaagcctagggtgtggccctttaacttccccttcagtagaactgggaaaggcagtaccattcctagttatgagtgaagcatccactttcttttgtaacaatgaggaacagaaaggataagactgaagagtgatcttttgtccaactaaaccatttatctccttttgtaggtaaattcaaatcctgcccagttatagttttcagtcactggagaattccaggtaggagccctactttaggtgatcctaggaactcctatgttcagaaaagaattttcttcctactatataattacagtatttagctgtcaattttaagatgaatttggtagagccttatagtaaagtatgtatcttggtcacacacaaagcttggaaaaagtaaaagatgtctaaaccataatcttgtaactcataacatctgggctggggcccggggatctaattgtttagagagccccaaaagtggctcagatgtaaagccagggttaagaaccatctgccttggaagatttaagggaaacatataaacttgtacaaaggacaaaaaaa

SEQ ID NO: 116389 - DNA, 1000 bp, Homo Sapiens
gactaaatgctggggaggtaaattaagacagaaccaaatgagctaagttgcaaatatatatatatacacacacacacatatatgtacatgtgtatgtacatatatattttaaaagactgtttactgcagttgctcaggaactgcttttgattcacattaagctgctttcagaaattaaaaaaacactttttaaagggtgcattgataaaatctgaggttttttggttgtcgtttttttctgtgtacatttttttcctaagtttatggcacagggtagaccttaagtattcctcctccatccttcattcttcaccctccattggatcctcaagttttaatgaattccaattataccttacatcagcaagttaaaaaaagtactttaaaataaagcaaagggagactgttgctcaaccatcaggaaacagttgtcagaagacatcattggttctgtgtttcctacggaaataagaaacgataaatattgcactgaatgtttgtggtttggagtccctgaataataaagagggaatatatttgcagaaagtcgcatagggttttttaatgcagaattttgtcagaagacaatggcgctgcatgtttttctttgagtgcaaatgtacattgctaagatttttttaagatggcatgtgctttgaaaagaagatattgcatttttaagagtttaaaaatcttatgagtgagaaatattaaaaaaatcttattttcacctctttagaagaaataaaagatgtttctcctatctccttttctctagtatttgactgttactgtccttggcgaatcgataatcattgcatagtgactgaaaagcctaagtgcaaaaaaaaaaaaaaaaagatgttcttgtttctgaacttcgtgccatattttgttcctgatgggatcaacttaatgtttaagactttagatgtcttgtattaaaaattacacaaaaaaagtaaaactttttatacttaaaaaaaaaaaaaaaaaaaaa

SEQ ID NO: 116390 - DNA, 1000 bp, Homo Sapiens
ggtagatgtgggtggggagaagacacaaggcagtttgttctggctagatgagagggaacccaggaattgtgaggttagcaggaatatctttagggtgagtgagttttccttgagttgggcacccgttgtgagagtttcagaacctttggccagcaggagagaggtggtagggagcagccagccggcaaaggaaggaggtggaaaaaaaccgccaccgggctgacttccacctcccagtggtgagcagtgggggcccaaacccagtttccttctcatttttgttagtttgccctttcggcctccctattttcttagggaaggggagtggggtccaagtgacagctggatgggagaagccatagtttctcccagtcagctaggatgtagccattgggggatctttgtggcttcagcaaattctcttgttaaaccggagtgaaaacttcaggggaagggtggggagtcagccaagtgcctcagtgtgccctgttgaaacttaggtttttccacgcaatcgatggattgtgtcctaggaagacttttcttttcctctggatttttgttcctcctgtacaagaggtgtctttgcttggtttggtggggctgcggccacttaaaacctcccgatctctttttgagtcctttattataagtagttgtagctgcgggagggggagggggagtgggcgggcagtggatagtaagacttactgcagtcgatttgggatttgctaagtagttttacagagctagatctgtgtgcatgtgtgtgtttgtgtatatatacatatctagggctagtacttagtttcacacccgggagctgggagaaaaaacctgtacagttgtctttctcttatttttaataaaatagaaaaatcgcgcacttgcgcgtcccccccccacccccttttttaaacaagtgttacttgtgccgggaaaattttgctgtctttgtaattttaaaactttaaaataaattggaaaagggagaaactga

SEQ ID NO: 116391 - DNA, 1000 bp, Homo Sapiens
gttttgaacttagatcatttcaggtgttgtttggtggataaaggaaccttttatttataaagatactgtagaaagcatgtgaacagctctctgcttgattaagatgccataatagtgctgtatttgcagtgtgggctaagacaaagtatattaataagcttttcagcccccccactcccgttccgtagtgtagaagcccacaggtgtagaactcagtcttaaacttcagtatgaaaccagtttccttgtgcgatgatggccactaaagcatagtacgtggatgtcagtgagacagcatgagagccagcagtcatcaaagcgttccacgtttgaagttagcaactgcttaaagttatgccctattaaaattgctttctcaaaagtttgggttagtttcaaatgtgatattttggagggaaggtaaagtaggtatctttcaggtcgtgataatgagctcctatgaaaggatgcaatataatgacccgcttttctagaaagttcataatcagctctggaacaagcacacttgattcctcactgtgcttcagaatgagattaagatcagatgttggaacgtgctatgctgtagcgtgtctggaaacaaagtacacaaacctggctacggtgatgagttagcttctgcttactacctgtgacaacccaagtgggtgacactagtgaaccttctccagtctgcaggctggcatagaaggctcttagattatattgggcagcttgcaatctgccgaagcagtgacttgcatttccacacttggcttgagcactcaacccagaaggcgaagatagcttttggttgtaggcggcttcctgtatgggatatccctcggtaagggtaaaggagcagaggcaaaggagaaaagcagaagttgcagctgatgcaggtatcctatgcccttgatggatgagactaaaataaaatttttgaagttaaaaaaaaaaaaaaaaaaaaaaaaaaaaaaaaaaaaaaaaaaaaaaaaaa

SEQ ID NO: 116392 - DNA, 1000 bp, Homo Sapiens
atgtcggactggatactacgaagttcatcgtggatgggtggcatgaaatggatgcagagaacccattacatcagcccagcccatccttaaataagctggtagcagagaacaagttcggcaagaagactggagaaggattttacaaatacaagtgatgtgcagcttctccggctctgagaagaacacctgagagcgctttccagccagtgccccgagtgcctgtgggaatgctctttggtcagacattccctcacacagtacagtttaataaatgtgcattttgattgtaatctatcgaagtgattattacaccagttacagcagtaatagattctccattaagaaataattcccttttttagtctgttcatttctgtgtattttctaaacagctttacacccttggtgccttggagcaaacatgttttttgaaccttgtcatttttgtgaagaattgcctagattccttctctcatcaacgggaaagtacttcctctgagagtgcgagtgcaccatgctcactgttgctgcgtgggagagtcacaagccactggcaagcaagtggtatagtctgtgaagcactgcagcgagcagcacctggatcttgcctttataagaacattttactacctgcagctttgagtcttgccctacattttgggcatgacataagatgtgtctttattcagctcgtcgtgaagatgctgctgctgaatgggtcagcatatctctgtttgcatggtttgcaggaggtcggttttcatggtcattcagttccacagatctgaatgattactgtctgtctgtgtcttttttccatgagaaatcactgttgcaaattgcctataaattgactctactaaaataacaatgtttcagtctgaaaatttgaattgaaaaaaatgtataatataaaattgtaatacactcaaatgattataaaagtaaaagttggtaatttaggcaaaaaaaaaaaaaaaaaaaaaaaaaaaaaaaaaaa

SEQ ID NO: 116393 - DNA, 1000 bp, Homo Sapiens
acaacctctgaaaaagagcttttaaaaagtgatgaaagttgcttttttttcttactattttctcaggaatactccagagatgtaaagcctgagagtccatggtgatgctcaagagctttcatctggccaaatattttaactaaagctgttcattataaataagaggtgattataccttttttaaaaaaagttaccattatttctaaagcccctatggtatgattgtgacctttaacaaaatgcaaaggtatacactggaaaggtactcagcaaaattctctccaaattctgatttatatgaatttcttggactggatagagtactttcaactataccttcctttggaacataccttttaaaaaatgttccctttaaatcctgttattctaatatgtaactctgctcccaacaaacaggtctcctcattgtccttggcatttgacaagttatcccaacttcgaatctcatttcttcctttgctggcagcctccacccttccccacatcagtcggcctaatccaaaccttgaaagcctggcttaagtcccagtatcagtgatggtccccctctaaaacatgattttatatttggctgagtgttaaaattcacaagatgagcatttttttcccagatggagaacgcttcaactcagtctagattttttttgtttgttttaaggaagctctaagtttgccattgaaactttttgtaccagtaatccataaactggttgttctatttatagcagcatgttacaaatgactgctttttttttttaactgtctatactattaaatcctttaatttatcctgaatgctgtagtgttaaattagtggatgaaattggcagtctgtgggtgattaatttggtatggatttgtcagttttgtgtggagtttaagaaatagaacagccttaaactctacatttcaaaatacttgtatattttaaaataaagctgattagttcacaggttttaaaaaaaaaaaaaaaaaaaaa

SEQ ID NO: 116394 - DNA, 1000 bp, Homo Sapiens
aagagaaagcagctttttcttaaaattcactgttgagaaacttgcatgtctggaggcggtgtcctctccgccctgtcgggtcctggatgagtacgagttatggtcacggtcacagcctgatctcttatgtgttcatagccattcgctctcccatcagaactgtttgtcctgaatgtgttcctctagttctagaaaatgaccactaatttaaaaaactcggttgtgaggtttgcccagaggcacttgttccagaatttcccctcctgcttcagccatgtccttgtcacttggcattctaagctaaagctttagcttcccaattcgtgatgtgctaggccaagattcgggagctgttgccagcctcgtcaaatatggaagagaaacaacctgcggtcaaaagggagtgatttgttaagtggtgcgcgtctatctcataactagatgtaccaaccagggaagggccaaggatggaaaggggtaacttttgtgcttccaaagtagctaagcagaagtgggggagcagtttagccagatgatctttgattaggcaaacattgagttttaaagaggctgtcaagttgaggccacttggtccattagctggggcagcaagatcactactcaacgttttcacactgtggcaagattgctcttctagtggaataatgccctagtttctctgagatgatgtaagtggcatgatgttacctaaggcttaggcttagcttgatttctgggcccactgtctgtgttcttaagatgccaacctgttgctttttttttttttttcccccatttaaaaggatagtacctactccctctaaccacctcaccccattcttgaatgacattttatccttcggaaagaacaaggctgtgatgtagtgactattgtctgtgtctcctgtgtgtgtctgttcttgtcacaaatgtatttggggacgttggatgcattcattttctgtaataaagtttcttaatcactcttcccaaaaagtaa

SEQ ID NO: 116395 - DNA, 1000 bp, Homo Sapiens
aaggacgagccacagacggtgcccgacgtgccgagcttcggcgagagcccgccgttgtcgcccatcgacatggacacgcaggagcgcatcaaggcggagcgcaagcggctgcgcaaccgcatcgccgcctccaagtgccgcaagcgcaagctggagcgcatctcgcgcctggaagagaaagtgaagaccctcaagagtcagaacacggagctggcgtccacggcgagcctgctgcgcgagcaggtggcgcagctcaagcagaaagtcctcagccacgtcaacagcggctgccagctgctgccccagcaccaggtcccggcgtactgagtcgggcatggcggccacctccaaggggcgggctcgcgggggggtgtcgtgggcgccccggacttggagagggtgcggccctccacccccccctccccgagtgtgcccaggaactcagagaggcgcggccccggggattcccccccgaggtgcccaggactcggaaggggcgccccggactcgacaagctggaccccctgctcccgggggcgagcgcatgacccccccgccctcgcgctgcctctttcccccgcgcggccgccccgtgttgcacaaacccgcgcgtctcggctgcccctttgtacaccgcgccgcaagggggctccgagggggcgcacgtcaaaccctgcctttcctttacttttactttttttttttctttggaagagagaagaacagagtgttcgattctgccctatttatgtttctactcggggaacaaacgttggttgtgtgtgtgtgtgttttcttgtgttggttttttaaagaaatgggaagaagaaaaaaaaattctccgcccctttcctcgatctcgctcccccttcggtctttcgaccgtccccccctcccctttttttgttctgttttgttttgttttgctacgagtccacattcctgtttgtaatccttggttcgcccggttttctgttttcagtaaagtctcgttacgcca

SEQ ID NO: 116396 - DNA, 1000 bp, Homo Sapiens
gtctggatgtgtttactgaaacattttaataaggaagtttatttttgataaagttatgtttttggatacaatatatttgtatggtgagagtgatgaattgttggatcatttgaataaaatcttttactaaccccatgataaaaggagaagacaacagtgagcttagaatatctataaagcaaaaaatgtagtctcttgtttaaaaaatctggagcgggaatgcaaggatacaaaactttagcatgctttgagcaaaaatttaaacttactggaatcttttataataatgtaagtggaatggaggattctaggaactgagaactgtattggaataggttcaaaatatgtaagaaatgctaatgtgggagataaaaattttatttagtacttattctgattattattaaagtaataatgtgttccttgaggataacttgtcaaatgccccaaagcataaagaatataattctgaatcccaaattccaaagacaagaactctgtgtttgaattcattctgcatataattatttataagtatagattgtgaatttttccatgttcttaaaattatttttatcttttttcatggttgcatagtgctccattgtttggccttggtaatatttagttgataattccattactgtgtatttttcacttgtttctaagatcaaacattttaatatgtgcatgttatatataaatatgtaaattctgtgatactctatgatcatctctttctttatattattttcatagacatgaaatagttgctcagagattatgcattttaagacactcatagtatatattgccaaagtggtttccagaaaggcactgctggcttcgactcctataagcagcacgtgggcttgttcatctcactgcatgtttatgaagatacagttcttttgccttgttctctgcctgatgtgtatgcagaggcagccctcaatatgcagtggttgaataaatgaatgaagaaaccactaaaaaaaaa

SEQ ID NO: 116397 - DNA, 1000 bp, Homo Sapiens
aacatcgatatgtatatcattctacagaataatccagtattgctgattttaaaggcagagaagttctcaaagttaattcacctatgttattttgtgtacaagttgttattgttgaacatacttcaaaaataatgtgccatgtgggtgagttaattttaccaagagtaactttactctgtgtttaaaaagtaagttaataatgtattgtaatctttcatccaaaatattttttgcaagttatattagtgaagatggtttcaattcagattgtcttgcaacttcagttttatttttgccaaggcaaaaaactcttaatctgtgtgtatattgagaatcccttaaaattaccagacaaaaaaatttaaaattacgtttgttattcctagtggatgactgttgatgaagtatacttttcccctgttaaacagtagttgtattcttctgtatttctaggcacaaggttggttgctaagaagcctataagaggaatttcttttccttcattcatagggaaaggttttgtattttttaaaacactaaaagcagcgtcactctacctaatgtctcactgttctgcaaaggtggcaatgcttaaactaaataatgaataaactgaatattttggaaactgctaaattctatgttaaatactgtgcagaataatggaaacattacagttcataataggtagtttggatatttttgtacttgatttgatgtgactttttttggtataatgtttaaatcatgtatgttatgatattgtttaaaattcagtttttgtatcttggggcaagactgcaaacttttttatatcttttggttattctaagccctttgccatcaatgatcatatcaattggcagtgactttgtatagagaatttaagtagaaaagttgcagatgtattgactgtaccacagacacaatatgtatgctttttacctagctggtagcataaataaaactgaatctcaacataaaaaaaaaaaaaaaaaaa

SEQ ID NO: 116398 - DNA, 1000 bp, Homo Sapiens
cggattcgggccctacgcgcagctcctgcaggtggcttccagaacatcgcctgtctccgtagcaatgccatgaagcaccttcctaacttcttctacaagggccagctgacaaagatgttcttcctcttccccgacccacatttcaagcggacaaagcacaagtggcgaatcatcagtcccaccctgctagcagaatatgcctacgtgctaagagttggggggctggtgtataccataaccgatgtgctggagctacacgactggatgtgcactcatttcgaagagcacccactgtttgagcgtgtgcctctggaggacctgagtgaagaccccgttgtgggacatctaggcacctcaactgaggaggggaagaaagttctacgtaatggagggaagaatttcccagccatcttccgaagaatacaagatcccgtcctccaggcagtgacctcccaaaccagcctgcctggtcactgactgcttactctaccttagctggacctcgtctcccagggactagagaaaagagcaggagtcctgggtcttcccagttgagactgctggagctgagacacagtactctcttaaagaaggtggggagctgcccagggcagaacccactggtgttcatgactacccctggctcctctcaccttgtccctccactgccaacagaaaacaaagcagctgactgagatggtcaaaggactttggaccataggggatctttggaaggctgtggggtcttgctcttccttagcactcctttctccttgtgagatctctcctcagctggaatgaggaatgtagtccatctaaactgcttgctaggctcaattaccacttctgtttgctttgtggatcctgggataacatgtatatgtgtacacatgcctattctgccatttctcaggaaagggtggagtatgtatcatatgccttctaccatcctcctgtcctctccctgcgtaagacttgacctggggaatctgtgttccct

SEQ ID NO: 116399 - DNA, 1000 bp, Homo Sapiens
acactccaaacctgaagtttttttgctgctgcctctttccctaggaaactcacactcccctagggggagaagaagccgagagccttttgtgcaaagccaaaaccttcgtccttttaaaaacctaggtctccagttggctttactttaaaatgccaataataaatgccctcttctcgtgcctccccaccaccacttaccactcgtgcatccctgagacagggagggaagaatgaacactccccattaacagatggaaaaactgaggcttagagatagacaatcactacaagtcagctccagctttctgccatctagccagcccctcttccccaatgctccatcccaaccaggcacctcttccttgatgtttggggtctttgtggtagcttatcttagaagcactacaccttgccttgctgtttgtcctgagatggaaaagtgtccttcttgctccccctcaatagatctccagcgtcagctgctccctggcattcaacaaatattcactggcccctactttgtggcaatctgtgggctacatgctggggtcaaggcagtagaactccaggccctcctctcccatccttgatgcaagtgcaacctcgctgagggcagactggggcatcctgtgccactaaactacattgttcttattctggcatcttagacctccacacccgtgagaaatcctggagagggtatttttgtagagtgtagactgtggctagtgacaaataaattaggaccaagaaagctcactgtagcttttaggaataacttttacacgaccatttgatagggaactggggaatggggtatggaagttttcctacacttgagagaaaaaataggataacaaaaattaaaagtcttttttttcctggtccactgtgttaaggtcatttttaaccagcttgctttctacaccaagagtttatgtttgtttaatggctggaaagagaatcttgagatcaaaaaaccaataaagatgtatctctac

SEQ ID NO: 116400 - DNA, 1000 bp, Homo Sapiens
tgggtggtattggagaaagaagatgaattatagctccggagaatcaagatcttaagtgaagcctttctgttcagatgtgatctataaataatcataatttggggaaagtttaagcaaatctggctttgtagtcctgatgttataagtgactttgtgatcaaactgtcaggcttgggttcttgttatagaatgcttggtatagaaaaaccatgccatcattaatggctaacaacacgtagggacttcatgtcatgtcaaagatagctctttgcaagtgccttgattaaaccagaaaactgtcatcgtttaacccaaatatctgaatggtcatctggtaactcatgggtttttggcctcataagatggtccactctgtacacaggcattcctcctgcaataatgttgtatctttgagaccgttgtcagtgtacacaactcacatccttcatattgaaggtgactcatttttctgcacacttttttgatgtgatgcttgacgtgaggcccgacactaggattctcaatgcaagaatccagtaccttgcacatagaagtagcaacccatcccttgcctattttcatcttgctgttttcttttttttaaaaaaatggatgtgacttgttttgaatgttttgtattatacttgtttttgtgtgtgcataaattcattctgtaggatcttaagaaaaagagtcccagaatgttgcttctattattgtgcacaaccattgagaggtgttacaagaatgcagttaattttaacatgtgtgatgtgccatggtggaaaagtactatcggaataactctgcagtgacagaatttgaagtttggctagcatccatacttttctactgtaaatatttcactctcctctagctatccttgatgagcttctcactttaagaataaatgtgtttgatataaaaaaaaaaaaaaaaaaaaaaaaaaaaaaaaaaaaaaaaaaaaaaaaaaaaaaaaaaaaaaaaaaaaaaaaaaaaa

SEQ ID NO: 116401 - DNA, 984 bp, Homo Sapiens
accagatcccagaggctgaacacctcgaccttctctgcacagcagatgatccctgagcagctgaagaccagaaaagccactaagactttctgcttaattcaggagcttagaggattcttcaaagagtgtgtccacgatcctttgaagcatgagttcttaccagcagaagcagacctttaccccaccacctcagcttcaacagcagcaggtgaaacaacccagccagcctccacctcaggaaatatttgttcccacaaccaaggagccatgccactcaaaggttccacaacctggaaacacaaagattccagagccaggctgtaccaaggtccctgagccaggctgtaccaaggtccctgagccaggctgtaccaaggtccctgagccaggttgtaccaaggtccctgagccaggctgtaccaaggtccctgagccaggttgtaccaaggtccctgagccaggctacaccaaggtccctgaaccaggcagcatcaaggtccctgaccaaggcttcatcaagtttcctgagccaggtgccatcaaagttcctgagcaaggatacaccaaagttcctgtgccaggctacacaaagctaccagagccatgtccttcaacggtcactccaggcccagctcagcagaagaccaagcagaagtaatttggtgcacagacaagcccttgagaagccaaccaccagatgctggacaccctcttcccatctgtttctgtgtcttaattgtctgtagaccttgtaatcagcacattgtcaccccaagccatagtctctctcttatttgtatcctaaaaatacgtactataaagcttttgttcacacacactctgaagaatcctgtaagcccctgaattaagcagaaagtcttcatggcttttctggtcttcggctgctcagggttcatctgaagattcgaatgaaaagaaatgcatgtttcctgctcttccctcattaaattgcttttaattcca

SEQ ID NO: 116402 - DNA, 1000 bp, Homo Sapiens
gttgcccaggctagagtgcaatggtgcaatcacagctcactgcagcctcaacctcctgggttcaagcaatcctcctacctcagcctcctgggtagctagcaccatggcatgcgccaccatgccctattttttttttttaaagacagggtcttgctatattgcccaggctggtcttgaactgggctcaagtgatcctcacgccttggcctcccaaagtgctgggattataggcatgagccactgtgcttggccaggatttttttttttttttttttgagatggagtttctctcttgttgtccaggctggagtgcaatggtgtgatctcggctcactgcaacctccgccttccgggttcaagtgactctcctgcctcagcctccccagtagctgggattacagatctgcaccaccatgcccagctaattttgtatttttagtagagacggggtttctccatgttggtcaggctggtctcgaactcctgacctcaagtgatctgtccacctcggcctcccagagtgctgggattacaggcgtgagccactgttcccagcaggaatttcttttttatagtattggataaagtttggtgtttttacagaggagaagcaatgggtcttagctctttctctattatgttatcatcctcccttttttgtacaatatgttgtttacctgaaaggaaggtttctattcgttggttgtggacctggacaaagtccaagtctgtggaacttaaaaccttgaaggtctgtcataggactctggacaatctcacaccttagctattcccagggaaccccagggggcaactgacattgctccaagatgttctcctgatgtagcttgagatataaaggaaaggccctgcacaggtggctgtttcttgtctgttatgtcagaggaacagtcctgttcagaaaggggctcttctgagcagaaatggctaataaactttgtgctgatctggaaaaaaaaaaaaaaaaaaaaaaaaaaaa

SEQ ID NO: 116403 - DNA, 1000 bp, Homo Sapiens
atgtttacagacaagttcattccattattagacgttccctgccagcaacactaccacagtgtcaggcagcgaacaagacctgccccaccaattacatgtggaataatcacatctgcagatgcctggctcaggaagattttatgttttcctcggatgctggagatgactcaacagatggattccatgacatctgtggaccaaacaaggagctggatgaagagacctgtcagtgtgtctgcagagcggggcttcggcctgccagctgtggaccccacaaagaactagacagaaactcatgccagtgtgtctgtaaaaacaaactcttccccagccaatgtggggccaaccgagaatttgatgaaaacacatgccagtgtgtatgtaaaagaacctgccccagaaatcaacccctaaatcctggaaaatgtgcctgtgaatgtacagaaagtccacagaaatgcttgttaaaaggaaagaagttccaccaccaaacatgcagctgttacagacggccatgtacgaaccgccagaaggcttgtgagccaggattttcatatagtgaagaagtgtgtcgttgtgtcccttcatattggaaaagaccacaaatgagctaagattgtactgttttccagttcatcgattttctattatggaaaactgtgttgccacagtagaactgtctgtgaacagagagacccttgtgggtccatgctaacaaagacaaaagtctgtctttcctgaaccatgtggataactttacagaaatggactggagctcatctgcaaaaggcctcttgtaaagactggttttctgccaatgaccaaacagccaagattttcctcttgtgatttctttaaaagaatgactatataatttatttccactaaaaatattgtttctgcattcatttttatagcaacaacaattggtaaaactcactgtgatcaatatttttatatcatgcaaaatatgtttaaaataaaatgaaaattgtattat

SEQ ID NO: 116404 - DNA, 1000 bp, Homo Sapiens
catctcccatgatgtatgctggaccaactgaggtccagtggcattgcagagcacggatggttgcaggagccaacttttacattgttggacgagaccctgctggcatgcctcatccagaaacagggaaggatctttatgagccaagtcatggtgccaaagtgctgacgatggcccctggtttaatcactttggaaatagttccctttcgagttgcagcttacaacaagaaaaagaagcgtatggactactatgactctgaacaccatgaagactttgaatttatttcaggaacacgaatgcgcaaacttgctcgagaaggccagaaaccacctgaaggtttcatggctcccaaggcttggaccgtgctgacagaatactacaaatccttggagaaagcttaggctgttaacccagtcactccacctttgacacattactagtaacaagaggggaccacatagtctctgttggcatttctttgtggtgtctgtctggacatgcttcctaaaaacagaccattttccttaacttgcatcagttttggtctgccttatgagttctgttttgaacaagtgtaacacactgatggttttaatgtatcttttccacttattatagttatattcctacaatacaattttaaaattgtctttttatattatatttatgcttctgtgtcatgattttttcaagctgttatattagttgtaaccagtagtattcacattaaatcttgctttttttccccttaaaaaaagaaaaaaattaccaaacaataaacttggctagaccttgttttgaggattttacaagacctttgtagcgattagattttttttctacattgaaaatagaaactgcttcctttcttctttccagtcagctattggtctttccagctgttataatctaaagtattcttatgatctgtgtaagctctgaatgaacttctttactcaataaaattaattttttggcttcttaaaaaaaaaaaaaaaaa

SEQ ID NO: 116405 - DNA, 900 bp, Homo Sapiens
atgcacagcctggcgacggctgcgcctgtgcctactacactggcacaagtggatagagaaaagatctatcagtggatcaatgagctgtccagtcctgagactagggaaaatgctttgctggagctaagtaagaagcgagaatctgttcctgaccttgcacccatgctgtggcattcatttggtactattgcagcacttttacaggaaattgtaaatatttatccatctatcaacccacccaccttgacagcacaccagtctaacagagtttgcaatgctctggcattactgcaatgtgtagcatcacatccagaaaccaggtcagcgtttctcgcagcacacatcccactttttttgtacccctttttgcacactgtcagcaaaacacgtccctttgagtatctccggctcaccagccttggagttattggggccctggtgaaaacagatgaacaagaagtaatcaactttttattaacaacagaaattatccctttatgtttgcgaattatggaatctggaagtgaactttctaaaacagttgccacattcatcctccagaagatcttgttagatgacactggtttggcttatatatgtcagacgtatgagcgtttctcccatgttgccatgatcttgggtaagatggtcctgcagctatccaaagagccttctgcccgtctgctgaagcatgtagtgagatgttaccttcgactttcagataaccccagggcacgtgaagcactcagacagtgcctccctgaccagctgaaagacacaaccttcgcccaggtgctaaaagatgacaccaccacgaaacgctggcttgcacaactggtgaagaacctgcaagagggccaggtcaccgatccccggggtatccccctgccccctcagtga

SEQ ID NO: 116406 - DNA, 1000 bp, Homo Sapiens
tgtctttatggagtccagctatgaaggagccactggcaaagattctctgtcatcgtggtggggtccgggctgtggcagtagattctacaggcacgtacatggccacctctggcctagaccaccagctgaagatctttgacttgcgagggacgtaccagcctctgagcactcggaccctgccccatggagcagggcacctggccttctcccagaggggactgctggtggcgggaatgggtgacgttgtcaacatctgggcagggcagggcaaggccagcccaccctcccttgaacagccctacctcacccaccggctctcaggccctgtgcatggccttcagttctgcccctttgaagatgtgctgggggtggggcacactgggggcatcaccagcatgctggtccctggggccggtgagcccaacttcgatggcctggagagtaatccatacagaagccggaagcagcgccaggagtgggaggtgaaggccctgctagagaaggtacctgcagagcttatttgtctggacccacgagccctggccgaggtggatgtcatctccctggagcagggaaagaaggagcagatagagaggctgggctatgacccgcaggctaaggctcccttccagccaaagccaaagcagaagggccgcagctccacggcaagcctggtgaagaggaagaggaaggtcatggatgaggaacacagggacaaggtccggcagagccttcagcagcagcatcataaggaggcgaaggccaagcccacgggggcccggccatctgccctggacagatttgtgcgctgagccagactccagggttgcctgggaacagtctctccccaagatcacctgtagggaaatgagtgttccctggaacaaggaggtgggggcagtgtggccccttccccaactgggggtggacagctgtctcctggggtgggttggtattaaagaggaaagcgattttttggaaaaaaaaaaaaaaaaaaaaa

SEQ ID NO: 116407 - DNA, 1000 bp, Homo Sapiens
acatgcacctcaatctgcggccgtttgactgccccgtgtgcaacaaaaagttcaagatgaagcaccatctgactgagcacatgaagacgcacacaggtctcaagccctacgagtgcggagtctgcgccaagaagttcatgtggcgagacagcttcatgcgccaccgaggacactgtgagcgccggcaccgcctgggcggggtcggggccgtacctgggcctgggactcccacggggccatccttgccgtccaagagagagtctcccggagtgggcgggggcagcggcgacgaagcgagtgcggccacgcccccgtccagcagacgtgtctggtccccacccagagtccacaaggtggagatgggcttcggtggaggtggaggagcaaactgaaggggcaggctactggggtggggtagctttcgggaaagggaataaggagcacgatgcaagggcgctgtggcccccgggtgatctcccaccacacttactgtcttcctttatctctgtggacttgtatatattctggaaggggaaccacagtttcaccatcacccgcccattctactactcaacccctcccccccaaggtatttccagaactaaacccttcctttccctctgatgggtacactgaagcccctgctccacagagtagattgcacatggagggagggagagggggcgtgttgaacatcctgcagtcacagggtcaggggtcaggtggttgtagtctgtgcctgaagtctgtgtttgtgttgtcgtggagacaaggcctttgagccccacccttgtcctagaacctaccccctctcaaggatgcgctctttatttctaccctgtctctccccgccacccccgacttcccgtggaaattcccaactcggttctcatggaggagtgggtggagacaaggagggagtaagtcgtaggagtacaaggtttttattttttttaacagtgattaaaatatttattggtcatttaaaaaaaaaaaaaaa

SEQ ID NO: 116408 - DNA, 1000 bp, Homo Sapiens
gcccagccctgacagtactgctgcccagaaagttgccacaagtcccaagagtgccctcaagtctccatcttccaagcgtaggacatctcagaacttaaaactgagagttacctttgaggagcctgtggtgcagatggagcagcctagccttgaactgaatggagaaaaagacaaagataagggcaggactctccagcggacctccacaagtaacgaatcgggggatcaactgaaaaggccttttggagcctttcgatctatcatggagacactaagtggcaaccaaaacaataataataactaccaggcagccaaccagctgaaaacctctacattgcccttgacctcacttgggaggaagacagatgccaagggaaaccctgccagctccgctagcaaaggaaagaataaggcagcataatgacatcaatagaaaaatgaagaaatcctacagcataaagcacattgctgagccagagtcaaaagaactcttcttgtaaatcactttttaaattttctctcactgatgccctttggaaattattggaaatttctggactatcctctttggaaagagaaccatgaaaacaatgcctcaccagcagaagaacagaatatcaggatgccttaaatttatagtagtagactgtaaaagattcattttggggtgatatctgtatatataacttgtttttttaaaagatgccgtttaaaagcatgattgggaaaatgtacgttttttaagagtagattgattcaccctacccacaggacattcaccaagccactgataccattttatatttcatcaattgcatgagtatttgctaatgttgattgaacctccctttccccataatgtgggcagatttggctcagctccttcatgagatcaggtcagtggtattgtttctgtcaagagtgttttttctgtcatttctactttttgtataaaggaaataaaacaatgttaacagccaaaaaaaaaaaaaaaaaaaaa

SEQ ID NO: 116409 - DNA, 1000 bp, Homo Sapiens
tagtagaagctttgtaatcataacacaatgagtaattcttgtataaaagttcagatacaaaaggagcactgtaaaactggtaggagctatggtttaagagcattggaagtagttacaactcaaggattttggtagaaaggtatgagtttggtcgaaaaattaaaatagtggcaaaataagatttagttgtgttttctcagagccgccacaagattgaacaaaatgttttctgtttgggcatcctgaggaagttgtattagctgttaatgctctgtgagtttagagaaaagtcttgatagtaaatctagtttttgacacagtgcatgaactaagtagttaaatatttacatattcagaaaggaatagtggaaaaggtatcttggttatgacaaagtcattacaaatgtgactaagtcattacaaatgtgactgagtcattacagtggaccctctgggtgcattgaaaagaatccgttttatatccaggtttcagaggacctggaataataataagctttggattttgcattcagtgtagttggattttgggaccttggcctcagtgttatttactgggattggcatacgtgttcacaggcagagtagttgatctcacacaacgggtgatctcacaaaactggtaagtttcttatgctcatgagccctccctttttttttttaatttggtgcctgcaactttcttaacaatgattctacttcctgggctatcacattataatgctcttggcctcttttttgctgctgttttgctattcttaaacttaggccaagtaccaatgttggctgttagaagggattctgttcattcaacatgcaactttagggaatggaagtaagttcatttttaagttgtgtggtcagtaggtgcggtgtctagggtagtgaatcctgtaagttcaaatttatgattaggtgacgagttgacattgagattgtccttttcccctgatcaaaaaaatgaataaagcctttttaaacg

SEQ ID NO: 116410 - DNA, 1000 bp, Homo Sapiens
ggaatctatgatgctatctttgatattgaaaataaagccaactctcgtttggcctggaaagaagtaaagaaacatatttctattgcagcttttacaattcaagcagcagcaggaactctgaaagaagtattatagaaggtctcaagtggctagccattaaaggtgttgctaaaagtctgaggataaaattcacctttctgataacttatgaagccagggtgttctaaactcttttcatgtcatgttttgattataggctttggtcttttcatctgcaaagccttttttttttttgctctttaaaagttaataattatattagcaaagtgttaatctaatgaagtaaaaaactcctgtgtggcagaaagtaaaagaaaattccctaaattatagcaaggaacatgaattctcagacattgtgagtgtgggaatgtaaaatggtaaaatcacttttgaaaacagtttggcagtttcctataaagttaaacatacacttttactttaggactccagaattccacttctagttatttattcaagagaaggaaaaacaatgatcacagcaatacttgtatgcatgttcattgcaacttaaaagcgtaaaaaccccaaatgtccatccacagacgaatgtataaactgtggtatccattacacaatagactacttactactcagcaataaaaatgaagtaactttcaataaatgcaatattattggcagacattgttgaaggaaaaaagccagacaaacaactacataaaatatgtttctatttagatgaagtggcaaactaatctgtagtgttaaaaattagattagtgattgcctgggccaagtggcaggttggggaggatggctgcaaagaagtatgaggaaactttctccaatagatgagaattttccgtatcttgatctgagtggcaaattgtaaacttaaaatatatataaaatttattgaaagaaaattaagcctcaataaacgtgattataaaaaaaa

SEQ ID NO: 116411 - DNA, 1000 bp, Homo Sapiens
gagatcgagaccgccctggctaacatggtgaaacatggtgaaaccccgtctctactaaaaatacaaaaaattagctgggtgtggtggcgggtcccagctactcgggaggctgaggcaggagaatggcatgaaccccaggctggagtgcagtggctcaatgcaacctctgccccccaagttcaagtgattctcctgcctcagcctcttgagtagctgggattacaggcacatgcaccacgcccggctgatttttttttgtatttttagtagacagggtttcaccatgttggccaggctggtcttgaactcctgacctcaggtgatccgcccgcctctgcctcccaaagtgctgggattacaggtgtaagccatcacacctggccctagtgacaggtttttatgggtacttttagatgatctaagaaatcatgtgcatatatctttcagatttctattttgggaaaatgaaggtttctacaacatattgtttcagtgttcaaataaactgaaggactcaacattacatttgaactatatccttcctagtgggttagtgtgaaaaagagtttggctgattcctaaaactctgccagccctgcagtaatctccagggcctggttattgttcagacattccatggtgattcctgggaaggaagcttggctgctcagtttctgagtctggggtgagataatgttctgggaagggacatctgttctttggtgtaatctctcatggtgaaatctgctctgtacatcagacaattgcattgctaccaagtttcataccaaatatttgaaaggatggtattgaatctaaaaccaaatattagtttttattaaactcatgggaaggctaatatattccaacgtaaattattacatatggttaagtaattgcatgttaatttattttaatgtaaatatttttgttactgttctgagccaaattctaaagaaaaaataaatacatttccttgttgaaaaaaaaaaaaaaaaaa

SEQ ID NO: 116412 - DNA, 1000 bp, Homo Sapiens
gtgggggaaggctgtacgacacgggtggggaaaggaggtgggggcggggagtattgaatggtggtggaagggtagagaggcgcggagtgaaccccacgccctgtctaaagtgtattttcagagccggcccgcctctcctcggttcaaggtcactgtttcctgggcacgcactgggttgcgggacagagtagccaggttctgccggtgctcggagaagagcgcagtgttttgcaagtgctggagtctcctgaggacacgcgcgtcgccgccaccgcgggtgtgggaaagcgcggacgtgctgggcggctgtgcttcggtaggcgaccaccgcccctggccgcgctccgggctttcacggaaactcccgagaccgggccctgggttcctcctctcctactcggctctgcagtcctactcaagcgggtggctctgggatcctgggggcctgggttgggggctagggagacgccatgtgatggacactccagggacacacagcctagcacagcagcttataatgggctctccggggccatttgcaataacagctgcaattccctggatagacgagttgatttcctccctctgcccctcccccagccatgccagctggcctttgtaagtgcaggaaaccgagtagaaaatgtgaccctccaaatggagaagctgcaggctttgccattgtgaaccatggtgaagtgcttggaacatactgttcactcactctaaaggcgctgagactgtgctgttgttctcgtttttatagtcaatggcttgttcatcatccagatgtggctactgacatatctacacttcgcaccggagtgtctggaattgtggctatcctgattataggattttaacttaactgaaatgcctgctttgaataaatgtgttgggttttttgtttggttttattttatacttgccatcagtgaaaaagatgtacagaacacatttctctgatctccataaacatgaaaacacttgaaatctcaaa

SEQ ID NO: 116413 - DNA, 1000 bp, Homo Sapiens
taactctgggacttcccaccttcctggactgttaaaacactcagggctgccaaagccctgtcttccagaggagtgcggggaaccacagccctgccctccggcagagcctgggcccccagaggccttctgtaggagtgagcctgagataccagagccctccctccaggaacagcttgaagtaccagagccctaccctccagcagaacccaggcccctagagtcctgctgtaggagtgagcctgagataccggagtcctctcgccaggaacagcttgaggtacctgagccctgccctccagcagaacccaggcccctagagtcctactgtaggattgagcctgagataccggagtcctctcgccaggaacagcttgaggtacctgagccctgccctccagcagaacccgggccccttcagcccagcacccaggggcagtctggacccccagggccctgccctagggtagagctgggggcatcagagccctgcaccctggaacatagaagtctagagtccagtctaccaccctgctgcagtcagtgggctccagcaaccaccagcctgatcttctcttcccaacacccgctttgtgccagcccccctatctgctcactccagtctttgagacccccagcaggccaggcaggcctcagcaatctggcccctcgaaccctagccctgagggagcgcctcaaatcgtgtttaaccgccatccactgcttccacgaggctcgtctggacgatgagtgtgccttttacaccagccgagcccctccctcaggccccacccgggtctgcaccaaccctgtggctacattactcgaatggcaggatgccctgtgtttcattccagttggttctgctgccccccagggctctccatgatgagacaaccactcctgccctgccgtacttcttccttttagcccttatttattgtcggtctgcccatgggactgggagccgcccacttttgtcctcaataaagtttctaaagta

SEQ ID NO: 116414 - DNA, 1000 bp, Homo Sapiens
gggagcaaggtcatcatccgggagttccaggagcactgccgccggggactgctcagcaaccacaccggcagcccgcggagcccctccaccacctacctgcacacccccacccccagcgaggatgccgccatcccctctaagtcccggctcaagcggctcatttccgagaactcagtgtatgagaagcggcctgacttcaggatgtgctggtacgtgcacccgcaggtgctacagagcttccagcaggagcacctgcccgtgccgtgccagtggagctatgtgacatcggtgccctcggcccccaaagaggacagtggcagcgtcccctccacggggcccagccagggcactcccatctcgctgaagaggaagtcagcgggcagcatgtgcatcacccaattcatgaagaagcgcaggcacgacggccagattggtgctgaagacatggacggcttccaggcagacacggaggaggaggaagaggaggagggcgactgtatgatcgtggatgtcccggatgctgcggaggtccaagccccgtgtggagccgcttccggagctgggggtggtgtgggggtggacaccggcaaggccaccctgaccgcgagcccactgggtgcatcctgagagcaggggtgacgtatgtagaatgcttagggtgtcctccccacagagcagatacttgaaccgactcaattcctgtgtaaagagcactttgtcctgcttcacggacctccccaaagtgtgcagagttctatataggatgctggattagttcctttgatatttgtaaaaattcccccaagagccgcatatgaatctgccctttaataaagcattattgagattgctggcctattggggaagcctgcgggcacaggagcaggcgtggaatccaatacttgtaaatgaattgaagcgtcaggaccacccgcctggccacgtgcgcgggcccctggacctaacgaggcagtgtataaacttattctctagccctgaa

SEQ ID NO: 116415 - DNA, 1000 bp, Homo Sapiens
cgagctctcatggaagcatgcaatgaattctacaccaggattccgcatgactttggactccgtactcctccactaatccggacacagaaggaactgtcagaaaaaatacaattactagaggctttgggagacattgaaattgctattaagctggtgaaaacagagctacaaagcccagaacacccattggaccaacactatagaaacctacattgtgccttgcgcccccttgaccatgaaagttacgagttcaaagtgatttcccagtacctacaatctacccatgctcccacacacagcgactataccatgaccttgctggatttgtttgaagtggagaaggatggtgagaaagaagccttcagagaggaccttcataacaggatgcttctatggcatggttccaggatgagtaactgggtgggaatcttgagccatgggcttcgaattgcccaccctgaagctcccatcacaggttacatgtttgggaaaggaatctactttgctgacatgtcttccaagagtgccaattactgctttgcctctcgcctaaagaatacaggactgctgctcttatcagaggtagctctaggtcagtgtaatgaactactagaggccaatcctaaggccgaaggattgcttcaaggtaaacatagcaccaaggggctgggcaagatggctcccagttctgcccacttcgtcaccctgaatgggagtacagtgccattaggaccagcaagtgacacaggaattctgaatccagatggttataccctcaactacaatgaatatattgtatataaccccaaccaggtccgtatgcggtaccttttaaaggttcagtttaatttccttcagctgtggtgaatgttgatcttaaataaaccagagatctgatcttcaagcaagaaaataagcagtgttgtacttgtgaattttgtgatattttatgtaataaaaactgtacaggtctaaaaaaaaaaaaaaaaaaaaaaaaaaa

SEQ ID NO: 116416 - DNA, 1000 bp, Homo Sapiens
gccaaaacctcacctcaagccacgcatatgataattttctggaacattcaaattcagtgtttctacagccagttagtctacaaaccattgcagcagcaccatcaaaccagagtctgccacctttgcccagcaatcatccagcgatgacaaaaagtgatctccagccacctaattactacgaggtaatggagtttgatcccttagctcctgctgtcactacagaagctatttatgaagaaattgatgctcaccagcacaaaggagctcaaaatgatggtgactgagaagaaagtggatgatcagctcactaccacatcaaaggtgccaactctctaaaacgtagactctgtgcagctttgaagcctggaagacaatacctaccaacatgtcaaagccatggtggcacatttctgctataatgaagattaaatagaataacagttccaggataacactgattcctgacaacagcgtgagatttcaacagaacttgtttggaacaaatactcacttaaaacttcagcagaagaaaaattacttagtccttaggccaaccaatttaactgcagtgtcatgtttcacaggccttcctacatttagaaatcgtcacacagctgtgataagagtagattattttactatgaaataattctgaatagatgaaagcataaaatgtgagaaactgaatgtattattcaggaagaatactgagtgccttcatttaactaaagttgaatgtaaaagtcaatttgcacttctttataatcctctggtttagaattataaattgttaaaaccttgataattgtcatttaattatatttcaggtgtcctgaacaggtcactagactctacattgggcagcctttaaatatgattctttgtaatgctaaatagcctttttttctctttttactgcaacttaatatttctatttagaacacagaaaatgaaaatatttagaataagttgtacatttgatgacaaataaatcactatt

SEQ ID NO: 116417 - DNA, 1000 bp, Homo Sapiens
tggaggacatcgagcagtggctgtccactgacgtgggtaatgatgcggaagagcctaagggggtcaccagcgaagaatttgacaaattcctggaagaacgggccaaagccgcggaccgattgcccaacctctccagcccctcagctgaggggcccccgggtcccccatctggcccagcgccccggaagaagacccaggagaaagatgatgacatgctgtttgccttatgagtgtggggtctggcaccctgcagcccaggtccccactgctctcacacccttaggctgggacctccctccctcctctggtgttaaggctgctttgggggtggcttgttacccccttttcctcctctttgaagacggagctgccccagctgtggctgggggtgtggaggcagtgggatgaactgggggacaggtctgcgctgcagtgggatctggctgctctgcctcctttcccaccccagctgaccatgagactttgctgagaagtggaggccccaggacaggctggctggctggctggctgcttgacccagtgtgactctccttcactgagtgataccctgctccgggcccatgccccaaggagcccttcagagcccacactgccagtcgaggcctggctggaggctggccacagtggaaattctgccgagcctcttgtcccttccctgctctgctgcatggggccccatggctttggctggccactgagggtagggtgtggaggtgtggaggccccctgaggagctgcggcggcccaggtacgaagctgcaactctgcgcgcagtgggcgagatctcatcagccccaggctgcaggtgaggcttcaggggatgctgggccccactgcccctccgctgccttgccctccatccttcctctgttccttctggccgggcaccacagcactggggctcacctcttggttgatcctcttgtactgggagaggtgccttttgtatccccaattaaaggtagaaaaccaccctgct

SEQ ID NO: 116418 - DNA, 1000 bp, Homo Sapiens
aggggactggtagagctggcgctggcgctgcggccaggggcggcgggggacctgcccgggctggctgcagtcatgggcgccctgctcatgccccaggtgtcccggttggagcacacgtggcgccagctccgaaggagccacacggaggctgcgctggcctttgagcaggagctgaagccgctgatgcgggctctggatgagggcgctggaccctgcgaccccggcgaggtggcgctgccgcacgtggcacccatggttcgcctactggagggcgaggaagtcgcggggccgctggacgagagctgtgagcggctgttgcgcaccctgcacggggcgcgtcacatggtccgggacgcacccaaattccgcaaggtggcagcccagcgcctgcgaggattccggcctaacccggagctgagggaggccctgaccaccggcttcgtgcggaggctgctctggggtagccggggcgcgggagctccgcgcgctgaacgctttgagaagttccagcgcgtcctcggcgtcctgtcgcagcgcctggagcctgaccgctgagagcgcagacacccttcttcacacccgggacccccaggtttttgcgaaccccagaagagaccaaaggagtcgtcccaggctcctcgcgcctcaggtggaatcctgccctgtgcctcacagaagaggtggggaccgcagtcagggtcacctggaccatggtgaacatgtgacctgcagatctggcatcagaggccagagttcaaatgtgactccacctcttaaaagccgtgatttctagcagttgacttcacctctgtgtcggcctttaacaaaatcatagccatacagcagctcaggcctgtaatctcagcactttgggaggccgaggcggaaggaaggcttgaggccaggagttcaagaccagccagggcaacatggtgagacctcatctctacaaaaactgaaaaataaaaaacttttaaaaaatgtaaaaaaaaaaaaaaaa

SEQ ID NO: 116419 - DNA, 1000 bp, Homo Sapiens
cactggccgcagcaagaacaaatcagtagagctggaggatgtaaaattccaccagtgcgtgcggctctctcgctttgacaacgaccgcaccatctccttcatcccgcctgatggtgactttgagctcatgtcataccgcctcagcacccaggtcaagccactgatctggattgagtctgtcattgagaagttctcccacagccgcgtggagatcatggtcaaggccaaggggcagtttaagaaacagtcagtggccaacggtgtggagatatctgtgcctgtacccagcgatgccgactcccccagattcaagaccagtgtgggcagcgccaagtatgtgccggagagaaacgtcgtgatttggagtattaagtctttcccggggggcaaggagtacttgatgcgagcccactttggcctccccagtgtggaaaaggaagaggtggagggccggccccccatcggggtcaagtttgagatcccctacttcaccgtctctgggatccaggtccgatacatgaagatcattgagaaaagtggttaccaggccctgccctgggttcgctacatcacccagagtggcgattaccaacttcgtaccagctagaagggagaagagatgggggcttgaacacggggcttccttacagccccggatgcagattttagagggagggcaggtgcgggctgtgtgtgtctgtgtgagggcaggtcctggacttggcagtttcttgctcccagcacccgccccttcctcacctcttccttattccataggctgggagagaaactctctgcttccctcgcccttggagctttccccatccccctgattttatatgaagaaatagaagaggggcttgaagtccccctcgcgagtgccttcttgcaattacctgccttagcgggtgttgcgggtccctccttcacagccgctgagcccagaggtcccgctggcccctcctctgaattttaggatgtcattaaaaagatgaatcta

SEQ ID NO: 116420 - DNA, 1000 bp, Homo Sapiens
taggaaaggacgttgaatttgaagttgttggtgatgccccggaaaaagtggggcccaaacaagctgaagatgctgccaaaagcataaccaatggcagtgatgatggagctcagccctccacctccacagctcaagagcaagatgacgttctcatagttgattcagatgaagaagattcttcaaataatgccgacgtcagtgaagaagagagaagccgcaagaggaaattagatgagaaagagaatctcagtgcaaagaggtcacgtatagaacagaaggaagagcttgatgatgtcatagcattagattgaacagaaatgcctctaaacagaaccctcttactatttagtttatctgggcagaaccagattgttatgtcctttgttccaaagggaaaaaattgacagcagtgacttgaaaatgattctgctccctttgaaagcattcattttgctagaactgttagacacattgcagtatgctgtattgaaagtaggaatatagttttaaaaaccctttgaacaaagtgtgtgcataaccagtcatgagataaaacaacacaatgcatgttgcctttttaatgtaaatacccgtaggtatcattaatagtttcaaaatattgtggtttagtaaagttgatacctggttataaatattatgcctttatttttggctagaagaagaattatttttagcctagatctaaccattttcatactcttaactgattgaaacagattcaaagaagtatcgagtgctatgcattgaaacttgtttttaaatgttagatggcactatgtatattaatgtaaaacaatgttaatttactcaagttttcagtttgtaccgcctggtatgtctgtgtaagaagccaatttttgtgtattgttacagtttcaggttatttatattcgatgttttgtaaaactcaaataacgactatacttatggaccaaataaatggcatctgcattcttgttacaaaaaaaaaaaaaaaaaa

SEQ ID NO: 116421 - DNA, 1000 bp, Homo Sapiens
gcagcatgcccacctgtattccctgtccccttccttcatgaaggcatctccaggcaaggaaaactgaagtcattggcccgatacaaaacatttcctgcaacgaaggaggtggtgccgacgtgctgcttcccatcaccagcagctgctcgacaaggggcgcagggtggctgtctttgttccagcactgttcaggctgcctgtcatcccgggcctgccagctcccctgagtgatgagcacttccaagcacccctctgccctttctctgtccttatgctgtcccggcctcgcagccctctggggaattgtgggagatgcctgccaggaatgagcaagctctgttgctcgggagcctcttgtaaccttcttggacttattccccacctgataccttatagagaaaagtgtgaattcaggtggagagtaggcccaggcccatgaggcaccagtggaagcacagctccaagttcagacaggtgcccttagagaggaaaaccatgacaggcaaatgcatttcctctggagtttgagaccctgacaaacaacaggtggcatcctggtgtgctgttcttgagttttcgtttaggattagttgagttccagctgggttttgggagaaaggagatgctaccaagtctttggatgttaagggccgagacccctgcaaagttgagtattagagagcttgtctttcaaggccaggttccctggggcttcaagggctaggagggaggagcctgccccttttaacagaacccccagttacatgcggctcaagtcactcagaggctgttgcatttcagggctatgttggtcctttgtttacctcctaaaccacagctgtttgtgtttcacatatgttgtgaattttccttggttctttttaaaggaatgataataaagttacttgctttaggatttgcttgtttttcttccacttcagaagcttctgagagggaatgggatgatcctaccagttgccttttcagacctgaggctcta

SEQ ID NO: 116422 - DNA, 1000 bp, Homo Sapiens
cctgtgccctagatgcacgtggggcccactgctcgtggactgtgctggtgcatcacggatggtgcatgggctcgccgtgtctcagcctctgccagcgccagcgccaaaacaagccaaagagcctcccaccagagccgggaggaaaaggcccctgcaatgtggtgacacctcccctttcacacctggatccatcttgagagccacagtcactggattgactttgctgtcaaaactactgacagggagcagcccccgggccgctggctggtgggcccccaattgacacccatgccagagaggtggggatcctgcctaaggttgtctacgggggcacttggaggacctggcgtgctcagacccaacagcaaaggaactagaaagaaggacccagaaggcttgctttcctgcatctctgtgaagcctctctccttggccacagactgaactcgcagggagtgcagcaggaaggaacaaagacaggcaaacggcaacgtagcctgggctcactgtgctggggcatggcgggatcctccacagagaggaggggaccaattctggacagacagatgttgggaggatacagaggagatgccacttctcactcaccactaccagccagcctccagaaggccccagagagaccctgcaagaccacggagggagccgacacttgaatgtagtaataggcagggggccctgccaccccatccagccagaccccagctgaaccatgcgtcaggggcctagaggtggagttcttagctatccttggctttctgtgccagcctggctctgcccctcccccatgggctgtgtcctaaggcccatttgagaagctgaggctagttccaaaaacctctcctgacccctgcctgttggcagcccactccccagccccagccccttccatggtactgtagcaggggaattccctccccctccttgtgccttctttgtatataggcttctcaccgcgaccaataaacagctcccagtttgt

SEQ ID NO: 116423 - DNA, 1000 bp, Homo Sapiens
attttaatacagattgaaaggacctcttctgaagctagaaacaatctatagttatacatcttcattaatactgtgttaccttttaaaatagtaattttttacattttcctgtgtaaacctaattgtggtagaaatttttaccaactctatactcaatcaagcaaaatttctgtatattccctgtggaatgtacctatgtgagtttcagaaattctcaaaatacgtgttcaaaaatttctgcttttgcatctttgggacacctcagaaaacttattaacaactgtgaatatgagaaatacagaagaaaataataagccctctatacataaatgcccagcacaattcattgttaaaaaacaaccaaacctcacactactgtatttcattatctgtactgaaagcaaatgctttgtgactattaaatgttgcacatcattcattcactgtatagtaatcattgactaaagccatttgtctgtgttttcttcttgtggttgtatatatcaggtaaaatattttccaaagagccatgtgtcatgtaatactgaaccactttgatattgagacattaatttgtacccttgttattatctactagtaataatgtaatactgtagaaatattgctctaattcttttcaaaattgttgcatcccccttagaatgtttctatttccataaggatttaggtatgctattatcccttcttataccctaagatgaagctgtttttgtgctctttgttcatcattggccctcattccaagcactttacgctgtctgtaatgggatctatttttgcactggaatatctgagaattgcaaaactagacaaaagtttcacaacagatttctaagttaaatcattttcattaaaaggaaaaaagaaaaaaaattttgtatgtcaataactttatatgaagtattaaaatgcatatttctatgttgtaatataatgagtcacaaaataaagctgtgacagttctgttggtctacagaaa

SEQ ID NO: 116424 - DNA, 1000 bp, Homo Sapiens
tgcaggccgttaagtggacaggaagtggccccacatagcccgagcagggtctggaagcatcctgtgctgtgcacacctgctctctcctctctcccaggcaggcagctgcaggcgctctcctccttctctgcctgtttccctcctcccttcctttccaccctggtgtgggttctcctgttctctctgtgctcttgcattctctcattcccttttcctctatggagcagagcctggagtttgagactatggaatccaacctccccattgcacagatggggaaactgaggcttaggaagagaatgaaacttgtggagagcttatacagaacctctgggggaaaaaagagcccttatttgtggggtgagattgggggttggaccagagtgatgtcctctctcagctatcacatcacaagataatgctggctccaaacttcctttctgtgcctcatcatgcaaggatcttttttccctcttacaaaaacaggtaaaaagcctcacccagatgacccccatccctcataccatggagtcatgagctgtctgggaagaatggacgtgctgggaccaactcaagaccttgttttgctgtcttcatcatcttacctgtgcttggcccacagtctggctcatgatgtgggctcagtaatgtgcgagaaagtgaaaatgccactctctccaccccattttacagaggagaacaccaaggcccagaggaagttaagggagagtcaatgggcagagccagggctaggccctggtggtgtgtggagcacccaggcagacccagtcctggttgggatcacacccacgggtgctactgcacgtaacactcctccttaggcctggaggccaaggtgtgggtccccacgcctgatctttgaaaacactacacagggctgctgtcacttcccagggcccaggcctcagcccaggcctcgggaccaactctttgtataacctacctgaatgtattaaaaactaattttggaaaaaaaaaa

SEQ ID NO: 116425 - DNA, 1000 bp, Homo Sapiens
gcagcggagagcctacctggagggcgagtgcgtggagtggctccgcagatacctggagaacgggaaggacaagctggagcgcgctgaccccccaaagacacacgtgacccaccaccccatctctgaccatgaggccaccctgaggtgctgggccctgggtttctaccctgcggagatcacactgacctggcagcgggatggcgaggaccaaactcaggacactgagcttgtggagaccagaccagcaggagatagaaccttccagaagtgggcagctgtggtggtgccttctggagaagagcagagatacacatgccatgtacagcatgaggggctgccgaagcccctcaccctgagatgggagccgtcttcccagtccaccgtccccatcgtgggcattgttgctggcctggctgtcctagcagttgtggtcatcggagctgtggtcgctgctgtgatgtgtaggaggaagagttcaggtggaaaaggagggagctactctcaggctgcgtgcagcgacagtgcccagggctctgatgtgtctctcacagcttgaaaagcctgagacagctgtcttgtgagggactgagatgcaggatttcttcacgcctcccctttgtgacttcaagagcctctggcatctctttctgcaaaggcacctgaatgtgtctgcgtccctgttagcataatgtgaggaggtggagagacagcccacccttgtgtccactgtgacccctgttcccatgctgacctgtgtttcctccccagtcatctttcttgttccagagaggtggggctggatgtctccatctctgtctcaactttacgtgcactgagctgcaacttcttacttccctactgaaaataagaatctgaatataaatttgttttctcaaatatttgctatgagaggttgatggattaattaaataagtcaattcctggaatttgaaagagcaaataaagacctgagaaccttccagaaaaaaaaaaaaaaaaa

SEQ ID NO: 116426 - DNA, 1000 bp, Homo Sapiens
caagcctaaaaaggcccctgcaaagaagggagagaaggtacccaaagggaaaaagggaaaagctgatgctggcaaggaggggaataaccctgcagaaaatggagatgccaaaacagaccaggcacagaaagctgaaggtgctggagatgccaagtgaagtgtgtgcatttttgataactgtgtacttctggtgactgtacagtttgaaatactattttttatcaagttttataaaaatgcagaattttgttttactttttttttttttaaaagctatgttgttagcacacagaacacttcattgttgtttttgggggaaggggcatatgtcactaatagaatgtctccaaagctggattgatgtggagaaaacacctttcccttctagttttgagagacttcctcttggctcccaggaggagggattccctgactttgacacacatggccaccttggcacaaaagccttgtggtatagaaaaacaaatttgtttttatgtcctcttctccctttccatctttcagcatagacttaactcccttaagcccagacatctgttgagacctgacccctagtcattggttaccagtgtgtcaggcaatctggactttccagtgatgccactgagatggcacctgtcaaaagagcagtggttccatttctagattgtggatcttcagataaattctgccattttcatttcacttcctgaaagtcagggtcggcttgtgaaaagttgttaaacaacatgctaaatgtgaaatgtcaaccctcactctaaactttccctgttcagagcatcagatgaagacttcattgggttttatagtggctttctgatttttggtagtccattgaagaagggagtttgaaagttgttgtatactgttaacgattgtctgcccatgtcctgcctgaaataccatgattgtttatggaaagtatctttaataaagctggatacagtttggcttggaaaaaaaaaaaaaaaaaaaaaaa

SEQ ID NO: 116427 - DNA, 1000 bp, Homo Sapiens
agtgtgaataaaaacttcagatccaagaaatatataatgagagatataatttttgttaataagacaaaggtaatatattggatacaaagacacaaatgtattgtgtgttcaattattttgttgtcttgagatttaatattctttccaagagcttttaatgaagcagagagctagtacttcattttcactggatacattttcagcatcatgagttgtcacagcctctgagcccctgatctgaagccagaagggctgagtgtattgtaaacttattcttgcatgttgctgtctgggaatggaccacactacagcaggtagttctgggggcgatactgccgaaaggcccgaacacatgtattttggctgcaattgaggaacttgggatgctattaattttgtatttcagcaactgccccttctcctatcccaaagcaccaattactgccctctgcctcagcagtaccagtataagatgacattccaaagactggaggcaactcagcctgagttaattcacaaaattatgccatgctggggcttgagcttgagcttgggcttaggcttgggctcagcttttgaccctcaggcatctcctttcccttcctgtcttcctctcccttctcctctgctgcagcatgattttcttaatcttcagacactcactattttcatgaacagttaccctctgtccccacaaccaaagacaactcatggcctcctttggcccttgtgtaacattgcaaacctgtggctttgcaaaatgtacccaggtcacaaggggatttttttttttttagcaatgatatccctgtctgggtcactttttaagcttgtaaccgcccccccagacttataatcttaaatgtattttcctttgtttaagctgctgcttcctctgtttcattggattgtgccagttatcagtggctcttgggttcaaagtaataaagaattccaaaactgaaaaaaaaaaaaaaaaaaaaaaaaaaaaaaaaaaaaa

SEQ ID NO: 116428 - DNA, 1000 bp, Homo Sapiens
ggagcaggccagactcaagatgaggctgtgggacctgcagcagctgagaaaggagctcggggactcccccaaagacaaggtcccattttcagtgcccaagatccccctggtattccgaggacacacccagcaggacccggaagtgcctaagtctttagtttccaatttgcggatccactgccctctgcttgcgggctctgctctgatcacctttgatgaccccaaagtggctgagcaggtgctgcaacaaaaggagcacacgatcaacatggaggagtgccggctgcgggtgcaggtccagcccttggagctgcccatggtcaccaccatccaggtgatggtgtccagccagttgagtggccggagggtgttggtcactggatttcctgccagcctcaggctgagtgaggaggagctgctggacaagctagagatcttctttggcaagactaggaacggaggtggcgatgtggacgttcgggagctactgccagggagtgtcatgctggggtttgctagggatggagtggctcagcgtctgtgccaaatcggccagttcacagtgccactgggtgggcagcaagtccctctgagagtctctccgtatgtgaatggggagatccagaaggctgagatcaggtcgcagccagttccccgctcggtactggtgctcaacattcctgatatcttggatggcccggagctgcatgacgtcctggagatccacttccagaagcccacccgcgggggcggggaggtagaggccctgacagtcgtaccccaaggacagcagggcctagcagtcttcacctctgagtcaggctaggggcctccccttctcatcctccccacccccccgccaaggttctcacactggcctgggcttgggtgcccatataggaggtctgtatgttcaccaacagtgcggaggggtcacacattgcaaaacactgcccagaacagtaaaaagagcctgcatgccaaaaaaaaaaaaaaaaaa

SEQ ID NO: 116429 - DNA, 1000 bp, Homo Sapiens
ctttcagaagcaactccatttcattggataacttaaaaccctccagagtgtactgtttacaagtccaggcacaactgctttggaacaaaagtaacatctttagagtcgggcatttaagcaacatatcttgctacgaaacaatggcagatgcctccactgagcttcagcaagtcatcctgatctccgtgggaacattttcgttgctgtcggtgctggcaggagcctgtttcttcctggtcctgaaatatagaggcctgattaaatactggtttcacactccaccaagcatcccattacagatagaagagtatttaaaagacccaactcagcccatcttagaggccttggacaaggacagctcaccaaaggatgacgtctgggactctgtgtccattatctcgtttccggaaaaggagcaagaagatgttctccaaacgctttgaaccaaagcatgggcctagcccactggctccctggaagagatcaagccatcggagctgctagagttctgtctggactttccagagaccagtattcccttttgctgcctctaaaaggcctgtccctgcagacatgagagacagcaggtctcatgggggtgacaagctttttttttttttcttaaagaattttcaaaatcaaattccagaatgattttacggagatatcccaggaaaattaaggcttctcttaaacactaaaaaggcatgtaattgcttgttagcaaaatggatatgacacatctctgatacttttttcattattggttgggctgagcagtcagaagacctggtcgtcgtcttgactttggcaaatgagccggagccccttgggcaggtcacacaacctgtcccagcgagggacaccgagtggcccttcatgtacatccatggtgtgctggcttaaaatgtaattaatcttgtaaatatactcctagtaatttaagattttgtttttaaactggaaataaaagattgtatagtgcatgttttttaaagtc

SEQ ID NO: 116430 - DNA, 1000 bp, Homo Sapiens
aaggatatactgagtaccctaggccaacttttttttctttgcagagaaccttttttgttttattcttcagtgttcatatagcacctggcccattacatatctaggcaactaaaaacaaacattgtaagaatgaatatttttaatgtagtaattcctagttacaatagatacataaagtaatgaactcagcattctgtacttttgcttcaggtttgaagtaaaaattatctagttaaattttttttatttcacgttaccatgccatttcacattaccataccatcagatagcatggcttattgtgggcatttctgcagtgaatacattttccaaaacagttaaattgtctgtttggatttgctttaaagtcttgtgtaagagagaagaaactatttctataataaaaagcactctcatcagatatctgacataattagatacaatataacattttactaagttcagtattcatgttttaaaggtgtttatactgatttgattgtgctggcaaatatactgtattgttaatattgaactgtttatttttctcttagtcttcttatttaattaacttcattgccgctggattctgttcagcctttaaaaatatttcttagtggtcattgctctgcagaactcaaaaagaaaattgtacttgttcatagacatttttaaagggttaatttattgttcagccttatcccttggcacgtaaacagactactagacttattgtaggttcgtttgagctttgtgttgtaaaattaaaaatgcttctataaagttttcaaggtagggagtgattttattattgtgtatatctaatatattaagtatgtgtgatactaaggtttgactgctataattatttgtactgttgatcacatgtacttaaaacatctgatactgtattctaagacaggttgtttttgcaattaaatttattttaataagacgatcatgaataaaacttaaaaaaaaaaaaaaaaaaaaaaaaaaa

SEQ ID NO: 116431 - DNA, 1000 bp, Homo Sapiens
cttggctcactgcaacctctgcctccttggttcaagcgattctcctgcctcagcctctcgagtagctgggattataggcgtccgccaccatgcctggctaatttttttgtgtgtttttagtatagacacggtttcaccatgttggccaggctggtctcgaatgcctggcctcaggtgatccacctgccttggcctcccaaagtgctgggattacaggcatgaaccaccacgcctggcctaaaatgtttttaaataactgtacttgtactcactcaccctacctccagggcatagtcagtctgggctgagatccccatgatcagatatttgatggaaagtcctgaaaggccaatgagttggatggcaagaatgcaggcagaagctgctggataaaataggctacagccacctcagatgctttcagtgctctgtctgaggatgtgtatatgcatatgcaaactcgacccccgttcctgcccagataatggctcaataactctgaggctggttgctcagcctctgagggcaatacaggcatttaaaaaattaaaatgaccaggcacagtggctcacgcctgtaatctcggcactttgggagactgaggtgggagcatcgcttgagaccaggagtttgggaccaggctgggcaacacagggagaccccctctctacaaaaacatttttaaaaaattagctgggcgtggtgatgcatgcctgtggtcccagttacttgggaggctgacgtgggtggctcacttgagcacaggagtttgaggctgcagtgacctatgaccacatcactgtacgccagcccgggtgagagagggagaccccgtctctaaaaataaaatgtaaaatcactgaaaaaatgagtgttcggtgaaacaagtgggattttctgggccagcaagtcttccaaactgtatatgatgcatcctgtctccatgtgtaatatattttaatgataaatgtatttttaacagtgaaaaaaaaaaaaaaa

SEQ ID NO: 116432 - DNA, 1000 bp, Homo Sapiens
tggccacgcccggtgagggtggtgaggacacactggggcgcaggttccatggcaaagcggttgagggaaagggctgctatacggttgacaacgaggtgcagccatcagggccggaggacaatgtggtcatcatctacctcagccgtgctgggaaccctgaggctgcagtcgcagaaggggtccctgggcagctgcccccaggcctgctcctgctgggccaaagcctcctcctcttcttcttcctcacctccttctagccccacccagggcttccctaactcctccccttgcccctaccaatgcccctttaagtgctgcaggggtctggggttggcaactcctgaggcctgcatgggtgacttcacattttcctacctctccttctaatctcttctagagcacctgctatccccaacttctagacctgctccaaactagtgactaggatagaatttgatcccctaactcactgtctgcggtgctcattgctgctaacagcattgcctgtgctctcctctcaggggcagcatgctaacggggcgacgtcctaatccaactgggagaagcctcagtggtggaattccaggcactgtgactgtcaagctggcaagggccaggattgggggaatggagctggggcttagctgggaggtggtctgaagcagacagggaatgggagaggaggatgggaagtagacagtggctggtatggctctgaggctccctggggcctgctcaagctcctcctgctccttgctgttttctgatgatttgggggcttgggagtccctttgtcctcatctgagactgaaatgtggggatccaggatggccttccttcctcttacccttcctccctcagcctgcaacctctatcctggaacctgtcctccctttctccccaactatgcatctgttgtctgctcctctgcaaaggccagccagcttgggagcagcagagaaataaacagcatttctgatgccaaaaaaaaaaaaaaaaa

SEQ ID NO: 116433 - DNA, 1000 bp, Homo Sapiens
cgccagttccggaatgaggggattgatttgacgcacaatcctgagttcaccacctgtgagttctacatggcctatgcagactatcacgatctcatggaaatcacggagaagatggtttcagggatggtgaagcatattacaggcagttacaaggtcacctaccacccagatggcccagagggccaagcctacgatgttgacttcaccccacccttccggcgaatcaacatggtagaagagcttgagaaagccctggggatgaagctgccagaaacgaacctctttgaaactgaagaaactcgcaaaattcttgatgatatctgtgtggcaaaagctgttgaatgccctccacctcggaccacagccaggctccttgacaagcttgttggggagttcctggaagtgacttgcatcaatcctacattcatctgtgatcacccacagataatgagccctttggctaaatggcaccgctctaaagagggtctgactgagcgctttgagctgtttgtcatgaagaaagagatatgcaatgcgtatactgagctgaatgatcccatgcggcagcggcagctttttgaagaacaggccaaggccaaggctgcaggtgatgatgaggccatgttcatagatgaaaacttctgtactgccctggaatatgggctgccccccacagctggctggggcatgggcattgatcgagtcgccatgtttctcacggactccaacaacatcaaggaagtacttctgtttcctgccatgaaacccgaagacaagaaggagaatgtagcaaccactgatacactggaaagcacaacagttggcacttctgtctagaaaataataattgcaagttgtataactcaggcgtctttgcatttctgcgaaagatcaaggtctgcaagggaattcttgtgtgctgctttccatttgacaccgcagttctgttcagccatcagaagagagacaaggaattaaaaatttctttttaatcctgtta

SEQ ID NO: 116434 - DNA, 1000 bp, Homo Sapiens
tgcaggattcgcttagtggtgacagcaagaccctcatggtggtacaggtgtcccccgtggagaagaacactagcgagacgctctattccctcaagtttgctgagagggtgcgctctgtggagctggggcctgggctacgcagggcagagcttgggtcctggtcaagccaggagcatctagagtgggagccggcttgtcagacgccacagccctcggcacgggcccactcagcccccagctctgggaccagtagccgccctggatccatccggaggaagctgcagccctcggggaagtcgcggccactgcctgtgtgacggatgtgaccccgctgggcctgaagctgggccctcactggcctgtccctgctgcagcgccaggacccccggaggtagaggcgagagtggaggctcttcttctgccccgtctcccctcaaagatgagaaacatgttcagaaggaaacggtgtctctcggctgtggctctgagtgcaaattgcatgggcggaaaggcgggggtggctgctcttcctggcaggcctgggccatcagcgaactgggccccgtgaggagggcgggagtgtggaggagggtgggcctctcacccaggctttctcggcccctctcctcagcttgcagagctggccagccccctccttagggggtgggcgaggagcctctgggcagacccaagaaccatggggactggggtgggttggtggcaccaatggcagccctccccgcccctctccttcaaggagggttcccgcagctggggggtgtgcggaggcgcatggcctcccgccacggggccgtgctgtgtttatggctggcagaggcagccagcgggtgggggattctgctgctcgctcacctgcctggctcgctggtctctcgaattttcttccctctgaaatcctatttaagaacttttggaagcttagccatttttacttattaaaataaaagaagcctttttacacaaaaaaaaaaaaaaaaaa

SEQ ID NO: 116435 - DNA, 1000 bp, Homo Sapiens
gggacatcttttggagagtatggcggctggtacaaagcctgcaaagttgatagtccaactgttacaaccactctaaaaaaccttggggcactttacagacgtcaaggcaaatttgaagctgcagaaacgttagaagaagctgctatgaggtctcgtaaacagggtcttgacaatgttcacaaacagagggtggcagaagtgctcaatgaccctgagaacatggagaagcgcaggagccgtgagagcctcaacgtggacgtggtcaagtacgagagtggccctgacggaggggaggaagtgagtatgagcgtagagtggaacgggatgaggaaaatgaagctcgggctggttaactgacttgctcagcgtcccatggcctagccgcccgtgactctcacactgtctcctgcatgacgggtggcgcctcccgcagcttcccttctctctccagtgctgcccgctgtgtctagcagcctctaggatcttgtcagagctgcacctctctgtgaactggccattcctttcggtgctgctgtcctttttgggggggttcctgatttctgtatacatgtagctttgccagatatgtacttagtaatataaactgtattaataaaatccatttactgtgtaatacacgagtttaaaaattaagagcgattagctgttcactttggtaacaggtagttaagtgtcacacaaggtgttgttgcaatggcatgacggtgacctgttgacgtaactaagccttagagcaaggcatgtgccgcacgtgctccgtggtacttagagccctgggggccccgctcggactccgggtctccctaggatatgccccagtagcatttgctgtgtagtctgtgtgtgaaatttgggcattctgcttttctctactaatcttgaagtgctcagtgatttgtgtatttgtgtctttctaacttctaataaactcactccgactgaaaaaaaaaaaaaaaaaaaaaaaaaaaaaaaaaaaaaa

SEQ ID NO: 116436 - DNA, 1000 bp, Homo Sapiens
cggcagcaccagggggcagagcacccccagccccacaccctctttgtgggcggcctcccggccagcagccacagctccaaacttccggtgaccgtcgggttcagcggctgtgtgaagagactgaggctgcacgggaggcccctgggggcccccacacggatggcaggggtcacaccctgcatcttgggccccctggaggcgggcctgttcttcccaggcagcgggggagttatcactttagacctcccaggagctacactgcctgatgtgggcctggaactggaggtgcggcccctggcagtcaccggactgatcttccacttgggccaggcccggacgcccccctacttgcagttgcaggtgaccgagaagcaagtcctgctgcgggcggatgacggagcaggggagttctccacgtcagtgacccgcccctcagtgctgtgtgatggccagtggcaccggctagcggtgatgaaaagcgggaatgtgctccggctggaggtggacgcgcagagcaaccacaccgtgggccccttgctggcggctgcagctggtgccccagcccctctgtacctcgggggcctgcctgagcccatggccgtgcagccctggccccccgcctactgcggctgcatgaggaggctggcggtgaaccggtcccccgtcgccatgactcgctctgtggaggtccacggggcagtgggggccagtggctgcccagccgcctaggacacagccaaccccggcccctggtcaggcccctgcagctgcctcacaccgccccttgtgctcgcctcataggtgtctatttggactctaagctctacgggtgacagatcttgtttctgaagatggtttaagttatagcttcttaaacgaaagaataaaatactgcaaaatgtttttatatttggcccttccacccatttttaattgtgagagatttgtcaccaatcatcactggttcctccttaaaaattaaaaagtaacttctgtgtaa

SEQ ID NO: 116437 - DNA, 1000 bp, Homo Sapiens
gcacagcagctgcaggggcctctgttcctttctctgggcttagggtcctgtcgaaggggaggcacactttctgcaaacgtttctcaaatctgcttcatccaatgtgaagttcatcttgcagcatttactatgcacaacagagtaactatcgaaatgacggtgttaattttgctaactgggttaaatattttgctaactggttaaacattaatatttaccaaagtaggattttgagggtgggggtgctctctctgagggggtgggggtgccgctgtctctgaggggtgggggtgccgctgtctgaggggtgggggtgccgctctctctgagggggtgggggtgccgctttctctgagggggtgggggtgccgctctctctgagggggtgggggtgctgctctctccgaggggtggaatgccgctgtctctgaggggtgggggtgccgctctaaattggctccatatcattgagtttagggttctggtgtttggtttcttcattctttactgcactcagatttaagccttacaaagggaaacctctggccgtcacacgtaggacgcatgaaggtcactcgtgtgaggctgacatgctcacacattacaacagtagagagggaaaatcctaagacagaggaactccagagatgagtgtctggagcggcttcagttcagctttaaaggccaggacgcgcgacacgtggctggcggcctcgttccagtggcggcacgtccttggcgtctctaatgtctgcagctcaagggctggcacttttttaaatataaaaatggtgttatttttatttttttttgtaaagtgatttttggtcttctgttgacattcgggtgatcctgttctgcgctgtgtacaatgtgagatcggtgcgttctcctgatgttttgccgtggcttggggattgtacacgggaccagctcacgtaatgcattgcctgtaacaatgtaataaaaagcctctttctttcaaaaaaaccccgaattc

SEQ ID NO: 116438 - DNA, 1000 bp, Homo Sapiens
ttgcgagagaaggataagcacattgaagaagtgcggaagaacaaagaatccaaagaccctgctgacgagactgaagctgactaatttgttctgagaactgactttctccccatccccttcctaaatatccaaagactgtactggccagtgtcattttattttttccctcctgacaaatattttagaagctaatgtaggactgtataggtagatccagatccagactgtaagatgttgttttaggggctaaaggggagaaactgaaagtgttttactctttttctaaagtgttggtctttctaatgtagctatttttcttgttgcatcttttctacttcagtacacttggtgtactgggttaatggctagtactgtattggctctgtgaaaacatatttgtgaaaagagtatgtagtggcttcttttgaactgttagatgctgaatatctgttcacttttcaatcccaattctgtcccaatcttaccagatgctactggacttgaatggttaataaaactgcacagtgctgttggtggcagtgacttcttttgagttaggttaataaatcaagccatagagcccctcctggttgatacttgttccagatggggcctttggggctggtagaaatacccaacgcacaaatgaccgcacgttctctgccccgtttcttgccccagtgtggtttgcattgtctccttccacaatgactgctttgtttggatgcctcagcccaggtcagctgttactttctttcagatgtttatttgcaaacaaccattttttgttctgtgtcccttttaaaaggcagattaaaagcacaagcgtgtttctagagaacagttgagagagaatctcaagattctacttggtggtttgcttgctctacgttacaggtggggcatgtcctcatcctttcctgccataaaagctatgacacgagaatcagaatattaataaaactttatgtactgctgtagcaaaaaaaaaaaaaaaaaa

SEQ ID NO: 116439 - DNA, 845 bp, Homo Sapiens
caggtgagcctctcactcgccacctcctcttccacccctgccaggcccagcagccaccacagcgcctgcttcctcggccctgaaatcatgcccctaggtctcctgtggctgggcctagccctgttgggggctctgcatgcccaggcccaggactccacctcagacctgatcccagccccacctctgagcaaggtccctctgcagcagaacttccaggacaaccaattccaggggaagtggtatgtggtaggcctggcagggaatgcaattctcagagaagacaaagacccgcaaaagatgtatgccaccatctatgagctgaaagaagacaagagctacaatgtcacctccgtcctgtttaggaaaaagaagtgtgactactggatcaggacttttgttccaggttgccagcccggcgagttcacgctgggcaacattaagagttaccctggattaacgagttacctcgtccgagtggtgagcaccaactacaaccagcatgctatggtgttcttcaagaaagtttctcaaaacagggagtacttcaagatcaccctctacgggagaaccaaggagctgacttcggaactaaaggagaacttcatccgcttctccaaatctctgggcctccctgaaaaccacatcgtcttccctgtcccaatcgaccagtgtatcgacggctgagtgcacaggtgccgccagctgccgcaccagcccgaacaccattgagggagctgggagaccctccccacagtgccacccatgcagctgctccccaggccaccccgctgatggagccccaccttgtctgctaaataaacatgtgccctcaggccaaaaagaaa

SEQ ID NO: 116440 - DNA, 1000 bp, Homo Sapiens
tgcagttcaacctgtccctgtactggagccacgaggccctgttccagaagaagactctgcaggccctggaattccacactgtgcccttccagttgctggcccggtacaaaggcctgaacctcaccgaggatacctacaagccccggatttacacctcgcccacctggagtgcctttgtgacagacagttcctggagtgcacggaagtcacaactggtctatcagtccagacgggggcctttggtcaaatattcttctgattacttccaagccccctctgactacagatactacccctaccagtccttccagactccacaacaccccagcttcctcttccaggacaagagggtgtcctggtccctggtctacctccccaccatccagagctgctggaactacggcttctcctgctcctcggacgagctccctgtcctgggcctcaccaagtctggcggctcagatcgcaccattgcctacgaaaacaaagccctgatgctctgcgaagggctcttcgtggcagacgtcaccgatttcgagggctggaaggctgcgattcccagtgccctggacaccaacagctcgaagagcacctcctccttcccctgcccggcagggcacttcaacggcttccgcacggtcatccgccccttctacctgaccaactcctcaggtgtggactagacgcgtggccaagggtggtgagaaccggagaaccccaggacgccctcactgcaggctcccctcctcggcttccttcctctctgcaatgaccttcaacaaccggccaccagatgtcgccctactcacctgaggctcagcttcaagaaattactggaaggcttccactagggtccaccaggagttctcccaccacctcaccagtttccaggtggtaagcaccaggaggccctcgaggttgctctggatccccccacagcccctggtcagtctgcccttgtcactggtctgaggtcattaaaattacattgaggttccta

SEQ ID NO: 116441 - DNA, 1000 bp, Homo Sapiens
cacagccagccccccaactgacctcatctggaagaaccagaactcgtggggcactggcgaagatgtgaaggttatattgaaaaattctcagggagaggaggttgctcaaagaagtacagtctttaaaacaaccatacctgaagaagaggaggaggaggaagaagcagctggagtggttgttgaggaagaacttttccaccagcagggaaccccaagagcatccaatagaagctgtgcaattatgtaaaattttcaactgtcttcctcaaaataaagaagtatggtaatccttacctgtatacagtgcagagccttctcagaagcacagaatatttttatatttcctttatgtgaatttttaagctgcaaatctgatggccttaatttcctttttgacactgaaagttttgtaaaagaaatcatgtccatacactttgttgcaagatgtgaattattgacactgaacttaataactgtgtactgttcggaaggggttcctcaaattttttgactttttttgtatgtgtgttttttctttttttttaagttcttatgaggaggggagggtaaataaaccactgtgcgtcttggtgtaatttgaagattgccccatctagactagcaatctcttcattattctctgctatatataaaacggtgctgtgagggaggggaaaagcatttttcaatatattgaacttttgtactgaatttttttgtaataagcaatcaaggttataattttttttaaaatagaaattttgtaagaaggcaatattaacctaatcaccatgtaagcactctggatgatggattccacaaaacttggttttatggttacttcttctcttagattcttaattcatgaggagggtgggggagggaggtggagggagggaagggtttctctattaaaatgcattcgttgtgttttttaagatagtgtaacttgcttaaatttcttatgtgacattaacaaataaaaaagctcttttaatat

SEQ ID NO: 116442 - DNA, 1000 bp, Homo Sapiens
ccagccagggcagcaagaagagtaagagcagcagcaaatccaccacctcccagatccccctccaggcacaggaagactgctgtgtccactgcatcctgtcctgcctgttctgcgagttcctgacgctgtgcaacatcgtcctggactgcgccacctgtggctcctgcagctcggaggactcgtgcctctgctgctgctgctgtggctctggcgagtgtgccgactgcgacctgccctgcgacctggactgcggcatcctggatgcctgctgcgagtccgcggactgcctggagatctgcatggagtgctgtgggctctgcttctcctcctgagcctctgtcgggggctaagccagcctggcgcccctgcagattccagcagggtccctctgagtggggccaggcccaggactgtcacacaaggcttgagaagccccctctccctggtcctctcctacccacccatgtcctctcagaaccccagccttgaaaatagtggggggcactcagaggggccacctcctcagccgtgggtggtgggcccatggcagagaagcctgaactctttactgggttaccaggttcatacattgctgaggacctgacaggacaacctaggggcagggctggggtgggggccgcagagggcagccagggctggggaacactgtgaaagttacttggggagggtgggccggtggggccgtagctctctacctctccctgctcctggtgcctgcctctctcctccaccccaggcttagaggacagaaaaatgtgaagagacgccccacccaccctcagccagccctctccagtctcctttcctaggcttttttgggggcctaacccacgcagtcaccccagagggcagggctaggcgagagcctggggtggggcgggagggggaacagtatggaaaagactggaaggggaaaggaagggaagggagggaggtctgttctatctgttgctgtaaataaagatatttgtccatctct

SEQ ID NO: 116443 - DNA, 1000 bp, Homo Sapiens
aggccaaagagcgagtctgtaatctgattgatagtggaacaaaggagggagcttccatccttcttgatggacgaaaaattaaagtgaaaggctatgaaaatggcaactttgttggaccaaccatcatctcgaatgtcaagccaaatatgacctgttacaaagaggagatttttggtccagttcttgtggttctggagacagaaacattggatgaagccatccagattgtaaataacaacccatatggaaatggaactgccatcttcaccaccaatggagccactgctcggaaatatgcccacttggtggatgttggacaggtgggagtgaatgtccccattccagtgcctttgccaatgttctcattcaccggctctcgatcctccttcaggggagacaccaatttctatggcaaacagggcatccaattctacactcagttaaagaccattacttctcagtggaaagaagaagatgctactctttcctcacctgctgttgtcatgcctaccatgggccgttagaaacaagtttgtttaagactgactccatcctgagtaatctccctttatttttgaccagcttcatttgtcagctttgctcagatcagatcgatgggattggaatacattgtaactaaaatcttcctcaggactattaacccccgcaaagtttctatagggaactgcctagtgtaacaatgaaaccagatttctcacttgctcttcatacttctattttgaggtaactgttgtaactatgaaatgcttatctgaaagtagtgcttaaacctgatttctaaaaattatcccattttctgatgatttgaaggggagaaaagccagtgtatgtaaagaaaatgttccagccaggcgcggtggctcacgcctgtaattccatcattttgggaggccacagtgggcagattgcttgagcccaggagttgaagaacgtggcgaaaccccgtatctattatttaaaaaaattgaaaaagtaaaaa

SEQ ID NO: 116444 - DNA, 1000 bp, Homo Sapiens
gataaatctctccagctaattcaggtcattttgtgaatactatgtatcaagccctgaaaatatggtaaataaaacgtgacagggaaacctttttttgattgaatattgttacatagttaaatgtgctatatatccttaatattttatattgatcctgcaaaatctgttggttttaggggagttttgttttttgtttctaacaattttcagacctgttggtataggaatgtagaagtctttcagatgatttgaaagcagctgcatttgctcttggaggctttgggagagcaggaatgaaaacattcagaggaagacatctgtagggaattcttctgttacttaccaaagaataagtgtctttctggtgttttatttcctatcataaaaatacaacagtgcatttacaaggttaaagattcctcgaagttctaggaaattcttgaaaatataagtggtgcttagaaaattcaagcatttaggaatgtgacctttaattcaggtatgtaaaagacttttttcccaaacttttaaaagtaggaaatacaataaatacagaaaagtcatatggttgaataaataattataaattgagcactgatggaatccctctacaggtcaagaaatagcgcagtgtcctggatgcccattatattgttttctcctttctgggtaacaagccctaacttctgtaatttaaaagctcctacttttgccacaaggtggtgcttctgccattagacgcagttaggaggatgcaactgcaaatctaaaattacgaagttagtgtagttgcaataaacttagaacatatgcattaatactaaacctatgcagtaataccataattagccttctaatcatgtaatttgctttacttaggtatttcatttggttcagcctgttatggaatttaccagcttgataaatttgcctataaagttttataaagaaaaggaatattttgttttcataaagaggaaaatccattcttagaaaaaaa

SEQ ID NO: 116445 - DNA, 1000 bp, Homo Sapiens
acttccctgtccctctgactcctactgtcccaattttctccctccctgtgtgtcactagagaaaaaaaaaaacaaaaacctagattccggattaggggatgacatcccaaacagcccggagtatttgcagaaggctcaggcaacgagtgggccacatctcacttctgcttcctcatctcagcccactctgaaaatgtgcagcaccctcactggttcctccccccaacgcaaggaggatgcccaattgttgccctctaaaaatgcacagttctcctggccctaggacttacttattacatttttttctctttccttgagctgcctttggcaagggaagagacccccaactctgcgcccctactccatgctgctgatccccacctgcgcactatagcgcagggtcagcagtggaatgaagggccttagaacctgcatagaagaaatgaactcactgcatttctgtgctccctcctccctcgcaccaaactcctagctctacaagtatatttatttatttatttatttattcatctatttatttacttatttatttatttatttataaatattgctatttattgccgagttgtgcactttggggtagagtgaggggctcccagcagctctagctgggtctctcttgcttcctccctgcttacgcctttccttttcttgctccttcttcaactcctggtgtgtgtgagcatgccctttgcttgccacaccatatcctttccccagatccacctgtcctgacactctagtcctccaggatagtgctcctcccccagctccagggctcctggatgtccttcctcaactccctccacccctagacaatcctacctggtcccatctgcctcttttctctccccagcctgccctgtgacccttgcctcttcctgatactcccaagagcaggccccaggggtctgtgtcacatatctctgtgtgattccttctggttgcatccccaatttcatacaaaaaaaaaaaaaaa

SEQ ID NO: 116446 - DNA, 1000 bp, Homo Sapiens
gaagagaaatacaagatacttttttttttttttttttttttttttttttaaatagggcctcactctgttgctcaggctggagtgcggtggtgtgatctcggctcatgtagcctcaacctccccggctcaagtgatcctcctgcctcagcctcccaagtagctgggactacaggcgttcactactacacccagctaatttttaagttttttatagagatgagggctccctatgttgcccaggttggtctcgaactcctggactcaaagtatcctcccgcctcggcctcccaaagtgttgggattataggagtgagccaccacaccaggccaagatgcttttcaaactgatacagatgacaatgggagcctcataaagatggcttttgtttcttcccttcaaggtcatttacttgtacgagacagaaaaagatagcattggggacatgggatgggggagggagggcaatagtggaacgaactttccatgggaaactttcccttttgtaagttgagggccaggggtagggatattttttagtttgtgattttacatttatctgtacatactttttcaagattgatcatttttataaccatggttttcctgaaatcctcaattcatcaatatgaaggaaatgaaccacatagactttatgcaataaataacagtgcaagtgagtataactctaactgatgttccacaaaacatttttgatttcaggtttgtatgatgtagtttttaatcgtacattttcatatgcttcaaactaacacatttttaaagctttcccccacttttctctctatttgtattgttagccatcttgaagtgatgttgtttaacataaattgtactgttgaatttggctttacgggtgtaaacactgatggtatatcagtatctgagaccccaaactctccaaatactgatggtgcattttattcttgaagtgaaatctgtgcaataaaataacagactgtctgcaaaaaaaaaaaaaaa

SEQ ID NO: 116447 - DNA, 1000 bp, Homo Sapiens
cgaggaattaaccctgtgtcctcagtcgccagcacttacagctccaacttttttgaatgaccatctggttgaaaaatctttctcatataagtttaaccacactttgatttgggttcattttttgttttgtttttttcaatcatgatattcagaaaaatccaggatccaaaatgtggcgtttttctaagaatgaaaattatatgtaagcttttaagcatcatgaagaacaatttatgttcacattaagatacgttctaaagggggatggccaaggggtgacatcttaattcctaaactaccttagctgcatagtggaagaggagagcatgaagcaaagaattccaggaaacccaagaggctgagaattcttttgtctaccatagaattattatccagactggaatttttgtttgttagaacacccttcagttgcaatatgctaatcccactttacaaagaatataaaagctatattttgaagacttgagttatttcagaaaaaactacagccctttttgtcttacctgccttttactttcgtgtggatatgtgaagcattgggtcgggaactagctgtagaacacaactaaaaactcatgtcttttttcacagaataatgtgccagttttttgtagcaatgttatttctcttggaagcagaaatgctttgtaccagagcacctccaaactgcattgaggagaagttccagaaccatcccctttttccatttttatataatttataaagaaagattaaagccatgttgactattttacagccactggagttaactaacccttccttgtatctgtcttcccaggagagaatgaagcaaaacaggaatttggttttcttttgatgtccagttacaccatccattctgttaattttgaaaaaatataccctccctttagtttgttgggggatataaattattctcaggaagaatataatgaactgtacagttactttgacctattaaaaaggtgttaccagtaaa

SEQ ID NO: 116448 - DNA, 1000 bp, Homo Sapiens
gatgaagaccctgaaggaagcgtggatccagaaggacaagggtcctagatatgtctttacttgttgtgattttagactccccttttttcttctcaaccctgagagtgatttaacactggttttgagacagactttattcagctatccctctatataataggtaccaccgataatgctattagcccaaaccgtgggtttttctaaatattaataggggggcttgattcaacaaagccacagacttaacgttgaaattttcttcaggaattttctagtaacccaggtctaaagtagctacagaaaggggaatattatgtgtgattatttttcttcttatgctatatccccaagtttttcagactcatttaagtaaaggctagagtgagtaaggaatagagccaaatgaggtaggtgtctgagccatgaagtataaatactgaaagatgtcacttttattcaggaaatagggggagttcaagtcgtatagattcctactcgaaaatcttgacacctgactttccaggatgcacattttcatacgtagaccagtttcctcttggtttcttcagttaagtcaaaacaacacgttcctctttccccatatattcatatatttttgctcgttagtgtatttcttgagctgttttcatgttgtttatttcctgtctgtgaaatggtgtttttttttttgttgttggttttttttttttttttttaacttgggaccaccaagttgtaaagatgtatgtttttacctgacagttataccacaggtagactgtcaagttgagaagagtgaatcaataacttgtatttgttttaaaaattaaattaatccttgataagagttgctttttttttttaggagttagtccttgaccactagtttgatgccatctccattttgggtgacctgtttcaccagcaggcctgttactctccatgactaactgtgtaagtgcttaaaatggaataaattgcttttctacataaaaaaaaa

SEQ ID NO: 116449 - DNA, 1000 bp, Homo Sapiens
ctgaggaggccgccaagatgccgcagtccaagtcccggaagatcgcgatcctgggctaccggtctgtggggaaatcctcattgacgattcaatttgttgaaggccaatttgtggactcctacgatccaaccatagaaaacacttttacaaagttgatcacagtaaatggacaagaatatcatcttcaacttgtagacacagccgggcaagatgaatattctatctttcctcagacatactccatagatattaatggctatattcttgtgtattctgttacatcaatcaaaagttttgaagtgattaaagttatccatggcaaattgttggatatggtggggaaagtacaaatacctattatgttggttgggaataagaaagacctgcatatggaaagggtgatcagttatgaagaagggaaagctttggcagaatcttggaatgcagcttttttggaatcttctgctaaagaaaatcagactgctgtggatgtttttcgaaggataattttggaggcagaaaaaatggacggggcagcttcacaaggcaagtcttcatgctcggtgatgtgattctgctgcaaagcctgaggacactgggaatatattctacctgaagaagcaaactgcccgttctccttgaagataaactatgcttcttttttcttctgttaacctgaaagatatcatttgggtcagagctcccctcccttcagattatgttaactctgagtctgtccaaatgagttcacttccattttcaaattttaagcaatcatattttcaatttatatattgtatttcttaatattatgaccaagaattttatcggcattaatttttcagtgtagtttgttgtttaaaataatgtaatcatcaaaatgatgcatattgttacactactattaactaggcttcagtatatcagtgtttatttcattgtgttaaatgtatacttgtaaataaaatagctgcaaacctcaaaaaaaaaaaaaaaaaaa

SEQ ID NO: 116450 - DNA, 595 bp, Homo Sapiens
gggcaaggctgggccgggaagggcgtgggttgaggagaggctccagacccgcacgccgcgcgcacagagctctcagcgccgctcccagccacagcctcccgcgcctcgctcagctccaacatggcaaaaatctccagccctacagagactgagcggtgcatcgagtccctgattgctgtcttccagaagtatgctggaaaggatggttataactacactctctccaagacagagttcctaagcttcatgaatacagaactagctgccttcacaaagaaccagaaggaccctggtgtccttgaccgcatgatgaagaaactggacaccaacagtgatggtcagctagatttctcagaatttcttaatctgattggtggcctagctatggcttgccatgactccttcctcaaggctgtcccttcccagaagcggacctgaggaccccttggccctggccttcaaacccaccccctttccttccagcctttctgtcatcatctccacagcccacccatcccctgagcacactaaccacctcatgcaggccccacctgccaatagtaataaagcaatgtcacttttttaaaacatgaaa

SEQ ID NO: 116451 - DNA, 1000 bp, Homo Sapiens
ttcagcaccaactgtataccgaatgcttgtacagaatgatataaccagctataagtttaaaagcttaaagcactgtgtgagtgctggggaaccaattacccctgacgtgactgaaaaatggagaaacaagacgggcctggatatctacgaaggatatggacagactgaaacggtgctaatctgtggaaattttaagggaatgaaaattaaacctggctcaatgggaaaaccttctcctgctttcgatgttaagattgtagatgtaaatggcaatgttctacctcctggacaagaaggagatattggcattcaagttctacccaaccgaccatttggcctttttactcattacgtagataatccttcaaaaacagcttcaactctacgaggcaatttctatatcactggggacagaggatatatggataaagatgggtatttctggtttgttgcaagagcagatgatgtcatattatcctctggctatcgaattggaccatttgaggtagaaaatgccctgaatgaacacccttcagttgcagagtcagctgttgtcagcagcccagaccccatcagaggagaggtagtaaaggcttttgtcgttctaaatcctgattacaagtcacatgatcaagaacaactaataaaggagattcaggagcatgttaaaaaaactacagcaccttacaaatatcccagaaaggtagaatttattcaagagctgccaaagactatcagtgggaagacaaaaagaaatgaactgaggaagaaagaatggaagacaatttaaagttgtttcattaattaccatatctataaaacaaacatagtatctgtcaatctctagaaaccacaagatgatggagaggtcataaaaactgtggtagtatgcttagaaactgttgatttaaaatatcttgtggttatgatatcagaggctaaattttgaaataaaatatttggcaaattcctccaaaaaaaaaaaaaaaaaaaaaaaaaa

SEQ ID NO: 116452 - DNA, 1000 bp, Homo Sapiens
gaagggcaggaagagaagcagagaggagagccgcagtcgcagtcgcagccgcagcaagagtgagaggagcagaaagcgaggcagcaagcgagacagcaaggcgggcagcagcaagaagaagaagaaggaagacactgaccgctcccagtccagatctccatcccgctccgtgtcaaaggagcgggaacatgccaagtctgaatccagccagagggaaggtcgaggagagagtgagaatgctggcaccaatcaggagacccggtccaggtcgagatccaattccaaatcgaaaccaaaccttccatcagaatcacgctccagatcaaagtcagcttcaaaaacccgatctcggtccaagtctagatccaggtctgcttccagatcgccctcccgatctagatctaggtcccactcaaggtcctaactggctatggccacagctggaactacccgagaagtcttttgtacatgtttggtagccgtagcacaagtgattggagtagaacatgtcactgctgtacatttttaactcccctaatggtgtgtctataattgttaaatctaagtgcttcctctcagtaaagcctcctggcaccaggccttcctgctcgactgaaaaaaattttctctttgaaaatccccttttactcatggcccacagtagaatatccaaaacgccttggctttcaggcctggcctttcctacagggagctcagtaacctggacggctctaaggctggaatgaccacataggtaggtatggtgagttcaaccatttttgctcttgaattgatgcccttcgatgtatgccatttagtgaaagtgctaagtcttaagtttcctaccactttggtttcatatttttggacttaacaaagttgtgaatagcacagtcgaggaaaattgatacctgcagtaacccataggaaataaactgtagagttccatattctggtattgtgattatattgttttatattaaaaaaaaaaaaaaaaaaa

SEQ ID NO: 116453 - DNA, 1000 bp, Homo Sapiens
gaggcagaaaatcaaggcctggatatctcttctccaggaatgtctggtcacaggcagggccatgactcattagaacatgatgagcttcgggagatattcaatgacctcagcagcagcagtgaggatgaagatgagacccagcatcaagatgaagaagatataaacatcattgacacggaggaagatctggagagacagctacaggacaagctaaatgaatcagatgaacagcaccaggaaaatgaaggaaccaatcagctggttatgggaattcagaagcagattgacaacatgaaaggcaagctccaagagacccaggacagggcaaaacgacaagaggatctcatcatgaaagtggaaaatctggctctcaagaacagatttcaggctgtactggatgagctcaaacaaaaggaagaccgagaaaaggagcaactcagctctttgcaagaggagctagaatcactcctagagaagtaaaaagaactgatatttaatttcagtcttcagactggtcagcattagaaaattcttggctttattgtactgggtattaagaccttgctcttcctagtccttttaatgctgtgtgttctgttaagttctttcatttgtttgtaattttgtttttcagcaaatttatattgttttgctaggtgttcatcctataagaagcaggattgtataggcagaaaaatgattgtaggaaagttgcaggattagcggaatgtatggttcaaccttaattatagcttcattgcaggactttactgtttctccattttctagaagctgctgttgctgctttgtgatgacgtgagatcaataagaagaacctagtctagagacaatgatgctagtttgcatatgttttcctatgcaataattgttttcccagttattcaaagcagctttctatatgtagagatgcaaattattaagttgtttccaatacaataaataaaagcatctgtttttcactttaaaaaaaaaaaaaaaa

SEQ ID NO: 116454 - DNA, 1000 bp, Homo Sapiens
tgataaatttaccagattcactgatgttcctttagctgcgggatttcagtggtacctttctcaaactcaacttagtaaactaaaaccaggtgactggtctcagcaagacataggtactaatttggttgaagcagataaccaagcagagtggaccgacgttcagaagaagattatcccgtggaacagtcgtgtttccgacttagacctggagctcctgtttcaggatcgtgctgccagacttggaaagtcaattagtagactcatcgttgtggcctcgctcatcgacaaaccgaccaatttaggaggactgtgcaggacctgtgaggtatttggggcttcagtgctcgttgttggcagccttcagtgtatcagcgacaaacagtttcagcacctcagtgtctctgcagaacagtggcttcctctagtggaggtaaaaccacctcagctaattgattatctgcagcagaagaaaacagaaggttataccatcattggagtggaacaaactgccaaaagtttagacctaacccaatattgctttcctgagaaatctctgctcttgttgggaaatgaacgtgagggaattccagcaaatctgatccaacagttggacgtttgtgtggaaattcctcaacagggcattatccgctccctgaatgtccatgtgagtggagccctgctgatctgggagtacaccaggcagcagctgctctcgcacggagataccaagccatgatgtgccttccttagtgaactgctgctgctgttcagacttttttaaaaaaaactatttggactaaagaaacagattctgaaatttattgtgataatttgtatttcttttttcttgcaatttaatgccaaaagtttgccatgtgccttaaacatattactatatattttcccctttaataaacactttttgttaaattgtattcttcctttaataaaatattttaagcaattgtggaaataaaacaatggattttttaagagagaa

SEQ ID NO: 116455 - DNA, 1000 bp, Homo Sapiens
tcccgagggatggctttagtcttgatgaatgtgaaccatgtcggaattgttaggtagaaacctgggctgggaggcctcggaccccaggctccatccctggcttccccagcctgcggccgcaagcaaaaccaagcgcgagatgcagctagcacccttcatatccatccccgttctcagcgggacaacaccatggacagccgttttcagagcctccagcatttgcacaccactactcaccctctctgctgctggcatgttggtagagtcatccctgtaatcaagaaatggcctgtggaatgttattgttcaacgttgtttacagctcttaaaacatggtgaggaatgcctaagtcttagtgaccaaacgtgaccttgaaagcagacatagcatgacagaccttcctagagtgtttggtcgggttcacagtgaccgagagtcaggtccagcacacacctgggaaagggatgctgccccaagggggaccaaaagggccggacgttacagggtgaaaccctctgacccctcgcgacaccgtaggacttgacttttgtttagtctttctaagaaatagatcatggagccaagtgaagtgcactttgtcaaatgtaagggtctgctttgttcttgttgcttttctgttttttaaccttttgttccgccatttaaaaaaagaaaaaaaaaaagcttatgtttcttgtcaaatgcagaaatgttccttccgccactcactgaagttttgcattctggcttgtgcagtttttattgtctgtgtcagacgtacagccagacatgttctctattggcatttttccgattctgttcagatgacagcgaccgccttttcattccccccgccacctgtactcaccctcacgctctttgaagaaaaaaaaaaaaaatcaccttgtgtgttgtagctcatttgtttcaagagagaatcaacagatcatattcagtgtcttgaataaattgctctattttgatattaaaaaaaaaaaa

SEQ ID NO: 116456 - DNA, 1000 bp, Homo Sapiens
accagccagagccaccccctccagtcacagataacctcttaccaacaaccacacctcaggaagctcagcagtggttgcatcgaaatcgtttttctacattcacaaggcttttcacaaacttctcaggggcagatttattgaaattaactagagatgatgtgatccaaatctgtggccctgcagatggaatcagactttttaatgcattaaaaggccggatggtgcgtccaaggttaaccatttatgtttgtcaggaatcactgcagttgagggagcagcaacaacagcagcagcaacagcagcagaagcatgaggatggagactcaaatggtactttcttcgtttaccatgctatctatctagaagaactaacagctgttgaattgacagaaaaaattgctcagcttttcagcatttccccttgccagatcagccagatttacaagcaggggccaacaggaattcatgtgctcatcagtgatgagatgatacagaactttcaggaagaagcatgttttattctggacacaatgaaagcagaaaccaatgatagctatcatatcatactgaagtaggagtgcggcgtttcgtgcccagtggctgctccttccttcacctctgaaaacggccctcttgaagggggatatgaatggagatttgaaggtctgcaagaacctgactcgtctgactgtgtgtggaggagtccaggccatggaggcagaatcctggccctctgtgttggcccaagctcttgtggtacacacagattactgcccaatatgcagttctgcagctgttttagttaaatttctggaccttgttgttgttaaatatcagtagaaactctacataatttagagtgtatgtagggcataatgatgatgggaattgtgtgatgtttaacaggaagatcttaaattttgtgatatggagccctgtaatttttttcttatataaaaatgggtatctatattcataaaaaaaaaaaaaaaaaaaaaaa

SEQ ID NO: 116457 - DNA, 1000 bp, Homo Sapiens
gtttgtgagcccctgtgagagtggagacaacaccggtgaaccctctgccctggaagagcagagagggcctttgcctctcaacaagaccttgtttctgggctacgcatttctccttaccatggccacaaccagtgacaagttggccagccgctccaaactgccagatggtcctacaggaagcagtgaagaagaggaggaatttttggaaattcctcctttcaacaagcagtatacagaatcccagcttcgagcaggagctggctatatccttgaagatttcaatgaagcccagtgtaacacagcttaccagtgtcttctaattgcggatcagcattgtcgaacccggaagtacttcctgtgccttgccagtgggattccttgtgtgtctcatgtctgggtccatgatagttgccatgccaaccagctccagaactaccgtaattatctgttgccagctgggtacagccttgaggagcaaagaattctggactggcaaccccgtgaaaatcctttccagaatctgaaggtactcttggtatcagaccaacagcagaacttcctggagctctggtctgagatcctcatgactggtggtgcagcctctgtgaagcagcaccattcaagtgcccataacaaagatattgctttaggggtatttgatgtggtggtgacggacccctcatgcccagcctcggtgctgaagtgtgctgaagcattgcagctgcctgtggtgtcacaagagtgggtgatccagtgcctcattgttggggagagaattggattcaagcagcatccaaaatataaacacgattatgtttctcactaaagatacttggtcttactggttttattccctgctatcgtggagattgtgttttaaccaggttttaaatgtgtcttgtgtgtaactggattccttgcatggatcttgtatatagttttatttgctgaacttttatgataaaataaatgttgaatctctttggttgtagtaactggg

SEQ ID NO: 116458 - DNA, 1000 bp, Homo Sapiens
ccacactggatgatgcagaacttactcttggaagaaggcggcctggtccaggtggagagcgtcaaccttcaagtggccacctactccaaattccaacctcagagccctgacttcctggacatcaccaaccccaaagccgtattagaaaacgcacttaggaactttgcctgtctgaccaccggggatgtgattgccatcaactataatgaaaagatctacgaactgcgtgtgatggagaccaaacccgacaaggcagtgtccatcattgagtgtgacatgaacgtggactttgatgctcccctgggctacaaagaacccgaaagacaagtccagcatgaggagtcgacagaaggtgaagccgaccacagtggctatgctggagagctgggcttccgcgctttctctggatctggcaatagactggatggaaagaagaaaggggtagagcccagcccctccccaatcaagcctggagatattaaaagaggaattcccaattatgaatttaaacttggtaagataactttcatcagaaattcacgtccccttgtcaaaaaggttgaagaggatgaagctggaggcagattcgtcgctttctctggagaaggacagtcattgcgtaaaaagggaagaaagccctaagtgaggactgttggctgattggaaaataataaaagaatcatttgcaacatcttggcttttagttactggcactgacagggacgagcctcatcagagaatactctgttacttaagatttatttagagttacctaagaattattaagtttgacttggaagtggagcagcaggactttgtagttgtatgcttgatttggggaaagacaaagagctgtccctgagggcctgtagatagctgcctcctcacctcttcacgctttcagcttgaggggagctcccactgcctcagcaggagcaattctgcatccctaattctgtcaaaacctatgaaggtgactaaattgtctaacatgaaaaaa

SEQ ID NO: 116459 - DNA, 1000 bp, Homo Sapiens
aacacaggaaagaagagtgggaaattgaaggcctcctataaacgggattgttttagtgttggcagtaatgttgatatagatttttctggaccaaccatctatggctgggctgtgttggccttcgaagggtggcttgctggctatcagatgagttttgacacagccaaatccaaactgtcacagaataatttcgccctgggttacaaggctgcggacttccagctgcacacacatgtgaacgatggcactgaatttggaggttctatctaccagaaggtgaatgagaagattgaaacatccataaaccttgcttggacagctgggagtaacaacacccgttttggcattgctgctaagtacatgctggattgtagaacttctctctctgctaaagtaaataatgccagcctgattggactgggttatactcagacccttcgaccaggagtcaaattgactttatcagctttaatcgatgggaagaacttcagtgcaggaggtcacaaggttggcttgggatttgaactggaagcttaatgtggtttgaggaaagcatcagatttgtccctggaagtgaagagaaatgaacccactatgttttggccttaaaattcttctgtgaaatttcaaaagtgtgaactttttattcttccaaagaattgtaatcctccccacactgaagtctaggggttgcgaatccctcctgagggagatgcttgaaggcatgcctggaagttgtcatgtttgtgccacgtttcagttcagttctgaagtgttattaaatgtgttcctcagcgacagtgtagcgtcatgttagaggagacgatctgacccaccagtttgtacatcacgtcctgcatgtcccacaccattttttcatgaccttgtaatatactggtctctgtgctatagtggaatctttggttttgcatcatagtaaaataaaataaacccatcacatttggaacataaaaaaaaaaaaaaaaaaaaaaaaaaaaaa

SEQ ID NO: 116460 - DNA, 1000 bp, Homo Sapiens
ccggctgtcgcccctaccactcagacacccccggttgccatggtggccccgcagacccaggcccctgctcagcagcagcctaagaagaacctgtccctcacgagagagcagatgttcgctgcccaggagatgttcaagacggccaacaaagtcacgcggcccgagaaggccctcatcctgggcttcatggccggctcccgagagaacccgtgccaggagcagggggacgtgatccagatcaagctgagcgagcacacggaggacctgcccaaggcggacggccagggtagcacaaccatgctggtggacacagtgtttgagatgaactatgccacgggccagtggacgcgcttcaagaagtacaagcccatgaccaatgtgtcctagaaccacctgcctcacagctggccgtcacttgtgggggtccacgggacgatggctttgccagcttaaagtaaccggatggcggacacctggcccccgaggtcccccggccgccgccctgctgctgacccagcctgttttaagttctggatgcatttctctggggtatttggggcttatttttaaaattttaatatgggttcttttttgtgtgatttaaagacactttttggactcaacgttacatttttgaatgtagtaagtaaattaaccaaaaaagttacaacttcctaattttagtgacagctctgcctgtttgttagactcttactttttaaaatcttttctattttccctcgctggggcagtgccctcctacccccagggttgaggggaccaaggtggcacggtggtactgggggtgcggcagggacacccgaccacaccagagcgtgggagacggtgggccttgtcccctgcctgtgcctgcctgggagttttgtattcatcttttgtatagttgtggacatttaagacagtctttgggtacctattttcattgtaaaactatctgaaccattaaagtcgagcttttctaaagaaaaaaaaaaaaaaa

SEQ ID NO: 116461 - DNA, 1000 bp, Homo Sapiens
aagtgtataactaaactaacaagattaaatatccagccagtacagtattttttaaggcaaataaagatgattagctcaccttgagataacaatcaggtaagatcataacaatgtctcatgatgtaaaaaatattaaagatatcaatactaagtgacagtatcactctaatataatatggatcagagcatttattttggggaggaaaacagtggtgattaccggcattttattaaacttaaaactttgtagaaagcaaacaaaattgttcttgggagaaaatcaacttttagattaaaaaaattttaagtatctaggagtatttaaatccttttcccataaataaaagtacagttttcttggtggcagaatgaaaatcagcaacttctagcatatagactatataatcagattgacagcatatagaatatattatcagacaagatgaggaggtataaaagttactattgctcataatgacttacaggctaaaattagttttaaaatactatattaaattctgaatgcaatttttttttgttcccttgagaccaaaatttaagttaactgttgctggcagtctaagtgtaaatgttaacagcaggagaagttaagaattgagcagttctgttgcatgatttcccaaatgaaatactgccttggctagagtttgaaaaactaattgagcctgtgcctggctagaaaacaagcgtttatttgaatgtgaatagtgtttcaaaggtatgtagttacagaattcctaccaaacagcttaaattcttcaagaaagaattcctgcagcagttattcccttacctgaaggcttcaatcatttggatcaacaactgctactctcgggaagactcctctactcacagctgaagaaaatgagcacacccttcacactgttattacctatcctgaagatgtgatacactgaatggaaataaatagatgtaaataaaattgagttctcatttaacaaaaaaaaaaaaaaaaaaa

SEQ ID NO: 116462 - DNA, 1000 bp, Homo Sapiens
gaagtgaaggaccttcctggagcagggccccttcgctttcagaagggccgtattgagtttgagaacgtgcacttcagctatgccgatgggcgggagactctgcaggacgtgtctttcactgtgatgcctggacagacacttgccctggtgggcccatctggggcagggaagagcacaattttgcgcctgctgtttcgcttctacgacatcagctctggctgcatccgaatagatgggcaggacatttcacaggtgacccaggcctctctccggtctcacattggagttgtgccccaagacactgtcctctttaatgacaccatcgccgacaatatccgttacggccgtgtcacagctgggaatgatgaggtggaggctgctgctcaggctgcaggcatccatgatgccattatggctttccctgaagggtacaggacacaggtgggcgagcggggactgaagctgagcggcggggagaagcagcgcgtcgccattgcccgcaccatcctcaaggctccgggcatcattctgctggatgaggcaacgtcagcgctggatacatctaatgagagggccatccaggcttctctggccaaagtctgtgccaaccgcaccaccatcgtagtggcacacaggctctcaactgtggtcaatgctgaccagatcctcgtcatcaaggatggctgcatcgtggagaggggacgacacgaggctctgttgtcccgaggtggggtgtatgctgacatgtggcagctgcagcagggacaggaagaaacctctgaagacactaagcctcagaccatggaacggtgacaaaagtttggccacttccctctcaaagactaacccagaagggaataagatgtgtctcctttccctggcttatttcatcctggtcttggggtatggtgctagctatggtaagggaaagggacctttccgaaaaacatcttttggggaaataaaaatgtggactgtgaaaaaaaaaaaaaaaaaaaaa

SEQ ID NO: 116463 - DNA, 1000 bp, Homo Sapiens
agcccaggcaggcctgctccggcagcaggaagaactggacaggaaagctgccgagctggaacgcaaggagcgggagctgcagaacactgtagccaacttgcatgtgagacagaacaactggccccctctgccctcgtggtgccctgtgaagccctgcttctatcaggatttctccacagagatccctgccgactaccagcggatatgcaagatgctctactatctgtggatgttgcattcagtgactctgtttctgaacctgcttgcctgcctggcctggttctcgggcaacagctccaagggagtggactttggcctctccatcctgtggtttctgatcttcactccctgtgccttcctttgttggtaccgacccatctataaggcctttaggtccgacaactctttcagcttctttgtgttcttctttgtatttttttgtcaaatagggatctacatcatccagttggttggcatccctggcctgggggacagcggttggattgcagccctgtctacactggataatcattccctggccatatcagtcatcatgatggtggtggctggcttcttcaccctctgtgccgtgctctcagtcttcctcctgcagcgggtgcactccctctaccgacggacaggggccagcttccagcaggcccaggaggagttttcccagggcatcttcagcagcagaaccttccacagagctgcttcatctgctgcccaaggagccttccaggggaattagtcctcctctcttctctccccctcagcctttctctcgcctgccttctgagctgcactttccgtgggtgccttatgtggtggtggttgtgcccagcacagacctggcagggttcttgccgtggctcttcctcctccctcagcgaccagctctccctggaacgggagggacagggaattttttccccctctatgtacaaaaaaaaacaaagctctctttccttctctggtaaaaaaaaaaaaaaaaaaaaaa

SEQ ID NO: 116464 - DNA, 1000 bp, Homo Sapiens
ggttcgggccgggctgctcgctctggagttctacacacctgaggccttcaactggcgacaggcccatatgcaggcccggtttgtgatcctgagagtcttgctggaggctggcgagggactcgttaccatcactcccaccacaggctccgatgggcgcccagatgcccgggtccgcctcgaccgcagcaagatccggtctgtgggcaagcctgctctagagcgcttcctgcggagacttcaggtgctgaagtccacaggggatgtggccggagggcgggccctgtacgaggggtatgcaacggtcactgatgcgccccccgagtgcttcctcaccctcagggacacggtgctgctgcgtaaggaatctcggaagctcattgttcagcccaacactcgccttgaaggctcagacgtgcagcttctggaatacgaggcgtcagctgctggcctcatccgatccttctctgagcgtttcccagaggatggacccgagttggaggagatcctcacacagctggccacagccgatgcccgattctggaagggccccagtgaggccccatctggccaagcttgaggaagatgtgtggccttgcccccaattccatcagaccaaggctgcaagtggccctccattcgtgtgtgtatttaggggctggggagggggaggggcaggagcttggaccttggtactacctcagctgagggtggtgacacaaccccttccatttgtcagcactttccagcctgccaattgcttcccctctgtgatctcatttcatctgcactgccatacgtggagtgagcaagacagggcttaccatcctgtctaccagatgaggaaatggcagttctgagaagtcactggtctagatcccgcaggtggcacgtgacagctagggttcaaaacgttctcaccaaatccaatgctcctcacatattaattttataaccagacaaataaatattagagacaaccaaaaaaaaaaaaaaaaaaaaa

SEQ ID NO: 116465 - DNA, 1000 bp, Homo Sapiens
tgttggaaaaagagcccttatcgtggcctccaggggttctaccagtgcctacaccaagagtggctactgtgtcaacaggttttcttcacttctgccaggaggcaacaggcgaaactcaacagcaaaagactacaccattctagattgcatttacaatgaggtaaaccagacctactacgttctggatgtgatgtgctggcggggacaccctttttatgattgccagactgatttccgattctactggatgcattcaaagttaccagaagaagaaggactgggagagaaaaccaagcttaatccttttaaatttgtggggctaaagaacttcccttgcactcccgaaagcctgtgtgatgtgctatctatggatttcccttttgaggtagatggacttctcttctaccacaaacagacccactacagccccggaagcactcccttggtgggctggctgcgcccctacatggtgtcagatgtccttggtgtagctgtgccggctggcccgctgaccaccaagccagactatgctgggcaccagctccagcagattatggagcacaagaagagccagaaggaaggcatgaaggagaaactcacacacaaggcctctgagaatgggcactatgaattggagcacctgtctactcccaagttgaagggttcttcccatagcccagaccaccctggatgcctcatggagaattaaagagagaagcctccttaaggagccacaggatggtacctggccccaaaaggaatcctggagaggaggacagtgacaacaggtgacttcattctttagagtgaactttccaaacccagtccagctggaaacagcttatctataatctgaaatgctggctcaaacagttatggggaggttcccagattgcgtagcattcagattgatttgagcagctcctactgtgataagtgtatcccagatccacaatgtaaatatatgtgatttgtaagaaagaaaaaaaaaaaaaaaaaa

SEQ ID NO: 116466 - DNA, 1000 bp, Homo Sapiens
ccttctcccagcgcagccgtgacatctttgactgcctggagggggcggccagacgggctccatcctctgtggcccacaccagcatgagtgacaacggaggcttcaagcggcccctagcgccctcaggccggtctccagtggaaggcctgggcagggcccatcggagccctgcctcaccaagggtgcctccggtccccgactacgtggcacaccccgagcgctggaccaagtacagcctggaagatgtgaccgaggtcagcgagcagagcaatcaggccaccgccctggccttcctgggctcccagagcctggctgcccccactgactgcgtgtcctccttcaaccaggatccctccagctgtggggaggggagggtcatcttcaccaaaccagtccgaggggtcgaagccagacacgagaggaagagggtcctggggaaggtgggagagccaggcaggggcggccttgggaatcctgccacagacaggggcgagggccctgtggagctggcccatctggccgggcccgggagcccagaggctgaggagtggggcagccaccatggaggcctgcaggaggtggaggcactgtcagggtctgtccacagtgggtctgtgccaggtctcccgccggtggaaactgttggcttccatggcagcaggaagcggagtcgagaccacttccggaacaagagcagcagccccgaggacccaggtgctgaggtctgagagggagatggcccagcctgaccccactggccactgccatcctgctgccttcccagtggggctggtcagggggcagcctggccactgcctagctggaatgggaggaagcctgcaggtggcaccggtggccctggctgcagttctgggcagcatcctcccaagcagagaccttgctgaagctcctggggtgtggggtgtgggctggaagcactggctccctggtagggacaataaaggttttgggtctttctgaaaaaaaaaaaaaaaaaaaa

SEQ ID NO: 116467 - DNA, 1000 bp, Homo Sapiens
acaggtgtgtgatgggtagatttcacagcccttctactaatagtgagtgtgaaggcaagcttgatgcaaaacctcctgacctttcctacctgaagagccctttgacttctaggaagaaaggtcaaaaatgttatcttcagttgtgttaatcccagttttagtgcagcttaggaggctgctagttaggaagatggcagtggctgtaggctgggttgccagaaaagatggtggcctagtcttattattcagatggagaacttagaaaacctgaagagtacccaaattggattgtattttaatggacaatggctgtattttttccatgttagaaggatcctaatgaaagcacctgttatttttaagtttctaagggtctagttgttcagaatccccaaggatatttccctaacctcactcagtcacattgtaggagccagtgtagctatggaattatcttaggaactcaagcttctaaaactatccatgtagtcaaatctaggggaaaaagcaaataaaaatagtaaaatttggccgggcacagtggctcacgcctgtaatcccaacactttgggaggccgaggcgggccgatcacgaggtcaggagatcaaggccatcctggctaacacggtgaaaccctgtctctactaaaaatacaaaaaaatattagctgggcgtaggtggtgcacacctgtagtcccagctactggggaggctgaggcaggagaatggtgtaaaacccaggaggcagagcttgcagtgagccgagatcgcgccacggcactccagcctgggagacagagcaagactccgtctcaaaaaaaaaaaaagtaaaatttattttttatattcattaataaatgctgttgtgcttggagatgatcactcatataacatgtcatttttttggttctgttttggtttggtttttgccaattattttgttatatttccaaaaaactaaataaaaatcatttttattttttaaaaaaaaaaaaaaaa

SEQ ID NO: 116468 - DNA, 1000 bp, Homo Sapiens
tccttcagaaacagaggagaccctgaacacaggcaggcctcctgagcttccagccagggccacagccacatggttcagtgcctcccacactctcccagccttggctaccaggagggtggccagaactcagtggttgacagctgacagacagacgtgggcttccatatcgtccgtgccctgggctcagaccatcagtgagaaaaaacctggagggtctctctgggaaactcgttcttccccaccgactactgcagggaccgaggaagccatgaacactacaagccttttggcgcctgctgctgagataatggccacacctggcagcccatcccaggccagccctacctcgggagcattcacccatggcacacagactccgagtccaaccaaggcaacagcccccagatatccacaaacaggtgatctctctgcagagtggccattcactgctggtgaagagccagtcctggtcccaagaccccatcaagtttcaaggtgtcctcagccactcttcaaggtgggagctatggcagctgctcctctcaccctggctattcagaggctcaacccatgcctgatggagctgtgccaattcttccagcaatgcctctgcatgagccagaggagtcccaggacagaggacatgagatactgtcttgaatactattcctggtttctgaagaatgcaacatatatctgtcagagggtgaaaagggtgtcccactcgcacaccttaaagcaaaagtgccttgagaatatctgcaagtctgtgtgaggccttgaaaataacactagggcataacaattacttcaggggatacgccatccaccctggctcttgtcccaagtgggctacatttgaagaattcacccaggctccagctagatcatcagttaatttaaagtggttattcttggaagtagcattttttttccctctcctgtgaatctgtgcaaaacattgaaggtagaagttttcttgttaaaaaaaaaggaattc

SEQ ID NO: 116469 - DNA, 1000 bp, Homo Sapiens
actgagagatttggtcagaatttgaggccagtttcctagctcattgctagtcaggaaatgatatttataaaaaatatgagagactggcagctattaacattgcaaaactggaccatatttcccttatttaataagcaaaatatgtttttggaataagtggtgggtgaataccactgctaagttatagctttgtttttgcttgcctcctgattatctgtactgtgggtttaagtatgctactttctctcagcatccaataatcatggcccctcaatttatttgtggtcacccagggttcagagcaagaagtcttgctttatacaaatgtatccataaaatatcagagcttgttgggcatgaacatcaaacttttgttccactaatatggctctgtttggaaaaaactgcaaatcagaaagaatgatttgcagaaagaaagaaaaactatggtgtaatttaaactctgggcagcctctgaatgaaatgctactttctttagaaatataatagctgccttagacattatgaggtatacaactagtatttaagataccatttaatatgccccgtaaatgtcttcagtgttcttcagggtagttgggatctcaaaagatttggttcagatccaaacaaatacacattctgtgttttagctcagtgttttctaaaaaaagaaactgccacacagcaaaaaattgtttactttgttggacaaaccaaatcagttctcaaaaaatgaccggtgcttataaaaagttataaatatcgagtagctctaaaacaaaccacctgaccaagagggaagtgagcttgtgcttagtatttacattggatgccagttttgtaatcactgacttatgtgcaaactggtgcagaaattctataaactctttgctgtttttgatacctgctttttgtttcattttgttttgttttgtaaaaatgataaaacttcagaaaataaaatgtcagtgttgaataaaaaaaaaaaaaaaaaaaa

SEQ ID NO: 116470 - DNA, 1000 bp, Homo Sapiens
tgatgcatgtgatctgggccgcactggcatttgcagctattcagctgctgggcatgctgtgtgcttgcatcgtgttgtgcagaaggagtagagatcctgcttacgagctcctcatcactggcggaacctatgcatagttgacaactcaagcctgagctttttggtcttgttctgatttggaaggtgaattgagcaggtctgctgctgttggcctctggagttcatttagttaaagcacatgtacactggtgttggacagagcagcttggcttttcatgtgcccacctacttacctactacctgcgactttctttttccttgttctagctgactcttcatgcccctaagattttaagtacgatggtgaacgttctaatttcagaaccaattgcgagtcatgtagtgtggtagaattaaaggaggacacgagcctgcttctgttacctccaagtggtaacaggactgatgccgaaatgtcaccaggtcctttcagtcttcacagtggagaactcttggccaaaggtttttgcggggaggaggaggaaaccagctttctggttaaggttaacaccagatggtgcccctcattggtgtccttttaaaaaatatttactgtagtccaataagatagcagctgtacaaaatgactaaaatagattgtaggatcatatggcgtatatcttggttcatcttcaaaatcagagactgagctttgaaactagtggtttttaatcaaagttggctttataggaggagtataatgtatgcactactgttttaaaagaattagtgtgagtgtgtttttgtatgaatgagcccattcatggtaagtcttaagcttgttggaaataatgtacccatgtagactagcaaaatagtatgtagatgtgatctcagttgtaaatagaaaaatctaattcaataaactctgtatcagcccccaacatattatttttcattatttgggggatatttcagttccaaaaaaaaaaaaaaaaaa

SEQ ID NO: 116471 - DNA, 1000 bp, Homo Sapiens
tcaaacaggcagagatctggctccacaaggaggcccagaaggagggctggagcaaagctgccaagctccaagggaggaagaccaaagaaggcctgattgggctgttgcaggaaggaaacacaactgtattagtagaggtaaactgtgagacagattttgtttctagaaatttaaaatttcaactgttggtccagcaagtagcccttggaaccatgatgcattgtcagaccctaaaggatcaaccctctgcatacagtaaagtgcagtggctcacgcctgtaaacctagcactttgggaggctgaagcaggtggatcacttgagggtttcttgaattcctctgagctttctggacttccagctgggcctgacagagaaggctcactcaaggatcagttggctttagcaattggaaaactgggagaaaacatgattcttaaacgagctgcatgggtgaaggtgccatctgggttctacgttggctcttatgtccacggagcaatgcagagtccctcacttcacaagctggtgctggggaagtatggggccctggtcatctgtgagacgtctgaacagaaaacaaaccttgaagacgttggccgccgccttgggcagcatgtggtgggcatggcccccctctctgttggctccctggacgatgagcctgggggagaggcagagactaagatgctgtcccagccgtatttgctggatccctccattaccttggggcagtatgtgcagcctcagggggtgtcggtagtagactttgtgcggtttgaatgtggagaaggtgaagaggcagcagaaactgaataggttccagagacttttggcccaggaggaatatttacttttagctctggacatcattacaaaaaggaatatttcccaaacctcttcagaccgagaatgcatgggtaaaattattaaatagttgtataataaaaataattttttccttgtttgcacaaaaaaaaaaaaaaaaaaaaaaaaaaaaa

SEQ ID NO: 116472 - DNA, 1000 bp, Homo Sapiens
ctacttcctcatcgcagccggcgttgtggtctttgctcttggtttcctgggctgctatggtgctaagactgagagcaagtgtgccctcgtgacgttcttcttcatcctcctcctcatcttcattgctgaggttgcagctgctgtggtcgccttggtgtacaccacaatggctgagcacttcctgacgttgctggtagtgcctgccatcaagaaagattatggttcccaggaagacttcactcaagtgtggaacaccaccatgaaagggctcaagtgctgtggcttcaccaactatacggattttgaggactcaccctacttcaaagagaacagtgcctttcccccattctgttgcaatgacaacgtcaccaacacagccaatgaaacctgcaccaagcaaaaggctcacgaccaaaaagtagagggttgcttcaatcagcttttgtatgacatccgaactaatgcagtcaccgtgggtggtgtggcagctggaattgggggcctcgagctggctgccatgattgtgtccatgtatctgtactgcaatctacaataagtccacttctgcctctgccactactgctgccacatgggaactgtgaagaggcaccctggcaagcagcagtgattgggggaggggacaggatctaacaatgtcacttgggccagaatggacctgccctttctgctccagacttggggctagatagggaccactccttttaggcgatgcctgactttccttccattggtgggtggatgggtggggggcattccagagcctctaaggtagccagttctgttgcccattcccccagtctattaaacccttgatatgccccctaggcctagtggtgatcccagtgctctactgggggatgagagaaaggcattttatagcctgggcataagtgaaatcagcagagcctctgggtggatgtgtagaaggcacttcaaaatgcataaacctgttacaatgttaaaaaaaaaaaaaaaaaaa

SEQ ID NO: 116473 - DNA, 1000 bp, Homo Sapiens
ctgaatggctgcagagttaatgttcccagcccagtcccctttcgggggccttgggagagtttaaggcacctgctggttccaggacctcgctttccatctgttcttgttgcaatgccatcttcaaaccgttttatttattgaagtgtttgttcagttaggggctggagagagggagcttgctgcctcctgccttgctacactaatgtttacagcacctaagcttagcctccagggccccacctctcccagctgatggtgagctgacagtgtccacaggttccaggaccatttgagattggaagctacactcaaagacactcccaccaggctctttctcccttttcctcttctcactgccctggaatcaacaggctggttgctggttagattttctgaaacaggaggtaaaatttttctttggcagaggcccctaagcaagggaggggtgttggagagccagtgcccttaagactggagaaagctgcaatttaccaagttgccttttgccactgtagctgaccaggggactaggttgtagaggtgggaaggcccctctgggctgatcttgtgccattcttgaccttggacctgcttggttaaggagggagtgggccagaccagagtgccaggagctaatggagccaggcctgacacctaggagtggtccaaagccttcagcctagatggtgcaaagctggggccagcctgtcttcaccggcaccctcacctgtgacaccaagacccaccccaatccagacttcacacagtattctcccccacgccgtctatgaccaaaggcccctgccaggtgtgggtccacagcagcaggtatgtgtgaaagcaacgtagcgccccgcggactgcagtgcgcttaaccaactcacctcccttctcttagcccaagcctgtccctcgcacagcctcgcacaaaccacattgcctggtggggcccagtgtactgaaataaagtcgttccgatagacacgtcaaaaaaaaaaaa

SEQ ID NO: 116474 - DNA, 1000 bp, Homo Sapiens
ttcgggggcaccctggctgtgtgcgtctggaagtgctcctgacactctgtcccctgccccgtcccctgcagggccttttcctgccactcatctggggtggggagcagccctaggcaggtcctggtttttccaaggagagttggggtcttttctttttgtctttgtgtaccagtttcctgagccacgcccagtgtgtgaacttgacatctccatccccaggctctcaaccgtctccctcggagtctcagggtgtggacggggcagcgggcatgggtctgtgtgggagacgtggggtggggcggtgtgacagggtagaggaggtgggagatgagatcttccgcacaggaacacgccagtccccctttctccagggctgccttccccttgcatcctgggagccccactgccctgccatccccagtactgccgggaagtgtcggccgtccttgtcattagtggtcatatgaaaatggccccaagaaggagatgattctttcaagggacacaggcagcttctctccttgtcctctggggaggtgctgacccctcagaaaccccttcccccaacttgaccccaggctgaacagaccactgcatctcactgggccagcagcccccccagcccccagccttggtggggaccaagcagcctttcccgtcccctcctcgacccgtacagttgagagccaggggctggtgtgtgggagctgctacctggcagtttctcgaggggtcaccgagcctctggtgggacacctgggcaggagtgctctcaccacgaggctgcttccgcagggaaccctggcctgcccgcgacttcgcatcagggaccgcatgctgatttgtactgctctctgctgggttttctatgttcttttcgagtgtgggaaaagggttttagtagaagggtgaatcgtattttacacagcggtcttatttatataaatgtcttggtttttacaattaaaatgaccaaaaactgaaaaaaaaaaaaaaaaaa

SEQ ID NO: 116475 - DNA, 1000 bp, Homo Sapiens
ctataaatgttctgaatgtggagaaagcttctctcggagttcccgtcttatgagtcatcagagaactcacacaggttagtaacagtggggtttctctttgccccaggtgaggtggcatattcagaggagcctgttggcaagagctggtattccctgcccagccgaccaaatgacctctgcattcttcaggtaatgggggctcattgtgagggaggtgcagaggcagcagaggattggcataaaactgaaaaggagttctgtctgcatgagaaaggatggcaagtctctgaggtgacctcagggtggaattctctgttaagtccaccctgccccagggtgctcctaccctcttggtctttttaaagccaaggtgcgatttgggcacctgactgtccagtttaccttaacaagtttgggaatccatgtgatgtttttgatacttcttcctcatttgggacattcagtaggagcatttgggcttccggggcccctgagaccaaagaagaggggccaagtaccctgggaaatcagctgaaggtcaacaaaagactggttgtgagttgcagctgtcccgaaggccccagttgggaagccatgggcagtccagatcaagccaccacgtgccctacgatggcctaacaggagtgcccattggcagattacacatgtaaatatgacctcagacaaaaaggaaccagaggcccaagggcaataataaggtggaatttgcaggtcagcccaggaattggcagaggaagtaggtgtctgataaccctttgtggagaatgagattccccccacctgtgtgagaaaaataaacagctctggagtcttgttcctgactccagaggaacgagagcattccaggaaagagagattccctggaaaattgaaaatgtgaatcctagggggaaattggggattgtgtctttccctgttgaaaatgtttggatgggaataaatatcttcaggaaacataaaaaaaaaaaaaaaaaaaaaa

SEQ ID NO: 116476 - DNA, 1000 bp, Homo Sapiens
ttccctaccatcgttgagagagagccttgggacggcagggatggcgagcttcccgtggaggatgacattgacctcagtgatgtggagcttgatgacttagggaaagatgagttgtgagagccacaacagaggcttcagaccattttcttttcttgggagccagtggatttttccagcagtgaagggacattctctacactcagatgactctaccagtggccttttaaccaagaagtagtacttgattggtcatttgaaaacactgcaacagtgaacttttgcatctcaagaaaacattgaaaaattctatgaattgttgtagccggtgaattgagtcgtattctgtcacataatattttgaagaaaacttggctgtcgaaacatttttctctctgactgctgcttgaatgttcttggaggctgtttcttatgtatgggttttttttaatgtgatcccttcatttgaatattaatggctttttccattaaagaataaaatattttggacaatgccgataaatgtatgaagttagtatccacatcataaattcagagtgatgtttagcagtaaatcaatattttgaagtgatacacagatgtctttcctccccacaaacttttttaaacaaaaaacaagacctcttttctttagatggtgccacctatgcccaccacaacagagattttacatggaaaccgggctcagtgagaactgatttcctgcccaatatttgtctttgggctgtctctagtgactaattattaaggaatctagctggttatacagttcaaggctttctatgttgttaatgaacctcaaaatagccgttaagacatgaaatacagcagcaggttaccaatgcgaacaggtagttcgcatttatgtaaaacattcagaaaatgaagttttgaatttgttggaacattcaaaggacttgagagcattttattgtaacttaaaaaaataaatacaactgtcactaaaaaaaaaaaaaaaaaa

SEQ ID NO: 116477 - DNA, 1000 bp, Homo Sapiens
gctctttctcctaatgccaaggaatttatttttcctaatatgcagggtcaaggtagtagtaccaatggaatgttcccaggtgacagcccccttaacctcagtcctctccagtacagtaatgcctttgatgtgtttgcagcctatggaggcctcaatgagaagtcttttgtagatggcttgaattttagcttaaataacatgcagtattctaaccagcaattccagcctgttatggctaactaaaaaaaagaaaatgtatcgtacaagttaaaatgcacgggcccaagggggattttttttttcacctccttgagaatttttttttttaagcttatagtaaggatacattcaagcttggttaaaaaaataataataaaacatgcatcatttttcatttgccaaccaagcacaaagttattttatactgactgtatattttaaagtatactctcagatatggcctcttacagtatttaagatatagcaaggacatggctgatttttttttataaaaattggcactaataagtgggtttattggtcttttctaattgtataatttaatttagtacaaagtttgtaaaatatcagaggatatatatatattgtttctacgacatggtattgcatttatatctttttactacagtgatctgtgacagcagcagcttcatgttgtattttttttactgaaattgtaaaatatccatcttaaagacatcaactattctaaaaattgtgtacaggatattcctttagtggtggaattaaaatgtacgaatacttgctttttcaaaaaaatgtattttctgttaaaagtttaaagatttttgctatatattatggaagaaaaatgtaatcgtaaatattaattttgtacctatattgtgcaatacttgaaaaaaacggtataaaagtattttgagtcagtgtcttacatgttaagagggactgaaatagtttatattaagtttgtattaaaattctttaaaattaaaaa

SEQ ID NO: 116478 - DNA, 1000 bp, Homo Sapiens
tacagactggattttttttttttttttacagccatttccccaaaggaatgtcttgcatattactgacatttggtatgtttcattcattggaatatttcttattttctacgtgtttgaaaagcctgtaagaaatacaggatttgataatattttgaaggcaggaaaaacccaaattgtttcttctttgagagtcatgactaccttctggtgtggagaaattgccattggaaaatttgacaattttgattctcactggtatgtttaaaaactgaataaaaggaatagaatttttttttgataaaggatcacaaaacaattctaaaacctaactgtttttaccattgaaatttaaattgtgataataggttttaaatgtctagaatgcaactgataggcttttcttgaactgttagtttttttgaagtagttttttcatgtttaatttgtatttgtaaaaaaacaaaaagcaaaaaaattcccaaaacccagataacaaccagagcaaaactgttgtgccttctatttatctttgatttcagtcttggcaattgtttaaaaaaaaaatctagatttgttttattaggttcagagtatgtggggaattatagaatccctctttcatcactttgtgtatgtcttttgttaacatatttgttatgccttattctaaaattgagtctcaaactggaatgcctttgaagacagatgcttctatagaggttctttgacctaaatagttcagcatttgtatttttattctggtatctaatcagattcctaatcatagcccgtaagaaggaatgttactttaatattggactttgctcatgtgctcgtgtccgcatttttttttttcttaaaatcatagccatatggtaaattttctattttgttatggttctcttttattgatgggcatgcagtgggtgttacttggaaatggccaatttttattaaaatatttctggaagaaaatttaaaaaaaaaaaaaaaaaaaaaa

SEQ ID NO: 116479 - DNA, 1000 bp, Homo Sapiens
acagcagcagtgggagtagtggagggagccacccaagtagtcggagcagcagtcgagagaacagtggaagtggtagtgtgggggttcctattgctgttcctactccatctcctcccagtgtctttccaggtcatcctgtacagttctacagcatgaataggcctgcctctcgccatactcccccaacaatagggggctcgttgccctatagacgccctccttccattacttcacaaacaagccttcagaatcagatgaatggaggacctttttatagccagaatccagtatctcttgctcctcctcctccctccatcctacaggtaactcctacgttacctttaatgggatttgtggccagagtccaagaaaatatttcagatacaccacctccaccgccacctgtggaagaaccagtctttgatgagtctcccccacctcctcctcctccagaagattacgaagaggaggaagctgctgtggttgagtatagtgatccttatgctgaagaggacccaccgtgggctccacgttcttacttggaaaaggttgtggcaatttatgactatacaaaagacaaggaagatgagctgtcctttcaggaaggagccattatttatgtcatcaagaagaatgacgatggttggtatgagggagttatgaatggagtgactgggctttttcctgggaattacgttgagtctatcatgcattattctgagtaaagctcagcagggctgtgcttggctcacaggaatagtcaggtcttcccagattatctgaaggccctggggattccactccagtaaagtagaatgaaggatacaaatgataaaaattacactttttttttgggttattccccagtattaaaaacaaagcaagctgagtctgaacaaatggatctttctgccatcatttgtacaatgctgagctgtctggattgaaataaaatgaccatttttatgtatgtcaaaggtaaaaaaaaaaaaaaaaaaaa

SEQ ID NO: 116480 - DNA, 1000 bp, Homo Sapiens
aaaacacagatagtgttgtgatgcagccgaaaagaaaacattttattaaggatattcgtcatcttcctgtgaacagtaaggagttccttgcaaaagaagaaagccaaataccagtggatgaagtgtttttccacaggtattataaaaaagttgctgttaaagagaaacaaaaacgggatgcagatgaagaaagtatagaagacgtggatgatgaagaatttgaagagctgattgacacatttgaagatgataactgtttcagctctggaaaggatgatatggattttgctggaaacgtgaaaaagagaacaaaaggagctaaggataacacattagatgaagattcagaaggtagtgatgatgaacttggtaacctggatgacgatgaagtttctttaggaagtatggatgatgaagaatttgctgaagttgatgaagatggaggaacattcatggatgtgttagatgatgaaagtgagagcgttccagaacttgaagtccactccaaagtcagtactaagaaaagcaagagaaaaggtacagatgattttgactttgctggctcatttcaagggccaagaaaaaagaaaagaaacttaaatgattccagcctatttgtatctgctgaagagtttggccatctattggatgaaaatatgggatccaagtttgataacattggcatgaatgccatggctaacaaagataatgcaagtctcaaacagcttagatgggaggctgaacgtgatgactggctacacaacagagatgcaaaaagtatcatcaagaaaaagaaacattttaaaaagaagaggattaaaaccactcaaaaaactaaaaaacaaaggaaatgagttattaatgtaaattatagattaaaattctacttacatctaatttttgctgttcaaccatgttttttgatctagctctctgattccatacattccagacttctcagtggatttgtaataaactataaataaaaaaaaaaaaaaaa

SEQ ID NO: 116481 - DNA, 1000 bp, Homo Sapiens
atcgccttggccttggctgtgattatcacctcttacaatatttggaacatggatcctggatatgatagcatcatttataggatgacaaaccagaagattcgaatggattgaatgttacctgtgccagaattagaaaagggggttggaaattggctgttttgttaaaatatatcttttagtgtgctttaaagtagatagtatactttacatttataaaaaaaaatcaaattttgttctttattttgtgtgtgcctgtgatgtttttctagagtgaattatagtattgacgtgaatcccactgtggtatagattccataatatgcttgaatattatgatatagccatttaataacattgatttcattctgtttaatgaatttggaaatatgcactgaaagaaatgtaaaacatttagaatagctcgtgttatggaaaaaagtgcactgaatttattagacaaacttacgaatgcttaacttctttacacagcataggtgaaaatcatatttgggctattgtatactatgaacaatttgtaaatgtcttaatttgatgtaaataactctgaaacaagagaaaaggtttttaacttagagtagccctaaaatatggatgtgcttatataatcgcttagttttggaactgtatctgagtaacagaggacagctgttttttaaccctcttctgcaagtttgttgacctacatgggctaatatggatactaaaaatactacattgatctaagaagaaactagccttgtggagtatatagatgcttttcattatacacacaaaaatccctgagggacattttgaggcatgaatataaaacatttttatttcagtaacttttccccctgtgtaagttactatggtttgtggtacaacttcattctatagaatattaagtggaagtgggtgaattctactttttatgttggagtggaccaatgtctatcaagagtgacaaataaagttaatgatgattccaaaaaaaaaa

SEQ ID NO: 116482 - DNA, 1000 bp, Homo Sapiens
ggcccagacttcccgaatgtatgaattcgtgggattggaattcttgccccatcttcagacctgggtgcataacatcacccgaggcaagggcatgggtgaccacgctttccacacaaatgccagggatgcccttaatgtctcccaggcttggcgctggtctttgccctatgaaaaggtttctcgacttcagaaagcctgtggcgatgccatgaatttgctgggctaccgccacgtcagatctgaacaagaacagagaaacctgttgctggatcttctgtctacctggactgtccctgagcaaatccactaagagggttgagaaggctttgctgccacctggtgtcagcctcagtcactttctctgaatgcttctgagccttgcctacatctctgagccttaactacatgtctgtgggtatcacactgagtgtgagttgtgtccacacgtgctcaagcagaaggacttttgtgtccatgcttgtgtctagaaaacagactggggaaccttatgtgagcagcacatcccaccagtgaaacagggtattgctcttcttcttttcttgatcttcctgtctgggcagacttcagagactttgtggcctggaggcctattaagcacgacacagtatcagtggaattgatccataaacctccctgtccacatcttgcccaatggggaatggatctttcaccaaagagctcaccagcattttccacagagatgcaaattctgagcccttggagttcccagtggattcaaggaaggaagtgggaacaaggttggatgcctacttatgagcttgaccatcacagctatcggtaatcagaaatatgaaacaaaatctctgcacaaaagagcaagctcttaagttcacagggtgcctgggctgcatttgaatatcacttcccctctgcattttcccatcacatagaagactttgacctgtgaagctgccatctgttaatactaaaattcccaaataagaaaaaaaaaaaaaaa

SEQ ID NO: 116483 - DNA, 1000 bp, Homo Sapiens
ggggacctcctctcctaacacctctcagatacactggaccccgtaccgggcgatgtaccagtacaggccccagaacgaagacgagctggagctgcgcgagggggacagggtggatgtcatgcagcagtgtgacgatggctggtttgtgggtgtctcccggaggacccagaaattcggaacgttccctggaaattacgttgccccggtgtgagtggtctccatggcaacttggagccagccaggatggggtggggagcggtggcactcgtgggagggagaggacccccgcccacatcctccttccccaggacctgagctcccagcatctgcagacgacccccgcagcatttccctcggacccccctcgaagccccctggactgattcccacccacgactcacaggcattcctcccacagccctttcatttcctccccaccccactccccaaatacagaggtctgctttgaagcggagaccatttccaggccttattgagaccagaccccaagtcccccacccccatcctgctccagcgtttcctctaacagggaccagctctccgctttgcccccacggggttcctctaaccagaaccagcttcctagcctcgtagagaccaaaggccgcccccgcctgctggggttcctcccagcaccccagcttgctggctgccctctttgccttctggcctccagctgggtgtgggggggcggagcaaggcgggggacagacgcagcaccttcttagcgatctaggcctggcaagagctctggccccaaggcctcctcttcccaggggctgccaagtcctggccctggccctggcatatcaccccgcactgtggggccaggcaccactagcctggctcaaatattccccagggagactgctgtgtgctgcccgcctgcctgctggctctcccccagccccacatcccctctggaagagaatgtaaaataaacctggacacaaggaaaaaaaaaaaaaaaaaaaaaaaa

SEQ ID NO: 116484 - DNA, 1000 bp, Homo Sapiens
ccagtcaaggaaagtcaagtagcaagaaggaaatgtctaaaagagatggcaaggagaaaaaagacagaggagtgacgaggtttcaggaaaatgccagtgaagggaaggcccctgcagaagacgtctttaagaagcccctgcctcctactgtgaagaaggaagagagtccccctccacctaaagtggtaaacccactgatcggcctcttgggtgaatatggaggagacagtgactatgaggaggaagaagaggaggaacagacccctcccccacagccccgcacagcacagccccagaagcgagaggagcaaaccaagaaggagaatgaagaagacaaactcactgactggaataaactggcttgtctgctttgcagaaggcagtttcccaataaagaagttctgatcaaacaccagcagctgtcagacctgcacaagcaaaacctggaaatccaccggaagataaaacagtctgagcaggagctagcctatctggaaaggagagaacgagagggaaagtttaaaggaagaggaaatgatcgcagggaaaagctccagtcttttgactctccagaaaggaaacggattaagtactccagggaaactgacagtgatcgtaaacttgttgataaagaagatatcgacactagcagcaaaggaggctgtgtccaacaggctactggctggaggaaagggacaggcctgggatatggccatcctggattggcttcatcagaggaggctgaaggccggatgaggggccccagtgttggagcctcaggaagaaccagcaaaagacagtccaacgagacttatcgagatgctgttcgaagagtcatgtttgctcgatataaagaactcgattaagaaaggagacaagttccatgggatacaacctccctcttgttttgtttgtctctccttttcttttgttactgttcttgctgctagaacttttttaaataaactttttttcaatgtgaaaaaaaaaaaaaaaaaaa

SEQ ID NO: 116485 - DNA, 1000 bp, Homo Sapiens
tcaggcaccagcaactctcagaccttcacaagcaaaacatggacatctaccgacgatccaggctgagcgagcaggagctggaagccttggagctaagggagagagagatgaaataccgagaccgagctgcagaaagacgggagaagtacggcattccagaacctccagagcccaagcgcaagaagcagtttgatgccggcactgtgaattacgagcaacccaccaaagatggcattgaccacagtaacattggcaacaagatgctgcaggccatgggctggcgggaaggctctggcttgggacgaaagtgtcaaggcattacggctcccattgaggctcaagttcggctaaagggagctggcctaggagccaaaggcagcgcatatggtttgtcgggcgccgattcctacaaagatgctgtccggaaagccatgtttgcccggttcactgagatggagtgagagagagagagagagagagatgacaaggagcacaagaagtggtccatctcccgaattcgctgttaccgcctgtctctttaagggcatgccttgtgctgttaatagatcttagggtgaaccacttcattctgcagggttctccctcccaccttaaagaagttccccttatgtgggttgcctggtgaatggccttccttcccgccagagggcttgtgaacagaccggagaggacagtggattgtttatactccagtgtacatagtgtaatgtagcgtgtttacatgtgtagcctatgttgtggtccatcagcccctcacattcctaggggtttgagatgctgtaggtggtatgtgacaccaaagccacctctgtcatttgttgtgatgtcttttcttggcaaaagccttgtgtatatttgtatattacacatttgtacagaattttggaagattttcagtctagttgccaaatctggctcctttacaaaagaaataccttgagaaaaaaaaaaaaaaaaaaaaaaaaaaaaaaaaaaaaaa

SEQ ID NO: 116486 - DNA, 1000 bp, Homo Sapiens
cggggccgcggccgggccggctcccagggcggccgcggcggtggggcgcaggccgccgcgcgagtgaatcgaggcggcgggcccatccggaaccggccggccatcgcccgcggcgcggccggcggaggcggcaggaaccgaccggcgccctacagcaggccaaaacaacttcccgacaagtggcagcacgatcttttcgacagtggcttcggcggtggtgccggcgtggagacaggtgggaaactgctggtgtccaatctggattttggagtctcagacgccgatattcaggaactctttgctgaatttggaacgctgaagaaggcggctgtgcactatgatcgctctggtcgcagcttaggaacagcagacgtgcactttgagcggaaggcagatgccctgaaggccatgaagcagtacaacggcgtccctctggatggccgccccatgaacattcagcttgtcacgtcacagattgacgcacagcggaggcctgcacagagcgtaaacagaggtggcatgactagaaaccgtggcgctggaggttttggtggtggtggaggcacccggagaggcacccgcggaggcgcccgtggaagaggcagaggtgccggcaggaattcaaagcagcagctttcggcagaggagctggatgcccagctggacgcctataatgcgagaatggacaccagttaaacagaccagcaaatccgcgtgcggaacaggacccaggcgtctcctcttgctccctggttggggggcggtggctggggctgtgcggccaatgatggatttgtttcttttatgttttaaaataggatttaaaaactcatgtaaaggttttttttttttctttttttttttttttaattctgaaacagacctgttttgtaccgagttatttttgggataaattttactggttgctgttgtggagaaggtggcgtttccaccttttccataataaaatagaaatgtgtgtaaaaaaaaaaaaaaaaaa

SEQ ID NO: 116487 - DNA, 1000 bp, Homo Sapiens
gactttttgaatgtcataaagaagagccttcacatgaaattagtagtgtgttgataagagtgtaacatccagctctatgtgggaaaaaagaaatcctggtttgtaatgtttgtcagtaaatactcccactatgcctgatgtgacgctactaacctgacatcaccaagtgtggaattggagaaaagcacaatcaacttttctgagctggtgtaagccagttccagcacaccattgcatgaattcacaaacaaatggctgtaaaactaaacatacatgttgggcatgattctacccttattgccccaagagacctagctaaggtctataaacatgaagggaaaattagcttttagttttaaaactctttatcccatcttgattggggcagttgactttttttttgcccagagtgccgtagtcctttttgtaactaccctctcaaatggacaataccagaagtgaattatccctgctggctttcttttctctatgaaaagcaactgagtacaattgttatgatctactcatttgctgacacatcagttatatcttgtggcatatccattgtggaaactggatgaacaggatgtataatatgcaatcctacttctatatcattaggaaaacatcttagttgatgctacaaaacaccttgtcaacctcttcctgtcttaccaaacagtgggagggaattcctagctgtaaatataaattttgtcccttccatttctactgtataaacaaattagcaatcattttatataaagaaaatcaatgaaggatttcttattttcttggaattttgtaaaaagaaattgtgaaaaatgagcttgtaaatactccattattttattttatagtctcaaatcaaatacatacaacctatgtaatttttaaagcaaatatataatgcaacaatgtgtgtatgttaatatctgatactgtatctgggctgattttttaaataaaatagagtctggaatgctaaaaaaaaaaaaaa

SEQ ID NO: 116488 - DNA, 1000 bp, Homo Sapiens
catttgcagactggaatcattaagtaatttaataaaaaaattgtgaaacagcatattacaagtttgaaaattcagggctggtgaaaaaaatcaactctaaatgatgataattttgtacagttttatataaaactctgagaactagaagaaattattaactttttttcttttttaattctaattcacttgtttattttgggggaggaagactttggtatggagcaaagaaataccaaaactactttaaatggaataaaaccaactttattctttttttcccccatactggtagataaagcaaactttataagtgggctattgaaagaaaagttacaagcttaagatacagaagcatttgttcaaaggatagaaagcatctaaaagtttaggctcaagatcaatctttacagattgatattttcagtttttaatcgactggactgcagatgttttttcttttaacaaactggaattttcaaacagattatctgtatttaaatgtatagaccttgatatttttccaatactattttttaaaaaattgtatgatttacatatgaacctcagttctgaaattcattacatatctgtctcattctgccttttatactgtctaaaaaagcaaagttttaaagtgcaattttaaaactgtaaattacatctgaaggctatatatcctttaatcacattttatattttttcttcacaattctaacctttgaaaatattataactggatatttcttcaaacagatgtcctggatgatggtccataagaataatgaagaagtagttaaaaatgtatggacagtttttccggcaaaatttgtagcttatgtcttggctaaatagtcaaggggtaatatgggcctgttgtttagtgtctccttcctaaagagcacttttgtattgtaatttattttttattatgctttaaacactatgtaaataaacctttagtaataaagaattatcagttataaaaaaaaaaaaaaaaaaa

SEQ ID NO: 116489 - DNA, 1000 bp, Homo Sapiens
gcaggccctccatcgtctaatggcacagctgcccacccacatgctcatgctgcttcagaagttttggaaaagtctggaagcacctcatgtggagctcaactcaaccacagttcttatgggaatggtatttcttcagcaaaccatgaagacttggtggaaggtcagattcataaacttcgtctaaaacttcgtaaaaagctaaaggcagaaaagaagaaattagctgctcttatgtcttccccgcaaagcagaacagttcgaagtgaaaatctagaacaggtgccccaggatgggtctccaaatgattgtgaatcaatagaggacttgttaaatgagctaccatatccaattgatattgccaatgagtctgcatgcaccactgttcctggtgtttccctgtacagtagtcaaactcatgaagaaattttagcggaattattgtctcctacacctgtttcaacagagctgtcagaaaatggggaaggtgactttaggtatttgggaatgggagatagtcatatcccaccaccagtaccaagtgaattcaatgatgtttcccagaacacacatctgagacaggaccataattattgtagccccaccaagaaaaatccatgtgaagttcagccagactctctgacaaataatgcctgcgttagaacattaaacttggagagtccgatgaagactgatattttcgatgagtttttttcctcctcagcattaaatgctttagcaaatgacacattagacctacctcatttcgatgaatatctgtttgagaattattgaattaatgcttgttaacttttttcatataatatttattattattagaagaacttacaatgtgttcaggtagtgttttatacactggacttgtgtaattacttgtgtaataaccatgaacaaaatgcaaggtttaacctttggttctgcccatgaagcatgtaatctttcttacacattaaaatcactgaatgtgtaaaaaaaaaaaaaa

SEQ ID NO: 116490 - DNA, 1000 bp, Homo Sapiens
agaagagagcacctttgtttctgatttggagaaccagcccagtaacattgtgtctcttcaaactgagccatcaaggcaattgccatcgccacggacatcattaatgtcagtatgtcttggtagagactgtgatatgtcttaaaactgccaaagcatttcattgagaattatgatgttataaaaaggaaaaaggaagaatgtcgtctactgcagtctatttaaagatgacatttggtgaaaactctcttcctccttacaatattttaaatgattttttttttggtgttaatttgtaaaaatcattatttgttcaaaatgtatgtcccaccctcaaagatatgcacttttaagtgaagaaaatgatactgctagcagcttatttaaaacttggggtcctttttaaataagaaaaattatataaattttagaagttatttcataaagccatacggtattgacatatttttaaggtagtcaatgagtatttttgaattttttttttttgagagttattctggaaatgtgttataagctaggagaatccctttggacagtctttatttttcttcttaaaaatttatatgattcaaaaccatttcttcaggttaaattgaggcattttaatctgcacagtttatcttctgccaaaataaaaatttactatttcctttatatacttgtttatctggactgccagtaaaacaaatgtgtattcaacaaaagaaaaaaaataaaacagtaacactttaaaacaagaatcagacattttcctatgcagtatttttttttaaagtttattttagtaaagttaaaatcttgaaagtagctaagggcataattatgtcataaatactgaacttcaggtgaacaaatactttatagttttaattattttctttgattttgaggagtatcttatttgctttctatcatcagtaaaaacagcatttaacttgctaaataaacatgaaaaacccttgtcataaaaaaaaaaaaaaaa

SEQ ID NO: 116491 - DNA, 1000 bp, Homo Sapiens
gaggtcaacacccgccgagcacaggctgacctggcctatcagcttcaggtggccaagactaagcagcagattgaggagcagcgggtgcaggtgcaggtggtggagcgggcccagcaggtggcagtgcaggagcaggagatcgcccggcgggagaaggagctggaggcccgggtgcggaagccagcggaagcggagcgctacaagctggagcgcctagccgaggcagagaagtcccaactaattatgcaggcggaggcagaagccgcgtctgtgcggatgcgtggggaagctgaggcctttgccataggggcccgagcccgagccgaggctgagcagatggccaagaaggcagaagccttccagctgtaccaagaggctgctcagctggacatgctgctagagaagctgccccaggtggcagaggagatcagtggtcccttgacttcagccaataagatcacactggtgtccagcggcagtgggaccatgggggcagccaaagtgactggggaagtactggacattctaactcgcctgccagagagtgtggaaagactcacaggcgtgagcatctcccaggtgaatcacaagcctttgagaacagcctgagccttcagccctcacagatgcccagcctcatagctgaagttgcctgaatgatcctcctgttgcatgtaacccactggcctccctgagcatgtccattgacagtgaggtcccacccctcatctctccttgccaaatagtttgtgccttgtcttgaagggggttgctccccttgccaacctcacactgctatgattgccaactccagcggtcccatgtcagccttctgatgatcccactccaccccacctcaacttatttaacttcctaattaaatcagactgtttgagcctgttgtctagaatattttcctgaccaagactgagggatgggctggaggttttcaactttgctacccaaataaattgctgtaagtaagtactaaaaaaaaaaa

SEQ ID NO: 116492 - DNA, 1000 bp, Homo Sapiens
taacaccttaagagttgtagttactgaccagaaatatggacagacttcttagacttggaggaggtatgcctggactgggccaggggccacctacagatgctcctgcagtggacacagcagaacaagtctatatctcttccctggcactgttaaaaatgttaaaacatggccgtgctggagttccaatggaagttatgggtttgatgcttggagaatttgttgatgattataccgtcagagtgattgatgtgtttgctatgccacagtcaggaacaggtgtcagtgtggaggcagttgatccagtgttccaagctaaaatgttggatatgttgaagcagacaggaaggccggagatggttgttggttggtatcacagtcaccctggctttggttgttggctttctggtgtggatatcaacactcagcagagctttgaagccttgtcggagagagctgtggcagtggttgtggatcccattcagagtgtaaaaggaaaggttgttattgatgccttcagattgatcaatgctaatatgatggtcttaggacatgaaccaagacaaacaacttcgaatctgggtcacttaaacaagccatctatccaggcattaattcatggactaaacagacattattactccattactattaactatcggaaaaatgaactggaacagaagatgttgctaaatttgcataagaagagttggatggaaggtttgacacttcaggactacagtgaacattgtaaacacaatgaatcagtggtaaaggagatgttggaattagccaagaattacaataaggctgtagaagaagaagataagatgacacctgaacagctggcaataaagaatgttggcaagcaggaccccaaacgtcatttggaggaacatgtggatgtacttatgacctcaaatattgtccagtgtttagcagctatgttggatactgtcgtatttaaataaagcaacgaaaaacgccaaaaaaaaaaaaaaaa

SEQ ID NO: 116493 - DNA, 1000 bp, Homo Sapiens
ttctaagttcttttatgttttagtttaccctcacagcagccatagtgttaagtcattatgagcttcatcttaaagataagaaaactgaggcaaggggagattaacttactgccaaatttcaaacagttagtagtatttgagaccagtagtatggctctaatcttacccttagccctcccaaccattatgctgtactatctacccataaatacctccaggaaacattcccctcttggtaatttgtccttctatagaagcttcaaagattaaatcaaattaattttcaaaaaaaatttttttttagaaatgttattttccctgtgatagaggatgacttcccagtttcaccaaagtctgtttatatcaacacacacaaaatggaataattctgagtcactaggcaatcaatctactgtggttttactatgtaaggtgaaaattaactggaacgatgtttgtttgctatacttacatagtcaaactttacaagccatgaaattaattgcactctttgtatttgttgttaaatgcctaagaagttttctaaaaattttgtaaaggcactgtcagagaatctggagttgaatgattattccagatactgtataacctgcataactttttgtctttaagtcgtgtttgtaaaagaagtaattgctagaaacatttgataatgtacaaagtagtctataatgactgttcagtacatttttaatatttttttggttatatccaactttttgtaaatatactggaagcttgataataaaatgtatttcctatcaccatacttttccatgtgaaaacctgagcctatttctagtataagtatccaaagaaaagtttgacctggttgtgttattttaccagaccttggtaaaagaactattttggaaacagtatttgtaaatggaactaatgctatatttaaaaacactgatttttttttaacctgccaaaaataaaaaaaagctcattttataattttctactaaaaaaa

SEQ ID NO: 116494 - DNA, 1000 bp, Homo Sapiens
tagaatgggagagtaagtagacagtggtgataaccccacactgcttataagtgcatctttatagtatttggggctttcctacccctttagccttctgtacctagtaccatattccagttttaaagaactggcagaatgtgatggataacagaggaagagctcaatttatgtttattggaagaacattttacttaaatgatttgaggggtgggagggagtgaactactgagtttgccagagtgaaaatccatctgaaaaactcagctacctttagtttttagtcctcatttttggtcttgtctctgcggactgtgaagaatcacaatgctctatatgccctggactgtgtggcaaatgcaggttgcagcgtgtgtgttacatgaggatcttccacaatttcagaatgcacgccagagctgaagggggaaacttggtaacttgcccattattctctgcttttagccagagttaaacagactgatgggtctggtagccaacaacttggcaacttccactccttctcacctcgtgagattaagggctgtgaaaagaaatctagtctaactccaacagaaatctgtctctgttaagtgttttaccttctgtaagtagagatggtagagccaagatttttcttttggtaatttccctgtctataaagtgagaccaaagggatatctgttccctgttacctttttggagaattcataacatttgaagatcaaaaaattgaatgataaatatgaatggcttttcaattctgtggactttgtaccatttggcttcaccttgtactgcaagatgaatttgtaaacaaaacaaaattggactgtctggaaagctaaagttctgaaatatggaatgtactgcctctaatttttctttgtcttcctctcactggcatttttttctctcccaggtttcttaagaataatgttttttaaaggaggctttttgcccatcaagaataaaaagaaataaaaccaaaaaaaaaaaaaaa

SEQ ID NO: 116495 - DNA, 1000 bp, Homo Sapiens
aagataacaagaggaaagtatggggaaggagccaagcaggagacgttcacctttgccttaactttggtcttcattcaatgtgtgatcaatgctgtgtttgccaagatcttgatccagttttttgacactgccagggtggatcgtacccggagctggctctatgctgcctgttctatctcctatctgggtgccatggtctccagcaattcagcactacagtttgtcaactacccaactcaggtccttggtaaatcctgcaagccaatcccagtcatgctccttggggtgaccctcttgaagaagaagtacccgttggccaagtacctgtgtgtgctgttaattgtggctggagtggcccttttcatgtacaaacccaagaaagttgttgggatagaagaacacacagtcggctatggagagctactcttgctattatcgctgaccctggatggactgactggtgtttcccaggaccacatgcgggctcattaccaaacaggctccaaccacatgatgctgaacatcaacctttggtcgacattgctgctgggaatgggaatcctgttcactggggagctctgggagttcttgagctttgctgaaaggtaccctgccatcatctataacatcctgctctttgggctgaccagtgccctgggtcagagcttcatctttatgacggttgtgtattttggtcccctgacctgctccatcatcactacaactcgaaagttcttcacaattttggcctctgtgatcctcttcgccaatcccatcagccccatgcagtgggtgggcactgtgcttgtgttcctgggtcttggtcttgatgccaagtttgggaaaggagctaagaagacatcccactaggaagagagagactacctccacatcaagaatatttaagttattatctcaaacagtgacatctcttgggaaaatggacttaataggaatatgggactgagttccagtcttttttaataaaataaaatcaagc

SEQ ID NO: 116496 - DNA, 1000 bp, Homo Sapiens
gttgtattctcacaggtgttatgtgcaggacacaatccaaatcataaacctggctcatgcccaacacatttctgctaatagggagagggacccaccacacacccacacatgccagaggtccctcctcacagaggagagggcctgtgtctgtagaaggttaaagctgacaacatgtgaaacatcccagaattatgactcttcccaagtttaaaatacattctcctcatgagagcagaaggtttgttgctgtgttgtgaatgatgagctgcctccatagggaacccactgccacctgggccagcttctggagcatgagaacctgagccagggtcacccttgtggggcctggacatgacgcacgctggctgcgactaggagcagggctgcctcttctccctccccaaggtctgcttgtgggcacgctctgttccctcaggtgccattctcccagggcttaggcgcccataaatgttctttctgtggtggagtagggcctcctgcttccatactgtcgcatgggctagatctcaggtgtggtgttgagccaccttaagatgagggctgcttcgcagtaaagtttccagcctgggcccctcttgggccttctggctggggaccctcagcctcctgatgctgttgcagggcaggtctgagagggtgcccagcagcacccggtgtcagggccaccttgttttccatttttgaacagcgctccctgtggtttgtgcccactgctcaatacagcctccgatcctcactcttgaaagctccatgataagcacagagatgggcagtgtgggtcagaaggtgggccgcttcctgtggaagagggaagtgtaggtgaatagatatcaaaacccctgatgtcattcttttgaggggttggattttcttttttctggcagacatttcagtacattcacatttctctcacatttgctgaatgtgagatcagaataaaggagatcggcgtttatttcgtaaaaaaaaaaaaaaaaaa

SEQ ID NO: 116497 - DNA, 1000 bp, Homo Sapiens
tttgaagctcatgggaaaattgtgatcaaaagggctatgggaagggcagaccccgccaatgatttctcttcacctgtcttaagattaaataaaaaagagtgtcctggcagttatcttgaggtggggaaggaggtgatgaaacattagtttgtgaaatccaaggccctggcttgctttctttctttttttttttttttttttgaaacagtctctctctgtcacccaggctggcgtgcaatggcgcagttgactcactacagcctctgcctcccaggttcaagcgattctcatgccttagcctcccaagtagctgggattacaggtgtgtgccgcaatgcccagctaatttttgtgtttttagtagagacagggtttcactatgttggccaggctggtctcgaactcctggcctcacgtgatctgtccacttcagccgtccaaagtgctgggattacaagcgtgagccactgtgctgggcccgaggccctgacttcttgctgtaactttccatgcattttttttaaaaggagcagtgtggattttcgcaccctttgtgaactaagttcaatgcgctctatccaaatttgcctaattgaactataagaaagtaataattccattttctatcccctcagggactgaacaaatggaaataactcccaggcagtatcaggtggtcactacagagacttccacaaaaacttttgaatgatgtgaaacacgatgtcatgaataagggttgagccaactatagctctgtgttcctactgggctttccctaatgtggttgggagttatgccctagactaactgtattgtcctagtcacagctccttgctttgatttcatccttgataaaatgaagatgaaacttacactacttctccaagccttttgctgtcttaagaataagacctgagattaacactaaccctagaatagaaatgtaatagggagatggtaataaaggagtttttctggcaaaaaaaaaaaaaaaaaa

SEQ ID NO: 116498 - DNA, 1000 bp, Homo Sapiens
tttcaaaattgctaaaatgtgtttgagctttagactataacatttgttgtaataattgctaggttgaagttcaacatgtaaaaaaagggggcatggatttacattgcaaaaggtgtccacagtgtattagtgacattctttcattgacagctgacataattcattgagtgaaatattttaagccaaaaaaaaattccctttttaaaaaagggggtttaaatactgttggcatttttatggttcctttaaatgccctagctattcccagaggggtttttttgtttgtttttttggttttgattttctttttgtttttctttcttcttcttatttttttcatttgagtcttagctcccatttaagttatgcttctgaccttgtatggtctgtaagcttgcccagaaataagaccactgttttgaactaccacaaaagtataaatgaatattttaatgccacaatctttcctgttgcctgtggagtctctgctgaaatgaatcaggattcgagctctaggatgagacagaaaatgaaagcatgttgtttgccaggacactgtgggtttatattgatgtgtaacaagttgatttggaacactggactctcattctgttattctggttttgttttttttgttttgttttttttcttttgtaaaggcaatgagctagtcccagaaaggatccttcagttacatacaatttgtttaatgaaatgtcatggctctgttcatatttttgtcttgttcttccaattggtatatacaactttcagagcctcttgtatttggaaggctggaagggcccagactttggaatagtgtcttggtttcactgtttttgttttgattttttttttgttttgattttttttaaactaaagctatataaagcttgtggattaaacagaataaatttctaaatttaaaaatttaaaaaaaaaaaaaaaaaaaaaaaaaaaaaaaaaaaaaaaaaaaaaaaaaggaaaaaaaaaaaaaaaa

SEQ ID NO: 116499 - DNA, 1000 bp, Homo Sapiens
tccataaatgcagatagtgaggctaagagagggaaagtgacttactcataaccacaccgtgagttagtgaccaagtcaggataagaatccaggtctgctgactcctaggccagaattcttgtctttatactacactgcttctatctctaccctattccccctctgagcctttgcttttctcatctgtaaaatgacgataataaagcctagagagtgtatgagaatcattaaagcagaagcatttttcttaatgtacaaggttctatacaaatgcaagggaattaatgtataacatatatgtggggctaagtctctaaaacaacataataaaagttgtttttattttagtcaatcttttaggtattgtgtctacctgatagcatgtaacaagattgaacacttgtgtaggtcgtatgtgcctttaatctgaggttggcctcagtgacaatcaaaattagcagttgaggaaaaaggtcatacatttttctcttgcccttgctggaatagggatcaagaggaatataaaagcagtgggatatctggatttcttatactcagtcaaccacaacatggccttagtactgaactagcccagggtttcaatggaactcgtagatctcattcccaaggctggtcctggttgaagggagaaggtcaaaaaaggacgtgtcttctgaaaggcattacccatggaaagccaagggggagggttgcccactaggaggagcttcttttgtagaagccagaatggaggaaaggggctttctgacttggagcatctgaggaaatagattatttgaggatctagtactcccagaataatctgtaaccacaagaaacacatttcttgaactccagcgccccagaacaggatatccatatccaatcccatcgtatccatcctggatgttatgaatttccagagagggccacttctacccccctaggagtcatacatctggctacttatttgttaaaaataaaattctgtaccatttat

SEQ ID NO: 116500 - DNA, 1000 bp, Homo Sapiens
gttgtacacgatggtcagccatgggtgtcatgtccctctttttgccttgtttatggtgttaccttccagccaagggttgccttaaattgtgccaggggtgttatgaccgggttaacaggcctggttgccgctgtaaaaactcaaacacagtttgctgcaaagttcccactgtcccccctaggaactttgaaaaaccaacatagcatcattaatcaggaatattacagtaatgaggattttttctttctttttttaatacacatatgcaaccaactaaacagttataatcttggcactgttaatagaaaggtgggatagtctttgctgtttgcggtgaaatgctttttgtccatgtgccgttttaactgatatgcttgttagaactcagctaatggagctcaaagtatgagatacagaacttggtgacccatgtattgcataagctaaagcaacacagacactcctaggcaaagtttttgtttgtgaatagtacttgcaaaacttgtaaattagcagatgacttttttccattgttttctccagagagaatgtgctatatttttgtatatacaataatatttgcaactgtgaaaaacaagttgtgccatactacatggcacagacacaaaatattatactaatatgttgtacattcggaagaatgtgaatcaatcagtatgtttttagattgtattttgccttacagaaagcctttattgtaagactctgatttccctttggacttcatgtatattgtacagttacagtaaaattcaacctttattttctaattttttcaacatattgtttagtgtaaagaatatttatttgaagttttattattttataaaaaagaatatttattttaagaggcatcttacaaattttgccccttttatgaggatgtgatagttgctgcaaatgaggggttacagatgcatatgtccaatataaaatagaaaatatattaacgtttgaaattaaaaaaaaaaaaaaaaaa

SEQ ID NO: 116501 - DNA, 1000 bp, Homo Sapiens
cattcctaataatttgttgtgagatataccaagcatggatgataagtgtgtttttagtggtgtgttgtttttttaaagaggtgattcaagtaccgttgctaagctgtcaacataccaagctgttgaaaaaattgaccatttctttcagaagtaattctcagcctgtggaataatagcaggtgaagacttcatagaaggcgacagatagattgggaggctattgaagcagtttttctgaagcctgcattttgagttagtttatagtgctaatagattctatataactgtgagagtttggtagtaaaccagtagggattgttttctctcctaaaaatttgcacactacttcattgtctaccaactttttacatattggaaaatagaaattgcaaatacatacatgtatggaaacatattcagattgggaaaaacaatggacattagtttttaaaaagttacgtggaagcaagatttctatatttgtttttttaaaggaagcagtcattctttctactaaatccatttcaagctagttctctgaaaattttgccatttatctacagaaatttgattataaatatgttcctttttcaaagaaactttattctagaacaaaatagtctatatggtacttgatctacatttaagtggaaaaattagcagtatttgaaagctcagtttatgtcattgtcttaacttcagatacaaataactgaacagaaagttttaacctttaatatctcatgttctgttttttattcagtattttcctttatgttaattcaattatatacttctgaatggcaccttactttttggaaacaaatcttctgttatttacaaaataataatttttaaaaaacatttaaaaaaaatccaaagctgctctcgataatagtcaacatttgcatatatatggaatttcttactttttttctcccaaactctatttaataaacttattttaatgtttgtgtatttcaaaaaaaaaaaaaaaaaa

SEQ ID NO: 116502 - DNA, 1000 bp, Homo Sapiens
tccctgaccccatcctggggggcatgttctgcactctctttggcatgattacagctgtggggctgtccaacctgcaatttgtggacatgaactcctctcgcaacctcttcgtgctgggattttccatgttcttcgggctcacgctgcccaattacctggagtccaaccctggcgccatcaatacaggcattcttgaagtggatcagattctgattgtgctgctgaccacggagatgtttgtgggcgggtgccttgctttcatacttgacaacacagtgccagggagcccagaggagcgtggtctgatacagtggaaagctggggctcatgccaacagtgacatgtcttccagcctcaagagctacgatttccccattgggatgggcatagtaaaaagaattacctttctgaaatacattcctatctgcccagtcttcaaaggattttcttcaagttcaaaagatcagattgcaattccagaagacactccagaaaatacagaaactgcatctgtgtgcaccaaggtctgaaaaatgacttccaggaaaggaagcatggtatataacaggaaaagaaaactacatggggaaccagaagacctaagcctgaaatcccagccctgcccctaactaacttctgtgtaaactcagataagtcacctttctctgggattcaaatttttgcatcagttaaaaaaaaaggggtgggggggaatgggccaaagtctgagtcttagagacttgtaccaatgttatgctatgtctctaaatctttactctcctaagtagacttgtcagcatctaggaagaacagctagaaattttcctctgtgatattttagactgcaagttgaaaaaaataaaaagaaatgagggcaggttccagggcctgaaatgtaggtatgctgcaaggcttttacattgaatttgaccctacatcacttcaagactaatgcataatattaaacatcatgttgaagaaaaaaaaaaaaaaaaaaaaa

SEQ ID NO: 116503 - DNA, 1000 bp, Homo Sapiens
gggctctccatgcccaccgtgtcccgggcccatagccgggcaagccctaggaggcagccgggcgtcgccggccccggcgccgtcacgctcgccctcggcgcagtgtccttttccaggcgggacggtgctgtcccggcctctctactacaccgcgcccttctatcccggctacacgaactatggctccttcggacaccttcatggccacccggggcccgggccaggccccacaaccggtccggggtctcatttcaatggattaaaccagaccgtgttgaaccgagcggacgctttggctaaagacccgaaaatgttgcggagccagtctcagctagacctgtgcaaagactctccctatgaattgaagaaaggtatgtccgacatttaacgcgggctgcgtcggtcccggacttttctaatttattaaaaacatggccttggcagttatttttccatcaccgagagagagagacagagagagaaaataaactacccctcctattcagaagtttatagtttatggagatggatgacataaaaatgtaaacatctccacacaaaaaaaaaaatgtcttaaccaaccgaaaagaaaaattaaaaaaggatttgtattaaatcttattctgtatatttaatgtagcatttttgtatttaaattgataattcaatatctttgaagtaaattatgaaatcaagacacctgtacaggcatttaatgtttttttgtaatataaatatatacatttgtgtttcccccaaaactgtttcatagttaaaaaatacaagtttaatttaattttttacacctattgattctgctgggtatgagctaaagtattacagaaaggaaacaggttatactcttagatttaaaaagtgaaagaaactgcaggcgcctttgtaaaatgcaaaatatttaattaaaagagattttaacataatgagagccactcattactttttagaagcctcaataaactgtccattgccttggtcaaaa

SEQ ID NO: 116504 - DNA, 1000 bp, Homo Sapiens
gcatccacaggcagttcttctccaactgcaccgtggacagggtccacttggaggaccccccagacgaggttctcatcccgctgatcgttatacccgtcgttctgactgtcgccatggctggcctggtggtgtggcgcagcaaacgcaccgacacgctgctgtgagggtcccggtgagatggagtgggtcacacctggcaagctggaagaaagttccctggggatgggagatcgggtgggtgctgccaatctccagctactgtggccacaccccacctggtcatgggcagacccctcccttcctgggctgacctgctccctcgaggccagcctgctccctggctgaggctcaggctatccgcccaagctctttgctcattctagggccagtggaggaaaatgtgataaggccagagcttgtgtgctgggcaagaaatcacctgctgcatcctgtgctccgcaggctgggccggaagcctctgcctgcaggtttctatgctgtttcttagcacagaatccagcctagccttagccgcagtctaggccctgcttggactaggactccttgcttgaccccatctctggttcctgccctggctcctgcaccagccccagctcctgcctacatccaggcagaaatataggcaggggctcttggaagacgttccgtgctgtgacctccgagccctcctggtgggaagacagctggaaaggctgggaggagaagggaggggctgggggttcccaggagccatgcgtggcctgcagagtccattccatcatgatgctgtgcccgctatgggctgtgtccatgaccagaggctggagtgggggtgtgttatagcccctcaccgggacttgctgtgcggatggggcctgggcctccttcctacaggggctcctctgtgggtgaggggccctctggaatggcatcccatgagcttgtggcctctatctgctaccatctgtgttttatctgagtaaagttaccttacttctgg

SEQ ID NO: 116505 - DNA, 1000 bp, Homo Sapiens
ccctggccgactgccggcgcgccctggagctggacgggcagtctgtgaaggcgcacttcttcctggggcagtgccagctggagatggagagctatgatgaggccatcgccaatctgcagcgagcttacagcctggccaaggagcagcggctgaacttcggggacgacatccccagcgctcttcgaatcgcgaagaagaagcgctggaacagcattgaggagcggcgcatccaccaggagagcgagctgcactcctacctctccaggctcattgccgcggagcgtgagagggagctggaagagtgccagcgaaaccacgagggtgatgaggacgacagccacgtccgggcccagcaggcctgcattgaggccaagcacgacaagtacatggcggacatggacgagcttttttctcaggtggatgagaagaggaagaagcgagacatccccgactacctgtgtggcaagatcagctttgagctgatgcgggagccgtgcatcacgcccagtggcatcacctacgaccgcaaggacatcgaggagcacctgcagcgtgtgggtcattttgaccccgtgacccggagccccctgacccaggaacagctcatccccaacttggctatgaaggaggttattgacgcattcatctctgagaatggctgggtggaggactactgaggttccctgccctacctggcgtcctggtccaggggagccctgggcagaagcccccggcccctatacatagtttatgttcctggccaccccgaccgcttcccccaagttctgctgttggactctggactgtttcccctctcagcatcgcttttgctgggccgtgatcgtccccctttgtgggctggaaaagcaggtgagggtgggctgggctgaggccattgccgccactatctgtgtaataaaatccgtgagcacgaggtgggacgtgctggtgtgtgaaaaaaaaaaaaaaaaaaaaaaaaaaaaaaaaaaaaaaaaaaaaa

SEQ ID NO: 116506 - DNA, 1000 bp, Homo Sapiens
acttaaagtgctttattgcagagagttatggaaatataagtggatgattattctcattgtaaatattggtattttgaatgttaaatgtcaaacaaatgtgacttatgctggtgccctcgccctgctgatcagattctggttcaaattctgccactccagctcctgggttaggggctttgctgtaagtttctttttctggactttagatcctgaacctgtccttgcttctcagtttctctcactgtacccctttccctcagtctcttcctctctctttcccctgtcactatttgtctttctaatctccttctgtttctctgaatatcttcatttctatctctgtgtttctgtctatttctctgtttatctttctgtccttcaatctgtgtttttgtttctggctctccgtcagtgtctttttctctcctctctctcttgctctgccatggctatttccactgctctatttctgactctcatttttggtctctgtgtgtctcctagtcactttctttctcactctgtctctgtctctatttctgtctctcctctgctgtgtcctcaatctctctgtctccctgaggctctatttctgtctctcctctgctgtgtcctcaatctctctgtctccctgaggctctatttctgtctctgatgctcttcttctgtgtctctatttctcttcctgtcacttaatcttttccttctctatctctcttatttagtcttccttccacacccttcactcaccatcttttcccacaatcaaatatcactccctggtacttccagcttccaactctagggattcatgattctggtggagattccttcttccagggcctgggaggatagggctaatcccaagggtgcctgcttaggctatgttagctgtgacaggaacctgccatagatttgcactgttctttcctaaagatcaattattttcagcaataaatacttctcagctttttgtatgtctttgtatgcaaaaaaaaaa

SEQ ID NO: 116507 - DNA, 1000 bp, Homo Sapiens
cttgatcagggtaccatgacataaaaggttaaagaacaggcaacacaatgagcacttaagtttttaacatgtggggaatagggcattttaaaggctggaaccagttcagaggaaacaagggtttgggtagaggtagaaaggtttaattaaccctggagatctgcaaatggagggaggggtgaaggaggaatcttaagaccgagggagaagagccaaggacaaggtcaggttgaatgagtaggaggtgttcacacatcctcttgtgtgctaggtagtggcgtgcatctgatctgagaggcagtaaagcagtgatgaagacagtgcagcagaacattgaagtcctgattgcagcagtgactctgcaaccttggataaattatttcaatctttattttgtaaaacggagataacggcctataggattgttaagactgaatattttaaaagagcttagaatggtgcctgacaaatgagaaacaataaatactgattattggccataaagtggtattaaaactggatctcttttcttccatggcactactctcattttgaagtttatgaacagtacgacagtgtattgtaaattccctttagtttgttacagtagccaattgaaaatgtatatcccaaaatttaaaaaaaaaagtaccagcagcaataaaattgcactagttttatctggtacatacaaaaacagccatttaaaatctgatgattctgtggaattggtgtccctgttagcaatggcagagaccagcctggagcctagatctggtgcttcttctgtgctgtggtttaccccaaacctttaggttgtttattcattcagattagatagactggagccataaagttaatttgcacctagctttttggagaatagccatgattaactgctattcgtggtgggggtgggggggaaccctatgatttactatgcagatgaagagggtaggaactaaataaaggactttgtaagccaaaaaaaaaaaaaaaa

SEQ ID NO: 116508 - DNA, 1000 bp, Homo Sapiens
tgtacatcatgtaggccccacgtcgtgaagcgcacgcctcggggacgggctgcagtgggcggggaggccacgccttcctcctgtcccacgctccagcctgccgcggcgtttctgtttcttgcgaccaaagatccgtgagcaacgataaatactcttaggaagagagaaaataaggtttcataagtttgtacttgaaaacatttggattggtaggattttgtaacacgtcaaccatttgatgcttctgaaaagtactttcaacttgcgaaggaaactcttctttaaagactgacctaaacaccgagggaaacttaagaacgtttaaaatataggagtccgtgatttccctgtgttttcagtttctttccttctgtgaacgatgagacttggagaacgggctggtccttcaccacttcctgttggccctggcctggccggggaaggtggcagcggcaccggactgacctgcagtgacccgcgatgccgcgccacgagggacacttatggcttcattcgagagctgctgccaaaacgcctggcgccgccaccgtcgggggctggcttcgaggacgcccgcctgcctcgcgggtcgtgtccgcgggactgtgttcgtacgtgcatagtttcgatatcacatcgcggggctgtgttcgtagctgcgtcgtttcgatatcacaccctctgtgtgccgccttacttcctgcttcgagaatgtataacgtggaaatccacgggaccaaatttctgcagaggccttgccggatggttccataactgtagagtctaattgctatccattacagaaattaatcgttcagttgaaagaagtactgatgacttttcaaaacaaatgaaccaccgtagctgacagagaaccgtatcgtagaggtttgtagttagtgcttatttttgcatgttgatgttgactagctaataaactgtaaatgtaaaccatgcgaataaaatggttttctatttctcaaaaaaaaaaaaaaaaaaa

SEQ ID NO: 116509 - DNA, 1000 bp, Homo Sapiens
cgtgctcaccctcacactcgccccggcccgctgcgcccctaattgccaaagggtagggaaatggcgaagccagccaccaggtcgctggtgacagggccagggttatgcaggaaggtggtgcggcattgccttccacatatgtaagtctctgggcggcgccctcccagctccctgcctctgtttccccatgtgggccgtggggaactcccagagctacctcttgggggagcgtggtggcagcgatgatggggagacgcctggaagctcacagaacttgggtctggctggctcctgcccgtgacgccttgcccagcagcaaggtgcgcaacatggctgccagccccgcctcccacccccaccccgagtcctgagctcactttcgccttctccatcccctgccgtgggggccacagccacacctcaccgcccagtccagctgtctccagaaggggacaggcagtccgcggtctctggacaatcaactcaaggtacgcccactgcaaggcctccctcccaccgcggcccctgcctggccacctggcctctctgcaccagggtgacaaggggtcctcgtctgccccccaatgctccagggccagtcctaaggagctgagggtctgaggacgcagggagggtggaggtgtcctgaggctgatggacagtgaccgccactggcccccaacatgaccacacgtgggtgctgaactcggggcgccgtgcccaccggcatggtcctcccgagctccgacagcattacctcacccggccccatctgttgccccggtccagccctgatggcgcgcgcctggtctgtctgattcccctagccgccaccccacgtttctgtaccgggtctctgcagtgttaaacggacgtgtaaatagtggtaaatagtgaaagcctgtccttccctaaatgtaaagccatctgtccggcgtaaggacgacaccgtcagctgtccgactcgcacacatttaataaactgagctcttgcattgcc

SEQ ID NO: 116510 - DNA, 1000 bp, Homo Sapiens
ccggtgccaaatctggaggtcctgccccggcccccagtggttgcttccacacctgcacccaaggctgagcctgccatcatccctgccacccggaacgagcccatcgggctgaaggcctccgacttcctgcccgccgtgaagatcccccagcaggccgagctggtggacgaggatgccatgtcacagatccgcaaaggccacgacaccatgtgtgtggtgctcaccagccgccacaagaacctggacactgtgcgggctgtgtggaccatgggcgacatcaagacgtcggtggactccgctgtggccatcaacgacctgtcggtggtggtggacctcctgaacatcgtcaaccagaaagcctccctgtggaagctggacctgtgcaccaccgtcctgccacagattgagaagcttctgcagagcaagtatgagagctacgtccagacgggctgcacctccctgaagctgatcctgcagcggtttctgcccctcatcacagacatgctggcggccccaccctctgtgggtgtggatatcagcagggaggagaggctgcataagtgccggctctgctacaagcagcttaagagcatcagcggcctggtcaagagcaagtcaggcctgagcggccgccatggcagtaccttccgcgagctgcacctgctcatggccagtctggactgaggaaagcagtgggcaggggcgctcggcagcccacagggcctggcctcagcccccactcctgttccttgtgcacccactggcccatgagcctctgcctggcccctgctgctgtcctgtggccgtcctggaggaggtgatgctggtccctggccacctctacagccctgaactcttgagacaactctctccagcaatagctgcccagctttgcccaactgttgcttcttggggcagcgaactgagccctggggctgctgctgtaatttataaggcaaattttattaaatttgtaactattaaaaaaaaaaaaaaaaaa

SEQ ID NO: 116511 - DNA, 1000 bp, Homo Sapiens
catgcgcagaatcatcgtggtgcagggctctccctttgcttcttcggttgcagtcctcttgcttcttgcgcgtgcgtgtagcgcttttgcaaagccgcggaggtgaagtgaacttagaggttgtggggccgaggggtcgtcttatagctaccagcccacaggcatttagtctacgttgggaggtaaacaaatacgggtcctgcttaggagaaaagaaaaacgtcttacagccagtgtctaaactccaaacaacggaatgtatcaatgagaccttgtatatggatacacgtgcatttaaaaccgccctgccggcttgtagagcttttgccgttctccagcgctttacaggggttatcgcacttaagcctcggaacaactttaccagtgattctaccagaaaggaatgaagaacagaaccttcaggaattgagtcacaatgcagacaaatatcaaatgggagattgttgcaaggaagagatttgatgatagtattttctactagccattgggaagataaaaggagacagaagattgaagcctttgccagccattctttccctttttgcttccaaactcctcaactgggaaccttcatatgtgcagtatttatattggatcatactggtgattataaaagttcctaggaggctagaagagccaaccaacagagaagggaaagcagtctgttctgaacatagggacataagttcattcatgccaagtatctttccagcatgtttctcccatttagaatatctagcatgtaaggcctttcaatattaatataagcccaatatcagctctttctctttgtatttcatctctttctactctcctatttgtattttgtgttcctatcaaagtgtcgtatctgggagatgacctgccttatcctgttctataacagttttgtttggtgctgtgtctttagaacagtgcctggcacacagtaagcactcaataaatctttgatgaatgaaaaaaaaaaaaaaaaaaaaaa

SEQ ID NO: 116512 - DNA, 1000 bp, Homo Sapiens
acagatgcatttcacaactgtcatatgggtattacagctgaaaatgtagccacaaaatggcaagtgagtagagaagatcaggacaaggttgcagttctgtcccagaacaggacagagaatgcacagaaagctggccattttgacaaagagattgtaccagttttggtgtcaactagaaaaggtcttattgaagttaaaacagatgagtttcctcgccatgggagcaacatagaagccatgtccaagctaaagccttactttcttactgatggaacgggaacagtcaccccagccaatgcttcaggaataaatgatggtgctgcagctgttgctcttatgaagaagtcagaagctgataaacgtgggcttacacctttagcacggatagtttcctggtcccaagtgggtgtggagccttccattatgggaataggaccaattccagccataaagcaagctgttacaaaagcaggttggtcactggaagatgttgacatatttgaaatcaatgaagcctttgcagctgtctctgctgcaatagttaaagaacttggattaaacccagagaaggtcaatattgaaggaggggctatagccttgggccaccctcttggagcatctggctgtcgaattcttgtgaccctgttacacacactggagagaatgggcagaagtcgtggtgttgcagccctgtgcattgggggtgggatgggaatagcaatgtgtgttcagagagaatgacaatgtgtgttcagagagaatgaattgcttaaactttgaacaacctcaatttctttttaaactaataaagtactaggttgcaatatgtgaaatcagaggaccaaagtacagatggaaaccatttcctacatcacaaaaacccaagtttacagcttgtactttactttaatgtgtaatactcaactcacggtacaagacaattgcatttaacattgttataaataaaaggaacatcagatcaatcattaaaaaaaaaaaa

SEQ ID NO: 116513 - DNA, 1000 bp, Homo Sapiens
gcctagagttgacacagagagagtttgtgcggcaggatgactgcatggtgctcaaggagttcctgagggccaactcgcccaccatggacaagctgctggcagacagcaagacggctcaggaggcctttgagtctgtggtggagtacttcggagagaaccccaagaccacatccccaggcctgttcttctccctctttagccgcttcattaaggcctacaagaaagctgagcaggaggtggaacagtggaaaaaagaagccgctgcccaggaggcaggcgctgataccccgggcaaaggggagcccccagcacccaagtcaccgccaaaggcccggcggccacagatggacctcatctctgagctgaaacggaggcagcagaaggagccactcatttatgagagcgaccgtgatggggccattgaagacatcatcacagtgatcaagacggtgcccttcacggcccgcaccggcaagcggacatcccggctcctctgtgaggccagcctgggagaagagatgcccctctagcccctcagatctgcggaaccagccctacatccgcgcagacacaggccgccgcagtgcccgtcggcgtcccccgggccccccactgcaggtcacctccgacctctcgctgtagccgctatttctgcaggtggattctgcaggggtgtggggccgtggacaggctgaggctcaaggaaggtggtcctcagctcggctggccgggcagcccctcctccgctgtggcccgcctcaaacgggctggtgcatcctcctcttggccacagagggcagcatcgcccgccccttcccccaaatgctgcttgcagcacccaccctaaagccccctccaaatagccatacttagcctcagcaggagcctggcctgtaacttataaagtgcacctcgcccccgcaagccccagccccgaggaccgtccatggaccttatttttatatgagattaataaagatgtttgcaaaaaaaaaaaaaa

SEQ ID NO: 116514 - DNA, 1000 bp, Homo Sapiens
tactcattctggggctcaggcttgagccactactccctcatcccctcaggagtctgaacactgggcttatgccttactctcagggacaagcagccccctttgctgcctgtagatgtgagctgttgagttccctcttgctggggaagatgagcttccatgtatcctgtgctcaaccctgaccctttgacactggttctggcctttcctgccttttctcaagctgcctggaatcctcaaacctgtcactttggtcagatgtgcagaccattactaaggtctatgtctgcaaacattactaatctaggtcctattactaatctatgtctgcaaacattaaaggaatgaaacaatgaaaggaacatttgaaagaaaatgtgggtagacaatttcttgcaacttgggggaaagtttagaattcttttgattggactacttttttttttttcctcaagcttcaggtgaccacaatagcaacacctccctattctgttatttcttagtgtaggtagacaattctttcaggagcagagcagcgtcctataatcctagaccttttcatgacgtgtaaaaaatgatgtttcatcctctgattgccccaataaaaatctttgttgtccatccctatacaacctgccaacatggttgacatttaatgagaggaatgtcaaaaatacattttactttattcaaagaaaaatatattggttactgggaaaaggtcaagaaagaggcagaaagagatcagggagggctaaagttgtgtcttatgccaagcggaagtggaaaatatcacttttcactttatcaactgagactttggggcctgtaagcttgaggcaagacagaaataagagaatcaagacttgattgtaaaaattgacaactttagattctgaggctaggctgagtacttattatacggctacatttacacatttacacttatctaataaatcagatttcacagtctcaaaaaaaaaaaaagaaaaaaaaaaaaaaa

SEQ ID NO: 116515 - DNA, 1000 bp, Homo Sapiens
ctggcttcatgaccaaggacttggctgcttgcattaaaggtttacccaatgtgcaacgttctgactacttgaatacatttgagttcatggataaacttggagaaaacttgaagatcaaactagctcaggccaaactttaagttcatacctgagctaagaaggataattgtcttttggtaactaggtctacaggtttacatttttctgtgttacactcaaggataaaggcaaaatcaattttgtaatttgtttagaagccagagtttatcttttctataagtttacagcctttttcttatatatacagttattgccacctttgtgaacatggcaagggacttttttacaatttttattttattttctagtaccagcctaggaattcggttagtactcatttgtattcactgtcactttttctcatgttctaattataaatgaccaaaatcaagattgctcaaaagggtaaatgatagccacagtattgctccctaaaatatgcataaagtagaaattcactgccttcccctcctgtccatgaccttgggcacagggaagttctggtgtcatagatatcccgttttgtgaggtagagctgtgcattaaacttgcacatgactggaacgaagtatgagtgcaactcaaatgtgttgaagatactgcagtcatttttgtaaagaccttgctgaatgtttccaatagactaaatactgtttaggccgcaggagagtttggaatccggaataaatactacctggaggtttgtcctctccatttttctctttctcctcctggcctggcctgaatattatactactctaaatagcatatttcatccaagtgcaataatgtaagctgaatcttttttggacttctgctggcctgttttatttcttttatataaatgtgatttctcagaaattgatattaaacactatcttatcttctcctgaactgttgattttaattaaaattaagtgctaattaccaaaaaaaaaaa

SEQ ID NO: 116516 - DNA, 1000 bp, Homo Sapiens
actctgggcaacagaatgagatcctgtctcttaaagaaaaaaaataaactcaagaatgatttttctaaaaatatgagtgagaatggatatggaatatatcccaattaataaagagctcacacagatttgccaggtttactaataatagaaatgccatttatgctgtagaattctccagtttaagtgtagacaactcctattttacaaatttgtagaaattatttactagaagcttcctggcaaatagtccctttagctacttctccagtgcagtataaattgtaacataaaactttatgtgatataggaatagtgtcaatgacacagtttaaagacctctatattcacaattatatccagagcataattttccatggccatagtttgagccacagagaaagccaatgaaatagattcctacttttatttaatgccaagagttttcactagccccaaactttttattggcagcagatatcctaggaggggtgtttgggaaatatctagctattttaatagatagatacctttttgcttgatgataagtttttgcttgctcatattttttgtcttgatcctgagaatgcaagtaaggaattaataggaggttcttagtgaccagatgttgtaatgggctatacagtccagcaggcagtatgcacctagaaatttctcccttttttaggctgggcatggtggctcacgcctgtagtcccagcactttgagaggccgaggtgagacgggaagatggcttgaactcgggagttcgagactagcctgggcaacgtgatgagactccgtctctaccaaaaaatatataaaaattagccgggcgttgtggcttgtacctgtggtcccatctgcttgggaggctgaggttgcaggatcgcttgagcccaggaggtcagggctgcagtgagccgagattgtgccactgcacaccggcctgggtgacagcatgagaacctgtctcaaaaaaaaaaaaaaaaaaaaaaaaaa

SEQ ID NO: 116517 - DNA, 1000 bp, Homo Sapiens
gatccccggactggcatcgtggacatatctattcttactacggggatgagtgccacctctcgtaaacggaaagaagaattagctgaagcattgaaaaagcttattttatctaagggcaaaacaccagctctaaaataccagcaactttttgaagatattcggggacaatctgacatagcaattactaaagatatgtttgaagaagcactgcgtgccctggcagatgatgatttcctgacagtgactgggaagaccgtgcgcttgctctgaagccttgtgagcaaggaaggctccctgcatgtcctgcttgctgcacgccacatgggtgtggtctgcatctcagttggccgccatcagtgtaaatagagcttaaagtcatggtttggctgcataaaaattttctaacttgggttcaatatttgtagtgaagtatctgttttcatttttttcacgttataaataaaaatactatgctggccgggcgcggtggctcacacctgtaatcccagcactttgggaggccaatgtgggtggatcatgaggtcaggagttcaagaccagcctagccaagatggtgaaaccccgtctctagtaaagataacaaaaaattagctgggcttgatggcatgcgcctgtaatcccagctactcgggaggttgaggcaggagaatcgcttaaacccaggcggcagaggttgcagtgagccaagatcgcgccactgcactccagcctcagcaatagagtgagactgtctcaaaaaaaaaaaaaaaaaaaaaacctgccaattttcaaacataccgtagagattattttcaggtgccattttatagtatagcagcagggcttttactctgtgtatgcacagatgcagtctggggcatggtttgtgtgctggactttctcatggccatcatcagtatgcttatggatttgatgacaggcatagcctgggcatatcacctcattggtaaagggctagagcctttcttttttatggcac

SEQ ID NO: 116518 - DNA, 1000 bp, Homo Sapiens
gcagccggcgagcactatgccccggaagacagcagcaactcgtactacgtggtggccgtggtgagacgggacagctcccacgccttcaccttggatgagcttcggggcaagcgctcctgccacgccggtttcggcagccctgcaggctgggatgtccccgtgggtgcccttattcagagaggcttcatccggcccaaggactgtgacgtcctcacagcagtgagcgagttcttcaatgccagctgcgtgcccgtgaacaaccccaagaactacccctcctcgctgtgtgcactgtgcgtgggggacgagcagggccgcaacaagtgtgtgggcaacagccaggagcggtattacggctaccgcggcgccttcaggtgcctggtggagaatgcgggtgacgttgccttcgtcaggcacacaaccgtctttgacaacacaaacggccacaattccgagccctgggctgctgagctcaggtcagaggactatgaactgctgtgccccaacggggcccgagccgaggtgtcccagtttgcagcctgcaacctggcacagataccaccccacgccgtgatggtccggcccgacaccaacatcttcaccgtgtatggactgctggacaaggcccaggacctgtttggagacgaccacaataagaacgggttcaaaatgttcgactcctccaactatcatggccaagacctgcttttcaaggatgccaccgtccgggcggtgcctgtcggagagaaaaccacctaccgcggctggctggggctggactacgtggcggcgctggaagggatgtcgtctcagcagtgctcgggcgcagcggccccggcgcccggggcgcccctgctcccgctgctgctgcccgccctcgccgcccgcctgctcccgcccgccctctgagcccggccgccccgccccagagctccgatgcccgcccggggagtttccgcggcggcctctcgcgctgcggaatccagaaggaagctcgcga

SEQ ID NO: 116519 - DNA, 1000 bp, Homo Sapiens
ttgtttatcatgaatgcaggatgtgggcaaactcacgactgctcctgccaacagaaggtttgctgagggcattcactccatggtgctcattggagttatctactgggtcatctagagcctattgtttgaggaatgcagtcttacaagcctactctggacccagcagctgactccttcttccacccctcttcttgctatctcctataccaataaatacgaagggctgtggaagatcagagcccttgttcacgagaagcaagaagccccctgaccccttgttccaaatatactcttttgtctttctctttattcccacgttcgccctttgttcagtccaatacagggttgtggggcccttaacagtgccatattaattggtatcattatttctgttgtttttgtttttgtttttgtttttgtttttgagacagagtctcactctgtcacccaggctgcagttcactggtgtgatctcagctcactgcaacctctgcctcccaggttcaagcacttctcgtacctcagactcccgaatagctgggattacagacaggcaccaccacacccagctaatttttgtattttttgtagagacggggtttcgccaagttgaccagcccagtttcaaactcctgacctcaggtgatctgcctgccttggcatcccaaagtgctgggattacaagaatgagccaccgtgcctggcctattttattatattgtaatatattttattatattagccaccatgcctgtcctattttcttatgttttaatatattttaatatattacatgtgcagtaattagattatcatgggtgaactttatgagtgagtatcttggtgatgactcctcctgaccagcccaggaccagctttcttgtcaccttgaggtcccctcgccccgtcacaccgttatgcattactctgtgtctactattatgtgtgcataatttataccgtaaatgtttactctttaaatagaaaaaaaaaaaaaaaa

SEQ ID NO: 116520 - DNA, 1000 bp, Homo Sapiens
acttctctacctaagagggcaggagggaaaccctacagctccttgtgagcctatatattagtatatcggcctggagaggacaagggaataagaccactcatagtgaggctggccaagctgcactggtcggaccaggcagtggctgacctaaggaaggcaacttgctttgcttaaaagtagattttttaagcaatgcttaacacaggcagcattcacctttgttcaggccatcgacatgtattgttaaaattactgcatatccccctcagatatcaagtatacactgttcatgttggggttgtgtgtgtgtatgtgtgtatgtacgcacgcatgtgtcccaaatcttgttttaattttttttttctgaatgtgatcatgttttggataatacctgagcagggttgccttttttttatttattaccattatatattatattatattatatattttttgctttcttataactttggaggaaagtcaaatcttggtattattaaaattgttttaaaaaggagtaaattttccagttgataaatgaaaatcactggcctatgtttaataagtttttctttaattactgtggaataacgtgccagctatcatcaacacaatgattttgtacatagggtagggaagcagtgatgctctcaatgggaagatgtgcaacacaaattaaggggaactccatgtattttacctacttcagcaatggaactgcaacttggggctttgtgaataaaatttagctgccttgtatagtcgtttgaaagaatatgtgatctgtgagagaattatagtttttttttagaagaaaaatctgcaaaagatctttccaaagacaatgtgccacagatcttttgttctctgtaatgaggattaattgctgtttaaacaaaaatgtaattgttcatctttaaattctttccttttcataagaggatcaagctgtaaaaaaacaaaaaaattaataaaaatttcgagaaatcaaaaaaaaaaa

SEQ ID NO: 116521 - DNA, 1000 bp, Homo Sapiens
ggaccgaaagtctgatagtgatatgtggataaatcagagctcctcactggactccagtacctctagccaggagcatctgaaccattcctctaagtcggtcacccctgcttccacactgaccaaaagtggccctggccgttggaaaacaccagcagccataccggccacccctgtggccgtctcccagccaatccgaacagacctgcctccgccacccccgccacctccagtccactatgccggtgatttcgatggaatgtccatggatttgcctctcccaccacccccttccgccaaccagatagggctgccgtctgcgcaggtggctgctgctgaacggagaaagagagaagaacatcagcgttggtatgagaaggagaaggcccccctggaggaggagcgggagaggaagcggagagagcaggagaggaagttgggccagatgcgcactcagtccttaaaccctgctccgttttctcccctgactgcacagcagatgaagcccgaaaagccttccacactccagcggccacaggaaacagtcattcgggagctgcagcctcagcagcagccccgcacgatcgagcgcagagacttgcagtacattacagtcagcaaagaggagctttcctcgggggacagtctgtcccccgacccgtggaagcgggacgccaaggagaagctggagaagcagcagcagatgcacatcgtggacatgctgagcaaggagatccaggagctccagagcaaaccggaccgcagcgccgaggagagcgaccggctgcgcaagctcatgctggagtggcagttccagaagagactccaggagtcgaagcagaaggacgaagatgacgaggaggaggaggacgatgatgtggacaccatgctgatcatgcagcgcctggaggctgaacgaagagcgagggtaaaggggggagtgctttggctgtgcccatctgtggtccctattttagcttctgcgtgtttcccatggggatag

SEQ ID NO: 116522 - DNA, 1000 bp, Homo Sapiens
tggggccccgtgatggggaggagagggcaggtgcggggaggctctggccttccttggtgccccgccctttgtttgcactattggacttaggagtgccgagggtggggagatggagctgcccgtctcagtgtgtgagtgtgtgtgtgcgtgcatgtgtgtgtgtgtgtgtgtgtgtgtgtgtgtctgtctgcctgtctctctcctcctggacccagggcagccaagggcagggataggcgcagtggtcagatgaagcagcgccagagaggggacctcccagctcttatttgcaccctccccacctcaccaactttggtccctctctgggggcatgaatggttaacaaacaccagagcagtactccaatattggagagtcgctgggggcacagggctttgaatcagggtagtatcctgccttccctcccctgaccccacatggtctcagggcccccttagggccccctaccccactgatagcttcctccttctctggcacaaggggagccccagggcttgggggagggcgtaaggtggggggaaatgccactgcttttagcaaaagcctccctcccagaattagccagcttgcctcctgcaccccacccccaccaaccaggggagccactaagctgactaacaactgtcccctcacccaccagctatttccccagggtagagtgggcaattctcaccttcaaagagtccccgcctgcccaggcctttggcacagaggctgagtggacagtcaggagagaggcgagaggcaaggcgaagcctgtgtccctgtttcagttgcactggggttggagcccagggtaggggtttccagcttccccaggctccggccttgtcagtctctttgcatgtgtggatttttctgtgtgtgtttctgtttgggtttttgttgttgggttttttttttttttttaataaagaaaagaagatgtgtatatttttggcaacgacaaaaaaaaaaaaaaaaaaaaaaaaaaaaaaaa

SEQ ID NO: 116523 - DNA, 1000 bp, Homo Sapiens
gacagtcccgtgccccgcagggccactgactggagaggggtgccctctgagatcgacgctgccttccaggatgctgatggctatgcctacttcctgcgcggccgcctctactggaagtttgaccctgtgaaggtgaaggctctggaaggcttcccccgtctcgtgggtcctgacttctttggctgtgccgagcctgccaacactttcctctgaccatggcttggatgccctcaggggtgctgacccctgccaggccacgaatatcaggctagagacccatggccatctttgtggctgtgggcaccaggcatgggactgagcccatgtctcctcagggggatggggtggggtacaaccaccatgacaactgccgggagggccacgcaggtcgtggtcacctgccagcgactgtctcagactgggcagggaggctttggcatgacttaagaggaagggcagtcttgggcccgctatgcaggtcctggcaaacctggctgccctgtctccatccctgtccctcagggtagcaccatggcaggactgggggaactggagtgtccttgctgtatccctgttgtgaggttccttccaggggctggcactgaagcaagggtgctggggccccatggccttcagccctggctgagcaactgggctgtagggcagggccacttcctgaggtcaggtcttggtaggtgcctgcatctgtctgccttctggctgacaatcctggaaatctgttctccagaatccaggccaaaaagttcacagtcaaatggggaggggtattcttcatgcaggagaccccaggccctggaggctgcaacatacctcaatcctgtcccaggccggatcctcctgaagcccttttcgcagcactgctatcctccaaagccattgtaaatgtgtgtacagtgtgtataaaccttcttcttctttttttttttttaaactgaggattgtcattaaacacagttgttttctaaaaaaaaaaaaaaaa

SEQ ID NO: 116524 - DNA, 599 bp, Homo Sapiens
cccggcagtgcacacacacggcaggggcgggcgacagatgcagtgcgtgcgccggagcccaagcgcacaaacggaaagagcgggcgcggtgcgcaggggcgggcgcccagcgggcttggcatgcgcgcccccgcccgaggctataaaagcatcgccacctgctgccactagccaagccgcgcgtccagttgcttggagaagcccgttcaccgcctccagctgctgctctcctcgacatggaccctgagacctgcccctgcccttctggtggctcctgcacctgcgcggactcctgcaagtgcgagggatgcaaatgcacctcctgcaagaagagctgctgctcctgctgccctgcggagtgtgagaagtgtgccaaggactgtgtgtgcaaaggcggagaggcagctgaggcagaagcagagaagtgcagctgctgccagtgagaaggcacccctccgtgtggagcacgtggagatagtgccaggtggctcagtgccacctatgcctgtggtgaagtgtggctggtgtccccttcccctgctgaccttggaggaatgacaataaatcccatgaacagcatgaaaaaaaaaaaaaaaaaa

SEQ ID NO: 116525 - DNA, 1000 bp, Homo Sapiens
gtattccggcctctgcccccacgtggtggtgcttgttgccactgtcagggctctcaagatgcacgggggcggccccacggtcactgctggactgcctcttcccaaggcttacatacaggagaacctggagctggttgaaaaaggcttcagtaacttgaagaaacaaattgaaaatgccagaatgtttggaattccagtagtagtggccgtgaatgcattcaagacggatacagagtctgagctggacctcatcagccgcctttccagagaacatggggcttttgatgccgtgaagtgcactcactgggcagaagggggcaagggtgccttagccctggctcaggccgtccagagagcagcacaagcacccagcagcttccagctcctttatgacctcaagctcccagttgaggataaaatcaggatcattgcacagaagatctatggagcagatgacattgaattacttcccgaagctcaacacaaagctgaagtctacacgaagcagggctttgggaatctccccatctgcatggctaaaacacacttgtctttgtctcacaacccagagcaaaaaggtgtccctacaggcttcattctgcccattcgcgacatccgcgccagcgttggggctggttttctgtaccccttagtaggaacgatgagcacaatgcctggactccccacccggccctgtttttatgatattgatttggaccctgaaacagaacaggtgaatggattattctaaacagatcaccatccatcttcaagaagctactttgaaagtctggccagtgtctattcaggcccactgggagttaggaagtataagtaagccaagagaagtcagcccctgcccagaagatctgaaactaatagtaggagtttccccagaagtcattttcagccttaattctcatcatgtataaattaacataaatcatgcatgtctgtttactttagtgacgttccacagaataaaaggaaacaagtttgc

SEQ ID NO: 116526 - DNA, 1000 bp, Homo Sapiens
taattgtaaaaaatattaagtcataatctgttacactaaaatttgtcagccaaatgttagatgaaatgtctgcactgtagtctcagatcactgtcacgtatataaattgcttcttcattttaatttgtagaagtactttacagtaggaaacgccagtaaacaacttttatactgttaaaaggcttttttccccttcctaaatgttttaattgtaccatagtgttttgctcactgaagaagcttcttatggaccttgcaactttgttgctagcttgaggttgattattgtggttgtattgttcactgtgtgtagaaatagtatgagtacgatttcaatagactgttcagtttttaatattagccatagcactggttagtatatctcagtagtttcatgaaacgtttcctgtattctaatctattttgaaacattttgtttttttttaattgtgtcttacagtcaagtttgtagattttcataagccacaattttaaaagatgcagtaatcttccaacttccaatatttatccattcgttgtggacccacagattgcatctttaaattcataataagtttccttaactatcttatgtttctagtctttcaagcttagtgataaggtggaagcacaagaaaaatttcagtagaatacagtttttattttgtaaacactaatgtattaaacttgctatacattaaagcaaataatatatatttttatttgaattgtatatgtgaattggaagttataattagttgattttttcattttgttagaggtattttcactgaacaaggtcaattggttacctcagtattacagccaatatagtccaagggaccatttctccccgagtctcttacactttattgtgcgatgtccacgtttttgtgactcttcaagctgttggtgaggtgggacgaatgcacttgcttcctgtggcaataaagattttctgtgcctcacaaaaaaaaaaaaaaaaaaaaaaaaaaaaaaa

SEQ ID NO: 116527 - DNA, 1000 bp, Homo Sapiens
cctctgcagccttggtgcctgtagctctggacttccctgggcctttccctgtgggagggccctgtagaccacatcagggtggggtgggggtcacttggcaaaaagggccgaggtctggtgatgtggttcccaggatctggaacctctcccacccctcctgcagttggactgaattcttccctttcatccgaagaaacccacttgctgtttccagccgctgaatctgctgagtgtgcagcctgcatcacctgctgtatgccgatcatctcagaaagggctgtgtagagtagggccctgttctccttaggatgttgcttcttgatttttttttttttttaggggtgggtcagggttgtgacacaccagcccaggtgagagctgctgcgggtcacctcatatttatttatcccttcttgcctgtgaggactgcggcttttcgctgtggctcgtccttaacgtttctgaaccaccttggtgccctgagcaggaagatgtgccacttcctagcaggcgcaaggcctgtgcggaagaaacgccgctccctgccaccagggctgaagatgcgagcccgtcctcatgacgcaggcgccaccctgctgccggagccgggcttcggcagtcttctccactgagggactgggctgggaagtcctgcgtttcagtggagcgtatgagcgtcaagtcctgctttctcagtagccccattgcggggccccaccattcatcctgtctgaaggtcctgggtttggtgtgaccgcttggcggctggtgggtggggttttcaagtgggtgacggcgctctccggcagccggggatggccgtgtccgcactgaccaggcctgtggagagtgctcggcctaaccttagaacacatttgtaactgaatacagtgttttcaatttgtacagaatagttagaatattctattaaagtggtgaaacattgagtcagcaaaaaaaaaaaaaaaaaaaaaaaaaaaaaaaaaaaaaaaaaaaaaaa

SEQ ID NO: 116528 - DNA, 743 bp, Homo Sapiens
aggcagcagtggatggtgcaggggaaagaggtgggaaggaggtcctgggagggacactggatgtcttaccccaagctgggccttgcagtacctgtggctggctgtgctggttgagcccgaatcgaccacggaaatttgacacctccgggcttggaagcagctctctcctccttccccgctgcttataaacctcagccctgaggctccagctcactctaccccatctccttgccgggtcagccctgacaaaggtcagctagccccttgaggacatcagctttggcctcagggtcctaatggcagcagaaccactgacagagctagaggagtccattgagaccgtggtcaccaccttcttcacctttgcaaggcaggagggccggaaggatagcctcagcgtcaacgagttcaaagagctggttacccagcagttgccccatctgctcaaggatgtgggctctcttgatgagaagatgaagagcttggatgtgaatcaggactcggagctcaagttcaatgagtactggagattgattggggagctggccaaggaaatcaggaagaagaaagacctgaagatcaggaagaagtaaagccgcctggctgagatggggtgggcagggcagagctgatcagggccgagcagaaccgcactcttcccaaataaagcttcctccttgaaacacaaaaaaaaaaaaaaaaaaaaaaaaaaaaaaaaaaaaaaaaaaaaaaaaaaaaaaaaa

SEQ ID NO: 116529 - DNA, 1000 bp, Homo Sapiens
agaaggatcctagagccaaccccagtgcctttctatgagactttggatccttctgacttttcttctgctctctctaagctttctcttcctcccttagggaatatctagggtctgtaaccgttttggtttgagaaaaaggaaaggccccttgtcacatcctctaaaattgatggaatagcaagactttatgccttgacatattttagtgggagccagactataaggaataaaaggaaaaactttcttcctctctctccaagaggatatgggaagcttctgtgagtgcataggatgggggctggagtcattcttagctgtttcccttcctctgtccatatactggatcacctcaacataccctggtgtggctctaagggtaaatcagggatagggccaaggagaaaacaaccaagaactctttcctgtaataagcaggatccagtttgagaaagtttagcgaatataaaagtaaaagccatttaaaaatctatattctttttttttttttgacacagagtcttgctctgttgcccaggctggagtgcaatggcatgatctcggctcaccgcaacctctgcctcccgggttcaagcgatcctcctgcctcagtctcccaagtagctgggattacaggtgtgcaccaccacgcctgactaattttgtatttttagtagagacagggtttcaccatgttagtcaggctggtctcgaactcctgacctcaggtgatccacccgcgttggcctcccaacgtgctgggattataggcgtgagccaccacgccccgcctaaaatccatattcaaagaagcaatttcagttcctttctaagctttgtcagtcaaggggctccactgacttcctaggccctgtaatttaaccagtctttaaggttttgcaggaaagtcccttcttccaagtggtttttccaaatcgcacaatggcaaagccaaacagaggaagaaacattaaaaaaaaaaaaaagaccattaaaaaaaaaa

SEQ ID NO: 116530 - DNA, 1000 bp, Homo Sapiens
ggtcactgcccgcctgcgaccacctgcacaagaacgagagcgtactcaaggccaaggcggtggtcgccttccaccgcggcaacttccgtgagctctacaagatcctggagagccaccagttctcgcctcacaaccaccccaaactgcagcaactgtggctgaaggcgcattacgtggaggccgagaagctgcgcggccgacccctgggcgccgtgggcaaatatcgggtgcgccgaaaatttccactgccgcgcaccatctgggacggcgaggagaccagctactgcttcaaggagaagtcgaggggtgtcctgcgggagtggtacgcgcacaatccctacccatcgccgcgtgagaagcgggagctggccgaggccaccggcctcaccaccacccaggtcagcaactggtttaagaaccggaggcaaagagaccgggccgcggaggccaaggaaagggagaacaccgaaaacaataactcctcctccaacaagcagaaccaactctctcctctggaagggggcaagccgctcatgtccagctcagaagaggaattctcacctccccaaagtccagaccagaactcggtccttctgctgcagggcaatatgggccacgccaggagctcaaactattctctcccgggcttaacagcctcgcagcccagtcacggcctgcagacccaccagcatcagctccaagactctctgctcggccccctcacctccagtctggtggacttggggtcctaagtggggagggactggggcctcgaagggattcctggagcagcaaccactgcagcgactagggacacttgtaaatagaaatcaggaacatttttgcagcttgtttctggagttgtttgcgcataaaggaatggtggactttcacaaatatctttttaaaaatcaaaaccaacagcgatctcaagcttaatctcctcttctctccaactctttccacttttgcattttccttcccaatgcagagatcaggg

SEQ ID NO: 116531 - DNA, 1000 bp, Homo Sapiens
acgtgaggaggcaggccctcctgcagctgtgtctgctcctctgccaccgtttcccgctgatccggaagaccacggccagccaggtgtacgagacattgctcacctacagtgacgtcgtgggcgcggatgtgctggacgaggtggtgactgtgctcagtgacactgcgtgggacgcggagcttgcagtggtgagagagcagcgcaaccgtctgtgtgaccttctgggcgtacccaggccccagctggtgccccagcctggtgcctgctgaagccagtcctggagcccatacctcacccctgcctggtgaggatgtcttgttcctgagggaggccggtgtggaaagcctcgcacagtggtgcctccagctgttgaagggtagcgctggcccttggaggctggcactagctgacagcttttcctctctgcacctgcgctctggtgacttggggtggacgcctctgccttcacttgaacacaaatgtgcttcctataaaatcatgtaccaagaagttcctgccttttgtctctgagcctgatgtgtgtaggggtgatggaaaggctcactgcccaggggtcagccagaggggaggtgggctgcactcctcctgcctggagaccaggcccccttcttgcctggtgctgtccctgctgtgggagacgtctggccacaggcagtgccccacccagtcttggagagagatgaatgttaaatcagaggttcaaatgctagagaactgagaagccctggtggcaggcatggtctggagtgctgggcagatgctgtttctgggcccgtctgcctggtgggggtgctgtcctcccccctgtgcacacgtgagcatcgtgcatgtggcccctctgcagtgcaggagtcactgattgatgggtgtgccgaccagcagcttcacaaatgtctgctgcaaggggaatcgtcagagtccaatgtgtgcctctacagtaatgtcggaaataaataccattcttgaaataaaaaaaaaa

SEQ ID NO: 116532 - DNA, 1000 bp, Homo Sapiens
ccaggccgggagtcgcccaagtgaggggctgcccagctgctcccctgccacgcaggccacccgggctgcctgcccctgctgcttgggacgtgtacagcacagaatgagtatttatttaaataaaggagaaaagtgggctgcagcagccggaatagagcctcgtctggcaagtcggggcctgggacacttccctgggcctcaacaaggatcaggctgctggaaacacagtcacttgggagctgctgggctaggtccagatccgctccagcgtcaaggtggcatccgaaggtgtctctggtcttccagcgaggtgggagaggcctcatccagggcccagcggtccctgcagaagccagaaggtgcaggggccaggggtgggagcatcggagggagtcccagagccctggaccttgggcctagaccgcgtgataaaactgggttgagggatgctggaaccagttacgactgaagtcagtgtagacctgagctgggagggaacctgttagtctccccacctcttccctgaagagacaggcacccctcccagccgtggtcaacggagggagtggcacttctgccttgagtccccaggggaaaaaaaaaaaagatatttatgaaataaatggtaatttgtgtaaataagctttaaggttcccagaatatgcaaattggtattaatttattcaaaggtgtacattgctgtgtacatatatttagagattaactcatacatttaaagtttttttcattttacgtgagcatctatattgtacagggctgggggggcccttggctgcgggagaaggcccagagccctggaggagccaccaccccgccggcccctcgacccctcggcccctcggcccctccgcccgggtttggctcgcccggcccgcgggctccacctcaggttttcacttttcgctccggagcgagaacgaaacgacaaaaacgcaagaaaacaataaaacgctagaaagcgaaaaaaaaaaaaaaaaaa

SEQ ID NO: 116533 - DNA, 1000 bp, Homo Sapiens
gaaaagggcatctcagatttagctcagcactaccttatgcgggccaatatcacagccatccgcagagtccggaagacagacaataatcgcattgctagagcctgtggggcccggatagtcagccgaccagaggaactgagagaagatgatgttggaacaggagcaggcctgttggaaatcaagaaaattggagatgaatactttactttcatcactgactgcaaagaccccaaggcctgcaccattctcctccggggggctagcaaagagattctctcggaagtagaacgcaacctccaggatgccatgcaagtgtgtcgcaatgttctcctggaccctcagctggtgccagggggtggggcctccgagatggctgtggcccatgccttgacagaaaaatccaaggccatgactggtgtggaacaatggccatacagggctgttgcccaggccctagaggtcattcctcgtaccctgatccagaactgtggggccagcaccatccgtctacttacctcccttcgggccaagcacacccaggagaactgtgagacctggggtgtaaatggtgagacgggtactttggtggacatgaaggaactgggcatatgggagccattggctgtgaagctgcagacttataagacagcagtggagacggcagttctgctactgcgaattgatgacatcgtttcaggccacaaaaagaaaggcgatgaccagagccggcaaggcggggctcctgatgctggccaggagtgagtgctaggcaaggctacttcaatgcacagaaccagcagagtctccccttttcctgagccagagtgccaggaacactgtggacgtctttgttcagaagggatcaggttggggggcagcccccagtccctttctgtcccagctcagttttccaaaagacactgacatgtaattcttctctattgtaaggtttccatttagtttgcttccgatgattaaatctaagtcatttgagaaagtt

SEQ ID NO: 116534 - DNA, 1000 bp, Homo Sapiens
ggcgaaacctcgtctctactagaaatacaaaaattagctggatatggtggtatgtgcctgtaatcccagctacttgggaggctgaggcaggagactcgcttgaacctgggaggcagaggttgcagtgagccgagattgcgccactgcactccagcctgggtaacagagcaagactccatctcaaaaaaagaaagaaagaaaaaagaaagtacaagtttataaagtattatagtgaaaaattcgcattctggctgattttaagccatttaaaatttatataaaacaaccttccataaaaatttgacaggtgcccagatgttgctttctccatttattttttgtttttttttaatcacagtaggtctgatagagaattggagctaaattataatatttttgttggtaaagttgagttatatacttgtacatacaatggaaatgcttttagtagtgattatttagcaatttttgtttttgttatattaggcatgtttggaggctttcctattctagcatttaaatttaaattttattaaaattaaataatttaaatctagcatttaaatttaaataatttaagtctagcatttacttttaaataattataatgaagttttgaaatactaagttaatccagacctttagttgtcccatggtgttaataaagttgccaaagaagatgtattatgaacaattcagcaataagacaattgtcaacacagttgagaataacaatggtaatcgttagtaatatttagaattggaatttgcctactgaaatagttatagatgattacttgtgatgtgaaactgaattgagcatgacaaccagacatttccagttggttttgtaagttttgagaatctagatactgggttttattttttgaaagattagctctgtttgtaagggctgattccttgaaaatgtaattttccagaaaaacacctaaagaaaataaaacatggacatgcctagtaaaaaaaaaaaaaaaaaaaa

SEQ ID NO: 116535 - DNA, 1000 bp, Homo Sapiens
agttcagcaccatcctggagggccgcctgggcagcaagtggcctgtcttcgagctcaaggccatcagctgcctcaactgcatggcccagctctcacccaccaggcggcacgtgaagatcgagcacgactggcgcagcaccgtgcatggcgccgtgaagttcgccttcgacttctttttcttcccattcctgtcggcggcctgaggatggtccgccacgaggagcttccagtgcatgttgccatgaggcctttccccagtgtggccccagcccgacaggcatgcaccagtgccgcctgtgcccacgtgtgcagactgtggctgcagagaccttgcgaccatgtgtagattgcgtggaccccgacaaagggaaggctgctgtgtagctctgtccactctgaataccaagtgtgttgggaattgcatgccatctccaccctgagcctgacctttctgagtgacatgggtgtgccaggctagactaggaggttccggtgtctggaaaagcactttacagatgagattccctctcctcccccaccttcaagcaccctgttccctctttctttcttttgtgttggatttgtttaaaaaccaaataagcatctgtgtaacctccacagtagcatttcttatttgtttggtcactgctacaccttagcagctcttcccctttcctgggggatgtgcacggcagcttgagcctgtcacgtggtcaaggcccggccccatcagaggctgggggaggcggcacattggcagtgtgtcacactgagctgggcaccacaggctgcctcatgaccctcctgtccagcaggtagtgggtgaatgtgtgaaggtcttgcctgaatccatcaggacttgggaaacagagaaccctgtgggggcggctgtgggggaggtccctgccagtgtttagaagagcctgactgtgttcagtgccttggagcagaaagccagggtcctgagtggctgaaataaaagcctctggtggaacctgca

SEQ ID NO: 116536 - DNA, 1000 bp, Homo Sapiens
ttgcctttgactcattggactagtgcagaggctttaagtagtttaaaatgggcttttgcttttctaggtcattaacgttttttatttagtttctttagccaatagtggctgagtttcgcacttgattttcaatattttatagtaagaaatgacaaactgctttgtttcatttcataaacaaactctgcatttagataactattaaaggttgttaagatgaagatttactgtttctttgttactcgttggtacagctgtttgttttacttgcacatttgtacatatacttaatgttttcaagtgccttaattgtttaaaatctctggcttcaaagtttcttggggaaaggtcggtttacctcacattttttgtttccattagtaatattctaggtacctcacaaaatgtattatggtgccatggctgttagtttttagtgagtgctgtaggattaattcgaaaataggcagaattccattcctcccaaggtggcaaaaattagctatactgatgtaattgtcatttacctgggtatgaattccctgacacacattcatgtcaacatatgtagcaaattttgtgaaaacataacaatttgaagcttctgtaattttgagcactgctctaacaacaagcataatataaaattagttagattttgcaagtctacaaatgagctcttgcaacagaactcacagcctttttacttttttcccctaactttagcaatgtagtatcttgagccattaatttttgggtttttttaaaatccagaaggtatatagaaaccttttcagatttttcatctgatttgttcttgcagatgttcttctatcaaataccttattttaccttacagatatttgttgcacaggcagatactgctgtatttagacatttctatttcagttcattaaaaactgcaaaaccaatctgtatcatgtaccaaactgacttaaaataaatctacatgtttattgaaaaaaaaaaaaaaaaaaaa

SEQ ID NO: 116537 - DNA, 1000 bp, Homo Sapiens
ccatagcgctctcttgccccttggcatgtaccccaaggcctgatggccactgggctcagcctgtcccccactcctgcctgcttcccggtgagctgccccccacacgtgcagcccgggctgcctccagggtctggctgagtgggatcaggtggccctccaactcagcacaggaaataagtagaaacatttcagcaggccacctcccctcatcttccccgccctgtccagcgccctggcaaaggctgacaactggctgtcttggggccgaacagcccctgccctgcctctgagggcccaccagcctgtgctgcatacccaccgcccagcttctccctgagggcccaccagcctgtgctgcatacccaccacccagcttctccctgagggcccaccagcctgtgctgtacaccccgttagtccctgatcccaaccttctccctcctgccagcacaccgatgcacacaccggaagtggcgagcccaagccctggggacaggtgtagggagaaaagcagccccaggcctcagactcgcttcccatcctggcatagagtgggggatggctggagggtgtctataggtacagcccgctctggctgctgccaggtgggcccctgccaggggtcctcacccctgtccaccctgtgcctggctgtccctgcacccagatacagcaacatggcctgtacccagcagagtggtggcaccaccatggttacagcggatgccccgagactctgcttggtaaacgtggcagagcagaatgggaggctggaccctgaggaagggcccctctcctggcatctgtctcttgctacctaagcctgtgcctctccctaaagagctgcctccctgctgccgagccctggtctggccacgagccactactgcctcccacaggcaccactgcctcccgctgctgccccccccccacaaaaaaaaaaaaaaaaaaaactattaaacccatataaccccccccccacaaaaaaaaaaaaaaaaaa

SEQ ID NO: 116538 - DNA, 1000 bp, Homo Sapiens
tgtttgcaaggggaaggaccatttcgtaatggtctgacacaaaagcaagtttgatttttgcagcactagcaatggactttgttgtttttctttttgatcagaacattccttctttactggtcacagccacgtgctcattccattcttctttttgtagactttgggcccacgtgttttatgggcattgatacatatataaatatatagatataaatatatatgaatatatttttttaagtttcctacacctggaggttgcatggactgtacgaccggcatgactttatattgtatacagattttgcacgccaaactcggcagctttggggaagaagaaaaatgcctttctgttcccctctcatgacatttgcagatacaaaagatggaaatttttctgtaaaacaaaaccttgaaggagaggagggcggggaagtttgcgtcttattgaacttattcttaagaaattgtactttttattgtaagaaaaataaaaaggactacttaaacatttgtcatattaagaaaaaaagtttatctagcacttgtgacataccaataatagagtttattgtatttatgtggaaacagtgttttagggaaactactcagaattcacagtgaactgcctgtctctctcgagttgatttggaggaattttgttttgttttgttttgtttgtttccttttatctccttccacgggccaggcgagcgccgcccgccctcactggccttgtgacggtttattctgattgagaactgggcggactcgaaagagtccccttttccgcacagctgtgttgactttttaattacttttaggtgatgtatggctaagatttcactttaagcagtcgtgaactgtgcgagcactgtggtttacaattatactttgcatcgaaaggaaaccatttcttcattgtaacgaagctgagcgtgttcttagctcggcctcactttgtctctggcattgattaaaagtctgctattgaaagaaaaag

SEQ ID NO: 116539 - DNA, 1000 bp, Homo Sapiens
gaaattgatatgctaatgcctcccccaccccccgccagacttttctttttatactttgtcttgtttttactggggtaggctgggcatgcgtgcgtgcctttagggcagcattttaaacctttgccaaaattgcaaatgggacatgtacattcttctgctccatcctacttaaacacctatcagctatttttatctttaaccttttctgtatgtttgaagtgtgtggggggtgtgtgtgtgtgtgaaagagcgagagaatgatgtcatctaaagttttttgaagaattatttggttttcattgcattaaaattctatcactcccagctttgttttcatttaaaaaaatatacaaagagctttgtaaatacaacacattttatttctcccccttcttttaatgtacagcttttttgccacttatatatacttaaaatattcccatgaattatgtccagttcttcttggaaaaaaatttggttttgaatgaacctgcaaagcatcctgcagcgtgagcagctcctccacctggagctccgaagcatcttctcaggccaaagcggcattacccgtgaatctgtcttctccgccacagcatggtttgaggcgcagtctgttaatatagctgggccatgtcagtgactgttgtgtttgtggggtcaggtggggggcatggtatttgcaaaaaaaacaaattatggctaatttattattttgttgcagtggggttaactgtaaactcatgtaagagtctgtgatttcctcattggttgatctctctctctgtaatcctcattgcaaattttcaccaggacagcgttttttgattagaggggagctctggcacagtatgctttaatttagcaggaacttccagatgatttaaattctcgatgctgtgatgacacacatatgatctttcgtgtttctgagcgactctactttcattgtttgccagcgtggctcgttgctgttgcccaataaagcttgtgtacgttctgc

SEQ ID NO: 116540 - DNA, 1000 bp, Homo Sapiens
gatggctaatgggtctgggcagcatcccttcatgaatttttttttaatccaatatccgttgatttgattgtgattagagaaccttggacattttgctgctaaagaatcttttttcccctctcccccttcctgaccctacttgcactgctgtggatttttttaagagaagcaaaaacaaaagtaaactcctttccctggccctccaaacatatattctgtgagataactgtgcctgctaccaagtgttaatcctgggatcgtatttttatatcatattcacatatttgtttttttaattggtgttagatgacatgattaataaaaaaggcaagatattttcagaatttgaatttcagttttttttttcttttgaaatgtccctttaagatttttttattctaaacaaaataaagaaaatcctgctgctctggtccttgtgataagcctctcttcggcatctgaggagcagctgcagcaaaatctaggggtgtaagtgtatcaggacttatgtgacttatattttggggagatgagggttgggttttttttttaatgctacgtgacagtttgaaaccttcacagttatcctctgggggtaaatcaattcttcaacccttgggtgtgtgagtttgaggcagggtcatttgtgtgatgtgtttggccttaccaaagcaaaagagggtgcaagaatgtgggagtatgtctgccggtttcaacacacacagacaaacacagccacacgcgcacacaagtataagactttttgtattactgctccctacttaacatacttgaattctcaaatttcctttggggtaaaaaaaaaaaaaggatttgaaaccataaagtgttctgaagaaattaagtctataaaaagcatactttcttttttcttttccttttttccctccacagacaatgtcctctgttcaattcctaacgcaaactacaataaatggtgacacacgttcagaagaaaaaaaaaaaaaaaaaaaaaaaa

SEQ ID NO: 116541 - DNA, 1000 bp, Homo Sapiens
agctgctggatgcggtaagccaagctgctcagaagtacgaggcactgtatatggggacactgccagtcaccaaggccatgggcatggatgtgctgaacgaggccattggtaccctcaccgccaggggggaccggaatgcctgggtccccaccatgctcagtgtgtctgactctctcatgactgcacatcccattcaggcagaggccagtacagaggaggagccattgtggcagtgccctgtgcgccttgtgacatttattggtgttggccgcgacccacacacctttggcctcatcgctgacctgggccgtcagagcttccagtgcgcagccttctggtgccagccccatgcagggggactctctgaagctgtgcaggctgcctgtatggttcagtaccagaagtgtcttgtggcctctgcagctcgaggcaaggcctggggtgcccaggcccgtgcccgcctgcggctcaagcggaccagctccatggattccccaggaggtcccctgcccctccccctgctcaaaggaggggttggcggtgcaggggcaacccctcgaaagcggggtgtcttctcttttcttgatgccttccggctgaaaccctctctgctccatatgccctaaacttatctgggaaggctggggaagtaggctctgggtccatgcctaactctgtaccgttttattcctcaaggcctatagcctgtcactccttgaagccttctctgcctgtccctccgatccttgtccaccgtctatttattgcccaatttattgtttatacggatgactgggaggcactgcaccacaacgtaggaccctggctcccctttccttgggtccttgtgttccttgcccctgtccaaccctggacagttggctctacctcagtaacactttatagcaaaatcagtgcaaataaaaatccctcagtgacctcaaaaaaaaaaaaaaaaaaaaaaaaaaaaaaaaaaaaaaaaaaaaaaaaaaaaaaaaaa

SEQ ID NO: 116542 - DNA, 1000 bp, Homo Sapiens
gttgtatttatgcttaagagcaaaaaagttttgatgggattttaaattcagcaaagcctacaacgctgagacaatcccctaacaacatggtagtaactaaagaaacttttatactaggcttcttagttttaaaaggaagtggcatcattgtttcagttctagtttgtatttttctctcagatatttttcttctttaaaaatctttcccagaagttggttcctagaaaactcaataccatcatctcttatctctatacagggactaggtaataaaaccttcaaaggttgtcaaaggtcatcaagcagtgttcatttatcctgtcacatgtttctgtttctatagtaatttagaaattgcaaatagttaacttttcatcatgtaaaaagttaacattatcctatttccatagataccatggacggcggtgtggcctgagttgtcagtctttaatcctgagtcatgtggctctcttttcatctttgatgtcagttccaattatttggcatcaaaaaccttcatggtaggtagagttttaggtaaaagtggatctagggttactttctttattaacatttcctaaataactgaattgagagacatactctgctactatgtcctcaggttaatttttgtctgatcttacgatgccctgccttttactagctactttagaaatagaaaatgtgaagagtgactatttacatgtatactcctttggctgctagaactcatctgtagtcctttattatttacactgaattccaatttcatttctcttccgctaagtaagagcacctcattcctgtgttttctctactattgagctgtagacgaactgtttctctaattataaagcaaactgtttgggatattcagggaaactaccccaatgttatgttgtcatttaatgggaaaggctgggatcatatgtatttctatgttctgtaaagtatttgacttactagttctcaataaaattttattaggactataaaaaaa

SEQ ID NO: 116543 - DNA, 1000 bp, Homo Sapiens
gccagccatggtgccacaccatggcttcgaggactggtcccagatccgctacccccctccccccatggccatggagcacccgcccccactccccaactcgcgcctcttccatctgccggaatacacctggcgtctaccctgtggaggggttcgaaatccaaatcagagctcccaagtgatggaccctcccacagccaggcctacagaaccagagtctccaaaaaatgaccgtgaggggcctcagtgagaccagattgtgtcatttggctccaccttcatcttgcagagccagctgatctcaattgccaaaaactagaagccacttgcacggtgtggccagagcctcagctggatgagaggctgagatgggtggccagcttgtacaccagtccctgaactgagctgtttacaggactggggaggctccacccagaaggctttcatttgtactctgctgggagtgactgggaaaaactccttccctgctgctgagtggagagaggcctcatccggctttgacccccatccttgcagaagcctccaggagcagcaatcctaagagtgggaggcagccaagacccccttccttcaaaacctcccggaagtggtttcaggccctctagttgccatgaccaatttgtgtgtgtgtttaatttttgcttcaagctctgtagcaggacctgccccacgcacacccctacccctctgtgaggagctgtgggaagtgtgggtttgtctccagaacagaagagaatgatggatattctggctctggggccctctccaccaccactcacagtagccttgctgaagccatcacagatgggagaaggccatgccagccacgtccgccgaggggcgccagcctgaagctgccaggccctgaggttcagaccctggaccccatagctggaggcctgtggtgccagaagcccagattagggtggctgtccatccctggatagctatttgcacgaatcatggacataaatccaagttg

SEQ ID NO: 116544 - DNA, 1000 bp, Homo Sapiens
tccaaatctcatcttaaattgtaatctgcatgtgttgtgggaatgggacctaggtaggaggtgactgaatacatgggggcggacttcccccttgctgttcttgtgatagtgagttctcataagatctcagtgagttctcatgagatctggttttttgaaagtgtgtggcaagtcccccttcgctctctctctctctctccctcctgccaccatgtgaagaaggtgcctgcttccttttctccttccaccatggttgtaagtttcctgaggcctcccagtcatgcttcctgttaagcctgtggaactgtgagtccaattaaacctcttttattcataaaatatccagtttctggtagttctttatagcagtgtgagaatgggctaatacacggagcaagcatcgttctttcatttttatttattttattttttgagatggagtttcaccttattcccaggctggagtgcaatgtcgtgatcttggctcactgcaacccccgcctccagggttcaagtgattctcctgcctcagcctcctgagtagctgggattacaggcatgtaccaccacacccagctaattttgtatttttagtagagatggggtttctccatgttgatcagactagtcttgaactcccgacctcaggtgatccacctgtcttggcctcccaaagtgctgggattacaggcatgagccaccatgcctagccagcaagcatcatttctattataccttggtgtttgcctctttctaagtttggactagcttccaacatcttatcccttgaattttcaatattgtggaatcactccagaagatcctttcatgtgaagttttttgctggcatttcaacctttgggacatcttcagcccttttattaccactcctctcccatttgtggcagtttgcgtttactacctccctctggctgcctatctgaagttcctgcatcagggtctacattgccacagtcaactatttgtacttctagaattc

SEQ ID NO: 116545 - DNA, 1000 bp, Homo Sapiens
agctgttaagtatgcccttagcgtaggctaccgccacattgattgtgctgctatctacggcaatgagcctgagattggggaggccctgaaggaggacgtgggaccaggcaaggcggtgcctcgggaggagctgtttgtgacatccaagctgtggaacaccaagcaccaccccgaggatgtggagcctgccctccggaagactctggctgacctccagctggagtatctggacctgtacctgatgcactggccttatgcctttgagcggggagacaaccccttccccaagaatgctgatgggactatatgctacgactccacccactacaaggagacttggaaggctctggaggcactggtggctaaggggctggtgcaggcgctgggcctgtccaacttcaacagtcggcagattgatgacatactcagtgtggcctccgtgcgtccagctgtcttgcaggtggaatgccacccatacttggctcaaaatgagctaattgcccactgccaagcacgtggcctggaggtaactgcttatagccctttgggctcctctgatcgtgcatggcgtgatcctgatgagcctgtcctgctggaggaaccagtagtcctggcattggctgaaaagtatggccgatctccagctcagatcttgctcaggtggcaggtccagcggaaagtgatctgcatccccaaaagtatcactccttctcgaatccttcagaacatcaaggtgtttgacttcacctttagcccagaagagatgaagcagctaaatgccctgaacaaaaattggagatatattgtgcctatgcttacggtggatgggaagagagtcccaagggatgcagggcatcctctgtacccctttaatgacccgtactgagaccacagcttcttggcctcccttccagctctgcagctaatgaggtcctgccacaacggaaagagggagttaataaagccattggagcatccaaaaaaaaaaaaaaaaaaaaaa

SEQ ID NO: 116546 - DNA, 1000 bp, Homo Sapiens
ggaaatcccaaatctagattccagcagagttggttctttctgaggtctgcaaggaagggctctgttccatgcctctctccttggcttgtagaaggcatcttgtccctatgactcttcacattgtctttatgtacatctctgtgcccaagttttccctttttattaagacaccagtcatactggctcagggcccaccgctaatgccttaatgaaatcattttaacattatattctctacaaagaccttatttccaaataagataatatttggaggtattgggaataaaatttgaggaaggcacgatttcactcataacaatcttaccctttcttgcaagagatgcttgtacattattttcctaataccttggtttcactagtagtaaacattattattttttttatatttgcaaaggaaacatatctaatccttcctatagaaagaacagtattgctgtaattccttttcttttcttcctcatttcctctgccccttaaaagattgaagaaagagaaacttgtcaactcatatccacgttatctagcaaaagtcataagaatctatcactaagtaatgtatccttcagaatgtgttggtttaccagtgacaccccatattcatcacaaaattaaagcaagaagtccatagtaatttatttgctaatagtggatttttaatgctcagagtttctgaggtcaaattttatcttttcacttacaagctctatgatcttaaataatttacttaatgtattttggtgtattttcctcaaattaatattggtgttcaagactatatctaattcctctgatcactttgagaaacaaacttttattaaatgtaaggcacttttctatgaattttaaatataaaaataaatattgttctgattattactgaaaagatgtcagccatttcaatgtcttgggaaacaattttttgtttttgttctgttttctttttgcttcaataaaacaatagctggctctaaaaaaaaaa
